United States Patent Application Publication US 2008/0114160 A1 - sequence listing, part 28

SEQ ID NO: 8002 - DNA, 49668 bp, Oryza sativa
ttaaacaagaagaaactaaaggtcggcaggagtacattctttaggcagaaagggatgaacaacatatggattagtagcaaattgtaggatgccaacaaggattggatatgcactggaaatagatctaaatctatggagaaggtgattgtccaccgaaagttttgtaattattgtagatgctcttatagtttaattattagggcttatacgagagccttgcgcgtagatcttccaagaataacgagagatctctcgttgagagatgaatattattcgtgccactgaaattcagtcatgatgatagagaattactctcccccgtggcagctggttacagaactggtggccatcctccagggcctgcttacctgagcatcttcgcgctggcttcgactctctggtgctcctggtctcttggtagctgtggaatgaacggaactctaggattttcgactctacgctctcttcagtctcagtggtctggagtccatccactcggagggccatctgtagtctttagctggcgttgccgcttttgtgggcttgttgggagtgtagagtggctcggccccttcccgctgcttggagtttgtgtttagccgccgtagttttctaagcttcagctttttattttgctttttctcccttcccttggcataagccgtggctgattgcgttgtgtaactataactttttttcttctaatatattgacgtgtaatccttttacacgttcgcgaaaaaattatacaaatttactcttgttattttcacgtattaactggtggctgcactggttggaatattgtatagagatcagttcagatcgcccaagggggaaatgagaaaaaagctgtaatattctaaaaggaggtgctggcttcattaaatttatagttttaacacttttcgagttgttcattaaataacttgttattcttcgaattgaagtacaagttctgattgtgttaactatgcatgatcgatccatccacctagaaaagaaatgcaagctctctttcatttattctcgaatttatttttgtttatgccagcataaagagcactttgtggatacgcatataagtagtatcacctaactaaaacattctaacggagtaacgatcgatggtccaatattgaaagactgcaagccatatctcaatgatctgtacgtactatagtataaatgataaacagcatatcaccacttgaaagatgtggaaccacgcaagagagatgattaatttataaaattgtaaagatctatctgtcgctaaaatcgggctgtatgcatccaagttggatgtagctgccgagtttttaatctattttctaaaataaaatatgtcgctaaaatggtgcaacatgaggtgcaagaaagtaaaaggtggcaaatccattaaaaaatcatcatacgtagggatatgttgttatacaaacataaccaagtttttcagatatgtggaaagaaacaaagcaactaaaaatagattatgagttaaaatttggtatgtaggtatttgacaaagcagttaaggttagtgaccatttataagaaaaaaaaaaggcccaaaacgaaaataatttttaacgcacaggatgttgttcaagtgcatctatgctttacactttcttgagcacttcgcttgtaagattcttgtccgggctggttgttgccgattaattaattcccatatggccatatgtgacatgtgggtgtaattaactttcatgcgtttagcttaaagagcactacagtagtatgtggtaaagagattatagtacctttgaaaattattatcatgacacaaaagctattctgtatattcattcagtgcgaggtgcattggagtagctatataatgttctcataaagaagaaaaggttcttttttacttagtactgtctccatccgagaatacaaaaagattcattctatgtaactgggcaaattaaatcacttagatctcattcggtacaaaggatttttaaaagattattgcaggaattgaaattataggattttttttctctatgcatcattcatttcacagaaatagatcataccaatttactaagaattgtaattttataaccatattccttataatctttagcacgaggtaagacctcttgaaaaaatttctatggattagagtgcatgtaacattccaattatttactttttatattcctgtgatttgaaaatacttctaatcgaataagctcatgtattctcaaacggaggtagtactagttatcagtacacttattacagagttgttagtggatttaggcctgtttggacagcccactatctctggcccatccctgtggatggaacggatggcactggattttactaccaaacatggtagctcttggagattacaggagcaaacaacaactagccacactgaaacagagatgccgcagaggaaaaggataccaccactacatgatgcatcatttgctgtgttccacaaagaccaagcacacatgatggcaaggtagttgcttgcctattaggtgctactcctactgatacttcagtacctctggacaaccagcaagcaggctttggaacacactccctatctctacaaagttaaacctttttaacttaaaatgttaatagcaaaaaaatactcctaaagattgacagcgtaaggataaagttactagatttatcatgaaataaaactataatactccctcattccctaaatgtttgacgccattgattcttttaaatatgtttgaccattcgtcttattcaaaaatttttgtgaaatgtgtaaaactatatgtatacataaaagtatatttaacaataaatcaaatgataggaaaagaattaataattacttaaattttttaaataagatgaacggtcaaatattatttaaaaaagtcaacagcgttaaatattttgggatggaaggagtagtatgtaactatttttatttatacatatattattatttaaagtaatatattagagtctatgtaaatgttatagtccctattctacgacggggtttgggccgatcaatccacgcctttaagggagaaggtttgtaattaacgaatgaataattaaatattgactattactcaaacttaagaaatggatttgttcgaaattttgaaagacttcaatatttttttctcaaaattataccgtttagcaattaaaaaaactcatgtagccaaaatttaaaaagaatgaggcctttgctgtgcctatatttgtggacgagggagtagaaggaaatacatgagtacagtgcatggcaaaattgatagacatggtgatatatgccgtgtttatagttggtttggaaaaaaaattgacgtatacggacaaacatttaaagtattaaacgtagactaataacaaaacaaattacagattccacctgtaaactgtgaaacgaatctattaagcttaattaatctgtcattagcaaatgtttactgtagcaccacattgtcaaatcatggcgtaattaggctcaaaagattcgtctcgcaatttgcatgcaaactgtgcaattggttttttttcgtccatatttaatgctccatatatatgtccaaatatttaatgtgatggaagattttaaagtctgaagtgaactaaacacagagacatagatggacaagcaataagcagactaggtgggtcagtgggtgaaagaaacacaggagactggacgtctccaccatccatgatccatgtctgaatttcctcctaaatcggcggctttcattgttccctctgcagatcgagagggggtggtatagtcgcatgcagattgcagatgctgccattcaagccttctccttccttccctgtgcgctgtggtcctcccggtttctatttttctgggcattttactactgcgacttaagcagaaggtaataggtgagtaagtgactgagataacggaaaaataagcttagaaagaagagaagcgatgaagaagcccctaaatcaattcgcatctaaaattctgaattgggtagagtagtatagtatctttgatttcaaatttacaagttgcaatttcgtttcttaaagccagctaattaaacaacctgtctttacaatatgttgcataaatataccaaaatgtttaggggacgacatcctatccacgcatccgagcgcggtatcatctgtacgatgaacccgagggcacattgtcattgactgcactatcctccacaacgtcacagcgtcacctgtttttctactgccctgctgtagaggcaaaggcggctccatggacgttggccgcttcttaatttgcgctcgtcgaggtgcacgatagtgtcgacgcgttcgtgttcgatgacttgttagagctagtatagcccacttcgagctttaatttatctatagccagtctaatagctaatttatataatattccctccatttcaaaatgtttgacactattgactttttagcacatgtttgaccgttcgtcttattcaaaaaatttaagtaattatttattattttcatatcatttgattcattattaaatatactttcatctacacatatagttttacatatttcataaaattttttgaataagacaaatggtcaaacatgtacttaaaaagtcaacggtgtcaaatattttgaaacagagggagtagttgcttactatactattaatatatggtctcatctgtcatacatgtactgcgtcttggagtccgtgctgcagctggctacagatctgtagcctgctgctcttctctctcatcttttatttctttaaaatatgtttacagctgtcttatattctgctattgtacgtgctctaaggggttgtcattaaatttatccttcctttcttgtacaatcttgaggcgaccgccatgaaaacctagtcgctaatggatactatttgcacatatgaaatatctgtgagatatatcgattctagtatttatatgtattagatttattagtattcatcagtagaaatcatagcattgtaaaacttggatccgtataatagcaacccctaaatataaacggcaacaatatgtattaagtctaaaaggttttgtatttggagtcagagagagttgttaccaagggcaagtagttaaccaacttttagtactccgtccgtgtgtgtggattacagcgctagctcctgtcgcataatttattacagcacatgcttactgtacttctcgtcgtgccacggtaattactgctccactaactactatacataccgttactactactcacttcttcctaaaaaaacaaaccctggtttccatgcccagagtttgaccatccgtcttatttaaaataattaaaaaaaaattaaaaatacaagtcacgcataaaatattaatcatgttttatcatctaacaataatgaaaatacgaattataaaaaacctcatataagacggacagtcaaagttggacacgaaaacctagggtttattttttttttggacgggggagtatgcaaaagagagtttttgacaaatagtgtgacgtgtcgaaatgctcatttgcacgatcgatatatctgccgttctattcttcttccgctgctgttggagagacgcaggcaggctcagctccagatatattctcttaccttgtttacgcatgcctagtagtagtaatacttacaaactggctagtaaaacctgttctgaatatgctgatgcttacttccttcgtctaaaaaacaaatttaatataatcggtattaaaacagatacttcatatgttcataaaaaaagtcaaatcccgactctaaatcgggatatacatatgtttagattgatatataagattgtttattttttattttggaacggggtggagaagaaaggagagcaaaacggttactagtaattgtggagtttatgtgttttaagtagaaaaagaaacggtttgtttcattgtatgggccatgaatcagattggttacttggctcgatctgcagatgtcactaatgcaagatcaaagcttgatgagtaaacagcagtcttttcaagttaagtatagtggtagtaggctagtagcaaaagacgacgaccgtgtgagtgttaagaaaatgtgcgtaggtgacctccaaatcaacacatgcatgttagcacgtaggtggcgtttgtcttttatcaactacagctcgtgataattatactgctactgatagtctgataactgtgtaacaaagcatccgtgactgactgatgataaatttgataatacgcgtcgttagtttcgcaacacatctggcgccacacaattttcaattgctcaccatgattccttaatccccttcacctcgtcgatgcttacatgtgttaacaaatggtgattcgatttagttaaggatgcacatcaatcgtactgtacagattggggttgctcagtttgttaggtttggttaatttttctttttaacctgtcgccatggatggatgaattcatggatttcattgagagcagctggagaagaaagaagaagagtgacgtgatccattcattcgttcgttcaccttgactgaccactgcaacttcgtctcctctccccttaaattccccttcactctcctcactccatccagctcaccaccagcagcagcatcagcagcaatgcagcctcccatcctcctcccgcttctcctcctcctcctcctcctcgccgccgcctcgccacggccggttctctcccgccgccacgcctcgccgccgctcgccaccgagacgctcgacgtcgccgcgtcgctgtcccgggcgcgggccgcggtatccgcggaggccgtgccgctccaccagtccgccgccgccgccgtgtccacggaggtcgtcggggaggagcacgaggaggggcgcctggccctgcggctccactcccgggacttcttgccggaggagcaggggcggcagcggcacgccagctacaggtcactcgtgctggctcgcctccgccgcgactccgcccgcgccgccgcggtgtcggcccgcgcggcgatggcggcggacggggtgagtcggttcgacctggtgccggccaacgtcacggcgttcgaggcgtcggcggcggagatacagggccccgtggtgtccggggttgggctcggcagcggcgagtacttctcccgcgtcggcgtcggcagccccgcgcggcagctgtacatggtgctcgacaccggcagcgacgtcacctgggtgcaatgccagccgtgcgccgactgctaccagcagtccgacccggtgttcgacccttccctctccacctcctacgcctccgtcgcctgcgacaacccgcgctgccacgacctcgacgccgccgcctgccgcaactccaccggcgcctgcctctacgaggtcgcgtacggcgacggctcctacaccgtcggcgacttcgccaccgagacgctcacgctcggcgactccgccccggtctccagcgtcgccataggctgcggccacgacaacgaggggctgttcgtcggcgcggcggggctgcttgccctcggcggcgggccactctccttcccgtcccagatctccgccaccaccttctcctactgcctcgtcgaccgtgactccccctcctcgtcaaccctccagttcggcgacgccgccgacgcggaggtgacggcgccgctgatccgcagcccgcggacgagcacgttctactacgtgggcctctcgggcctctccgtcggtggccagatcctctccatcccaccctcggcgttcgccatggacagcacgggcgccggcggcgtcatcgtggactccggcacggcggtgacgcggctgcagtcgtcggcgtacgcggcgctgcgcgacgcgttcgtccggggcacccagtcgctgccgcgcacctccggcgtgtcgctgttcgacacgtgctacgacctgtcggaccggacgagcgtggaggtccccgcggtgtcgctgcggttcgccggcggcggcgagctccggctgccggcgaagaactacctgatcccggtggacggcgcggggacgtactgcctggcgttcgcgccgacgaacgcggcggtgtccatcatcgggaacgtgcagcagcaggggacccgcgtcagcttcgacacggccaagtccaccgtcggcttcaccaccaacaagtgctaagtcattagcagcgatggcttaacttaattagccagatcaaggagtgattagtggtggtaaatggtaattaagcgcgagagtgtgtgatgtgggggtggggcccagtgccaggctctgtgggctttgggagagacgaaaggcgaggacaaatgccagcctgtcctgctctctgcttgtcgatggatgggggggcccactctcttcttctccggtgctttgctgtttcgtctttgatgtctcggcaaagacgaattaaaatgaatccattccaatctgttcatgtgttctatggccgcttttgtttgatgaaaacgtaagcttccaaaatttccatatctccattgctcctggggatgaatgatttcgtaggtgttcggaccaaatttggaccggtagcgtaatacatttgcatttttttttgttctcgagcatttggtaggtaggtggcgataaccgatcacatgcgtgacgtagcttccaaattttgtcatgcacggcattgcatcattgttgatgagagagtatggacgatggatggatggctgcagcagaatggtttttaaccttgcgatgcaatgcttttatacggcgaatttgtgatgggatccatccgttttttgttgcttttgtccggaaaacaccaccattttgtgtggggactggaggtgatgatggcggtggatggggtgggtgagggattactgcagtgcagtgcttggttttatatttatggagggttggtgaccgttactgtagcattcttcaatgcacctgcagcatgtgacccagatgcttccccagcctgacccaaagcttcctcatatccattgccaaattttgctactgccttgagccatcaccggcttgattacctcccagctccagttctgttcaagatcttttggtagatggagcatctttcaaaatctcttaactcatttagattttctttcagatttgagaacggtaagagtatgaaaatatagaattcagaacataatttagaactcgaaagctaaaaacacagctattttagattttcactagttaattcctatcaactgtttcttagaattctaaactctattccatattccctccatcataaaataaaccaacatcgtgcgggatatgacacattcctagtcaagattcataatactaggatgtgtcatatccggtacgagattgatttattttaagatgaatgaaggagtggagtagaagtagcagtaccgtacagtacgaggcagtgttgtctgctgctacaactgcatgcagctagacaagcgacccggttcagatgggactaattttagtcctatcacatcggatgtttggacactaattataaatattaaatgtatattattaataaaacccaccttataaccctagactaattcgcgagacgaatttattgagtctaattaatccatgattagcctatgtgatgttacagtaaacatgtgttaattatagattaattaggcttaaaaaatttatcacgcgaattagttttatttatgtaattagtagtatatatttaattctctaaattcatccgatatgataggacggcgccacctcacacgggctaaatttagacagcagcagatgctcttgcgtgctttaatttgtcgtcatgcatctcgacttcccttaaaaaaggggctataaaatgcttatgtgtaggagaaaagtaggtccccggaacaatagagctgatcgatcggtgatgaggatcacaataacttgcagtgccattagttggtgatacgtcggtttcatcgaagaacatggcaaatgccaaatggagggatcggaggagcatacgtgctgctgcgccctgtgtattcatgcatgcatccatgcatcttgacgacctcatgtcacaaaagagagagagagagagagagagagagagagagacaacgatacaagattctcgaatctagtggttaattagtccacctctaatctgcatgttggtaaatttctgactcatttgctacttggattgtttggttttgctactgaatctagtgggttggaatactgatttttgcacatggaattaccaggacgaagttacacaggtcacagaatacaattactcacggtgttgacaaaaacacctctaattcctactctaatcttgtcgcgtactacttccactgtttcacaatataagttattctagcattttccatattcatattaatgttaatgaatctagacatatatcaatatgaatatgagaaatgctaaaataacttatattataaaacggaggaagtgcgtacagttacagcaaagtgcagaacaacgtttaacatctctgcgtgcacggttgaagaattattacgagtgtgttgcacacaattaagacacaatcagttgaggaggtgttcgttttcttcaatccgtcaaagaaattacaacgaacaacttcgaaatggagacatcaattttacgcagcgaagtacgccgtgccaaagcttttacggttaggcgtcacgattactcaacagggggatctctgatccgccataaagcctctcatgagccgatgagcccgacaactaataaagtcgatttgatgttcataaaacggtgcactgttcccgtaaaaaaaaaacaaccttagaagtcccctcccaggttaagcaaaggatgtgtttagttcacaccaaaaattaaaagtttgattgaaattgaaatgatatgatggaaaagttgaaagtttatttatgtagaaaaattttgatgtaatgaaaaagttaaaagtttgaataaaaaggttagaactaaatttggctttttttttttggactgtccggtgcatggtaatactgtcattcgagagtcctctctgataagcgatggattgtccaatgaactggatagtcacgctactccctcgtctaacttctaactttctatcacatcacatcacatctaaaacttttctacatacataaactcttaattttttttaaactaccaacttttcttaaatttttaacttttttcaggaactaaacacagcctaaaaaataacctagtactcgctccatcccataatataagagattttaccattttgcttgcaccatttgtcctattcaattttttttacaaatataaaaaacaaaaagttatacttaaaatactttggataataaagtaagtaaaaaaataaataataattctaatttttttaaaaaaataagacaaatggctaaacaatacaagtaaaatgtcaaaatcttttatattagagaaaggagggagtactacatatcctagtaaaaacaaatttagatatagagttatcaagatccgttataatagaatatgtcacctcataataataagaagttattttttttaaggactgagggtgtatatcgctagcagtagcaagaaaataaaaaagcagagacgagagaaggagacactagttgactgacgtggccggatgccacgtgtacagagatccggatcaacgtcggccccaccacgtggacggctgctcttcttcttcctttttaccccgcttccttcgtctgggctgtttcttcttcctttgcgctttctctctctccatggagtatgtctgcttgaccatttgctccagatgagatgagattattgtcatctggtctgccttttttccggccctcccggctacaattatcgcggtcgtctcagaagactcggcacgcactcccatgctcaaactccggcttgatccgcgccgcgcggggtggagagtttttttttcctttccttttaacgccttggacttggacctgatcagagagtgctgggcttatcagctcagaagtgagagggaagaagaaactgagttcggctttactccagcttcttagtgaaggcccaaataatgccatcacaagttgatagtttttgataaggaaaaagtatatttggactccctcaactaccgcctggagtatgattcatatcctccaaccataaaaccagatatatcggctcctccaactatcaaaaccagtacaaacaatgtccctcgatggttttcgaggtggttttggctgacgtgacgcctacgtggtgatcttaactcttaaccgagtctttgtcatacgtgacgcttacgtagcattagaataaaaacaaaaataaaaaaatgtgggatccacatgtcattcacataaaaaagtattgtgggaccactgacatgtgggacacacatgtcatcctccctctccttcccttcttcctccccgtctctctcccttatctctttctccggagcggtggcggtggggacaaggcggaggggagcagtggcggtggggagcggcggcgggcaggaggaggaggagaaggcggaacggatgtcggccaaatcaccgatgctgctccatcggaaggacaagaagaggcggccgatggtgttctgcttcaccgcgtgttaacgaccaaatttggtaatatcagcatcggaaaagaggattagatcgaagtggagtagaaggcaaagatcggttcgagaatagagcaagaatcggctgaagtccggatcggctatgaacaggatcggctgggtccgaatcagattgtgtgagccgatacggccgattctgacaatatgactcgatgtacaacatcgggttgagttgatatgcttcaagatgattgccgcacatggatagagtcctgagaaggcaattgtatctattaattaggatattttatgtaaattccttagagatacgtttgggcaaaagtctgccgcaaagacttgtggtatcttatagtttgttagagataagagacgtgtccgatatggacatagtttgtaattttcggatataaatagaccccgaaccccatgtaatcaattaacatacacgttcaacacaatctcggcgcatcgccgccctttttgctttagttttatttcgacgagttcttgatttcgggttgagctgcatcagtttcgatcttcaataagaggtaaaacttgttatgacggcttgcgttctcgggattagtgcttccatctttatgacactctaatcttatttatgtaattcgtcgagttatcatatatcttacataatctttggcaatatcgctatctaacctacaatcggctaacatctatcggtagagggcagccgattagattaaacaccgacgttgacttggattatatgagatatctactgttctataaaacttccagcggcttgattatcaagatattgttctttttttcatacttaatgctgcatcagttgagtttgatctattaagtcgtgcttagaatatcaatctctagcctgccttctggttgccgattagggtagcatcggaatttcagccgattttatctgatttaactatatttactctacatgctttgttgacacgttaaatctgccctttatgttaagatattattgcatctaagtatattcagcttttgtttggtatattctgtttgttttaacatcttaacatagagttgtatcggagtattagccgatacatgctagatctatctgatcggctatgctatgaacatatataatcctgttattaatatatatttcgatctaagtgatttatactgtctcggcatggcgaccgatctatcctaatcacttgatttaagtatatatcgatataagaattatatattgctaatatctacatccgatcgagtagatttagttctttattatctatttacaaccgccgatcgatttacatatgacatcggctcaaagataaatgatatgtcatcggcacctagccgatcgactatcgtttataggtttaaccgcggttttctttgtttctatttcttgttgattgcaggatcaaatcaactggcacgctaacacacccaaaggcgagctttggacctgcactggagttaagcagatctcccaggcctcgtgtttttcaccaacactgtgtgctgcatcctcttctggctgctcgtcatcgccatcagcgtggccgtgctcatcatctttctcatctaccacccgcagtcgcccaagatgcgggtgaccactgccaccctgaacaccgggtatgtcgatgagcttgacctcgtcggtggcgcccgggcactcaacgccgacctcaacgcgccgacctcaccgtcctcgctgccatctacaacccgaacaccaagctccacgtccccaccgccaccgctcccctctgcctcgtccccaccgctacagccgccgctcctttttgtgtgtgaatgacatatggccccgcgtatttttttatttttttttattctaatgccacgtaagtgccacgtaggataaagactcggtcaagactgccatgtcagccaaaaccaccgaagaacattgtttgcaccggttttgatagttggaagagtcgatatacccggttttgtggttggaggacatgaattatactcgggcgatagttgagggagtcaaagtatactttttccttttgataaggccgataaagagaggtcatgggccacggcccatttatgcaggctatctcgtgtgggccttattgtggtccggcttcgtttcattctgcgccaaggagcatcctcgggtatgtttgtctgcaagtagaccggcacgctgctgctactaactgtcatcaaagatggctgttttattctggtgatagttttttttttgttgtagataatagaatttcatttttctaagtcgagtgtcctgcagatcatggcacgggaaagccctttggcgtcttccgcgggcaccacggctttgcctagctcatgtgctctcgtgaccctactaaaataaatgaaactatatatggggatcccaaaccgttcgactagtattattttttttgggtatcacacaatatattactcctactctactagcaattgtttgttttgaaaaatatgaattgcgtctactcctctatccggaacatcgtcgacgtagatgtaacctatttcgatataacgggattgaaactcctatcgatgttgatagtaaatgggaatgggaagaatatatggacggttacgatgtcattgtcctggctgttcatgtctgcgtttacattctctttatgattgatctttgcagtaagggcagtcccaaccctccatctaggattgtgtttatggcattaactacattatcatataggacttttagtttacgtggcactatattaattaagagagagagagagagtgaagagaggaagcaactgggtctcatgtaagacacagcttcaacacaagaacctatgcagtagacactatcaagttttgcattggaagagaataatggctttataatagatgaagaataaatatgattggtagagaagagagatgatatatttattaatggcccactttaagaaaccatgggatgtagagtgtattttctattgtgatgtcttatcgacataggccctgtttagatcctccaaaatggcaaaagttttgccattttgtagcactttttgccattttggatctaaacactagtagcaaaagttggcaatttggcatttggcatttgctagtccatagtagcaaattgtgctaaaaagtgctttgggaccactccctctctctttctctctctcactttagtgctagaatggcaaaactttaacatgcatctaaacaccaactattacttttgcaatgccaaaacttttgccacaaaaacttttgccatttaccatttgctattctaaatggatctaaacaggccgatagtaccatagacactgcttatgtaccctacgggttagactatcctaaatgggggttacgggctccgcaccgcgtgatcaacagcttccgccaatttactgcccctccgggcctacttgtgtgatttattgggagcagcactttgcgttttgtgtgatttgttgggacggatcaagcaagtactacctctgtattttaaaatgtacgacattgttgacttttcgtttaacgtttgaccattcatcttatttaaaaaatttacgtaattattatttattttattgtgacttgattcatcatcaaaatgttatttaagcatgacataaatatttttatattttcaaaaaaaattttaaataaaataaatgatcaaacgttggacaaaaagtcaatagcgtcgtaaattaaaatacggagggagcaggtactcctcgttcagtttgcgagtagatagatcagtgacagcgtgcacaggtgcgtacgtgatgcgtggatgcctcgtcgccgtggccatgtccatgtgctcgcggtcgcggaggaaaatatgccacgtccgtttctgcgttgctgggctgcaggttggcaggcggcggcacgaacgaacgaacgtgcggcgcaccactcgcgcacaccaccccccgcacgtcgcagaagcagatgctgatatgcggatgcccaccggagcagggggggctttttgtggtggttgcgttgcagccgtgcagcccgtgcgatttgggtttggggcgtgcaatcatcatgatgcggcatttagaacggatcagtggatgagggtacggtgatgggagtgcggcggtggttgccgtggcactgccaatgcccaaaagctcgttcattcattttctctaaaccccgatcattatccgcttgtactatcattactgattcaagagcaacagtatggtcctgtttgcaggttctctccgaattagaaactctcccaactaatacagtgtttattccagattctaagaaactatagttgtagaatctaaaaaaataaactaagccataagctataagccataagctagaaaacccagctttttctagatttttataaactggctactaacaaactgtttctcaactgtttgtcagaatattaaactctcctaacagactctatctatatatgttaccatatgctctagcaccaggcagccactatcactgatatgctaatggttagtagtagtaggttttctctcgataatgatgccaatggagttggtagcggcatcagattagtaaattttaccgcggtcacgtgagatgccatgcacgatgaatcgaatccattcccagccagctgacgaggtgtctccgtgtgtgaatcggatggtagaaaaagctttgcaccaccctccaccaccgctagattcgctcacatcgccgccattactgttgccctctccttcccggcgcggccactccgtccgccgccgccgggggcgaacccgaacgcctctccaccgtccgatccgccagccggatcagatccaacacctaccaacctaccttggcaccttctccctctcgtctccttcctcctcacctcgcccactacacctccacctccggagctcacaacacaaatcgatttctcccaaaccccccctaaactccccaccgaatctccaatgcaggtcctgctgctgccgctgctcgtcgcggcggccgtcggcctcgcgcgcgccgccgccaccgacgaccccttcctctccggcggtaagctcactcggatcagtgggaatggtttgctgaaattgagcttgagatggtagtaatggtgatgggtttggttttggttttgtgttcctcctccagcgccggggaaccacagctacaacatcgactgcggcggcgcggcggacttcgtctcggtgttcggccgacggtggctcgccgaccagttcttctccgccggggggcaggcgggcatggtcgcggagccgcaccggttcccgcagccgcaggagcgcacgctccgcttcttcccgccatcgtcggcgggcaagtccagctgctactccctcccgctcccgcccggccgctactacctccgcctcttctccgtctacgacaactacgactccaagctccgcaccccgtccttcgacgtctccgccgccgccacgctcgtcctctccttccgctccccgtggcccgagccggcatcgcgctacggggcatactccgacctcatcttcccctccgccacctcgcccacctccgacatctgcttctactcgctctccaccgatgcccccgtcgtcgcctccatcgaggtcgcgcccgtgcacccgctcgcctacgacggtgccaccaccggcgcggacctcatcctcgtcaactacggccgtctcacctgcgggaacaacctcttcggcccgggcttcaccaacgactctgacgccttctcccgggtctggcagtccgacatcgatttccggaacaatgacctcaactacgacgccattacggccggggggaggaagattttcggcagcaaccagccgcccaactacttccccaccaagctctacacgtcggcgatcaccaccggcggcgatgcctccaacgagatcgagtacctcatgccggtcgacaccaggatgtcctacatggtctggttgcatttcgcggagatcgatgctggcatcggctcagctgggcagagggtgttcgacgttatgcttgccgggaagaacgtgacgaggattgacattttcaagcaagtgggagggttcaccgcgttcaagtggacatacattgtggagaatttgacgagctccaccatgagtgtgaagcttgtgccagtagtaggacggccgatcctgtgcgggcttgagaattatgcaatggtgccacttgagacgaggacagtgccaaatcaaggtgacatggtttgaagattgcgctctcagccgagaaaattggagaccagcaaaaatttcctcttgtacattctctaagcttgttttttattcatcttggcagtggctgcaatgaaggcattgaaggattccctgaaaattccagcaaggatggggtggaatggggatccatgtgcaccaaggacatgggatgcatgggagggagtcacttgcctccgcaaggacaaagggcttgtgatcacccaactgtaagtaccatttcgttgctccagtgcaattggtatccaccaactgtttttgtggggatgtttctacttagatgtgcagtactgatttgataagtttgccatgaagtagctttggcaagtacagccacctttttattttcttcagataattgatagcgttttcctagaaaacaacgatgatagttttttatgatgaccagaaaagaaatgatacatatgtacctcaatttcacagctgaatattactctactagttaccactacctccgtcccaaatacaagggattttgtccttgtattttgggatgttggcagtactacacaactaatctgaccgaaagcttaattgtcatattcaaatcgcagttaaaagtttcttcttaattctgctttggttgttttgagttaccattttttaaaatggtcaaactttagggcctgtaggtttgttgttgcacatttcttgatatcctttatcgcagtaatttatgactgtcagtattattgtgtgaaattggaagcaggggcggagctagcacaaaatgaaggggggttccacttgcttactttactctagtttgaaccaaatttagcttgatacgggtgcctaaatttgaactgacagagtatatatatggtgaaaatggacaaactatagctaaaattttttttcaaccgggttcctgggcacccccctagctctatgtagctccgcccctgattggaagggagtcagtggacttcctttctcgtaaaagctctattgagcaaacacatattatatatttgtgaaaattatctaaaaaaaatcttgtgacattgatatttttgctgctacaaacttataacctgtatgtatgtggtttctatgtcctttacagggatcttgcaagtcaaggactaaaaggttacatcactgatgaaataagtcatctgacagacttggtaagcttgtaagtatcattaaacctactgaaagtcgatttttcagtttgttcattatcttctttgatatttaaagtatctggatatcaacagttggttttgttatcggtatcttttgcactacgggaatatataaaaccttgaattatcaaagttaagtctcaaatagctctatagactggtttgcattgctcaggttaatagcaaataaagttggagtggccactttcctctagaagataaaaagagcaatgtatcaactagtgaagtacttcccggcttgcctatccacattttctgaacattgtggagccaaagacaaagaaattcccttttgcttttctccaacgtagatattttttcatcctgttaatgatacatttgcttcaccaggaacttgagctataattctttgactggaagcttacctccgggcttagggcaaccttcacttgctacattgtgagtatagctttctgttccataacatgcaatctcgtgattcaaattagaaaatatcttcttctttttttttaaaaaaaagaaaaataggcctgggtggccctgctttttatagaaagcaaaattagaaaatttcttgtgttcagatcacagttcaaatgcttgtcatatatacatgatgctgacagaagcaatgatggccactttaagaaataattttgtgaaatcaaccttctttatacatgtatcatttcaaagagaacttatgaaactaggatgatagagcatgagttttattttattatcatggattgatgactcctgagacagcgtctttcatttgaggaataaattttggaaaaggacatgatatgatatgccaaattggaaaattttaactcaagttcaacccaaacatttggaaacagaaagaaaaagtgaaatcgtgtacttttattcatgattttttttattttccaatgcgtggatcgaatttggtttgagatttttgcaaactggtacatgatgtaatcttacatttctaaacagtatctgaaatttttttcatgaccgaaagagtatgtctatggagaatgataacatgttaatatggtaacatcagatattccttcttccttatagacaatgtgttagcagatcctctacgaatttgagtgatggaatgatgcttttcagtttgcagctatcctaatgataccttatgatcttgtagttctggttctcttgtgagtaacctttatgtcttgtttttagggatctgtcatcaaaccagtttactggaggaattcctggcaccataggttcatcaaaattacaaacagcgtaagtacactgtttgacattagcaattgttgtatattctcaaagcaacacaaacatactgattaccatctcttgtacagtttactgaacaacaatcaactcgatgggcaagttccagaaagactttactcgattggcgtacatggtggtgtgatagagtaagatacctttagtattttcacataaacaagatcttcactttctcctgtaaagtttactagtagttagtagtatatccagttgtcagatatctcatacaaagagctattgttctcaggcttagaattgatcggcaggctcctctatttcatcccatgctccctgctgaagtccaccgcttaagattttaggttccactatgtgacttatgttatgttgagtattgtttagatcagtggtagagcctgctactgggctggtcaggcagccgccctggctcttttttttgtgttcttcactgtagatcactgataagcatggaaaaaagttgtcagagcaagaagcagctcttcgctggctgggttcattgttgctggctccgccactggtttaaatttaacaatgccatgtttacaatatgatacactgatgctgagcgatatatctctgaggttaaactgagtaaaagcagggtgttgttagaaacgtgagaagtatgtactaggccttgactaactaaattggagattttgcatctaatggtgcttaatttagcaaattttactttcttattccttgcaagcaaatgactggagttcaaacatgcacactgtgatcagataatagatcaatggtagatatattgtgaaccatgatacttgcattcattttatctctctatttacaaacacccactgttttaacagtttgtcaggtaataaaggcctttgcggggtgcctactttacctgcttgtgcattattttgggagaaaggagggctgaacagaactggtaaaattgcactaggggcctcgcttgggtttgttctacttgtcacactcatagtggtctacatattgtgcatcagaagaggaccgtacgattatgattttgagttcccccaagatttgacttgtgagtataccacatctcaccttcatactgtgggtcaacctcatatatgactttaagattctttagttttgagtgattattgttttccattgtaagttagtggtagccgttcttttcttaaactatacctaaggccattcatatcagttgtcatgtcatttgaaaaaattatcagtgttcctatgttcctattaacgcaagtaacaatgtttcagatatatcaacctagagtttagtatcccttttatgaacaagtaatcactgtttacaaaccaatttcctgtcttcacaaatgtctaccatgtttaaatttgctactttctcatcctacacagcgatatcagcaatctctgcaaaaaggaataggtatcagagggcgaagtctgtaatgcttgccgagatggaggcgcacggcccggacggttattataccaacgggggcgctcactgaattgatgggcaccggaaatggatatcttcacaggttgttgtatttctacttacagagcaaacactcattgacaattgctggcctgaagcaaggacagttgtgacttgtgactcgtgaacacaattcaccagcatcatcaacatgacgtccctgtaacttcagtcaagcatccatggcattattttgcagttacactcacagcttaattacaaatgtaaaatatgtgcatgttttatgtgtactataatacgatgaagtggtggtggggtggtagtagtagtttggtaatagtagtaggggtgccttattttttgcagaggctttgctgtctcgtattagctttagctttaggcgtgtgcactccatcagcaatgtaaatggaaccaggttgggtcaggacagattcaggcgttgaaatgcttggggggtaaaagctggtgtactcataggtgtattctttctgtataaaacctgacttcgttggcactgtctgacttcaggagattgaaaacattagctttggatcagagtgttgttagccacttttgattatctgttgcttacttgcgtgtcatccagagtcatagacgactcaaattctcacctgctagtatttcaattgtcttcagaatgtgctctttaaacttaatttttccttctaatcgaaccatttggtctggatttagatacttgcattatatcgaagttgtactgcatgaaaccttaagcaatgatgtaataatatcgagtcatctgtaatgtctgaaaccttatttagactatgcagtttgcagttcatattaaagcccacgtaaaataattctcagcccaacaaaatacaaagaataattctaagcccaacgagcccaactgcgcttcccaactatcaaatctgcaccatccattcctcatcggatgccttcacgccgccacgtagcggagagcaaagcaaaaccctagctagagccacacccagaggtatagattccccaccccgccgcctccacgcattccttcgcccaccaaaaccctagccgcgccgccgccgccgacgaccaggtaaggaaggagatccgccgccggcgccgccatgaagcgcaacccacgcgtgacgagctcccggaggaagtgccgcaaggcgcacttcacggcgccgtcgtccgtccgccgcgtgctcatgtcggcggcgctgtcgtcggagctccgccacaagtacaacgtgcggtccatcccgatccgcaaggacgacgaggtgcaggtggtgagggggagctacaaggggcgcgaggggaggtggtgcaggtgtaccgccgtcgctgggtcatccacgtcgagcggatcaccagggagaaggtgaacggctccaccgtcaacgtcggcatccacccctccaaggtcgtcgtcaccaagctcaagctcgacaaggaccgcaaggccatcctcgaccgcaaggcgcgcggccgcgccgccgacaaggccaagggcaagttcaccgccgacgacgtcgccgccgccgccgggggtgccgccgccaccggcgcctcgctccaggagatcgattaggctcgtgggtcggatctgctggtgctcctactgttccccccctccttatctagcttttgtttcgctatcaactgcttctgctaggagttcatgctacctgaacactgcttgctgctttatcgttgaaaatgtctccatgagagttttggatccttgatgttgatctatatctacgatgtggctctgtctgggattttgagttatgaagaaatcattataagtctaaatgctcccgttttgtttgtgttgcctagatatactgaatggcatttcatggactgtgttacctagatataccgaatgattctaggttgataagactctggttttctggatgatgtctagtcccttaatttgactctgagtcacgcatctcaggttgtaacacatcatatatgcttagttttactcaagttgagcatttcaggctgtaacaaatcatataggcttagttttactcaagttgagcatttcaggttgtaacaaatcagctaggctcatagtcctacttctaaattgagcatttcaggttataacacatcactgtagtttaattcgacatggtgttgcactatcatactgctttccttagggcaactggcatttcgtttggatcctacgtgaactaggaagtatctggttgagtggatgactgttgattataccttgctatgagtgtatgacttcctctatattatattcctatattgaatcgatttgaaatgatcttattgttggtatgatatgatgcatacggagcatggcgttagtaggctggactggctggtagcatcttgctttcacatgatgttttgttggcaaagttttttctgttgattcatcaaattttctactctactattgagctttgtttgaaactttgaatggttatatagtactagaatgtagttcaccttagctttctagtggtgacccttccaatacggctacgcatatgctctgtttgaattgctcagctaagacatcagggttaccgatgcatgagttgtctttcgatcaatgtggttttcctgtgctttcacggctgtgggagtgaatttcccttatggtccttctattgtcatgttgtagcaacattttcaacatttctgtgttgatgattgtgcgttccacctttatttaccgcgggattcaggcatttggacacactacatagctagagtaccagatagtctatttgttcttatttagcggctgacatgttaaattatgtgaaaggtttcttacacaagcgcatctgtgagggatggcgttttgattcctcaataagctggccctgtttatgaagtaggtgcattgtggatttgtgatacgggtcgcccctcagtctaatttagttgctgttgtgcattatgatggtttctagtatgcgggggttattaatggcaatgtatttccatggaattttagtcgatccctatgtttatgcgtaagcatgaatattgaaccgtatctgtcaatcgaatatttggtttgcatcagttttgaaaacggatgttggtgataaaaacggtcgaggggatggaaaacgagatcatatggctgtgctctttcctgggcatgtctccgaagtccatgaatagaccaaatgggtcagctcgacgccttatctgtggtgcgagcagatcaagtccactttgactccctcaaatataggtgatatcttgaaccactaacaagctgatgtggcgtgttgactattctaatcactattctaatcgactgaatcagaaaacagcgcccagatatcagcatcacttcctctttcttccccatctctattctctcgtctgttgacgtgcatactcgcctactctctcggtcccataaaaaacctagtatcggatgtgacacatctagacatacatatgtccagattcatagtactagaatatgttatatcttattctagattccttttttagggacggagggagtagtcgcttgctccatcgcccatatgttcaggagagcttctggcagctggatattcttttagaagccacagttgccagaagctttttcaaacagtctagatttttatctggattctgagaagttgtaattgtatagaagccaaattttcactcggattttctagattctcaccagctacttctcaaaatcttaagtttcctcaaatagaggtgacgacgttggctcaccacctttgtcggagacctctggagatcagttgcgaacaggatatacgtcgagcaacgccatgccacgcaacaccgccaccttcactagagacctatggagatcgagctcctcgaccttacacaccgttagcctcccctcctccttcctttccgcctcgctctagtgccaatagcgtgggtgcttgaggaggccagtgatagcttggcgaatcacaagcatgtgatgcagatcgcttctgcggttctgcccttggtctagaaattcttgataccccaaatgtccaaacgatttcatggataatcccaaaacagatacagagtgcatccagagcaagcacctcgatcccctatcgcttgcatcggttcttcaccgacgtcgtcgagtcttccttgtcgatgcagcttgacatcgggggagctgggaggttgtcaatgccgctcctgatgagcttccactttggaagggtcggtcttgatgtgttctcgtcgacgtcgacctttgtcgccgccaactccgacctatcccagaagcggtggtgggagcaagaattgcagcaacatcaaatggccgagtacatgtagaagccaaattctaggcatgatgtggatcgtgctagttgcatgagtgccatcgccccgttctttacccacaagtggctcgggcatccatgtcctctccatgggtgctgctgcagaaaagagacgggagaaagaaagagaaaagataggatgaggaagaagaagggacattgacatctcacctcacatgctaacttagtcgcttggactagttaacgagccacgtcagcggaaatgactctcaaaaccgctaaggaagtcaaactacatcggtttaaatagtttgggggttaagatatccggcatttcggttgagagatattaggatgaaatcggttggaaaaaccctctaccattttcatttgcatatttttttctcgaaaacggaatcgaaatagtagacctgaaaacaacaacaatatcattaatatcgttatatcggaaacaggaccatcgaaacagaatctaccaatattggttggaagtcacgacgaacaatataaacaaagttcaacaatacttcaacatcattgaggaaaccgaaattcaacaaagtccacttgccacaccttagggttaactgagttttcccctagccagttcccattactaataggttgcaagcctaccagatctcctttattcatgggcttccgatgggttgggctggctaagccgctgcggagttttttattttttttggaattttgacggaaattattggacaaatacgattaccgataaaatggtcggaaaaacctccatcccattttcggaagatattaccgtttccatttgtgacactgacaattaccgatatcgactgaaacggtcgatgcataccggaaacgataactagatatctcggaaatttccgtatatttttcacccctagattgatacaaatcgcacatgttcgagggaattaaagttgacttattccccgggcagttgctgttgcaattggagacgagggacccaagaagccaggccatgtccgtgtagcgcccatggtttgtgaagacatgacctcaccgatcgattgatactttgggccctcggcgtcgcgttaacagtgagagcatcatatatagcaagaccataattgccaagttgagccgcctacgtacgtctgtgagagttgcagttgtgttgtacaacaactacaagcctctcactgcttcacgtcatgcatcacgggctcattgtaacatcgcctgcctgcctgattttcgcctggctcggtacgtcggcactgcactcctgatcctgaatatgaatgaaacgtccttcaatttccaagctgaagtaaaaacgaccacacgatttttggtttggctgtcagctactgtgctcccctctcgccgccgtgtcattcagacatccacacacccatctcaactggaccccttgtgtcccactcgatcgatatgattcaggtagcctcagccagccagccaatcagccagccgccgtagcgcccaacactgcagatttccactgtgctaccacatgtacgcacgcatctcatcgatccgtccagtccattcattataccgaccgtcacctggactggtgttaagtagccacacagctgctcgagattccgagaagcagccccgacccgatgagagcccatcccggaaaatccttagcatatgtactccagtttcatgttttgaattctaacactatagattgttagtagaatcttgatggggatatatatagctaggctgttttgaagaggtagaggttactccctccgtcccaaaaaaaaacaaaccctggtttccgtgtacaatgtttgatcgtccgtcttatttgaaaaaaatatgaaaaaaattaaaaagacaagtcacacataaaatattaatcatgttttatcatctaacaacaatgaaaatacgaattataaaaaaatttcatataaaacggacagtcaaagttggacacggaaacccatggtttgccttttttcgggacggagggagtatataagaaactatagcttcagaagttcagcaagctaagcctcagctagctgctatagacatgtactccctctgtcccagaatataagcatttttagagttggacacggttattaagaaagtaggtagaagtgaatggtggagagttgtgattggtagggaagataatattggtggagaagttgttatattttaggacaaattttgagagctaaaagttattatattttgggatggagagaataatacatattgatcgatctatcacgtatttattgatccagccattgatatatatatataatcgatcgagcacgagcactagtctgttctctgttgacaagttgcaaggcaacaaccataataacaataacaatgataataatgttttaagaaaaagccatcactccaggattctaggtcgagggtcagtacatcatgtagcaagacatcagatgcgcaaatactagctagtagtaacatcaatctggatgcaaacacgcagcagcaccaacattatttgtccttgcagcaagtaggtcgagctatagctagtcccatgcaaatggatcattgatatcgttaatacactcacactgacaagtgagaaacactacgctgaaaaccctgcacattgccatgttgcccctgcctatactgctagtgcgcgcgccacctgtttttcgatccccagctactagcgctgatcgagacgacggccaatgatcatatgcaagtaaaaatttgcaagcaaaagcgcatgtagtgcaaaaccatgggcgggctagccgctacacggtgggctgcactgtgccctaactacttggaactctgtccattttcaaaagatcgttggcaacttggtactaggaatgctgctaggatcactgtgctcattgcgtccgattattgctttcgttgccatcaacagaggccaaacactgtcgactacagtctgaatgtcgacacccccctgatcatggattcaaagctagctagctacatgatgcacgcatactccttgtcagcattaatcctagtcgtctctgcttgtctgcatatctctccttgtcagcattaatcctagtcgtcccctgcttgtctgcatatttcaatatccatgcttgcaaatgcaatggttcatcagatcgagatactactactccagctagttaaatttccaatttctttgcactggtagtagtaaaaatgaattcggagctttcagctaacgtactgtctgattaataactcgatcgtgataaaacattttgatggcgtgaccagtgaattaaagcagccgatctggacttctggggactgtttttatatgagactaagctattggaagctgtcgtcaccgtgttcagagatgcacaacatcatgtttctgcaaataatagtgctcctcttccttacagtggcccaggcctgaatttgtccaaagctcaacctctgcagctagctaccgctgcattactgcgcaccataaagttgcacttgtacgaccatccaatcagcttctctcaagtttcctgtgctgtgctcatatggttttatatctagaaaccgttcctgaacatttctgtcacattgcttgtctgtttcgctgagaatcaataaagaagctcactggctgctcttgctcggcccagctccaacagggatctcgactcatggatgccaaaaatatccaagaacaacatcattgatgtctcttaggccctgttaacagatcccaccccaaaatttttcaccctgtcacatcgaacgtttaaacacctgcataaagtattaaatataggctaaaaaaataactaattgcacagattgcgactaatttgtgaaacgaatcttttaagcctaactgctacatgatttgtcaatgtgatgttacagtaaatatttgctaatgacggattaattaggcttaataaattcgtctcgcggtttactgacggattctgtaattagtttttttattactgtccgaacaccccatgcgacaccctatataatatccgatgtgacacaccaaaactttacacccctgatctaaacacccccttactccagattgagatggctgcatgccggttattttactgttgtaagtggacaattctactatccgtataaaaacctgtttactataaaaaaaacctgtttactagttcatttttctacatgatattttaaatttttaaaaacaaaataaactagaagtaaaataagcggacaaaataatcctacttttgcccgctccacttgcattcctatcggttattagggtacgtcttgattaacaattcagtttagcgtgtacttgtacaaaacaattcagtaaaataagtcttgattaacaacttacgcaagtgtgcatcgtatatatgatttagaagctgaaatatttattccattatcttaaaaaagttatcctaaggcctggtttagttctctatttttttttccaaaaacatcacatcgaatctttggacacatgtatgaagcattaaatatggattaaaaaaactaattgcacagttaggggggaaattgcgagatgaatcttttgagcctaattagtccataattagccataagtgctacagtaacctacatgtgctaatgacggattaattaggctcaaaagattcgtctcgcggtttccaggcgagttatgaaattagttttttcattcgtgtccaaaaatctcttccgacatctggtcaaacatccgatgtgacacctaaaaattttcttttcgcgaagtaaataggccctagaagccttgcaatattgcaagatgattgtgtactagtacatcgtatctgatagagtgaataaatgcgcatcagggtcgctgcttcaaaggagaacctacaatgttggtgtagcagtagcactcaatcctagcgcattaaccagcgacctactcacgggatgcagaatatgctcttatgcattttattgcatgcctatacatgttgctatcacgctaaaaataattacttaagaatctttagctctccagatacatatacatttggtatcacaacctttatcacaagtttaatggaaagctagctgaggattatggatatgcaggaatgatgcccttttttataatagaatgattgattctcctttgcaggttatctcattggttctgtttctaggctatccttcaaaagtcgggtttgcagaattttattgccgtggcatgccagcaattggaaagggtggctagggagtttttttttacccaagaacataagtgacgatctagtctatggattgatagctcttaatcattcctgtcatttgcttacttttttcaaatccagtgtgtgtttagctgtgtgcatcttagttatataaaggccaagagtgtttaatttcattacgattgtatcgtgatataattgattgagtttaataaatcttccattattaaaaaaagtactagtttcaaacggtgaaactaataagcacctggtgtagaattcagaaatgaactgatagacagaaatttgtttgggttcataggtttacgcaccaagtacactgttctttctgaaataaaaggactgaaatgatcgagtgcccggcccgtttgtggtatacggtggtgatgtactattttgccaaaacaagtatacagtaccacgaaattatggaagggcagcagcagcagcccgggagcctcggatgctgtaccatgtatagctggcattggaatcagccgtcatcgtggtcctttggattctttggacggtgcagattggatttgattggtcgagtatcctgttgacactggtcaatgcagagcacgccagttccaattgccaaaaggtgggcttcccacttgtcatgccccccccggtccatccaaaactgtgaaggttaattgcagatttttgcaaaaaaaaggaaaacattaattctaattctatgatgcatgtaaaattgcataagcaggagaaatttaagaaaaacatacgagttacttcgttagtacccaggggcggatccaggataagaaacgagctagcgtcaccacgcactactactttatggatcatatatagtatttacatatggatagtaaaaactgtaatttacatggcatgtttgaagatgcccttacacatttgtttccacactgcaaactatatatgctctgcaaatatatccaggtcccctacggttgtgcctcctccactgctgataccgagttgcaagcgggctggagtacgtaccaacttgtagtagttgccccagcctcccaaggctgccactatatatcaacaaatgcaaacagttatgctctataattggatcttgccatatcaactgtcccatatacgatccaacgtccttttcatcctatgtcatcactgcaccccacaaatggtccatatcccattttccacacataggaaatctggctgaaaaacttggaaacttccaaaataacaaatttatatatatgcgcacataaaaagaatattttgattaatgaagagatgcgaaactgatgagaatatattggttgtttaaataagattgttattgaatatatattaaaatagtagtatgcatgttaggatgaaagggtaaatatatggtgtaaaccaatatatacgtggaaaccatgcaagctacatgatggaagttctccatacgagaatgtttttttgatttttttcaggacttctatgcaaaagttcctaaaactttttgtcatagtttccactgcatattttttcatgcggaaaacatgctagtttcagaaatcaaatggaaatttcgatcaccgacagatgccaaattattacttcaaaagcatcatatcaatcaattactagtaccatataagaacctcagctgaaggggactcactatatattttttatctttatgcaatttagtattatctcagttgcacgtgtaccatgtagataccagatgagatgtgctacctaattaacttttttttttggaaaaacaacatatatgtgtataaattgtgcctgcaatgtgaccacttaatacatcagaaatgggcccaattaaaggctcttgtacgtagggggatgaacctaattagtaaggctcatgtccattcgtccaggtcactctccgtcctctgcttccacttggccaattgtttcagcaagatttcaagtgcacccgatgctgaatcgttattggttattgcaggccgtacccccttgattttaatggcaatacacaactgctatctactgtcacaaaacacatggtatcggaggcgataaggttttcaaatattaatgcagctttgacaactaaattttgtcataacatacttataaaactcgacaaaacatactataatgtacactatttttggggcgaacacagatactattttcatacatccaatcttacaatattaaaatattaagattgatgtttcacctctagaatttttagtgctctttgtgagtaatttttttttgctctttaattattgaacgggtatttgtaataagtggatgtaacttctttgaagcaaagtatagtccattatctcaaaagaaccacacactcacacaccaccaaatgcatcctctaacacacggcaaaggacagtggtaaatctctgccccttactaaacttctattgaaatcacaaccacatgtatgcttatattggttttgagagtcccttgggtcaataggactaaatggatcaaaacttctggtcaattatattattcggagtttctagatgtaaacaggaaaaaatataacttgtattagtaagaactatgctcaacatcaaaaaccatttgaaccaaacgatagaatgcgggctatagactaagaaaagtaaaacacccactagctcaaactaccacatgcatagattgagtcaagagaagtaataacggtacagagagaagccaaattttttcaccaaagttcggatccgacgatcctaaatattgagggactcataagagctaggtcgcattcgactggtctaaatgtgccaaacgaccacgaagataaagctcggttttgactcaatttaccactttcccttgtggagggggagtagatcattcacaatttttctcgggctctccacatgggttggaagtgcgcatgataagactaaacctaggggtgggcattcgttatgaccgaaaattttggtatcggtcttcggtctttcggtcatttcggtctttgaaaagtgaagatcgaatttcaacacaaaaatgtcaggaccgacaaattcggtctcggtctcggtctcggtcctgaccgaaatagaataacattttcatatacgcaaagaaataatggaaattttcaacacaaaaatcacaaaaaaaattcgtaagcatgtatgagtaaagactcttattaggttgcatgcctataagaagtagggatgtgaaaattagagtttaatcctattgaaattagtggattataggttgcatttaggcatattttgttaatttggtcttttcggtctattcgtttacccgaggaaactaaccgaattgatcgaacaaaattcggtctttcactatctaggaccaaatttcttggtctcggtctcggttttttcggttcggtctttttctgcccacccctacctaaaccacctagagccctagaaaggaaggcctccaagagtaactagtatgaacactagcttggcttcgaactcaagtgctcaagaatgaagctctcaaatgcattcaaatgcccaaattttatccaatctcacaaggatctctcttaatgcaaggtggagagtgagtactgggagtgtgtttcaaagaatgagccaaccaacctatcaaaggaggggaataaatatcccaactggccaactagctgttactcacaacaatttaatccatgaacttccaccctcctaggcctagaacttgtggccttttttgaaatatcagacaaaaactctttgccagaacttctggctacatcagctgctatacataacacttcaaatggatacccaacccctttgaacttccgaccaaccctgtcaaccccgaaagtgtaagtgttgtgaattttatatctcatcaaatatttcttgagcacttgagacaacgcatactacaccatatgcatgagagcctcttaatagtgggacattcctagactcaaaataaagagaaaaccgacgcttcggtgtcttgagtccattttccactagtcgtttcttttgtagggttcattgttgtttcaatcaacatctccgttgaagttgatccctatacatgtccttaataaacacgttagtgtactaaccgctttgtcatcaatattccaaaacccacttaggaggcctagatgcactttcagatttgaattgtggtgggtgaagtcatgcacctagaactccaccatcatacaaccaatgcttccaagaaattttgaaattttatttaggcaaaatttattacgggccactgaaaaagtgtggtctttgctagtggataccaaaataacgtgaaatttgcccaaagacactccaaaagtacgataatttgctgtaggacaccaaaaacattaaaatacaacatacatccaattgatgagagagaaaccatataaaatatcagttttgcccccatcttcttcttccttctcacagtcttcttcaagcaacatgcatcaacggtgaagctgctgtggcagctagagggcatccaaatccggttgaccgtgcatgctcaccccgtcatgaagtcactgccaccaggcgctgaaacccgatagacgatgcatgtgcgtgctgccgtgaactcgccactattgcaccctgccacctcgcagcctcaccacgaggtcaccatcgccccctgctgcgttgaggtcgcaggctgcgcacgccccgccacgaggtcagcgccgctgtgccgccccaccacgtagtcctcaccgttgtgctgccatcactcgcacacgtgccccatgtttctcgtgacgttgcagcccccccccactctgtagtcataagcgttgcaccgctcgccgatccgccgcaaggtcatcgccaccacgcggtatagttgcatcgctgcttctcatgccctccctccctctgcgggttgcgcatgagtggaatggatggaggaataagatatgggcaaaaaagtcattttatataaattctcaccaatctagtgaaaataatattttaatggcattagtgtcctataacaaattaccacacttttagagtgtgctcgagcaaattcatgttcttacggtgtctactagcaaagaccgcactttgtgaatgttctgtagtaaatttggccttttttttaaggcatgacctaaacaacatatatccaaatgtttgttacccgagggaatatatttactatagtgaaatgaattaacatcttgtaattaaaaacaattattaaaataggagagagatatatgtaaattatgatcaaaccttctctccatttgaacatgacagaaaagagaaaaacacttctatgttctcactttcttattagggctctatcaaatgcaagattttaacagggtttatgcaggaatttagattaaataatcctttaaaaatcctccgttacaaagaagaccttagggttctatgcatctcaaagtacatttaaggggaagttgtagaatcatgctttcaaagtgcaaacaattaccactaaaatatcttactaaaaagggtcatccctcgtctcctcccccttctcatgttgcggtcgcctccctgatgaaaagaaaaaaaaaccaactaagctcatagactatttttaattgtatggacttagtaatacatttggcccatccctaattgcacagccgattcaacgtccatgtttgttgtaattagttattatagaaaactatatgaagcacggtatattaggatgacatatgtggtttaaaataattgatcaagattattttttggactgtctaattttttttagaaaaaggccagtggcccggcttatattgaaagcccagtgcgggagtgtgctaggcaaagcccagcccggcttatgttgatgcaaaaaacacatcaaatttggtcgttaacagagtaccattacctacctgccactttgacccaagtttcatccactttcttgcacgaagcaccccaacccagaattgagaagctctatcaggggagcattggaacatcccaccattgtgtaggtatttcttcctcaatagctcaacacacaaactcttatcaggggattcaatcttaaacaactatttagctagtaaagcagtgttcagtattctagtttcagtaagccccagtcccccaaactctttagggaaagctagatcagaccacttcaccatgtggtatttcatgccttgtttatttcctagccaatagtatctaccactaattaagtcaaagttatgatgtaatcattcataaagttgatagaaacccatagcatatgagggatagaggataaccatgcattgatgtgtacaactctacctgcatgtgaaagagtattatcagatcaaacacctaatttcttctccattttttgagctaagaaggacggtatgcaaattaaaacaatcgaaaatcatgcacaccttttttgctttcgtcatcatgtatctaaaatctctattagagcaagtttaatagtatagccaactacttgcttcaaatcatatatagtcgatttaatagctaattcatacaatagttacatataacatatagtacacaattaatacctagattcacttatcataaacacatgtatcttggagcccatgctgtagctggctataaatctgtagtctactgctcttctctcttctcttttattttcttaaaatatgtttatagctggcttatagtctactattgctcctgctcttatattcttagagctgatcagcttgagcaggagagcaacatgaagggtacagtgcataaatatgaatccacgaaaagtataggaagaaaacttcagtgccatgagggaccccatatggggccatgctatacagctgaaatgtgcatgcctttaaacattcacagtaatcaacctcttagaatatattccaccaaaaactattatctcctcgacggttgccatgattgtacggacatgcatgtatatatagtgaaacagttcaccctgtcttttcttcagatataatattagtactcatcagtcgtcaattaaatttgaccaatcaaccaatcgtactaattaaattatattaattgcttgatcgccatgtttaaagcagcgtgcctgtacgtgcatgatcgacctacatataatatttcctatgttttaatttagtgctttagtttaattacactcttttggggatcttaattaatttcgagaaaaacaaagcacactttggcagaaattaaaaatatatatacctggactggatgaaattaagaggactcgaatgtgaaaataaaacaagtttgcgtggcctgtccttagaacagaatacatgatcagaaaacatgcacaaccacgcgggaaggaacaggaggcccagatggatgcgtacaggaaaaagtacatactagtaagtgtgcatctttcttttgcctgaaagcgacaattaaattgtttcaccaaaaaaaaccaattaaaattatcagtaaaaatactaaaatagctaagaatatatgtatgctcatggaccatttctgtggaaaaagcatgctggcttgcacgaatcaaatttaattaaatatggtacacatcaaaactaaataatagcatcgaccaaaatagtcgattactaacagagattctcgtagccacacatgcctaaacagtaggcacaaacgaacacttgcctgaaaagatcacgcaaaaaatatagcataaaatgacagtctcaacagtgtaaagtttgcaagaatgtgcaattagaagctaacataaacacaaaactagctatcatacatacgagtgaagggctggaagcagctaagctgaaagctcaacacaacatatactaccaatctagctacaaggccactccaagtcgcatatatactagtatctataagctaggctgttctctctttccattcgtcaagaactaccacgacgtcgacatcataatcgtcagagagctcgagaaattttttagtatctttgatccagatcgatcatggagcaagaagctgccatggtcgtcttctcctgcaactccggctccggtgggtcgtcgtcgacgaccgattcaaagcaagaggaggaggaggaggaggagttggccgcaatggaggaagacgagttgatccacgtcgtccaggcggcggagctgcggctgccgtcgtcgacgacggcgacgcggccgtcgtcgcggtacaagggggtggtgccgcagccgaacgggcggtggggggcgcagatctacgagcggcacgcgcgggtgtggctcgggacgttccccgacgaggaggcggcggcgcgcgcctacgacgtggcggcgctccgcttccgggggcgcgacgccgtcaccaaccgcgccccggcggcggagggcgcgtccgccggcgagctcgcgttcctggccgcgcactccaaggcggaggtcgtggacatgctgcggaagcacacctacgacgacgagctccagcagggcctccgccgcggctcgcgcgcgcagccgacgccgcggtgggcgcgcgagccgctgttcgagaaggccgtgacgccgagcgacgtcggcaagctcaaccgcctcgtggtgcccaagcagcaggccgagaggcatttcccgttcccgctccgccgccacagctccgacgccgccggcaagggcgtgctcctcaacttcgaggacggcgacggcaaggtgtggcgattccggtactcgtactggaacagcagccagagttacgtgctcaccaaggggtggagccgattcgtgagggagaagggcctccgaccaggcgacaccgtggccttctcccggtcggcggcggcgtgggggacggagaagcacctcctcatcgactgcaagaagatggagaggaacaacctggcaaccgtcgacgacgatgcccgtgtcgtcgtcaagctgttcggcgttgacatcgtcggagacaagacgaggtaacacgcaagcgcagctagctgcatcgtatcgatcatatatatcaccccggcgccttcttcttcttcttcttcttcttcttcttcttcttcttcttcttcttcttcttcttcttcttcttcttcttcacttgttcttcgttttcttcctcttcgatcttctcattcatcttctgttgctgccctagctacaatgatcgatcgatggatgatccatatcatcgttgatccttcgcttcacatcaggttcatcattcctagctacatcgatatatgtacctataatttgatgatgagatgaacttcttcaaaattcaaattaatctctgaagaaaccaacggagaattaggatcagagtgtgctagctacatgtgagctagagattagagaaatttaagagtgtgtgttatatgtaaatatatcgatcattgccagatcgatcgaggcgaaactatagaattttgccttggggtttaattagccttaatttgtacccaaaaattgaaacaaatccgtcccacgcattgcattgggatgtgtaatccgggtttccatatgcatggttatgggaatgtgccatgtgtctgctattgctatatatagttattagtctagctacatttccaaatcacatgttaaatttgttgttctcataatggattcctctgttggagatgactgttcctacaatattatattcgaacttttatgatctcttactgtatgcttgcttcttctgcctacatttaacttactgtacttgtttagctagggttacagtaaaactccctcttcttaatttccttctaattacaaactcgattcttcaaacatatatattcagttcagactcatccaaaccgcctctctctataattcacacattgcatgccagttacttcctctgcttagttaattacaaaggagcacgtatgcacatatcccaagattcagtacgttagttttgactagcaaatagactcacatttagtgatatatgcatgcacaaagtagtggtaccaccactactgtaaatgtacttccaaatatatactcactatatcctataacaacggtatataaaaaatgagtaccactaaggaggaatttggttatcagataatagaaggaattttgagtgtgttgagattcagaccttgtagctgaaaccacataccctttaccacgacagcatctcaattaacggcagtatattgcaagtaggaatttatggttagagttcaatacaactaaaatatatatcgccttaagatcgagaagttatatatgatatggacagtagtgcagtgggtgtgcactttcagaatcgaaatgaagcctatgcgtgtttaaatatataaagagatattacttttcaggtattgagaactgatcagctctattgcttgcatgctagctagttctttatctcccaaatttaattaaccagtttgctcctacaggtaaaataaccatacattatatttctttccgagttagtttgtttttcggcttaattattttgcttagcccatcgaaccaaacacatcctatgggggtgtttagatccagtagtgtaaagttttggactgtcacattgaatattatatagaatgttgcatggggtgtttgggcactaataaaaaaactaattacagaatccgtaaccgtgagacgaatttattgagcataattaatccatcattaacaaatatatattgtagtaccatattgtcaaatcatgtaacaattaggcacaaaagattcgtctcgcaaattagtcgcaatttgtgcaattagttttttaagcctatatttaatactttatgcatgtgttcaaatgttcgatgtgacagggtgaaaaattttggggtgggatctaaacagggcctaagtatagtttgcacaatttaatttgttatatatagttgtatttggtatatagatggaatatattcctgagccggcaatggaggacgaggtactcacgtgtggtacggtcgccggatgcatcagaggcttgggagagaaaatgtttagaattttctggatttttcaaagaaaaaactataccaatgcagcatgcttcctgctattaatttccatgaatttaattggaagcatagatcaatcatacaaaggttgcaggagtatctacaaattatcacaagttttttgagtgaaaagtttttagatataactaatagtataactgtgaatgaaccgagctcgagcgagcccgtttgcccaggctcgagctcgacataagcttgagccgggcctattgcaccttcgagcttttagacaagttcggttcgagctcggccataagtaagataatatatattttaatgataatctcttgataagtataattattttctagttaatcacactaataaaagagtagaaaatgattaaaataaatatattgtgctaacacatgctaatttattgtgtaaattgatattaatatatatatttatctattggtttataaatcaataaggtgaacaaacaatataaactatatataattaagctcggctcggtaaagctcgcgagcttttgctcaggctcgagttcggctcgtttggagcttaggccgagcttgaacagagcctaggacaagctaagctcgagctgctcgcgagcctcgatcttttttgatagccctaactataactgtgttgtaaccacactgtaactattatataacttatataaaacttgtattcaactatagttaatttggttgcttagtacctgtattttacgcgtgatatgtgtgaaaatttctttctagcaatttttttcttgtatatataaatctcgagatgatccgatggccacaaatctaaaaattttgaggataaaaaacttgcagaaattttctagcaatttcgtattgttaattagacgtggatccaacatgcatgcaaggtccatgatatatgagtagctagtctcacttatcatcttcatctacagtatataaactccataacacaaagccagccagcaaggaactgtctatgtgcagtgatcataaagtgaagctaattaaggtagtgaactaccttaatatcataccatacgttttgtgtactcctcaacgtacacaatccaaggattacctcatccttggtacgtacaattttatgagatctattattgtctcagctgtgactatgcaactatgctgtgagggccacaaattctttcccacacattttgatctaatggaaggttgccattttaattatttgggagttaattaacttgactaaataaagttattgtacatcttattcaaaatgtggagccgcagtttggacgcgtccatatttgatcatattacaaattaatttgttatatatatgcatgtcacaagcaatactatgccacaaatacatatatgtatacgcgtgtgtttgtttcgattggaaccacaattaagtgagttattctgagcatgcactactttgtacgcatcaccttcagaatgctgcaacaatttaattacttttatagctacattatatatatatacttaatctactgtacgtcccagttaattgctctgcgctgatatatctttgtacatctgatagtctcgtaatatactcaatctgtcttctagcattcatcatccggaggaggcaggtgtttagactgctttctccttagctcaatggactttgaggcccatataataatctaagtatctaatgtatttaggcctggcccaacctaatccaattcagcgtaaaaaaaaaaactaatccaattacagtgcattgtaattttgctgactgcatatgcagccggtcttgcctgtatgcttgcaattgatgcacactagcagaaatgcagaatgcaggggaaggacaagaaagtttcatgatgtaaatggtgtgtatcaaatgctaatcatgatcggtaattagcagacaggtgagctgcacatcacttcaattatgggcaccaattttgggacgaaggtgtagtactaatctgaactatatgaagccatgcatttaattttgttgtggacttgtacgtggtacagtcgatctagtgatgatacagtgtttaagggattttaactcttcatgagatgtcactgtgcagatgtcatgctttatttttttagtgaaatttgctataagacacttaaaatttgtgtaatttgcttgtaaatatcgtaaaaatatgtcacgactgaaagacacttaaaaaacaataattttgttacgggacactttcagttcaatttgatagagaaattcttcaaaaagacgagaatgcccctcgggtcaaaagcttttaagccgagtttgaagtgaagatggcatatgatatttgctagtgatttacttctggtgatgacaaatttagagttgcataatttctaaatgtttactctaacaccatgtttaaagcatgtgttcatagggacattcttgtctttcttaagaatttgtttctccgattgagctgaaagtatcctccagcaaattaccacctttttaggatgtctttcagctatgacacgtgtttttgatgtctattagcaaatttcacaagttttggatgtcctgtagcaaaattacctattttttaaacttggagaaattatatatgttcatgcctcatgttgaactcaaacgataacttcatccctagttttcttactttatgtttcctcttatttttaaatctaaatcttgtgtttgcccatattccatctgaaggagtacttaacaatgttaaaaacatcgatgtatggtcttgcaaatttaccacaatttttatgaggactttgtaatttaatttcccccttttgacatcaagccttttgacatgcattttcacaaatctagttaaaaaaagagcaagcacaaacttttcatgaattttaccaatgtatttaacatgagttttcacaccgtcaagtcctcctaattgaatgggaacaatcacaagcatcacttcaaaaaagataccaaaataaaaacaaatcaaaactagaaatgaacagaggggtaagaatggaattgccccttaattttccttgttgcatattcatggctacagtacatttagccagagatgcatgattatttcttttggattttaatcatggtcacttatgttgcatgagttgcgaggtaaatacatctattgaggcactactaggaaaacgattttcgcagacgaggtgcgtctatcttcctaggcagataacattgttgccatcatccgtccgcctgcaaaatagggaggcgggggatcaagatggccgtccgcttgcaaagatcaatcttcccatgcctttgcctacaggggggcgaccgtccgcctgggaagacaaattttggtctcctgcaaaaatggttttcctagctagtagtgaggtgagaagggcaaccactatatttaccatcttgctaactagtgccccacatgttgttacgatatataattaaattcaaaatagtataaaaataataatgaaatttgtatatactggttaaaaatggtgtaggcattggacatcagctctcctagctgatcgagttgtaaccagtgtatatgtaagtcgtgggtgttttcttttcttcttctttgtggggaagggggggggggtttatcaactacaggtagtgaagtttatctgatggttcatatatacacgtaagacatgttcaagtgtgcattggtttaacaaagagactaaataataggggtatctgtgaaagctcacacctgtatgaactgctcaattggagaaacgaggtaggatagtgtcactactactaaagagaatataatgtggaatgagagaattgctccttgagtgtgtgttttgagagtgaataattggtctccttttatagctgcttatgacggtggttaaggtcggtaactcccacaaccgtcattgggaagcaaccaggagctgccacttggtttggccgacccctgggccccacctctctccaccgcctttcaccagagattgacatgtgggtcgctaaggcagtgcacgacggtttggccccactctaagttggtttgagctgacttgtgggcccatcaattcatttgctctcatgtgattcgccagaggtgtgtttctttgaatgccggctcatttctccttcaccttagtgtataattcatgcacccatagtaattctccaagacaagtggaactaaatttacttgtaactaatatacgtgtaagaaatgatagttctctctttatttattgaggtaattgacgtgtcaaaattggtacttaacgaccgtcaacagtcatgcaactcagtcacccaaaaaaaccgaccacccctccaactctcgttactctcatgtaatcctgttggccacgtcctcctttcttggccataattgaagaggcgatacaaaacgacaaggcaaagatgtccccactgtcgttcctctctatgcctccctcaaagatgtccccacctccacccgtccccaccctcgtctgaggagatggtcacccttcccaccactattcccctccccatccctgtccttgtgtgctagcacctatcgccgagggaggccaccgcgtctgcctcgagcagtcgccattggccagagatggaggccgcatcaacctccattcatccccataggggtggacaaaaataccccgaaggctgcaaactgaacaaaactgagctaaattgaaccgaagtgtcgattctttggggcataggtttacccttcgattaatgtattgtgtttgatcaatctatggtcttttctacggtttttaattctcatgaaccggacaactcgaggaaactggaaagtccgaaccacaggtccaccaaacgttgtatagcgacaaacctggcaatgtgcaagctttaaggctcaacacccaaagcccacatatctaacaataatacatctcctagagtactccagtactgttcatcgttgtttcgtaatcgtgcgaagccgtggccggatttctaccctaccgccgcaaccgtttcacgggtccgtgccgctcgccgcccccagctcctttggacgactaccctgtgcaactgcgcatacaattaccacatagctcggtcatggtctactagttgcccaaacctctccaagttccaagactcctgctatgtgaggtcagaaaaactccttgtctcttgatctgccattgtatgtgtcatcaagtgatttctttgagtatcttgtgctttggaattcttgccaacgtgttcccacgatttgttcggtaaaaccgaacaacagaaccaaagttactcagtttactcggttcggctttctattttttctataaacacttcggttgtcatagctagaaaaccgaacttttattaaaccgatgaaacggaacactcagccctaagtcccctagagcttctttcacactacgaggagcttgcctccaccttctctaatcctcagcaagtctagaccagcgcccttcatcttcgacaagtcgtcatccacagatgctatctcccgtctttgcctcccatcctccactagaccatgctccgggccctttctcaacaacatgcggttacttcggttatgaccgaagaccggaccgaaattttgggtgcctgaattgtcgatcgcaaaatctacagtgccaagttcaggcatcatttttagaagaccgaagtttttttttacccgaattacgtagaccaaaatctcggtcagcaacaaatgcccacccctgagtatgccgatcgggatacgtggcacccgttggacctctttcttaggtcagcaggtgtcaccaatagtcccgattgagcggccgaagtcactccttggattaggcttggccagccaacccactcatagggcggttggtccaccacctcacttgggcttgtcttggtgaaattgggttaatggccaaggcattggacgtggtcggccggcctagtttaacttggtggctgacccttccaaggggtccaaaggccctccggctaggcttgtcttggtgaaattaggttaatggccaaggcattggacgtggtcggctggcctagtttaacttggtggctgacccttccaaggggtccaaaggccctccggctaaggtggtgaccagcctgattgctggcccttgttctaggtcggtcgaccaccctcggctctataggatgacggctctataggatgacttgtttttctggtcgtcgt

SEQ ID NO: 8003 - DNA, 11100 bp, Oryza sativa
cattatcccctctaaaccccttgaatttaatgggagaattaccatggacgattgtttttatcgtgcctcgggctccctgacaaggggcccaggacagctgggtcttgcttccctcgccacgtgctccaaactaggcttggtggacccaagccaagtcatagcacatccatcatcgtttttctcatttcttgatggtgaagtatgaaaccacctaccggtgctagcatctaactgtacatgtgtgtggccgtttagagctagcataaggtgaattactacctacctggagatttcctcccaaatggccccgttgagggtcgcttcctgcaacaccgtgtccatctcgggtcggatcgtgagcagctccagtgtatcctgccgaagccacctgttgtcagccgacgagccattctcgtcacccttcacgctggccagcctatcgtggttgagggagctcccgtggctccaccgagctgctcacctgcctgctcctgcttctgccttgttcttacagccagcgatggcgtctggggtttgagggggaggggggagggaagggggccaagcaaacggtgaaaaggcgagacagagcaacgtcaatggcatcttagagttcaaaagcgagggctgggacggtggattgggagattaggggagcgatggaggttcgaggcaacgacggcggcatcgtcaagggttaagagggggagaggacgagagtgatgctgcggggattggcaagggtggcgattgagggatggaagtatgctaggtgggaggtagaggcgatctgagacattggatctaacgtagatgggccgttggatttgacgaatgaggtgcgcaggagtgtagttagtgaactatatggtagatacctgtcgaaacaaattttcggcaatatgaaaagggggtagcgcacgagacctaaaagtggatggatgcggagacaaaggatttagacaggttcaggccctctcgatgagaggtaataccctactcctgtttggggatttgaatccaccgggtgtatattgatctgacgatcagtttgtgtcatgccccctagagggcctcctgtccaccttatataggatggggggcaggattacaagatagaaaccttaaccaatacggtatcggtttcctaaatctattttacaatattatcaaatcaggactttaggccgcttcataatataaaaggaaacgtaatacccaagtcatgatcggttaaatattccatagatataagctatcccctatgactagtcggataaccatgccgtgtgggtatggggtacccataatctccacagtagcccctgagaccttcacagtcggaaagataatcttctctcgaactagattactccaaagccgtgtgcttcaatcatcctcgccatgatctcccgagtacttttaccaaatatgaagactgtggagggctgaaaaataaagtcaggtgcatcgagtagatgtacctaatagatgcaccaactgagtggttttgataatcgtagtcaaacaagtaacttaatattaatatatagcatatgcggtatgaatccctgaataacatgatccgagtgatataccgacttatgatgcgtgcaacctaaagctgactacattattgaatacacatagcaaaacagctataaagaagcttgtatgttgtgaataaataactttccaaagtattgggcatacaccatgcgcacactgctttaacagatgtgcttgagtccctaaaagacacatggtttcactacacctgaaaatatatggcatatgtggtataaaatccgagtaaataaactcataaggatttatcaatcgtctgaaaaatgaccaaaatatataatcagcctaagccataatattggtcaataaaaatacacacttacgtggcaaaaagcaatgatgttgtatccaatcaattgcttgataaacccaaacagcgccatgactatataaaaaagtcagcggggcagctatataaagctttactgtttgacaccttttaagatgcattgtaccaactcctaaaaagttgagtaactgcggtataaaaggattttaaggtattggacactagatcacgcgcacttttgcctaagcaaaaagatgcctaagtccctaaaagaacgtgacatgccacacctgaaaatatgggctgcagacatattaggcctaggccaaaaaatatgccttcgacaccctttaaaggatgacgcatgtaacatgctcccgagtaataaatcttttcgggtgatatagaccaagtgtagctcatatgaataacttctgatctcagtgattatcctttatgggatactccaaaatagatataacaattgaattccgactggcgcaagtattcggttgataacccttacggggaataataaatagtccagtctttaagcataaaaaatagacccatgatcatcaaattcatgttgcatgtatccggaacaagtccaaattgaaggtatgacacttgtgtttgaggtagtaagcccctgagcatatagcgtgtccttttgttgtagtcacaattgtccattgatggtagctgacgcagttggcatagagacaagacgaccaatatagagagaatattgcccaccagaggtggcaaaaatattggtggtagtgaagatagtgataccaatcaaaagtgatgaagttgcacaaccgtgaaggcaaagaaaccagtcggcagcagtcaggtcagccagcaatgaagatgaaggcgcccagcgataaagttgtgtagccatggcagcgaaataatcagtcggtgacagacgatgcagttggtgaagaagatgaagatgcccattagtggcgacataataagccatccataaaggcgaggataccggtcggtggtgacgaaagcaagccgacggtgaagatgtagacacgcatcaaaggcgatgacgaaatccaccaatcatgaagatgaagaaaatagtcggcggcgacaaacgcaaccgatagtaatgatgataagcagcaatcatagatgatcaaatataatgacgaagttgcccatcaatagcagtagagtgggctatgttgaagaggctatgttgaatagggatattgatgaagatgacgatgtcgatgatccagtcaatagcagtgtagcaaccgatgataatgacgaagacgctcatcagcgtttgcatagtaggtcaaccgtgaaggcgaaataacaagtcggcaatgacggaagcaattggagacgaagacatagtcatccattagcaacagcagagatgtcagggccgatgaattagaggtgctggtgatgaagtcaatgacaataatccatcaaactgttgagaagatatcgaagctcgagtagtttccttggcgcgagagtgtgtataacgaagattgatgcaaagctccttgatttataaagatggcagtagaatttggtgttatagctgttgcagattcttcacttggaggaaagtagatgctcttgcccaactcatcaaaactgaacttattggttgataactccaaactcccgaacatgtagattaaatttcaaaattgatactggaaatatttggagtagattgtgacggcgtgaagaagccaaaattgccggtgtaataattggagtcgctgaaattaaatgacggttctgaagcgtagacgaagataataactccccgaattgactcgttgattgattgattgcttaatcttgacataaagcttgtcgaattttgatagtcttgtatttgtgtagcccccgactctttggttagttgagaaacaactgaacatagagtcgagaactgtagcttcttgtagtcgaatagtcattgcttgagtaaagatgcatgttgaagatgtccgagtagaaatattgaagattggaacaccacttgttgtaataatataacacggcatcatatttggtgacgcatgccgagatgtcgaagctcctgtagacgtcgtggttggtgaagtaggaaagcggtagtgaagacatataattgtgaagataaaagcaccagccggcggcggcataaccagtcggcgacggaagacgatgatgtccatcagtagtggtagctgtataaaccagacgtagaggcgagggcattagtcaacagcagacgagacgaccgacgataaagacgataaagccaatcaacactagcagaatcatgcagccatgaaagtgaataaaccagtcggcagcagacgtaggcagcttgtgttgaagatgctgacgcctattagcggtgacggcgatgtagccagccgtgaagaagatagcatcagttggcgtcataacaggctagccgtgcaggcggtgacaccagtcggcggcggatgaggcggccggtcagtgaagcggccggtcggtgaagacgtagacgcccaacaacggtggcataataggccagccgtgcaggcggaaacaccagtcggcggcggacgaggcggccggtcggtgaagatgtagacgcccaacaacggcggcataataggccaaccgtgcaggcggaaacaccagtcggtggcggacgaggcggccggtcggtgaagacatagaagcccaacaacggcggcataataggccagccgtgcaggcggaaacaccagtcaacggcggacgaggcggccggtcggtgaagacttagacgcccaacaacggcggcataaagcccagccgtgcaggtagaaacaccagtcagcggcggacgaggcggccggtcggtgaagacgtagacgcccaacaacggtgttgtgaccaaccaaccgtatagacgaagacaccagtcggcggcggcgacggcaagccagtggtgatgttctgactgatccattcctggggcgtaagagataagcttaaagccatgaatcccttttatgcatatctggatctggatcctgcagaacgaacatataggatgagtagtatctgatgtaaatataatacttcgagaaaaattcaagtattttaaaatatttataaatatgtatttcttctcttgtcaattttgatttcccctagcagatgactcattatgtttaaacactctgcccgactagtcatagccatcaagcaccgggagtcggcctaagcacttcccaaacatgcatatgagtgacatgagttcgtcattaatggaacaaagtttcatgggtcggagtttactactcgggtacttttgcaattattaagagcagaaaataaattatcttatctctatgcttttgatttattccgaataatacttagcaccttacgttattcggtccatccaacaagcccccaggtgctaggaatcggcccaaaggcaactatccattggcaaaccaaacggaaagcataggaagatggaactccataactcgataggcacttttgtattcagaatatgtcgcaagcaatcaagataaatattatgaaaattgtttaaaaaatatgatataacatctatagccccccgactcactagtcaacggcgaaccagttgatgtagtgaggcaaaggaaaaggcaaaatatcatataaagaataaaataaatgatgacttagctttgtcatattccccttgattatggcagaggtggccaatgtgggaacaaagtcgtccatcaataataatgaagacacccgtcggcggcgacgaaggcgatcgacggtgaaagtgtggacgcccatgaacggtggtgtggccgaccagccgtataggcgaggacaccagtcggcagcgacggaggcaggccggcggtgaagtcgtagaagcccaacaacagcggcataataggccagccgtgcaggcagaaacgctagtcggcggcggcgaaggccagccggtcggtgaagatgtggacgcccatgaacggtggtgtgaccaaccaaccgtataggcgaggacaccagtcggcggcgacggaggcaagccgccggtgaagtcgtagacgcccaacaacggcggcataataggccaaccgtgcaggcggaaacaccagtcggcggtggcaaaggccagccagtcagtgatgaagtacaagcgatgatacatgcaaagacaagaaattgcacatcaacctgtggttagatatttgtaaaaaaaaaataactgatataataatcaatagatccaaacacatggcttgattggcacttgatagagaggcctgcataaccataagcacaaaagcgcatgcacgattgcatgtggttcattggctcctcgttctgtccggcagctgccgtccctgtacaggacttgtataaccatcgacttgttcagcgagtagttcgacgtacaactgcatggtcaaaggactcggccgaatcgacgacaggaaatatatacagataatagattgatctgtaaaaaaataaataaatcaaagattaattttaataatctatgaattggaacagctaacccgatatctgaacaatttaataggggtgtgatctgcccggtcgacaatgacggatatggccgtcagtgggtatggtcgacaatccaatccagtcatcggtgttagatccattgatgagcgcgtgaggccgcaattggtggagatcatgacaccatgcgaacgtgcgacggccgtatagagtaacgtgacgtccaaaatgcatggatcaagacatgcagccggcgagttgcgcagcgacttgtgtcctgtactccgcttcagcctcgatatgatcatcaccgtgatagcatgatggcagtatgacatcaccacgcactcagcagtacatgcatgaaatcaaggagagaaaacaacgtagagtaacatgtgattagggatcaatctaaataaaattaaagtggaaagccaaaccaggtaatagttgcatagatcgatatatgtgatgatgccaaatattatggccacgagctagccggttgatcttgatctcaagcttctttatcgttccaccggtctgcatgcacactcatgattggttgccctggcaagcagtcggcggcttcacggcgtgcagcacgcacacacatcttgtgagcgagaatccagggaccagtgcatccatgcatgccaagatgatcatcagcgctgaacgtgcaaacgcccggcgacgttgctaattggatcgacattgatcttttttctttctgaagttgatttccatcgcactcgttgataggaaactcggcgtcacccctacctggcgcgccaactgtcgaaacaaattttcggcaatatgaaaagagggtagcatacgagacctaaaagtggatggatgcggagacaaaggatttagacaggttcaggccctttcgatgagaggtaataccctactcctgtttggggatttgaattcgccgggtgtatattgatctgacgatcagtttgtgtcatgccccctagagggcctcctgcccaccttatataggatggggggcaggattacaagatagaaaccttaaccaatacggtatcggtttcctaaatctattttacaatattattaaatcaggattttaggccgctccataatataaaaggaaacgtaaaacccaagtcatgatcggttacatattccatagatataagctatcccctatgactagtcggataaccatgccgtgttggtatggggtcattgtgttgttgataagcaggattcacaacatgaaggacctgtacattcaaagggtggaaatcttgtaccttcatatttttattgtgctcagatgtggagcttctgtagcaaggactgggatggccagccccagtgatatggccaaagtgatgacggccaacccaactgaaagtaacctgctgcaaaaacccaagtcagcagcacgtttttaggaggtgttgaggtgatgtcatatttttgaaacttaaagtagtgcgatctctaggaaatacaacacaactacaagatcctctttggccgaccaagagtcaatttctctaatttgaaatatatgccatcaagtcttacaatactgataattagtgggcagaattatccattagttagcaatatggtgcccaagtccaacaagatagttcccttgtcatatttcttctacgtgtactgaactgtggatttttcatgttcaataaagaataaactctgatgaacaatttcaatgtactgaaagtatcagacgtccatactcagtagagatttaggatatgtagtagatatcgtttatataggtgacagtaactgcattgtaccattagttagtcatattttttcgacatacactgatcttcagattctgctgttacactcaataaacactaatcactaatgaataatttcaatattatgcagcatcatagatatatatatatatatatatatatatatatatatatatatatatatatatatatatatatatatatatatatatatatatatatatacttcagttgaggcatcagacatgtaaatattgttcatgtagaagacaataacaatgttgtgcagctaccttactactctgatttcttcgggcatctccaatttaacaaaaacagaggcttgtgcaaaactagaaagatgtgaattactaaaagatgatgggcaattttcttttttggccaatggaatatgtcaaaagcatgtttatcccatagtaaaggtctgacgttggtacttatctctacatcataagggctaacattctgttactaactatagctctaaaagaatatcgcaaagagaaggatatccctaattctggcataagctaaaccattaaaaaccataaaagtctgattccttaaatttgcccaaaaaaaacaatagttgtttcagctccagacatgcaaagacgtgaaaagattgtctatagaataacatacaagattaacatcttttgagttaaaagatgatattaatgatccatgaccacattagaaatttctgtggagggcaacaatttgtaggtggaatccaagctcaaaggaaataatttcagaagagttagcaacaaaaaaaaaaagctatgttagctactatttggaaattaggttcatggaaagttcagtggttattcattagtcacaaatgactatatgtacctcagatgtcaggatcacgagagataagtggggcaaactgtttagaccaaaatatgcaccttcgttaattaagtcctcataataatggcacagaatgtcactgaattcttgaccgccttgcaaaatgtttgccacgctgtggaataatattatattttccagctcctctccaatggtctctgttggccaacaaaaaggttctgaactccttttcaagttttggatcagaagcaaagccattttccttcatttcatcataatactctaaagctctttgcatgcatccgtgtttgatcaaaccttgcacaactgacatatagtgtgaataagaaggtctgatgtcatatcttttcatttcattccagagcttcaaagcatgtccaggttcattcaattgaaaaaatctatcaataagcatgagaaatgtatcactcttaggaccacagccatcatccttcatttttttcaagaacttcagggtttcatcaatgttttcttgtctcagaaatgtatggtatgtcaaaatggttggaacaattcccttcagcatcatgtcctccaacaccatccgtgcttcatcaagcttgcgactttcgcaaagcggaactatcatactgttgtaagttttgacgtttggttggaggccttcatcgataattctagtgaatatattctgtacatccttcatgcaattctcttttgtcaggacatagataagagaattataaacagcaatactaggagtccaacccctctttttcatctcatcgtaaaccctcagggtatcaaaaaggtttccaacttttgcaaaacaactgaccatgagggtataagatgtgccatcaggagtaatgcagtaatttgacatttctctccaaattctctttgcttcagctatatcagtgattacattgcaccaaccatctagaataatattgaaaccttctgcagtaagtgggaagaatttctttctcacgagaagcaattcctcagcatcctctatgtttttatttttgcaaagagcacgaagaagggagtaaaatacagtttgatctgcttccgttttaaacttctccattgcatcaaatgtcttgattgctttgttcacttcattggcagctgcatacctgaaatagccatgtccttacagtgagatgaccgtcgaccattatgcaacaaataaaaacaactcaactaaaaaaaaacaaaaaaagaagtgctactacaatatggactgctgcaaagcaggcattatgatgtccccctcacagcaagacgacaaatggacccgtatatatttttcatccaatgcataagttcaacaagattaaaggagccaaatcccagaattaccactagttaaaacactaacaacacaggaaatggtaacttacggacttgcaacagctttatattcccaaacactaatccattcaataaatcgatccaaccatgaatatttgttgaccatcatagacaatagcacagttataacataatattcaagtggatcctggatccatagaagctgcttgtttgcaacagttttacttcctaatatgattgtgcaagctgataactgcttgttcaccaaatcaatatgatgtacaagtcccttgagggaggcgcacattcagtggcagtaccaatcagtaaggcggaccaaatcattcaaaatgcaggcatacatcaccataaacaagtagcaaacacataattctgacaagccaatcaacaacagttgaatactgcccaagcaatcaaatacttatgccatagcagtagcactatcacaaagctgtttcttatctcaacatggaaagctatatactcctctgtacagaaaaatggagacagattacgaagaggagagaacccacctctccatcacgatgaccatggcgcggctggtgagcaccccgcggcgcagcatgcggcgcacgaccgcccacgcgaggtcgaaccgccgcgccttccccgcggcccatatggtcaggtgccacgcctcgg

SEQ ID NO: 8004 - DNA, 12005 bp, Oryza sativa
gtgaaggttaccacataatgaatcttccatttgttatgaaggttacaacaaataaatctctcatttgttgtggatgttacaacacaatgaatctctcatttgttgtggaggttacaacacaatgaatctctcatttgttgtggaggttacaacacaatgaatttcatttgttaatggtgactttattctcatctgttacaaaacgaaagagcagcaggcaggctcggctcggtcggccgcctcgcctcgctacgcccacggccgaggccgactcggcatgcgcgcatgcgtgtggcagtccaaccatcacctcaaccggtcaacagggaatctctaatatcaccctatttaagttgaggttcttccacctaaattttcaaggcagtattattctctctaacattacttgtgggctcttgagattttagttgaattaaattgggacatatgagacaagaaagttcgcttcatttgatggcttttaacatgatttcacactttttcctatggttcgtccagatgagtacaggcctagcagtgacttccatgcatactcttttcatgtcatcctaccataccctctgatttggtcccgttagtggatacaagcctaggcgagattctcgctctcaggttcggtcctctacgagcggatacaaatcacggatacaaacataaattttgcataattcaccataaattaaacaagcacttgcttcggtcatgcttcatggcttcgagccatgctagtagtgatacaggcatagtgataaacaaaattaattgagcatactaattaattagcacgcacatttgctagttttgacatatgttcagccatatttctctaacaagaattaaaataaaatggcgtttattttctttccgtggtcagagataggaaatagatgtgcgcatgcatatattttctccttccatctattcatctacaaaatgttggataaatcacgaactacgccgagtcatgacggccggccataaaattaaccaacactcgcttcggttacacttcacggcttcgagccatgctagtagtaatacaagtggagtgaaaattataatctcaaaatcatctgcatacatatatttgcttaaaatagtgtatatatacttgttgcaccatatataaagtgcagtataaaaaataatctgatatacgcacatgcatgcatccatatactctggccgtgcattttccttccaattgcaaattaaccatgtacgcacgacaagtggcgacatcgtgatagtcgaccataaatcaaacaaatacccacttcggttacgcttgatggtataaggccatgctagtagtaatacaggtgtgccgcaccaaaatcccgtggcatgttgataataatggcgctaaaataaatactcgtttggttacgccccgcgagtgctcaggaaaattcatcaatttatatatgcgtgctacatataggaaaaaataaagtcacaatgccaaaaaaggaagctatgtataaatttgctaccatacacgcagtgatattaaaaaccaacaaattagtgggcatctaaaatacttggacgcccaaaatgaaataaacatataaatggaaatctacagaagattctacagctgcgacatctggagctttaggatagattttcctttttatccttttagcgctcatgtaattttattttctttcatgttggaattcctaatcaggggttttctctacggagatgtaattaacagaatttctatctaaatgtatgaattctggaagtaatggactcgcaatttctgatttttatttatttattgcatttaaattaaattgtctctaacgatttgcggataacggacctactataacgaccgtcccagttttcccatcgtcaattttctatatggatcatctatgtgatcctaatccatgcaagatttgggactaactatttgattgctcctgaactgatcttcagaaaatactctactgttaggtgttagattcagaaatgctgtcttttccggtttgttgaaattagttccaatttgaagaaatcatgtttgacttttagtgattgaattaatttagtggcagagaaattagaacaatagcctagttaactactttttctcaggaagtatttaggcccttcatcagtgtatttgcagaccttgctgaaacattcaggccatacctcctggaaggagaaaatgttgctgcgcagccttgctgccctcagatgttctttatacactgatgaagaacaaaaaaacatagagagcaaaaaaaaaagataaaattttgatagaattataacgttaaaactgttagatttttttcgacggataaaatataatgaatttgaggttaagattttacacgtaagtataatactattgaaagtacatgcattattttttctagattttttggtgatatttattagttggtatgtacggtgtatacaagtgagaacttgtgtggataggatatgtttccaacttgtttatgcccacatgttaatggaatagctcttcatcaatctatttatgtggacatatgttgtcttaaaatatgtattaaagtgactatatataatggtgaatgttcttaattattttttctagacaatataatatttttgcattttgtcttaaatatatttttttatatgatcgcttaattggatcgattctaagaaaatcaattttactgtcatcaaatttaatgatttattaactaaaatattatgtcatcgtagcgtagcacgggcatattactagtaggagtgtagttggtgaattatagggtaggtttgtagatgtctctctaagactgtgtttagatccaggagtgaaaagttttagcgtgtcacatcggatatacggacactaatttgaagtattaaatgtagactaataacaacacaaattatagattccacctataaactgcgacacgaatttattaagcatcattaatccattattagcaaatgtttactcagggccgtgccatcaaatttgtaggccctgtacaaggctctaagtgaggcctaaatcaagtaccaaatatagctaaaataatgtatatactgcagagcaaatgcgatatatcaacaacagtacatttttgaactcttgttttataatcagaaactgtcaaactgaaaatggagaatgttcgttgctgttgctagcttgctgcctagtgccttgcttgttggttgcttgctaagttgctatatgctagatgaatgaaaatatgaaattagatgagccggctagcggcctggcgctcagaagagacgagacgtcgagactcgagacgaactgaataagtcacagatacgaaaaagaaatacaatacaaaaagccgtgaggcctcggggctcggagtcgagaatacgaagcgccacgcatgtgaagtcgccacgcggagatatgcgcgtactcgaacggggttctggcgctctggcctcacacgaatacatgggccttctctggttgggctgattttttgaggccctggaaatttggagaccctgtacggtcacacaggtcgcacgcccttctgcatggccctgtgtttatgtgtttattgtagcacaacattgtcaaattatggactaattaggtttaaaaaattcgtctcgcaatttatacgcaaactgtgtaattaattatttgtttatctatatttaatactctatgcatatattcaaacgtttgatgtggtaggataaaaaaatttaccagggaactaaacaggccctaactctccctaccatacttgatactagtaccaaaagtcaatgtgcagtacaaccattatctgtaaaaatctagagaaagtgtagactctccctacatgtatgcagtgtagtagtactaggagagtactagctaggatgggtagatttcttcggcttctaccatagggtgtgttcgctattcatggatcccaatcggatccttccacacggaaaacggagtagttcattagcgcgtgattaattttgtattagctttttttaaaaatagattaatttgattttttaagcaacttttgtatcgaaactttttgaaaaaaaacacgccgtttagcagtttaaaaagtatgcacgcgaaaaacgagagagaggttaggaaaaggggcatccgaacactccaatagagtgtcttcgatactcacgtttgggaacggtactctctaccacggaaaacggattagtttattagcacgggattaattaagtattagctattttattaaaaaaggaacaatatgatttttaaacaacttttatatagaaatatttttaaaaaagcaccgtttagcagtttgaaaaacgtgcgtgcgaaaaacgagaaggaggggttgggaacccggaaaaaccaatgcatgtgtaagtgcctgatgatgtatccattcatcaaacaagcaagctactagtagggcctctcacagtgcaagctatgtcgcccgtacccctagcccaaaaggttggtccaaaaacacccacctcatagtgcaagcacccatatatgtatggtttaattggatgaaggcactagtaaaggtaccaagcccacagtgggtgtgaccctagacgtgttaccacacatttatttctctcaattaccctcgcctgctactcacgcgagtattcttctcctctcctcggcgcgaccgcctcctcctctctcccgcatcgccgcgcctcctcctctcctgccacgccaccgtgcctcctcgcctcccacgccacggcgcggtccacggcgccgcctcgtcgcaagaaaccacgcgcgcaccggcgagtctttcccctccctctctgtcccacgctctgcttctcctccctcacacgcgccgaggaggaagcgggcacgggagaagggcggaagcaggcggcgtccccggtgacggcggtccggagtagggcggacttcgccggcggtggtgttaacgaccaaatttgataagatatgaaccaggttcgacattggaatcgaagcagattcggcaaagagatggattcgaagaacagagtgtgcatcggttgtgaagacatcggttggggtatgcatcggctgagatggatcggttagaggatggctgatgcaaccaatagagctgatatagctgatttcgatggagatagcttcgaggctgtttctggaatcaatcgatgtgcttaacaaggattgccacaatggagataaagctctcagataggcaattgtatctattaattaggatatcttatgtaatttctttagagatatgtttgggcaaaagtctgccgcaaagacttatagtgtcttagagtttgttagagatagtagtcgtgtccggcaatgacatattttgtatctcgggtataaatatgacccgaacccatgtaatcaaacaacacatgttcaataacactttcggcgcatcgccacccttttactttcgttctattttgacgagttcttgctttcgggttgagctgcatcgattcaatcttcaactagaggtaaacttgtcatgacggtttgcgttctcaggattagtgcttccatctttataacactctaatcttgtttatgtaattttttgagttatcatatatactttataatctctattagtttcgctatataacttgtcatcggctagtttttactgttagagagtagccgatagagttagatctcattattaatctagattataccgtatatctaccatctcttataggttttcatcatcttgtttagatcttacagttatctttatgcttaatgctgcatcggttgagtttgatctattaagtttatctataattgtgatatctagcctgttttatgatcatcaatagagatagtatcagagtttcagccgatcttacctgatttagttattcttatctcatatgcttgtttgttatgctaaatctgccctttatattaagatcttgttgcattgaagttatattaggtttattatttaatatatcttgcttgtctcaaatcttgatatagagtggtatcggagtattagccgatacatggtagatctatctgatcggctatgctataaacttctatataatctttgctttaatatatatttcgacttaagtaatttatactgtcttggcatgatgaccgatctatcccaatcacttagttcaagtatataccgaagtaaagattatatgttgttaatatctacagccgattgagtagatttagttttatcatttttattcattattgccgatcgagtcaaacatgacatcggctcgaagataaatgatatgtcattggcaactagccgatcggctatcatttatggatttaaccacggtttttcttattcttgttgattgcatgatcaaatcaactggcacgctcatgaacctaaaggcgagattttggacctgcaaaggagttaagcagatcttccaggccagtgtgtgtttttcacatcaacagacgactggcgcactggcgcggcggcgggaggcgtccccggtggcggcggctggcgcggtgtggcggcgagcagccggagcgtggggctgcagttccggcgccgccacaaccggatccagcggttcagcgttcgatctggccggggtcggcaagagtggacggctcaacgccgacgggcggctggcagcaggagcggacggcttctccacctcgccgatttcccccttccttttctctaccaaattactcaagaaatattgttggtttggtccgcatctgtggtggtttccttccttttctctaccaaattactcgagaaattttgttggtttggtccgcacctgtggtggtttgggagggaatttgttgtgcgtttggggggatttcagttcgtcgatgattccgttggagggtgatttggggttttctgtaggtggattcggcgcgagggcataaggcagtgaagaaacgctgcccacagcgcgcgtgcctcgcttttccctgtccgctcgcgccctcgccgcaacaaagtttcgcatagctcaggtaggggacgagaaacctagctaagggacgggccccgtcgccacgtcgacctgaatccgagctggcgcgacgaggtcccggtccagctcaccgcactgtgagaggcctaaagagctgtctactcttgagctgtccactcttgcatcacacttgctcctcctccagtacatcctctgcttcagaacgtgctcaacaaatatttaagcaccaacatcctctagtttggaagctgtgttcggaagccttggttgagaacccaacttctatgcatggaaaacggagcattccattagcacatgattaattaagtactattagctaatttttttaaaaaaaaaatggaacaatatgatttttttaagcaactttcgtatagaaacttttttaaaaaacacaccgtttagcggtttgaaaaacctgcataccgaaaacgagagagattaatgaaccctgagttcctctcaacactcaaggctgttgttggcccgatctttcggtgagttgtgataactacgatttgggagaaacgttgacgatccgactacaaccgtacgagacgttgtgttgcgccttagcgatcgatacacctctccgtgggttgctgatcttgccggtgcagataaaccctattcctgcaagcaaatcgaagaaacaagcaagaacaagataaaagcaatctgatattgcaaataggaatttaatacaaatgataagttggggttccaaagaacaagcagacggatggtctagccgacacgcgcgctgcaagcaagtagcaatggctaaactttaatctatcaaaaacccaagaaaccctgaaggggtacctaactatttatagaggtgggaggatgaccaagagggtccaagggtcatgctccaccagattggggcgcaccccacatgggccccacatgggccagggtcccaaacaaagttacaagcccattggcccaatacaggagacgcagcaccttgcttttgtgattgcggccaaacgagatagatttccgagatgaggctggatccgttggaaggaggacttcgagagctttccatcaagtactcacgggcccaaaacggagcacgtatgtagatttggcggccgtttgaagtcagcaatgtaacacgtggccgaatcagattgcagcacatggaggacttgatcgtgctccacctggctggggcgcaccccacatgggccccacctgggccggggtcccagacgaagttacaagcccataggcccattataggtgacgcagcaccttgttgcttcaattgcggctcaataagatggaattttgcaatgaggctggatccattggaaagaggactccaagagctttccatcaagtactcacgggccgaaaacggaggtcgtatgcagattcggcagccgtttgaagtcagcagtgtaataggtggccgaatcggattccagcacttggaggacttgatcttgatatcttcttgttgattcatgatgtgagcaatggtcgtatccatagtagccatggtcacatcatcctccccttcttcacagaaaaccgtcctcggtttttccatatggtgctcttcgcgcagtccactgaaaacaacctgtttcttgcaatcaaaacaagacaaactcgagacaatatgattagcagtaacatgtctctctagcttgcatattttatccggaactacaagatgttctaaatctgaacaaatgtaaactctatacaccaaaaatattcctctatcattatattcgccaaagatatgaaaaatagcattagttggacatggcaaatcagatttagcaaataatttctccttcaaattatcgagctcacaaaaatcatcaaactgaacatagcccaaagtatttaaagaagatagcaattcgcgttcctctacttcattagcaatgtgaacaacatgcttagaatcagcacacaaagaaatagtagaactaacatgttcattcactagttgtggcatggatataagtgaaacattatcacacaactcttctttatcacaaggaacagcaagtaaatcaacttgtgacaaaggcaactcagtaattgattccactaatggttgctctactatagcatgaaaagtggacaagtgtagctcaccttgagaatactcaccttcatttctctcagcaccatttaatttaccttgcgaactttcttcagataatgtagctgcatcagccttctcctcattcgcgagtgatggaaatgacatctcaaacatatcgttcttctcattttggagacttttctgaacttcctgcaaaacatcagtgataggaggcacaagcatatcttgttgctccattggattctccaaaattttgcgctcaacaatacaagcaagcatgaacaattggcctatatgattatatgtcacattaacaagcccagcctgaatattgaaattaagccctctgaaaaatctagtcattgtgttctcattagattcttgtaaaccactataagtgatacaaattttaaaatcatgaaagtactccctaacagttttgtcaccttgttttagatgttcccatttctcaaggagagcacgtctatagtatgaaaacacaaatctttttctcatcagtattttgcattcatcccaagtttcaagcttattccccacagtatgccaccaaaaagatgcagaaccggtacacttattactagcagccttaatcatttgagcattagaaaaatcatactcatcaaattgtttttctactgctagctcccaattaatgtatgcagcggaatcatactttccatcatagactggtaacttacatgcaacttgtgcaaaattatagtcatgtacctcatatgcatcacgtgaagaagtcgtcatatctcgtcgaaggtgtagatgttgacgttgagcatgaccatcttgtttccccttgcgcaatcctgccatggttagcagcaaacaagaaacatacacaagaatatacacgctcctatcaactactaggtactggcagctcaaatctcacacacacactcaagcttttaaccaagctcttacaagatcttaccaatgcaagtggaatggtgatgtacaccgactcaaccaagcaccccaatagaggttggatatatcgatgcctcggcaaacacttgccgtacggttgcaatcaaatctgtggagctctgggtaggcttaaatatgtagcaaaggaatagcaaatgctcaaatcagagaacgcaaagttgaataattgttcaaagtcaagtaccgtgctggtcctaggctagaacgtactagagacgcgagcctagacacaaacggtaccacaaaatagcaccagaaacaactcaagcacactctgatgtatgaagttcagctcaaacaaaacaatattttctcttttctttctttcttctttcttcttttctttttttttccttttcttttctgattttttttggtgcggctttttttttcttttttttttcacctttctgccttttttttctcactttttttcttattttttttaacaaaaactgactcaaggaccttaatgtaagattacagggactcaaacataaatataaaatttatagggactcaaatgtaaaagtctaaacccaaaattaaaattatacaaaaaatggaatgctgaatttatgccggttccgtttttccaaacagatctcaaaaccgacaccaaacaaaaattcgccaaggtgtttgacacaactcggaacggtggaagagagggagggagtcggactcggccaaaggggcgagtgggactcggccaggaggtggagtggatggcagccgaatttggtgtatgggataaaaaggaaactgatttttaaccaatccaatctactatatctttccaaaacaaacttgactacttccaaaatcagatatggtaattcaccttcctcctctcgtgcacgacacaggcacggccaaaacaaacacacacaaggatcggcaaactctagatgcaactcaagaactccaaaactaaccgatagaaacttctgaaaactacaaaaatagaaccgtggcagcgagccgattccgttttcgtaggtcccgacaacaacagagacacggtggcagcgacgactgtggtacaaaacgtgaccagaactcgagactctaaacgaactagacgctaagaccagcaacacgacgtgacgatgcaacacaaaattcaacaaagcaaaaactgaaaagaacaatgcaatggcacaatatggctaggtaaatgatacgaatttttttgtatggctattttctggttataggaagataaaaactcaccgagcaacgaaagctctgataccacctgatgaaccctgagttcctctcaacactcaaggctattgttggcccgatctttcggtgagttgtgataactacgatttgggagaaacgttgacgatccgactacaaccgtacgagacgttgtgttgcgccttagcgatcgatacacctctccgtgggttgctgatcttgccggtgcagataaaccctattcctgcaagcaaatcgaagaaacaagcaagaacaagataaaagcaatctgatattgcaaataggaatttaatacaaatgataagttggggttccaaagaacaagcagacggacggtctagccgacacgcgcgctgcaagcaagtagcaatggctaaactttaatctatcaaaaacccaagaaaccctgaaggggtacctaactatttatagaggtgggaggatgaccaagagggtccaagggtcatgctccaccagattggggcgcaccccacatgggccccacatgggccagggtcccaaacaaagttacaagcccattggcccaatacaggagacgcagcaccttgcttttgtgattgcggccaaacgagatagattttcgagatgaggctggatccgttggaaggaggacttcgagagcttt

SEQ ID NO: 8005 - DNA, 9567 bp, Oryza sativa
caaagcaatttacataaaaatgtactatattatactccctcaatctacttttgatagacatatttccaaatctgaaaaatttagttttgatagacatatttcaatccaaccacctatcctcttattgactttctcggatttaatgcgtgactctctattcttctacacatgattgtctattcttctacacatgattggctacatgggcattgagaaacgtaaatattaatgaatcgcgtgtttacaaggaataactagtagaatatttaaatggataataaatagaattacttattcttaggtcattgtgaagatgaaatatgactatagtaatgaatccatatatggattatcaatcctattagtatattattcataaaaaagttatattgtcatcaaataagacatgtaatggaaaaacatgaacgatcgagatacacgttactccctccattccaaattgatctacatataggtttttttaaggttattcctaaatgatctatatatatttatgtttattcattaagtctattcgttatttgtgcattggagtaaatggacattgatgcatgcatccatgcacataagggggtgtttgggagagaggggccaccccctaagtatatataacccacatgcaatatcttgatttgttattgactaggaaatagtggggatggtgcatacattgagtttgttgctcgagtaaatatagtatgagagagttattatttttttttgttttggtgcacctataaaataatcaatttggaatggagggagtatacaatattattatttgatctctatagcttttgtaaaatgtctaagggtatggtcttcattacacggtctatattaatttaacggaacatttagtggtacgctattagtccaagcggctagtcggagcagtaggagaaggtaagctagaatctagaaacaaatattcaatatcgatcaaaattaaaacaacccaaaatcgaggtagacgaaaaaagacatgatgatcgaacctgcaggagcgccgccgccgccgccggcgtcggcggccgtgcattcccagatctcctcagcaacgggaagatgtgctccatgatctcccggcggacctccgactcgagctcccattcctccgcctcctcccgcaggatccgctccattatcttctgcttcttcgcctgccgcagctcgtcgcgaccagccgccgacggtgaagacgactgccccagcgacacggccgaatcacccccgttgtagtctcccgtgcccccgccgtctgcgccacgatgcccatcgtctgatcaagaaaggaaacgataccaaaaaaaaagacgcagatagcgagatcgatcgatcgatcgagaataattaattaagtaaccttcgttggccgggagcacacgggcggatccagagctcgccgtgggcggcggcggcgggggaggggaggaccggctgcggtcgtcgccgtcgcggtaccggaactccatggcggtgcgggtgcgggtgcgggtgcgggttctaccggggttttgcgggatgcgaagcgcgtgagcgctcggggtgcgtacttatcgtacgaggaggagtagggggatcgaaacggctcgcacgcggacgatctgatcccgttcaattccatcttactttttgggccttccctaatttcttttggaaaaaaaagtacaccgaagtttcccaactcatgtctgatgtgaccatagctactatggatacgaccattgctcacatcatgaatcaacaagaagatatcaagatcaagtcctccaagtgctggaatccgattcggccacctactacactgctgacttcaaacggctgccgaatctgcatacgacctccgttttcggcccgtgagtacttgatggaaagctcttggagtcctctttccaatggatccagcctcattgcaaaattccatcttattgagccgcaattgaagcaacaaggtgctgcgtcacctataatgggcctatgggcttgtaacttcgtctgggaccccggcccaggtggggcccatgtggggtgcgccccagccaggtggagcacgatcaagtcctccatgtgctgcaatctgattcggccacgtgttacattgctgacttcaaacggccgccaaatctacatacgtgctccgttttgggcccgtgagtacttgatggaaagctctcgaagtcctccttccaacggatccagcctcatctcggaaatctatctcgtttggccgcaatcacaaaagcaaggtgctgcgtctcctgtattgggccaatgggcttgtaactttgtttgggaccctggcccatgtggggcccatgtggggtgcgccccaatctggtggagcatgacccttggaccctcttggtcatcctcccacctctataaatagttaggtaccccttcagggtttcttgggtttttgatagattaaagtttagccattgctacttgcttgcagcgcgcgtgtcggctagaccgtccgtctgcttgttctttggaaccccaacttatcatttgtattaaattcctatttgcaatatcagattgcttttatcttgttcttgcttgtttcttcgatttgcttgcaggaatagggtttatctgcaccggcaagatcagcaacccacggagaggtgtatcgatcgctaaggcgcaacacaacgtctcgtacggttgtagtcggatcgtcaacgtttctcccaaatcgtagttatcacaactcaccgaaagatcgggccaacaacagccttgagtgttgagaggaactcagggttcattaatctctctcgttttcggtatgcaggtttttcaaaccgctaaacggtgtgttttttaaaaaagtttctatacgaaagttgcttaaaaaaatcatattgttccattttttttttaaaaaaattagctaatagtacttaattaatcatgtgctaatggaatgctccgttttccatgcatagaagttgggttctcaaccaaggcttccgaacacagcttccaaactagaggatgttggtgcttaaatatttgttgagcacgttctgaagcagaggatgtactggaggaggagcaagtgtgatgcaagagtggacagctcaagagtagacagctctttaggcctctcacagtgcggtgagctggaccgggacctcgtcgcgccagctcggattcaggtcgacgtggcgacggggcccgtcccttagctaggtttctcgtcccctacctgagctatgcgaaactttgttgcggcgagggcgcgagcggacagggaaaagcgaggcacgcgcgctgtgggcagcgtttcttcactgccttatgccctcgcgccgaatccacctacagaaaaccccaaatcaccctccaacggaatcatcgacgaactgaaatccccccaaacgcacaacaaattccctcccaaaccaccacaggtgcggaccaaaccaacaaaatttctcgagtaatttggtagagaaaaggaaggaaaccaccacagatgcggaccaaaccaacaatatttcttgagtaatttggtagagaaaaggaagggggaaatcggcgaggtggagaagccgtccgctcctgctgccagccgcccgtcggcgttgagccgtccactcttgccgaccccggccagatcgaacgctgaaccgctggatccggttgtggcggcgccggaactgcagccccacgctccggctgctcgccgccacaccgcgccagccgccgccaccggggacgcctcccgccgccgcgccagtgcgccagtcgtctgttgatgtgaaaaacacacactggcctggaagatctgcttaactcctttgcaggtccaaaatctcgcctttaggttcatgagcgtgccagttgatttgatcatgcaatcaacaagaataagaaaaaccgtggttaaatccataaatgatagccgatcggctagttgccaatgacatatcatttatcttcgagccgatgtcatgtttgactcgatcggcaataatgaataaaaatgataaaactaaatctactcaatcggctgtagatattaacaacatataatctttacttcggtatatacttgaactaagtgattgggatagatcggtcatcatgccaagacagtataaattacttaagtcgaaatatatattaaagcaaagattatatagaagtttatagcatagccgatcagatagatctaccatgtatcggctaatactccgataccactctatatcaagatttgagacaagcaagatatattaaataataaacctaatataacttcaatgcaacaagatcttaatataaagggcagatttagcataacaaacaagcatatgagataagaataactaaatcaggtaagatcggctgaaactctgatactatctctattgatgatcataaaacaggctagatatcacaattatagataaacttaatagatcaaactcaaccgatgcagcattaagcataaagataactgtaagatctaaacaagatgatgaaaacctataagagatggtagatatacggtataatctagattaataatgagatctaactctatcggctactctctaacagtaaaaactagccgatgacaagttatatagcgaaactaatagagattataaagtatatatgataactcaaaaaattacataaacaagattagagtgttataaagatggaagcactaatcctgagaacgcaaaccgtcatgacaagtttacctctagttgaagattgaatcgatgcagctcaacccgaaagcaagaactcgtcaaaatagaacgaaagtaaaagggtggcgatgcgccgaaagtgttattgaacatgtgttgtttgattacatgggttcgggtcatatttatacccgagatacaaaatatgtcattgccggacacgactactatctctaacaaactctaagacactataagtctttgcggcagacttttgcccaaacatatctctaaagaaattacataagatatcctaattaatagatacaattgcctatctgagagctttatctccattgtggcaatccttgttaagcacatcgattgattccagaaacagcctcgaagctatctccatcgaaatcagctatatcagctctattggttgcatcagccatcctctaaccgatccatctcagccgatgcataccccaaccgatgtcttcacaaccgatgcacactctgttcttcgaatccatctctttgccgaatctgcttcgattccaatgtcgaacctggttcatatcttatcaaatttggtcgttaacaccaccgccggcgaagtccgccctactccggaccgccgtcaccggggacgccgcctgcttccgcccttctcccgtgcccgcttcctcctcggcgcgtgtgagggaggagaagcagagcgtgggacagagagggaggggaaagactcgccggtgcgcgcgtggtttcttgcgacgaggcggcgccgtggaccgcgccgtggcgtgggaggcgaggaggcacggtggcgtggcaggagaggaggaggcgcggcgatgcgggagagaggaggaggcggtcgcgccgaggagaggagaagaatactcgcgtgagtagcaggcgagggtaattgagagaaataaatgtgtggtaacacgtctagggtcacacccactgtgggcttggtacctttactagtgccttcatccaattaaaccatacatatatgggtgcttgcactatgaggtgggtgtttttggaccaaccttttgggctaggggtacgggcgacatagcttgcactgtgagaggccctactagtagcttgcttgtttgatgaatggatacatcatcaggcacttacacatgcattggtttttccgggttcccaacccctccttctcgtttttcgcacgcacgtttttcaaactgctaaacggtgcttttttaaaaatatttctatataaaagttgtttaaaaatcatattgttccttttttaataaaatagctaatacttaattaatcccgtgctaataaactaatccgttttccgtggtagagagtaccgttcccaaacgtgagtatcgaagacactctattggagtgttcggatgccccttttcctaacctctctctcgtttttcgcgtgcatactttttaaactgctaaacggcgtgttttttttcaaaaagtttcgatacaaaagttgcttaaaaaatcaaattaatctatttttaaaaaaagctaatacaaaattaatcacgcgctaatgaactactccgttttccgtgtggaaggatccgattgggatccatgaatagcgaacacaccctatggtagaagccgaagaaatctacccatcctagctagtactctcctagtactactacactgcatacatgtagggagagtctacactttctctagatttttacagataatggttgtactgcacattgacttttggtactagtatcaagtatggtagggagagttagggcctgtttagttccctggtaaatttttttatcctaccacatcaaacgtttgaatatatgcatagagtattaaatatagataaacaaataattaattacacagtttgcgtataaattgcgagacgaattttttaaacctaattagtccataatttgacaatgttgtgctacaataaacacataaacacagggccatgcagaagggcgtgcgacctgtgtgaccgtacagggtctccaaatttccagggcctcaaaaaatcagcccaaccagagaaggcccatgtattcgtgtgaggccagagcgccagaaccccgttcgagtacgcgcatatctccgcgtggcgacttcacatgcgtggcgcttcgtattctcgactccgagccccgaggcctcacggctttttgtattgtatttctttttcgtatctgtgacttattcagttcgtctcgagtctcgacgtctcgtctcttctgagcgccaggccgctagccggctcatctaatttcatattttcattcatctagcatatagcaacttagcaagcaaccaacaagcaaggcactaggcagcaagctagcaacagcaacgaacattctccattttcagtttgacagtttctgattataaaacaagagttcaaaaatgtactgttgttgatatatcgcatttgctctgcagtatatacattattttagctatatttggtacttgatttaggcctcacttagagccttgtacagggcctacaaatttgatggcacggccctgagtaaacatttgctaataatggattaatgatgcttaataaattcgtgtcgcagtttataggtggaatctataatttgtgttgttattagtctacatttaatacttcaaattagtgtccgtatatccgatgtgacacgctaaaacttttcactcctggatctaaacacagtcttagagagacatctacaaacctaccctataattcaccaactacactcctactagtaatatgcccgtgctacgctacgatgacataatattttagttaataaatcattaaatttgatgacagtaaaattgattttcttagaatcgatccaattaagcgatcatataaaaaaatatatttaagacaaaatgcaaaaatattatattgtctagaaaaaataattaagaacattcaccattatatatagtcactttaatacatattttaagacaacatatgtccacataaatagattgatgaagagctattccattaacatgtgggcataaacaagttggaaacatatcctatccacacaagttctcacttgtatacaccgtacataccaactaataaatatcaccaaaaaatctagaaaaaataatgcatgtactttcaatagtattatacttacgtgtaaaatcttaacctcaaattcattatattttatccgtcgaaaaaaatctaacagttttaacgttataattctatcaaaattttatcttttttttttgctctctatgtttttttgttcttcatcagtgtataaagaacatctgagggcagcaaggctgcgcagcaacattttctccttccaggaggtatggcctgaatgtttcagcaaggtctgcaaatacactgatgaagggcctaaatacttcctgagaaaaagtagttaactaggctattgttctaatttctctgccactaaattaattcaatcactaaaagtcaaacatgatttcttcaaattggaactaatttcaacaaaccggaaaagacagcatttctgaatctaacacctaacagtagagtattttctgaagatcagttcaggagcaatcaaatagttagtcccaaatcttgcatggattaggatcacatagatgatccatatagaaaattgacgatgggaaaactgggacggtcgttatagtaggtccgttatccgcaaatcgttagagacaatttaatttaaatgcaataaataaataaaaatcagaaattgcgagtccattacttccagaattcatacatttagatagaaattctgttaattacatctccgtagagaaaacccctgattaggaattccaacatgaaagaaaataaaattacatgagcgctaaaaggataaaaaggaaaatctatcctaaagctccagatgtcgcagctgtagaatcttctgtagatttccatttatatgtttatttcattttgggcgtccaagtattttagatgcccactaatttgttggtttttaatatcactgcgtgtatggtagcaaatttatacatagcttccttttttggcattgtgactttattttttcctatatgtagcacgcatatataaattgatgaattttcctgagcactcgcggggcgtaaccaaacgagtatttattttagcgccattattatcaacatgccacgggattttggtgcggcacacctgtattactactagcatggccttataccatcaagcgtaaccgaagtgggtatttgtttgatttatggtcgactatcacgatgtcgccacttgtcgtgcgtacatggttaatttgcaattggaaggaaaatgcacggccagagtatatggatgcatgcatgtgcgtatatcagattattttttatactgcactttatatatggtgcaacaagtatatatacactattttaagcaaatatatgtatgcagatgattttgagattataattttcactccacttgtattactactagcatggctcgaagccgtgaagcgtaaccgaagcgagtgttggttaattttatggccggccgtcatgactcggcgtagttcgtgatttatccaacattttgtagataaacagatggaatgagaaaatatatgcatgcgtacatctatttcctatctctaaccatggaaagaaaataaacaccattttattttaattcttgttagagaaatatggctgaacatatgtcaaaactagcatatgtgcatgctaattagtatgctcaattaattttgtttatcactatgcctgtatcactactagcacggctcgaagccatgaagcatgaccgaagcaa

SEQ ID NO: 8006 - DNA, 7191 bp, Oryza sativa
cggtagggtgtttaagagagttttcactaaaatctactcagctcttatcactttcttaatctaatttgtgttttcttgactgtcacgtgcttgaagaaaaatatcatataatccatccgtttcataatgtaagactttctagcattgtccacattcatatagattttaatgaatctagacatatatgtctagattcattaaaatctatatgaatgtgggcaatattagaaagtgttacattctaaaacggaggaagtagtaatttcttatatcccactctaagtttacaagtttacaacgatacttttaatttgcaagtcattgttatcttcatcttccacctccaaaacaccactattgattgaattagtgttcattggtgaagttgttgtcatttggtgattgggttgcagaaggagtcgtataagaaatcttttaaaaaatactagaatgctaacttgaggtgatcataatcctgattgcatctcatgattttttagaaaaatatatatctaggcgaattcttacaagcgaattcttacaataaatttcactttaaaccgtataaccgttgttgcaacgggcatattttccagtaaaattaaaaaaaattcgccctactaatatcgttgttattgttatgggccgaaatccatgggctggcaaatatactcgtggagaagatcgcccaaaaataacctaaaccgagcacttgaagcgcaaaacggcaaaacccaaaactcccctgccccatcaccgccgtctgcccgtcttcatccacccaaccatggccgccgccgccgccgccgattccacttcggcggtgccacccgccgtggtgtccgccgccgaggacaccctcgcggccgccgagtccgtcggggaccacctcgccgagatggtcgcggcggcgggcgaggaccccgacgccatcgccgagctcccgccgctgcgccgcgcgcgcgcgtttctcgccatggcgaaggccgccgcctccctcttcgcaggcaggcagctctcgcggtgacccccttcccgttatgactgcgtgacccgcatcgcttctgaccaattgtttttattactattattattattgttgcagtgcggcttaggtgttcgggagttgatccggatgaacaccctatcaagaaggagtttgtaagctctctctctctatatatatatatatacacctgcctagaatcctatctacttctacattgttctcacattctatagtagtagaaattcggtttcagatttgccaataagaacaaaagtttgggtgtatccttatataggtttctaatttatgttaacaatttctaattgggaatctttgtaccatgccatactattgtaaagaggagtcatggacttattttataccctgtttttagacaaaggcaaaccaccctgctttcatcccaagcaaataacgaggttcggcacagtagcatcagagaaaaggaaaaggaaatagctggttttaccagtgccctataaatcatagtaataactagtaagttcaatcttacaactaccattatcaaagcatatcacacagttaagtcacccctacagctgtctttaaagtggtggactgaaagctcatttagccagctcgtttgctcggctcacagcagccctgattatactcgtttatattccacaataaatcagtcgatgttaatttttgaaagtagactctcaaggagggattgattggactaggatggcgcaatctttattctttaaaggtgatatctcctgattatgctctggaggccgcgaaaccaaccagccataaatatatctcactcgaaagaaaccatgtagttttgcatgccttttcgatcttgtttgtactgcatgtatgctcgctccccttgcatccttccggttcccacatgcaaaatcacatacaaaaactgtttgcaccatagctcagtggaaagatgtcgtgacggtggataccctcctgtggcatgtgcacaagaattgaaagaaatactcaaataatcagtaggataatttgggatgtatcagtctgatcgttatctcatttctaaatttgctacaatgataataaatcaaaataagtaaaacacggtgcaaaactaagaaaagtaaagttgatccaatatactccctgatctttgaactcttgtagccattattgccctttgccctttgattacttccatattattttgcctttcttgatgtagcaattacctccagttttgcgtattggaatttagaaagaatgtgtacgataagttcctgcctgaggaaaaggctgctttcaatttccatgatcccttgccttatagattgtaaaagaaacagctgcaaaagaaaatagtgtaagatgataaacagattcacccccatttttcattcacatatataaggtgctagaggtttggcatggccgtgaatcccaagcaactagtgagcatattacataaaacttacacaatagaacactaaaatagcaggcacaagagcccccaagtacagttaaccacccaatgcaccatttaatgcataatcggggtggctacctggcgcctagcacctagggccaagttttgaacacttcattcacttatacaaaagatgtcaaatagaagttgacatcctgtcccactcgagagcctctatagtaatccagacaaaggtagctaagagacaggatgacaaaatattaataccatcctccatacctgaatacagcatgcactttcctggccacaaaaggaacaaacttacttccatgggatattgctttaacaaatcccttcattcttgtgtttctcacacaccaaaccaatttttttttcagtatagccatctaggaattaattttactgatctgtccagggtgtagtgagccacatcctgttcctgatcaagctgatcaggggataacaagatgcaaaagctaacactataatatactggattttcactttgtgcacttcttcccaaacttgtgtgcctcccataggatcagtgctgaataagtttttcccttgctggtattgtgtacttccttttatcctatctaatatctgaagcaacttaactgagctaccttctataatcccatatcctgatattcatacttagtaggcacaaattgatgatcctgatatttaagactaccactctacaatcctttggcagcttgaacattaaatcatccatgctctatgctcatttcacgaattgttatccagtttttcacctgattttggctagagcttgtaggtttgtaattccactcgtttatcctaacttctaatatggttttataactttggtgttcctggggcagtaatgcagttaaagattgaagtcttggatagggaagatttgagtttattcttagttagaaattttgcatggaacaatctaaaatggaaaatccaatcaatatgttttttcaattccaatgctgatactgtcagatgtttagttccacttctgcttcatttatttcaggagaggttaagcttgtgggaggaaaagttaaatcgatttgaggactgggacaagggtacttgacaactcattaactattggtggaaatatcatatctatgcacacgtataccaaattactgcttgtgttctgaattgcagcaccattgcgcccaaccactacagtgaatacacaggcagcagcaaggttcattggtcactcattgccccatttgacaactggtacataattgtttattgaaaagttttacgaacggtttggttttttatggtgtagtgttgaggtttcatttgctatttcagatcagaagaggagcatgcaggcaatcagtagaggagaaggagggagttactctgggaacaagagaaaaccacaaccaccgcggccaaataagaagtctgttcgtgctgccacggaagaattccttgcaaaagcagctctggagcttagtgggcataatgatagcaaggtgaagggccctattaggctcctctctgatgaagatgaggactaagattgtgtattgttggttttatccagaggtattccttgctgcttccttgcattcatgatttctatatcattgcaatcaaggtctgaactggcttggataagggtccagagccctatagggcactagccctctagtagctctagcagggtctccactaagagaagctctgaggcttagggctaactttagagatttgattgattgattaataatagagtacatactaccacaccaaaggaaataatgtctaaaattgtagaaaccaacccaatctctatctctaatttactatcagagctcatttatttcctaactagataatcgcctacctttaattgatgtttttcctaatctgttatgcctaacctgctgcatgggcctggcccatgtctataacatattgctccatagtgacaatatgatgtaatcacgatacttgcaacacttaaatgcccattgtttgttggctgaaccccattgaactagccaaaaccagcagtcaagccgcggtcagactggcagatgtgagtccttttagccttttaatttggggtgcatttttagactttgtaatactagctccactttatcgctgattaggtgcttttgcctgaattttttttcctccaaatgaagttgattttggacttgagatttggtggtaatgtagttcatgcctctctagtaaatttttcatgaatttagagaacttttaggtcccgttttcatgtattttcacttatttgatggttttcaccagatatttccccgtataaccaatgggcccagttctgacttaatccattttgttattgaagggcatgtttaaaccgaatgttatcttcttgctttaataactgatcaggatttcttatgcacaactgctcaaagctaccaccaaactagttagcctcaagaatacccatatagcaccctagattagcattgagctgagtccttaaactattcctcaacacctaaaattaaaaatgttgctactaaatttgagtagaaatctccccgaaataaagcaattaatgggatagcaaatcttgataaccccatagctggtcacattacaatactataacagtaacaataaggtgccggtaataatagaaaatagaaccatgttctgcacaaaccgcaaagtacccacatgctaccaataactgaattccagctgaactgagctaaaacattaaaaatataattatgataaccaaacatgataactaaacttaatattcatggaacactgtgtgtatggtactaaccaagggcatacatacagtagtagcataatgttgcccctttgtttggcagaaattatcaaactcttctgtatttccagacttcttttaatcagggtccgcacatttcacaggtccccaaccaaataagtccatatccttccttggttcctgctactttcttgcatttatttctgctacatttcttggttttgcttctaactctaccttgaaactccacagaggatctttttcccatgtttggtgctgctcatctagtgcatatttcctccgagcctacaacccaccttttgtgtctcaagtctacattgtattgctttcaaacctctcctgcaacttcagtgctccaagagtggaatccttcattccttcctcaagatttctttccttcttttatttagatttttcctggcccttcatcttagttacttgtgcttacatctttacctgcacaagctagccattggaattagatgcaatcatcaaattaaatattgggcacaacaaaaaatgccagaacctataagtttataaactgtattcactgctagccatgcaattactccagacatacacgtcaactattctcacaatctcaatgcaaacacttctctatacattccactctactgtgtgatttcagtccctcacttctacttgataaagacgacagcatgatgcaggtagaggtttgagacaacagctcaacgtgctagggtaataatccttttatgacaggatcattgatctaactaaactgagcggatacatttcagtggctgtaactggggtgaaaaaaatgatactataactatgccactcaagatactagtactgtagaaagtttctgttaagcataatgctagagaagggcaacttgaagcaactcacatttttgttatttgacattttagacttgtcattgtcaaggctagcttgagattagtttttttttttaacacttccgataaattgtggctatccttttaaatgcctcaattgtttgtttcacttccatgcagatgaaatactagctgcctacttcaaagaatggataaagtgcggtataacttactctgcaatcaagaaaattttgcttagttgtgctgtggtgtacataccaaggcagaatgaagtagacaagctagatgtaaactgtaatagttattatctttgccttgagagcaatattgtagtcctgtctgaatgtcattttcagaaggaaattttgactgtttttagttaaagcactgaccctcgaatggcagttgagtccattgctgaagatttgatctagtggtgtttgagactgtttaacatcgccgtagcgtgaatgttgccaaagtagtctgcttgtccagttcctgtgagtgcttgtatgatgtattatatttttctttagtgaacagccttttacgtgtcacaacttttttttttgtgtgtttggcttgagcactgtcatgatcagaagacagcgtcatccgcccttggtacaggtttttttttttctcttcggtaacctattttctagggaattatttttattctttaaaccttttaaattttaaaaataaacatttccaaaacttattttcaaaatctaaatcttttggtcacgccagctgaactgtcatagcaaaacaatattgtcatataggtcttattgatgtgacagcattacttggccatgttgatctcgctagtgtgacaacgttatttggcacaccattctcgctgatgtagtatggtgtgtaaaggctcagattttgaaaataagttttgaaagggtttatttttaaataaaaaattaaaatggttaaaaaataaaaaatcttttctaggtaaggctagcgtgggattttttttattttcctggatccaataaat

SEQ ID NO: 8007 - DNA, 19104 bp, Oryza sativa
caagcactttgaacataaggcggaccatcgtacgaagcctaaacatcgcagcgggaaaatagtgtttgctatggttaaagatcttaaagtagtgtttggaaaggggcctggaagcagcctatagagagcaaagatggtcacgcggcgatgtggaaaaagaactctatattttgggagtttccctattgggaattcttggacgtccgccacgcaattgacgtgacgcatctcactaagaacctttgcgtaaaccttcttggcttcctaggtgtatatggaaagtcgaaagatacactggaagcacgtaatgttctgaagcatatggaacaacgcggcgaccttcacccggaaccaaaggagaaaggaagccattacttgagtccagccagctacactcttagcaaggcatagaaggaaagtatgtttgaatgcttagagagtataaaggtatcgtctagatactccacgaatatcaagcgaataataagcacgaaggagaagaagttcacaaacctaaagtctcatgactgtcacgtgttgatgacacaactgctaccagttgtaataaggggtatccttctagacaatgtccgggcaacaataacaaaactatgtgcattcatgaatgcaatttcgcagaaggtcatcgatccggatatattagaagcccttcagaatgatgtggtgcaattccaccttcattttttaatataatgacgcatctgctttgtcaccttgtcaaagagatcagtattctcgggcctatgtacctacagaacatgttttctttcgagaggtacatgggtgttttgaagaagtatgttcgtagccgtgctcgtccagaggcaagcttcgctaaggggtatggaacagaggaggtcatcgaattttgcgtagaatttattgaagaccttcgtccaattggggtacctgaatcgcgccatgaagggagactacggggaaagggaactctcggaaggaaagcaataatgacggtagacaacaatttattccgtaaagcctatttcacagttctgcaacaatcttcattggtagctccttacatcgaggagcacttggctctagttcgggccagaaacatcggtcagtccgatgcatggattacacggcatcacattgatactttccccgcgttgctacgacaacatctcatgggtaacgagacgatcaaccaacaactggtcttcctggcaaggggaccatctgggtcgatcgcgacattccagggatatgagatcaatgggtacacattctacacgagagcccaagacatgaagagcacgaaccaaaacagcgctgttcgtatcgatgccatgggacacgatggaacaactggcatgtattacggtgccattgaggacatatgggagcttgagtatggtcctctcaaggtccctctgttccggtgccaatgggttaggttgactggtggaggcgtaatgattgatgacagtgggatgacaacggttgaccttaacaaggttggatactcggacgaaccttttgtccttgccaatgatgtaacgcaagtcttttacgtgaaggacatgtcaagcaaaggaaagaagggcagagggcctgacgagccgaagcgtcacgtggttctctcaggcaaaagaaaaatcgtcggagttgaggacaagactgacgaggattacgatcagtttgatgggcaaccccctttcacggtgacgattgaccctagcatcctcctatcaaatgaagacaccccttactcacgtagcgatcacaaggaggaaacaatagtgaggagaaagtacgtgcggtcaaccgtcaccgccgatgtattgccgtaattattgtgtacacgatgtaaactattttggatgtattgattatccatataaatcaatttttgtatggcatatgttaactacgtacgattattagaggttttaacaattttaaatcatgtaattgctagttatatgcgataattagaatttttaaaagtcttaaatcatgcaggtggcatttacatatgatacttagagtttttaacaattttaaatcatgtatatgctagttatgtgccataattagaatttttaaaagttttaagtcatgcatgtggcatttacatatgttacttagagtttttaacagttttaaatcatgcatatgctagttatatgcgataattaggatttttaaaagttttaaatcatgcttgtggcatttacatatgttaattagaatttttaacaattaatttaatatcattcatatgctaattatatatgattattcaaatttttattaattttaaatcatgcatgtcgtatgtatttacatatgttaattagagtttttaacaattaatttaatatcattcatatgctaattatataagattattagaatttttattaattttaaatgatgcatgtcgtatgtatatacatatgttaattacaatttttaacaatttaatatcattcatatgctaagtatatatgattattagaatttttattaattttaaatcatatatttgcttattacgttttatcgacttaatttactacagacaacaataatttttcgaagtaattgtcattaatttttcgactttaaataattttaatgcattattttctattttagaaacacatatgtaatggaaattaatattcagtccgcttatcagtagtcccggttcctaaccttaaccgagtttaaaaagaatttggaaatagcaggaaaatatctttagtcccgattgatgagaacaacccggagtaaagatatctttattcccggttgttgagaacaaccgggactcttatctttagtcccggttgttctcaacaaccgggagtaaagatatttttatctttactcccggttgttctcatcaaccgggactaaagatctaggggtatatatattcccgatacgcgccctcatcttctccaccaacacttagaagttttttccccgatcgatctctctcggcttctccttcgccgccactgcctagggcatccccgcaccgacgccgccgtcgtatctcgccgtcgtctcgtgcgcgtcgtcgtcgccacctccgtcgccgcctccccctctctctctctctcttcgatctcgatctctctctctctcccgaaaccgccgccggccgcctcgttgccgacgccaccgcctacgtcgtcatggccgaacacgactccgccgcgccgacgatgccgaccccgaccttgatgcggctggcaccggcgacgctgtcgccctcgcagtgccgacgaagccgcgccacaacgccgcggcggcacgacacgctgggacgccacgacgccgccgcggcatggcaccgccgcgccgccacgccgccgccgcgcaacgccgccgccacgccgcgcgcgtcgccgtcgccgcgcaacgccgccgccgcgccacgcgccacgccgatgccgtgccgccacgccgccgccgctccactgccgccacgtgaacgaacgaacgtgaacaagaacgtgaacgtgaacgaacgaacgtgaacgtgaacgtgaacgagaacgtgaacgagaacgtgaatgaacgaacgaacgtgaacgaacgaacgtgaacgttaatgaacgtgaacttaacgttgtatttgaacgtacgtaaacaaacgaacgtgcgtgaacgaaaagtgaacttaacaagaacgcgaacattacttaacgtacgttaacgtggacgcacgtgaacgaacgaacgtaggtgaatgatatacgtgaacttaacaagaacgcgaacgtgaacgatcgtgaacgaaacgtgaacttaacgagaatgcgaacgtgaaatacaatatatgttacttcgcgtttatcctaatacatctttttgtatgttgcagaaaagacgttgtcgtcgtcgtccctcaagccggagtggtagctagccctcgaaggaattcgcgcaggcaagtgatgtaaatatatgattgttagatttttaatgcaattaagactattagatttaatatacgacacttagacttagcattataattagagttttaatacaatattatttgagttttaatataagattattagatttgtaattagacttagcatataagattatgtagggttctaatatatgactatttgagttttagtataagattatttgagttttaatataagattattatatttgtaattagacttagtatataattattgactagttagggtcctaatatacgtcacttaggcttggcatagttgactattacagttttaatacaatatttgagttttcgtataagattattatagttttaatataagattattagatttgtaattagacttagcatatacgacagttagacttagcatatatgacttagcatatatgattgttagcatataagattgttaaagcaaaaatgtctcatgacttagcaactatttcttgtatgaacagatggctgaccacgatgaggaatagatattgtacgatacaatcgcggagggaagcagctagtactggaacgaagaagaggggaacgaggatccaaaccagtacttgaacgaggaagggaacatggagagggatgcggaggggaaccaggaggggcacatggagagggatgtggaggggaaccaggaggaggaggctagtggaagtcaaccctccgctggatagaagaggacacgtgggcaacgaggtgccgtgaagaagcttgagggttggcacatcataacggaagtggacgaagacgaccgacctagtgtcccggcggaagcagccaagaactacgtacgtcacagcagttgggttatgcgggataacatgcctgtcagtacggtgtactggcgcagaacaaggacacgcagagatcatgagagctttgtcccagattcggagaaagagatgctatggaccacaatgctcgagacattcacccttcccatgggtacagaggacaaagtgaaaaggtggactctaaagaaaatgacagaacagtttcagagcttcaagggagatctataccagaaatacatcctgaaggggcagacaccgaacttcgacacattcccaaagctaagggatcactgggacgagttcgttgcatataagataggtcaacaagggcaggcgatcatggaaagaaacaaagaaaataccaccaagaagaagtaccatcaccacttggggtcaggcggctatagcgtcgcgatgccgaagtgggaggagatgaaggcaagcttgcttgagaggggtatcgaaccggctaccgctaattggccagatcgatcgaagttttggtactatgctcacggtggaacactcaacccagttgatggctccttggtcttcagcgatcagatacgcgaggctgcgcatcgactaacggacgcagtggaagcctcttctcagggcatgttccgacccgacagagagaaggacgagctgtcactcgccctgcagactccagagcatccaggacgaacacgagggaaaggggtgattccttggaagattgggttcaaggaggacatccacacgtacaggagtcagatgaggagcaagagagataccgaggcgaagattgcagatcttgagtacagggtatcgagctacgagctcagcatgcaagaggaggtggcaagtaaggttgatgaacgcatggccgcacatcggtcccatgatccccagccgaccattcctcctgcaatgatgagcccttcaggaaatcgtagcagctgcgcctcaacagggcaggtaggatcacaaagcatggacgccatgcaaacccaggacgaaaccacctgccccgttgatgacatcactcagcggacaccatgtgagctgcatattccctttaagaacttatcaataaaggtaggctcataatttatatatttttgatttgtccattccgcaagttgctgcttatatatgttgattactaataaataacctctcaccacgtgaaggtggcgtcgggcatggccatcccaacagacccttcaggtacttaccactgcaggccgattctagcaggatactccaaggtcgaagttgagttggtcgaaggtgcgtacgaggacctcgagttggattaccctagaggagacggcgagacgcatctacgagacacaagccacgccattatactatggcgcaagcggtacatcatcctccctaggcgacaagcggcgtctcgtgcaccatctcctccggctctgccatctcctcctcaggctcttgcaccgtctcctcctcatgctcctgcaccgtctccacctcaggctcctgcaccgactcctcctcaggttcctgcaccgactcctccttaagctcctacaccaactcctccgcatgctcctcgtccggcaccttccaagtcaagggccccccaagctccaccgcctgcccccacaagggcaacgaagaaggcgaaagttgacaccgccaagaacaaggacccggggtacgattgtacgcaagaggagcttgacgcttatgtggcattagaagtcaggagacaattgaagcctcgaagtccagaaaagaagattcctatagacccgagtgtcatgaacttcttcagggatatgtctgcacctgccaaggaggccataaagctatcggactatgagcgaacactcaagaaagcatcttctagaaagtccaaaccagtccctcagcttggagagcaaccaaatcaggagatcgagccgttggtgaccggtgaagattttggaatacaagaatttattaatgacactaggctaactacggatcaatttctacgaggcgcaccaatcgaaaaggcggaagtgaaatacatgtacgaactcggtaaattgcttatcaagcctgagcagctgcagtctctacccacacaaatgtacaagttccatcaactgtacatggagatgagcgccaccggtagagagatgatcggagcaaggatcagggacacggacttcacatatatttttgaataagatgaacggtcaaacatgtttaaaaaagtcaacgacgtcacatatttagggacgaagggagtatttcggtatgggccacgtgatctcatcggcaacaagagccatcatcaagtcaacagcatcaaatatttagggacggagggagtatttcggtatgggccacgtgatctcgtcagcagcgagagccatcatctcattgttgcgcccccaatcctttttcctcttctcatcgtttaattaactggtggtaagagctataatgggtttgccttatgtatacacaaatgaatagagagcctagctaacaacaaaatgttaataggtaaaaatcgaatgctaaaaaatagatatgtaacttcagtgaatgtctacttactatgataaacacaccttaaaaaatagggaacaatcgcaaaaagtttactttagtcgtggaagttatacaactaatttaaggcttcagttgtaaaaactgcataacaaatttaggattataatcattgtttgttatacgataaatttataaagcttctgttgtaaaaattgtatgataaatttaggattataatcattattaatggcatatattctaataagtgcgaacatgttatagtttatttataataactagcaatgatgcccgtgcgttgcaacgggtaaaggtaattttaatcatgtatactggtgggaaaaaaaataaaggaatcataataataataataatattaatgaaataaaattgcagtgacctttggtcaaaaagataaaaatatataattaattttccattaattccattagctaaaaataatataatacgaagtaggaaagttattctcaaattttagcaattttcaaaaagcttaaatagagcaaactaattatataaatgaaaacaaatttaatcacctaaataaaacaattagacctgtaattgaaaatctgttgtcagttcagttaaacatgagcctgcgggtgtgtatggtatatatctctcactcgtatgtcgtggtctttttttttgacatagaaaaaatgcccatgggttgcgacgggtaattaaaattataacaaatataaaaatattatatgattaaggtttagttttacatgatatgaggtctttaagaaaatatatttataatgaaataaaaaagttcagctgaagtgacctaaagtgaacttgttccatacggagcgtacacatggtcaatgaggcggcccaatagtgtgggcggcctaggaatagaatcggggaggaacaacttaagcgacctaaagtgaacttattccgtgtgggcggcctaggaatggcgttcggcctgacgtgggagaagccagagctgtctgatctgatagacggtcatcccgacctatataaaagttcaacagcccaaaccctaaccctaaaatcatttcccctcccccctctctctcaaaacaatgtggcggcggcccgacataccgacatccctgcgacggcggtggcggttcagcagcgacggcgacaccctccccttccggcgtcagcgttttcttagtgttcttgaatctgatattgtattcttgcagtagtgttttctttagaatttaagtccaaatttgatgcggtctctcattttttttctttcttttctttttttattttttgccatcggaaagggattaaagcgggatcaatcgcacgtgcgatagcatttctataacccataagccatacaaatttttttaattaggtatatgtagatattgaatcggactttcctttttttttcatttttttgcccttttttggttactacggatgtcagaaacatctttaattttttttaccacgtcacgtataatcagattcgatttttttcgccgatttctttttcacgctttttttcacggatggacaacggaaacactttttaatttttaagtagtagagatagagatagacatacacatagagatagagaaagagaaacggaaaacttttttcgcaacttttttttttggaatcggacagaaaaaaattttacgcttgttttttaccgcgtcgatggaatcggattcgatttgtttttttaccacgccgtgtcacatataataggattcgattttctttggaatcggacatatacttttttctttttggcccatttctttaccgcgtcgacggagtcggattcgtttattttttttccttttttcatccttatttaccgtgtagaactagtcagattagtttcttttttttcctttatttcgcccctaatcggacttattttttttctttttttttccggtttttttcccttctttcgcccgttttgatcggactttgtttttttttcacacggtttttttcgtccgcggattttttttgtttcgtccttttttttatcggacatagttttttcacccggtttttttcgcacggtttttttctcccacggttttttgacggacgatggaagcacctcttattttttaagtatatatataataataaatagagatagagatagagatagagatagagaattgttacttcatttttaaaataccgtacacttcgtcctggtgtgatgatctgtcgtagctaaattttagtgctgggtctgccagtgaagatctggaatgccaaaatcaaatattacccgacagatttgtcgaactgaaaaatagggcatgaaatctttatggcaacttgaaaattttgatcgatgaccaaacttacgtggcaacctaaaaaaatgtatgatcgatgtatgctttcattgtttctttttcattacatggaaatcttacaaaaatgtatgatcgatgtatggtttaatgaattcttttttttattgttggtatgattttaattcgatcatccacatattttggttgtttgattcagattataaaatattatcgtagtgttagtacgggcatgccactagtactacttaagtatcaaacatcagtgcccctccacggtagggcattttttttctaaaataactcaaaattattggactgttagtccaatctaccctatatttgaaccaacaccgactggggtatttcctcgcaaaaaaagaaacaccaactggtgtattaattaatcaatttttgttagggccaaacgtttctgctgggcttcatctggatatatacgtgtattttttggggattaattcgtacacgatctactgctgttgtatcaggtgacccgtatctaggggtgaaaacggtacggaaacggacggaaacaatctttatcgttttcgtttccatatttttttcggaattggaattggaatcggaaaccccggaaacgaaaacggaaacgaatattatcgaaaccgaaaacggagtgaaaacgaaccggtgcggatacggtaacgaaaatttattggaataaaaaacccctcaaactgagcttcaaacttttgtcaagtccaattctaagtctcaacaaacaacaattcatcatacaacccaattatatgaaatcgtcttaacagcaaaatatattcttctataccttcatataatttgcataacaaatattttaaaaaaattacagcaaaacagaacagcaatatattcttctataccttcatataatttgcataacacccttgtataagatatatagtatacactattattcagtgctatactgctaatctgctatgagctatcactccatcatcagtacatagttcatcaattgtttcggtcatcacagaacagcaacacacatcaatccatcagtacagtacttggatcaatcacaaaacagctacttacatttgatgattccatcataaatctgcagcacaaaagaaatcaaatcaatggtttatgatcgtcggctcgtcgctgggctgctggctgctgccgctgggctgttggctattgccgctgggctgctgctgctgctgcgactgcgaggcgaggcgtcgtcggctccttggtgtggctgtggcgtcgtcgtcagtagtggtagtggcggtgaaacggcgggacggcgccgcggccgcgaaacggcactgcgaaacggcgggacagcgtcgcgagatggcggcggtacgagacggcgaagacggtgggggcgaggtcgcgaggagccgaggacggtggaccagcggtggcgcgggcgccgggcggtgggcgctagcggtgggtggagcgcgatgctccaccgccggcttgcggtctcgcaaagtcgcgatgccgtgtggctgtctctctcctgtagggttagccgctatttggatagatgccgcgatttgggttgggcttaaaacttggggacgagttatagactattgattctatgggtctttttaacttcggaaattccgataatttttccggaatttttccgattcgattccgtttccgagaaaatatttccgttttcaattccgtttccgagacattccgaaaaaattccgaccggctgattccgtttccgaaaacaggcccagaatccggaaagtttccgtaccgttttcacccctacccgtatcggatatttaacagatcaatcactgttatatccagattaattccacgacgacccaccatacatacgtgccgcgcgccgccggccggcgcgcatgggcaaactaagacgcgtcggcggcgagggaaacgacctaatcagcgagctcaacgatgacgtcctcgactccctacccaccatggccgacgtcgtgcgcgcgggcgcggcgtcgcggcggtggcgccacctctcgacgcgcgttccttccctgcgcttcggcttcaccgaggacggcgtcgacgcgaagccgaagcggcgcgagaaattcgaccggttcgtcgccttcgtgaaccacgtcctcgacgcgcgcgccgccagcgccggcatcgagcagctggcgatctccatccaactgtatgaccgcggcgccgcgcatgccgtcgccgcgtggattcggtacgccatgcggcagcggcacgcggtgaaatctctcgctctggatcttcacctgccggaggatcccaggttcgcggacgataacaccatagatctggacgatctttcgatggtttccaggagactggagaccatgacgctgtcgttagcctatgtaagtctccggctccccgctgctgccaccgccaccgccgtggtgttcgactctcttgtggacctttcgttcaaggggatacggctcgtcggcgccggagccggagccgatagcagccgcctactcagccggctcgtgttgtccgcggctccggaagctacggctggtgagcgtagtcgggctgagatcgagcgctgtggctcgacgccgacgttcgctgcaacagttccctaggaaccgggcgtttggtgtgcttgagctcaacacgccgaatcttcgctccctcaagatgtgctgttacgcccctggaacattgagaatctcggcgccgaggctggaggagttgagatcctccaacaacgtgatagacatgaggtggcaatgcgtagagcaactcgacgttggtgacctgtcgtgcgtgcggggactcagggagatcgacctgagctctcgtgggcaccccgtccgcgacgccggcattaacgatggccccattcatctcctgcggcgttgtactgccatcgaaagtcttggtgttcgccttgtttctccagataaggtgtactccctccgtcctaaaataaaccgattcctaggacggagtggttgtcccccaaaaaatcgattcttacccagaaaacgagacacatttaatatcttgcgtggtcatgggtggtccagaaggagccagaccatcgcagcttttcctttctctctgttcagacggtaacctttcctctcccaatctccctcttttcgcttctctctccctctgcctctgtcatcctcccactcaatctctcactccagctccaccctctttccgctcctatctgcagggacagcggcaaaagccgcggcgacggatgcggcggcgacgacgcgcggcgacggatgcggcagcgacggcgtgcggcggcacatggatgcagcggcgacgacggcggtgatggatggatgcggcggtgacggcggcggcggcggcgatggatggatgcgcgacggatggatgcggcggcggcggcggatgtaggatcccgattttatttttttttcctctctattcctagttcttctttgtttttcttcttgctattttttttcctctattcctggttcttctttgttcttgctattgttcttatatgtgaattcaaaccatttctttttcttagattagagagatgttccttccttgcggcaatgcatttcgttttttcttctcctctgagtactactccttcttctctaaagtactagtagtaaattaatgtgactgcagagattgggattgttgatggatgtagttaatgagggtacttcggtaatttcacatgaatcctaaactagccttggggatccaggaatcgattttatttgagacagagtgagtatatatgtgcacactccttggtttttattcccatatgttaataactagctaggttgcctgtgcaattacgcggctagcatccaaacaaaatcatatattttttaagtttgattttacttaaaatttattaaatagctatctcattgtcttaagactttgaaagaccaaaccttatcatccagtgtttctaattatatagttttttaaagtcacatcagttgctaccccttatgtcatcttctactttatttgcttggtcgatctaccactatttctattcattctccttggaacctttaaaaattagatattatagtttttagagtttattgtaacgttgggtttcatttttataatttctagacgtctcgtcaaacgttgccattatactcctctatggcatgtccactgtctcttctctttaatgtcattgagattttaaaaatctaacataattatcgtttgggttcatttttactttcacaagtcctgccaaactcgctcgctgcctcccttctttattgtcattgagattttaaaatcgaacataattatcatttttattactttttagaagtttcgaacctttaaaaattggaccttgtagtttttagagtttattgtcttgttgagtttcattttttttataatttttagaagccttgtcaaacgatgccattatgctcctttacggcccgtccaccgcctactctttattgtcatcgtgattctaaaaatcaaacataactatcgttggaattcattttttattttctagaagtccagtcaaccatcggtggctctgcaactatactcctatacaccccgcccggtgcttctcctttttattgtcattgagagtttaaaaatcgaatatgattatcaatgcggtttattttttttactttctataagtcccagtaaccgtcttgctcatttgcttcacagcttgcttgtcgtccctccttttaattgtcgttaggattatatttggtgttttattaacagtttttatatgtcatatcaaccgccaccactctactcctttataggcatgttacttaatttatctcgtcatatgttttagatggtcttttctttcaatagtctttatttttatcacaaattttagttatttataaattgtattcttaattgaaatcttatttttctttttctaatttcataatttatttttcttcaaattttaattaatattgtattgtgttcttttaatatttttactttttatttttaatttcagttgtttcaaaattttattcctacttgaactccctattaagttttttaattttggatattatattattttttatgaatagtaattcatctcatattgggttcttatatggattcttctttcaatattgcttatttttaattccgaatttctgctaattttaaattctattcctacttgaactcttcttttattttttttcgctaattttggattttattttttattcctaattttaattaatctcgtattgggttcttatatggactcttcttttaatatttcatatttttaatttcgtatttcagctattttaaaattgtatttctacttggactatccttttcttttctaattttagattttattttatttttatttcgaattttgattaatctcatattgggttcttatatggaaacgtctttcaatattgcttatttttaatttcgaattttagctatttttaaattatatttctaatttgactctcctttttttttctaattttggattttattttgaatttcgattaatctcattcaatattgcttatttttaattccgaatttcagctatttttggattgtatttctattttaactctcatttttttttctttttctctgattaatgtgagaatttctagcccccacagcgaacgtggtgcctcctttcaaagctattttaacaatataaacatagatgcgagttatatccctcctatatgtatattatgagtacctttacgggggagtattttaactaacaatattgtcactagtagtagtcgtaatcttaagggttgatttatgagtagtacaactatatatctatagaaaaaaaatattttttactatgaatagttaacttgttgtggtagtataaataggaatgatcaattggattagaaaagactgtgaatggtataaaggggtacttatattataatgaccattgtaaaaaggggtacttatatattataatatatatccaagctataaactgtacatgcatatttttctatataggccgtgtttagttcgtgtaccaaaatttttttaaagtacacggacacacatttgatgtattaaacgtagactaataacaaaacaaattacagattccgtctgtaaactgcgagacgaatttattaagcctaattaattcatcattagcaaatgcttactataacatcacattatcaaatcatggcataattaggctcaaaagattcgtctcgcaatttacatgcaaactgtgcaattggtttttctctttttcccatttaatgccccatgcatctgtccaaacatgatgtgatgtttttggccaaaattttttggaatctaaacaaggccatatatatctttttcgaatgacattgattatcctctgtgcaggaatacgtagttatctgggatgcagaggcagaggaattgatagatgaagaggaagagaaagaagaggttgatgacatgatgaaagatgtaccacatttgcccggagtcacatctttgacaataagggattctaccctaaacgaacgtgctcttatgactggcgtaacatgtctccttgcacgatgtaactctctcagatactttcagctcaacatgaccagcccgattatggtgagttcctcttgcattctcgcattgatcgttgcgtccatttcgctcgcttagctttcttttcaggtttttaagtactgtgatgtgttaactgacaacaaaataatattagaagttatagaagttatggtatcacaacctcttagacgacagtagaaaaaaaaactttactgcatgactactctctctctgcttccataatttaacgttttggcattgtctccgaaaacatatctttgattttctattgtaacacatctataaaaagtaagtaaatatttatcttttaaaagtactttttataagactaatctgtacatcgtggtatggtgtctttaaactaaatgttctaaaagttactattaacagtcaaaatattatttcctctatcttaaaatatagttttatactgtttatgttcatgtccaatatttgatcgttcgttttatttgaagtttttttatgattagtatttttattgttattagatgataaaacatgaatattactttatgtctgactaattttttttcatatatttttcaaataagacggacgatcaaacgttgaacacgaatacctacggctacacctattttgagacggaggtagtaattgtttaataccttgtctaaacttcaagaatcatgaaacggacactataaccagagtagtacaattatttagtttcttgtctccagacatgctaagatttgctgctcctttatttaattgcatttgcacaggattccaccattgctgctggtaatcaagctagcatcatctcgcttccacatctcacggaagttgagataagtggcttccgaggacggaagtgcgaagcccgcttgatggaacggctgcatgcaagcgccactgctctcaacaagatcacattacgtttcgactggctgtttacagtagaaagtagcagagaggaacgcataaattcgctgcccctaatccctttcggtgaggttggcaagtaggcggcggcttctggtgattttgagacgttcatgtggcgcccctgcgtgaacaagacagaattctgtggtgagaggaagcaaatgtgagactaaagggagtaataaaccatggaagcgtggctagaaaatatttattggggcaggagaaattatgtcatgacatagtagtacttgaactaattaagtaccttttattgaaaaatatgaacattatcttatatatgatattcctatagcaatattataggattattataccatgaaattcatatatttgtataattttctgaggtagttctaggtttctttgattttttttccagttctccaagtacattcatatactttcaaccaaaacatgcgtatatatgaagatatacagttttgttttggatgaactccggttagaatgctctctgctaaaatcgaaagtgagatgctttgtttgaaatcggtattgatctcttggattttctatgagctttcctaagagagaatttgttttaactgtggctagaccatgatgtggaccagagtcttggaggtgtgactttgatcacaattttatattataaaaagattattaaatctaacaagttcatagattacaaaagtacttttcatacaaatctatgagacacaaatctacactttcgccaaagcgattttcgcacaacggcgaagagggaacccccctataaagatttggctaggggcgagttgaggtcatgttcgtttcgcgtggggtgtaaaaaaaaggaatacaataaggacacaagaagtatacaggttcaggctgctcagaagtgtaccctactcctgtgtttggtactatgtggatacgagagtgcacaatacaaacttgctcactgaactaggcactagtggagaaaggggctttaatcccggttgggaacccccctatagtcccggttatgcaaccgggactacgaatccgggactaaagatgcctatctttaatcccgtgtgaaataaccgggactaaaaatccatctttaataaccggggctaaagagggtgggagcagtcccggttgatttttttttctcaaatcgatctgctctctaaatatccccgatcatattcccaaatcatcctcaaataaaagtagcatcacagatctggaaagaaatacatcacatattggaaagaaatgcatcacagatcacaatacatcacatcacaaaatctccaacaaaaaatacatcacagatcctaaaagaaatacatcacatctctcagatcagatccaacatcacatacatcacacagatcaaatccaatgaatcacaaattaaaaaaaaaatcggcagcagagaggaaggcgccaccggcctcccgaccaccgtcctcgcggcctccacgccagctcggccggccggctgccgcgccagcccgcgcggcgcccgctcgcccgcccgaccaccgcacccgcccgcctgcccgcccggccgcctcgcccgctcgccgcacccagacggccggccgccgccgctcccgccgggtgccgctgctcctgcccggccgccgctcagagaggggaaggggaggaacgggaggggaaaggggagaggaaggggatgaagggggagaggaagggatggaggagtaatgagaggggaggagatcgagaggagtgcgcgcggataatatctgagttggtggcgcgcggtcggggtactctttactcccgg

SEQ ID NO: 8008 - DNA, 35260 bp, Oryza sativa
actctccttcctctcttcctctctttctatcttcactctctctgtgtcacggtgacggggagtgcgagcggcgcgtgggggcggactggcggtgtgcggcggcgcgagcggcagagacggcggtggaatggcggcgagcggcgcgcgggggcggacgggcggtgggcggtggcgtgagcggcgcgcgggggcggactggcagcgagcggcggcgcgagcgaggcacgggggcggactggcggtgatcggcggcgcgagcggcgcgcgggggcggactggcggcgagcggcagcgcgagcggcgcgcggggtcggactagcttctcccctccgccgcctcctctcctagcctcccttccgccgccgccgccgcctccacgctgccatctgccgtcgagagccccggttctccacccacgcggcgacgatggcgggcgttctgcgcggccacaacgacatggtcatggcaatcgcggcgccgatcgacatctcgcccctcatcgtctcctcctcccgcgacaagtcgctgctggtgtgggacatcaccaacctgtccagctgctcgtgcccgccgccgcagctcgcgccgtcgcccaccgcccgtccgccccctcgcgccgctcgccgccggccaccgccgtccaccgccgctcgcgccgccgctcgcagccagtccgcccccgcgcgccgctcgtcgctagcccaccaccgtcctccgccgctcgcgccgttacccaccgccagtccgcccccacgcgccgctcgccgccagcccaccgccgtccaccgccgctggcgccgccgctcgcagccagttcgcccccgcgcgccgctcaccgccagcccaccgccgtcctccgccgctcgcgccgccgcccaccgccagtccggccccgcgcgccgctcgccgccagcccaccgccagtccgcccccacgcgccgctcgcgctccccgtcaccgtgcagagagagagagtgaagatagagagagagaggaagagaggaaggagaggtatgacaggtgggtcccacaattttttagaaagaaaatgctgaccagattgccacgcgtacaccacgtaggacaaaaccgctctgaattagattgagagggtaattcgtccggtattgaaagttcagggtgagcaatgactggttttcgggtttagggggtaattcggctgaccgcaattgttcagggggtaattcgtactatttccaaaatttaaatacgatcttgtattgtttatggagtgatttatcatatattaatatatcttttttttaaactgtttggataacatataacgagagaattttcttttcgagagtttaaaatagtttcgtgatgattccttgatcgtctcatgttaagatgactaatgtgatcgtttagttccggtgatataggctgtgtttagatcaggggtgtaaagttttggcgtgtcacatcggatatacggacatatatttaaagtattaaacataaactaataataaaacaaattacataatctgcctgtaaattgtgagacaaatttattaagcctaattaatccgtcattagcaaatgtttaatgtagcaccatattgttagataatggagcaattaggcttaaaatattcgtctctcaatttacacggcaatctatataattagttatcttttccatttatatttaatactccatgcatgtgtccaacattcgatgtgacagggtgaaaaattttgctagagatctaaggcccaaactttttcttcaaacttccaactttttcatcacatcaaaactttcatacacacacaaacttccaacttttccatcacatcgttctaatttcaaccaaacttttaattttggtacgaactaagcacaccctaaacagagccatactgtttgtcttgttgggatggatttctggccatctgcgatagtctggacgtgtggcggcgcactaggccatttggttggggataatgccggtggaagtaaattacttgtttctaattgtgagatgtctgtcaatcgaaagtgctcgttttaaattgtgtttgtggatattgttccatgattcactattatgtgctactaaggccctgtttagttaccacgcaaaatttttttatcatgtcacatcgaatgtttagacacatgtataaagtattaaatatagaaaaaaatagttacacagattgcatgtaaattacaagaagaatcttttaagcctaattgcacaatgatttaacaatgtggtgttacagttaacatttgctaatgacggattaattaggcttaataaatttgtctcgcagtttacaggcggaatctctattttgttttgttattagactacgtttaatacttcaaatgtgtatccgtatatctgatgtgacacttttaccctggatctaaacacagcctacatgagtcgataaaatctgcacattctccattcatcgtcgaataattcattgatggcgatgtcttaagataatcgtcaaatgattatgccgtccaatacggtttctcagtactaaaataaatcaatccaaaattattctaattgtatatcacatcttacctttgattaatttattataggaatgaggctcactgacttataggccccacagaccctcaaacccatataatagcgagcagtactgcagagaggatcaggattgaaactagaattgcatctaccactgattccagcaacacgagaggaacagcatgatagtaggtgacatgagtcttcaattgcaataatctcttgcccgaaatcatggcgacaagatgagacaaacttgtagaagcagccataaatcataatgccaccacatgcgaacccatcagcagagaaccagtattcctggggttagaatcctgctgaactacactacctaaacatcagttttaaccagcaccacagttgtactgctgcatcttactgtaatactaattcttaatgaaagaccaggaaaaagaacacatatggctgccagaactagcatggcattgcatcacagtagccaattagccactaccagaaatataaaacatcactatggagtgaacatatatgctgacattactatagtaatattcacacatggatataatctacaatggtgatgggttccatgacttccattctattccctagtgtctacataaaacaagattgagctcaagaatgaattacagctctacaagaatataaacatatgcagctgcagcacctactacaaggcatcagacagcatttgtattaattattcatttgctcaaatactattagccctagagtagttgttgagatggcattcacgctaacaaaacagacaagtgattgattatacacgactacgatctcaacaagtgccaggagcattacacccatccaccgattcctcttaaggattcttttacaactcgaggaacagggatgaacgaaattcagttcctcttcccaactatctcaacactgttattattaacctatactctgagagctaactgatcctgccatgatatcttcctcttcccagctcgggaggaggcggcgttccggacatcccagaatgccgccattttcgcatcactaggaccggcggcaaaatcaccctccattgggtacctcatgaccctgccaaccctaacaggttcctggtaaccatgaagctcctccatctcttctgaactctggaaagagcaaattcaaccacattcagatgataatttcttcagataacggaacttaaccgagttcgccccaaatattaccggctcgcaggcctcgttgaggtcaatcaccggagatgctcttggagcagcattcagcctccggtgcgccgatgggcctttgctagagcttccgatagcccgaaccgtgtggtactcttcaccatgagaccaaccaggttgccgcaatgtgggcggcaatgccggattctttactctatagacaaacgtctgggatggattttcggacatggatttgtaccttttccgcaaaaacctacagcgcggcacaattatgcgcaggataatgagacaatatcaacatgtttgcattgtcgtagagcataatcatccaggcatgtaaatcacactggagaagatgatgagttcaggcccttacttgacttcagccaaaagcctctgtttcttgagcttctccatctgtaatctcttcttctttgcttcagtttcctgggtaacccaacacagctaatcatcagcaaacatcataatagaagtaactgagatggacactaaacaccatcaaacttgcaagaaccacatttgtggaaatcctcctagattaagagagttgcgatccttggaagaaagtttaactacgaaccagaatgaactgatacacttattagctgacttggaacatatcaaaacatgctaattcattcaatattaggagaagaaggataataaatttcagaaccccacagatctaacccaaaatattgtcacaagtaaaaaaaaatccagatccacaaaatacaccaagaaaacccctcgaataatcagaaaaccaagaacaccgaaaataaaatcgatcaagaaacaaagccgccaagatccaatcggaatcacaaaatccccaaataccgagaggaaaatcaaacatcacaaaacccccttccggagagaaaccgatcgaaaaatcgcaaaacccccaaaaatcaagatcagatcggcgaagccaaccacgacggcatgactccaagaaacgccatgaatccacccacccacccacccacctcgaggagctccttgtagtcctggagaagattcttgtacttggccctcgccctgtacgcctcttccccgccaccaacgccgccgccacggctgtgccccggcgccctcggcagcagcggcgacggcggcgccctcgccgccggctgagccaacaccaccttagccttcttcatgtccgcctcacctcacccgcgaagaaaccaacaaacgccccgcaagagcaggagaccaagaaagccagggagagagagaggtagaaggagataggaacaagcaagggaggaggaagaagaagacaatatagaaataaaggaggaggggaaggtggacgtggggagggaagtttcttgcggccgctgcttcttggtgctctcgctgctggctggctgcagctgcggcgccgtggtgaggtgtgaaggagacccatggatgtggtgccaaaaaaacccgaaaaggcccatgcatggtcatggatggtgctagagtagacggactggacggcaagatagagagagagagcaagggaacaccaaccaaaccaaaccaaacaatctctcatgtgtttctctctctagacttgtagtagtagcggtggtagcggagagggagggagggtgggtggtggtaatggcgtggcgcatgtggtaatcaggtaatggagtggtagtggggcgcttgcttgctgctgctgctgctgctgtctgcagcgttggcttcgtcgtcggtccagctccgtctccaagaccaaggagaggagaagagagagggggggcattcttggaatccgttggggttgagaggtcagaggtgtccaccatgagtgaatgctgctgcagctaccccctctctctgtgtacacagatgtcatggtccatagggaaaaaaaagcgagatgacgatacgggacatggacatggacatggatgtgtgtgtgtgtacgtctctctctcctggcgtccatggctgggtggctccatggatccattcttttgattctttcgtttcgctttcttgctgtcctcttgagagagaggccgaacgctcccgggtcttgtgcgagtgggtggtggcagcagcccagcatactacaagcgttgcagtggttgggaggaggatgatatgatggcgtttgcagtttgcacgcatttgatgctttgatagtgtgggcggaggaggaggaggagatgatggatggcgcagaccgtagaggcggatgggccagtgcgtgcggttggtgtacaacggcgtgtgtgcgtcttgcagaggctctgcggcgttgctgtttgcttgctgatgttgttgtggctgtggctgcgagtgaaatggcgagattgccatcccattcccaaacaaacaacaaacctacctgggtttctctccctgccgttgacacggtcgcctccgctcgtttttaagatgggggatttgggaagagaggagaattcttgtgtgagatgaagatggcgatgaaacgatgataggtggggtgggtgactgggacgtgtagagataagatgctgtggactttgtggtcctgtggtttgctcgttgcatctgtctgcccggtgctttcgtatgcataatataaagtactgtatcatattaggtaaattttactgtatgatattaggtaaatcgtgatttcatagttttagctctagaacatggtaaaaatcgatctttggaaaaagacacatccaacatgtgattatttgctgttgtatcccgtccacattaaaatattaattttcagttcactaagagagataaacatcgtgaaaggtcaaagtacctctagccccatttgtcatcttcttcctctttctcatttccctctttctcatttcccctttctgggagccgatatcgaggtggattcaaggtggcttggaggaggcgaggtggagcgacatggacgagtcggggtgaagaagatcgacacgtcgagtggtgagctggtggggtggtcgatggggtctgtgtggaagccgaggatgagccggttgatggcgcggttgcaagagagggcgctggccggaattggaactgaagaggatgacggagaaggcggtattatcctcgatccggagaagcggtggcaaggagtgctaggcagagctagggtgccatgcggtgatggaggcggaagaagacgacgccgtgctgccaagactgatttagagctggcgaagcctagcctgaatggtttgcatcaaaaggacggcgtacccgaaggcggcccttgcaaacgcggcgaagaggggcccgtcagaggcatgcagtgcacagaccaaagttagcagcggtggttgttattgatgcgcccacaacgcgaggtagtgtgtcgatgacgcgggagaggcttcgcccacggatctgccaccccacctcctccaggcgggaaatttaactatttgccactcttgtgatatggcaattaactatttgccacaccctgtcaatgacatgtgggccctcatgtgtttatgacatctgggcctagtgacaaatcgttaagcaacattcgtaagagtggcaaatagttaaaagcccccctctaggccaccacctcgatgctgactcctctgttccgtcaacactggggtgggggggaagaagaatggaagagaaacgatagcgatttggtcactccgtgtaaatagttgtgccccctatcaccttgtcagaatgaatacattattttaatcgacgtagttgtaggatcgagatgtcgactagaagggggtgaatagacgatattaaaaataagagaaaattggaaccatgccattataattttgcaaaatcgagatatgccatcctgacccacatgccattgactcatgtgggtcctacatgtcattgagataccgatgacatatctcaaactttgcaaaattataatggcatggttccaaattaccctaaaaataaatagcgcctaattaaaactaacctgagttgctaggcttggtgaagggtaagactaactaagcaactaggttatgttttacaatcctaaggtgatagggtctcaagtacgtcattatgaatgtaaattgcacacaggtaaatacaataaataaatgagacaagagagaagaaaattttcacccgaggttcggaaactcgctggttttctaattcccgttgagacgagcctaactttaccgcttaaaaccatagagccacaacaattctactacttaaaagatctgtagtggtgatggtgaagctaatgtagactcatgatccaacttaaaaacgtagacacgtgaccgtgaaaaaaaaaaaacgaacgcttcacagcgacgcgcaacagaagcgatccgaaatcagcgcaacagaagcccccaatccatcttcgcgcatccccacatcgccgcgcccgctccactcttccacccccggcgccgctgacccctccccagctcccgcctcccggtctccctcgacccatccccgccgcttgaagccctcccgtcgcgcctcacggtctccatcacgccggctcgccctcgacagatccccggaagccctcccgtcgccagttcgtcgcacacacctaccttgccgatctgctcctcgccgccactgtcggcgcccgcatccacgacgccgccgtcatcccttggtagtttgatgtcttctccttctcctcaagatggatccaaatgtgccaaatgcgtttattagcaaagcgaacaaactggggatggcgccacgacctgcttgtgctggagacagaggacccctcgtcctcctcctcctcctcctcctcgccgtgcctccctgacccgccgccgcttccaccctcaagcgccaccgcacgtcgcacgagaccccacttcctcccgctccccccgctgccgcgcctcgctgacctgtcgcctttaaaccttgcgccggttccaccttctccgaggtcgctgcctccctagagggccggccagaggtcgccgtggagtccttgaaagaggaggaggaggaggaggagagacggtgccatatgcgttgcatcacacgcgggcgccgtcgctacctcgagcaccgtatgtgcgattgcagccgcctccgctcgccatgagaacaatagcgtgtcttggtgctaccatgccgagtgatctaggagtactcccttttttctgtcagtttttctttttccctgtttgcttgatttgtggtcaggcctttttcctcgtgctgtttgaaatttcatggtgaattatattcctaaattatatctactttactttctaggtggaatttctccaggttttagttgagtgcttgggactaaacagtactgtagcaagcattatcggcctattttgttcgcagagtgaagaccatggatgcagcatgcatgcagagttgcagactgaagacaggccatcattcttcagtctaccacgagatagcggcgcaaatgcttgattcacttgtgagaatcacttctttcaacttccaacctgattttagagcaacagtgcctcaccaattgaaatcaaccgatcaacatatatgtcactggttctcccatctattagatatagttctgaatttttaaacaaaatgactatttgtgtgctgtgagtacaacaaaaatgagctcaagaaaagctatctctatcaacattagcgaaaaaaaagcacacttaaagcctttacaaaaaaaaaatatatgaagtctttacaagtgtaaacatttctgaaattgcctggtgagcgattaaaatgtttttcttgtggtgccttcagagagtttgatatgtttctatatatttttacatgtgtgccattttctgctgccccgaacattgatctgagagtaatcaaattccttgaatagtttaacttctaaatgttcaaaaataaagggagcgccatggaagtcaaattagtgaaaatcttaggtatcctgcagtgtgtatgggggcactgtgcaatatgatgttgcatgcagtatactatcattcttttaaaagtatcttctcggaataatttcttatttccaaatattctcagatacactttcaataatgtagatatgagatattatgtgcgaatggccaccccaagataatatacttcaggatatgcaaaatcagttggagaatgcaaattcggttgttctctttcatccctcatatatgcatatgtttcttaaataatttacaaaattactgttcagtagtggagtaaataaatatgaatgacggtacctgtcattatgcacatgttctctaaacacatttcatgaatgacaaggtaatttttggtaatattgtttggcagcgagtatttgggtacaatgtactaaagttaatcaatatgtgtggcatatgcattgtttttcattgttaaggttcgaacaactgaaggcaagtaagatgaaagaccttgtttgaaaagggaaagctgaactggaagagcatagaagatgcgctcatctaattagccaggaaggttatgcagctgagtttagcattgaagttattgaagtgcaggtaagatattctcctatcttactgacttccattgttcttgaaaattgtcattccaaacatgttcatgttttggccaagatggccgaatgatccactttggttctgaatattttgtttgtcgtttttgcaatggcagggacgtatgcgttttgcaggctgagcacatgaagaatcccagttaatgtctctttaacttccatccataaggagactcgtgcactttcctgacaccctagcacaagttattacgctgtgcagacttttggctatacattaagcaagatgcagcaagtattttggattgatgatctgtaagatttgagttcagctcatgctcgttgatagcacatgacacatcggttgaataactgtgttcatttaactctggacctacatatacataatttcctcttactttgattccttggctcaaaaggctcacagaagcctatattttgcaattaagcaacaagaagcagggcttgatttgcattccgattcaggtaaggtaacagctgacttcgagtttttttttaattggtgcattatccatgaaacccttttccagtttccagtattcttttgttaaattttctgataacttaataggaaagacattaattaactatgcatcacctgctctatatataatataactataggacattgaatattttatttcattgcactaaaatataatcaatgttggcctatttttatgaatatattattctggcatgtcactacaagatctaagtaatactgatattttgatccatgggtgctttataagatctaagaaattaattatacttgatctcagggtctgaagaaattaaaccttaacaacattgtgaaatatagtgagactgaatcttggagataaattactgaagaactgaactattattatgagtataatttactttctgatcttttaacaaataaggatattgtttattagtggttctagatttggttaccttgcgtccttgccttttattcatcagtgcaattagggccaagcttttgcgtggccttgtcagagagatgaaaaagtacatatgcagtgcatcacttataattggttgtgcaacctcctcatccgcatgctaagtacaatgagttgaagatgatgtgctgcaagtacgccctttccaccatctgattatgtacacatttttatatatttcggtacatccgattatatacacatcaatataaattgtttttacgcattcttatatatttccgtgccacctactatgtaaatgagcaaaaaaaataatttgtttcttacatatattatttacaattatttttctccacttctataggattgacatattgttttccaaaggaaacataatagatcgggcagtttctgtgagctggatcagtacgggcatatgtgctaactgcctcctatgcagttgtgctttgcacaacgaagtgagtgtggttcatctttagagccatgttcaaagagagtttgggtgttgatcaattgtgagaaaatcatgtgtagaaatgccttgggatgatgtctaaaatagggcattgtattcatttcccgtgaattgctgcacaaatattttttgatgtactttatggtgcaacatgcatctattgacactttctactttaaacatattaaaaatatttgatgtattgtttcgtgctatagtttttttcctgttgcaacgcacgggcacctaactagtattttaataaatccctacttattataaaaattgaagatatttttgtcggtattttggtacatcaactgtgtttgagtcgtttttaagtccgtccgtttttgggaagacatatctgtgtttgagttgcattttagtcttgtttgcttttgaaaatacaaaaggagttgtataagaaatcttaataaaaaaactcacattacttgagatgaaatacaaactcataattgcagcccacgattttctttaaaaaaaatattcatacgaattcccaaaatgaattttaccctaactaaaccgtataagaatgataaaattaaaatagtatttacccgttacaacgcactggtattttttctagtctctactattataaaaattaacaatgtttttgccggtattctggtacgtcatccgtgtttgagtcggtttttaagtttgttcgcttttggaaatactgatccgtgtttgagatggattttaagttcgttcgcttttgaaaatacagatctatgcttaagttggattttaagttcgtttgcttttggaaataaaaaggggtcgtataagaatctttttaaaaaacacgcatgctaacttgagatgagtgtcgaactcttaattgcagctcatgattttctaaaaaaaatatccaaacgaattctcacagtaaatttcaccttagctaaaccgtataacaataataagatttaaatagcattcacccgttgcaacgcacggacatcttttctagtctctactgttataaaaattgaaaatgtttttgccggtggcttggtaagtcatcgtgttcgaatcggcctcgcatataatcactgccaatttaactattttatgtgtccaacatgtacgagctttaaacattagattttccataagaaaatttgcatgttcggatcgtgcctttggccgattgcgttttgtcctgtgcattgtcacaaaccaaccgcctccgcgaggttgtcatcttgccgatacggtctgttgggcaacacggtttgggacctgctgttgcgcacctatatcaacaccaaccagcagcagtcaggtgtgttgccgtgcgccgaggcaagcagcacgacgtaccattgttgattattctctacacgcacacactgtatcgagaagaattcctaccgtgttcatcagaaactcaattcaatacggtctgctgtgtatacgtgttccaaaaaaattaaaaaaaaagttcaggagcgatatcaaagccgagatctattactacccacatattgaatatccacgcgtgcagcaagacgatcagcaacaacagccgatcgatgacggttgccaagagaaatacaaaaacctaatcagagaaatattcaatcaagctactgcgcacatatatctttatctttactattatatctctatctctactattataaaaattaaaaatgtttttgtcagtacgtcatccgcgtatgagtcggttcttaaatccgtttgattttagaaatacaaatccgtatttgagtcagtttttaaattcgttcgcttttaaaaatacagaagaaatcgtacaagaaatctctttaaaaactcacatactactaacttgagacgttcggacacctaattgcagctcatgattttctaacaaaatatatatccaagcgaatttaacacagtgaatttcatcttaactcgatataataataagattaaaataatcttcacccattgcaacacacgtgtattttttctagtaaaattaaaaattttaaaaattctcatctggagcgttgctgggctcgcgcggcccacatacggcgcagatcgatcggggctgtggggcctgcgcgggagagagcgcatctagcgcgcgaggctataaaacacgccggattctgatctcaccgcccggcaagcacgaacacgatgacatcggatcgggtcggtttctctcttgctgtcttctcgatcgatcgatggctcccacggcggcggcggggctggcagcgcgcgacgcgtccggccacctctccccgctcaccatctcccgcaggtgaaacttcaattatactcctatatatatctagatagggttctctagatagtagtgtaatgttgcgaggggctagctagcgctgttccgttcgtacacgtgatgccgttcgtgagcggcgccggcgccggaccgagtagggaataccgttcgtgagcacggcagcggcggcggcgttggcgtgcgtggagatggatgattctgttgaaacctctattcccatcgatattcatgatagttcatgattctgttcaggcttgtttcgttcgattttgccgacatgtcgtagtacatggtactacctccatctagatttgggcacatagaattaaatggtggaaggttattattgattaagaagtgcaggtacatggggaaattaaatggtgaagggttataattggttgataaaggattgttggtggagaaattgtattttgggataaattttaaaggctatgttatattttgcgacggaaacaaaaatatccaatccaggttctgaccttgggattaatttcttggcatcacacaaattaatttataggaaataaacttatttcagcaacaacttaattatattttagtactgtttgtcctagaaaataatcagaataatatatgatatagatagatagatactagtagataggtaggtaggtagtcgtactgctgtttagggtgcatgcatagtaggatgatactatcacgtacgtcccttcatgcgacggtttaatttgtcgatctagtggcagtccaacctattacacaccaaaatcgatcaacatgtggttttgcactgttcttttgtgaggtacatgcaccgggaggcttatgttgacacataatccaaaccgcattgtttgtgattacgtgatcagatcgatcacctcgtagtcttggtctcttggatctgtcattttctgtagtacgtactgtttggacttttagaggtacgatgtgttgagtacaactgtatatgcacagtaattggccattgtctctctgttcatatctagtgcactggtagcgttgcacctaggactttaccgtgtgatgggttgtatttcttcgactattgtcacaatctgtataattcctagccatatacgatttgccttttatgccagagtttagattgagtacgtttttaggcctcgttttaaagatgataataatttgagagcataaataataatattgatattgaaaagctgaaaaatgatttaagaacatacaaagaaaataatgatgaacaaagttttacaaaagacgcgccgtctagtagttggtgcctgtgcgtagagtttttctttaatcaacaatataaatagcgtttgtgctaattacttgaaaatctgtaggagcactggagatgatgatgtggtgataaagattctttactgtgggatctgccactccgacctgcacagcatcaagaacgagtggaagaacgccacctacccacttgttcctgggtaattattaattaagcaagctagctttacaaacaggttttgtacgttgttacatactccctctattccaaattgatctacatattttataggtacacaaaaaccaagaaaaattaataactctctcatactatatttactctaacaacaaactcgatgcatgtaccatcaccactattttctaactaatagcaaattaagatattgcatgtgtgttataaatacttgtgtgcatccatgtgcatggatgcacgcatcaatgcccatttactccaatgcataaataacgaatagacttaatgaataaatacaaatatgcagataatttaggaataaccttaaaaaaaaactatatgtagatcaatttggaatggagggagtacgatgcattattctgaattaattctgatcaaacaaacatgcactcgatggcgcaggcacgagatcgccggcgtggtgacggaggccggcaagaacgtgaccaagttcaagggcggcgacaaggtgggcgtcgggtgcatggtgaactcgtgccactcctgcgacagctgcaaccaggggttggagaaccactgcccaggcgtgatcttcacctacaactccgtcgacaaggacggcaccgtcacctacggcggctactcgagcatggtggtggtgcacgagcgcttcgtggtcaggttcccggaggccatgccgctggacaagggcgcgccgctgctctgcgccggcatcaccgtgtacagccccatgaagtaccacggcctgaacgtccccagcaagcacgtcggcgtgcttggcctcggcgggctcggccacgtcgcggtgaagttcgccaaggcgttcgggatgacggtgacggtgatcagctcgtcgccggggaagaggcaggaggcgctggagcggctcggcgccgacgcgttcgtcgtctccaagaatgccgacgagatgaatgccgcgacgggcaccatggacggcatcatcaacacggtgtctgccaacattccgatcgcgccgctgctgggtctgctgaagcccaacgggaagatgatcctcgtcggcctgccggagaagcccatggagatccctcccttcgctctggttgcttgtaagtgcttaatttgatccggatccattacagctagctactagctagctagctgctctgtgttgtgatccattacattctgtctgtggcatgcatgttgcagcgaacaagacgctggccgggagctgcatcggcggcatggcggacacgtaggagatgatcgacctggcagcgaagcacggcgtgacggcggagatcgaggtgatcggcgccgactacgtgaacacggccatggagcgcctcgccaaggccgacgtcaggtaccgcttcgtcatcgacatcggcaacaccctcaaggacgccatcgagtgatgcgtccggtccggtcactgcttaatttatctctctgtccattctggaaccggccagactgtctaatcgaacgtttgattagaaaatgaacatttaaaataactttcgacagaaaacggaacagaaatctgtcggatttttttccaccacaggatacgtacccaaagaaaagattaggcctcaaaggattttgtttgcacactacgacatggttaatcgatgaaactaattcagactttatttcccgtaattttgcaaacaaacagtatggttaaacactaaattagcatcaatcaagcatttctttacctattacatgaagcacggtacaaagtttagacattgcataattaaactataactacactataatttcctctctctttttttaaagaaatacggcaggggaggcccccactgttaataaattttattaataaaaagagaggtataaaaatattacaacatagcaatccaattgatagctgcatctttgtctctctcaataagacgaaacagcagaaggaggagatcacccttaaatagctgcctccaaagaggagattttttagtaaaaaatggaaccattcctttgcttccagatgtttcaagccccatatagaaacttctccatgaaacacttgccttggtaactattctttgtatgcagggtagtgtcccgagagatacccagcatagcctagtagaattgagcaaaaggccattggaagaacaaatgcaacagatcttccagaatatgagcagaacaaagaacacaattaagatcgcaattgggtggcgcacaatgtttgtgatctaggtattcagtctattcatcagcagcaaccaaccaaagactttaactttagaagtagttttgcacttccataaccaaaggaaatgagagggtggttgtaaagctctgaagttaagggcataaaatttctgagaagaatatttcagattacccaaaatgtaaacccaaacatcattatcctgagaaagattgacactctccaaaagagttaacaagggttgcaactcctgaaaagcttgcgcaaaaagaggcagatgaaaattttcctccaaatcaaaaatttctgactgatatctttgcattagcaacataagagaataatctttacatatggaaagacaaaggaggtttatcactcaaacatcttcccaaaaatagcaagcgacaccatcacccaccatacatctagcaatgcccatggaaagatccatcagtttgcaaacatctttccaccaaaagtaacctttgagattgctcactccattcccataataagggttccaaattaaattaacccaaggtagatttttttctattatagaacttgtccaggtatttcaagagaagtgcctgattctgtatagaaaggtttataacccccaagccacccttattttttggtatgcaaaccttgcccgatacagccaaagattttcggttacagttcacatcagaacccctctatatgtaataccttcttgccctatcaatactagtaatatgcatgtgctaaacgctacagtgcaattatattcatctttaataaaaccttagaatggattcggatgtcacgaatagaaaaatatatagagtataagaaaatatattttccgcatgtcacaaattctaatgttctcttaggtcaattccattcattttttctttttgtgttatgtacttaaaaaaatattgattttttctatttgtcacacaaggcacacgcctgttgcagcccattgatgataacatgagggtgtgaatataaacccaaataacagtttgaataatttcacaatgtacaacaatataacaattgttggtcatctcattaacgtcttctttcaagatctatatggaatgactactaaaattaatcgatggcaaaagtgcatatttagagagacacaagtgttaacatattatcagcatggtgcaaactgactcatgtagaacacgatggtgtgaagaagataatcatgcaatattccacctgaggtgatggcgtgctgtacaaaacaagaggatgtcgatgagtaacatttcgatcagcaatttactatcttctagaatatgtttttgaattaattttgatcatgcgagcctacctttgctcaccagttaagaacgtttttatacacgatattcctagtgctcttccctgtggggtcgacttctttttttgactttgccaaaattcttgttgtttgccttgacacacctcctgacagtacgcatttatccttgttgtttgcgcatttatccttgttgtttgccttgcccttgacacacctcttgacaatgcacatttatccttgttgtttgccttgacacgggggttcctaaggggggcacttgcgccggctgcttaactcgtgcagccgtgcgccctcccccacgcccgcgcgtgattagcgcatcccgctaattaccatcattaacattaattaccctaattagtattattattttagtacgcgaaaaattgggataattacggagagttcaacgtaggtttgaaaacctttaagtaaagatttgaaacattcaaatcaagattttttgaaatttttaagtcggatttgaaaaatttcaagtcaagatttaaaaactttcaactcggatttaaaaacattcaactcggatttgaaaactttcaactcggatttgaaaactttcagttcagacttgaaaactttcaacttggattcgaaaactttcatatcaaaattaaaaaaattcaagtcaagatttgaaaagttaactcatgtttgaaaacttttaactcaaatttaaaaactctcacctcgaaattcaaaatatttgatttaaatttaaaaactttcatttcaaaattcaaaacattcaactttaatttaagaaactttcaaatcaaattcaaaactctcaaactgatattgaaggtgaaagattcagtttataaaagtcgcaacaaaaatcacgcgcgcgtgtagagaaaaaaaggatagatttcccaaaaaaaaacaaaaactagcgcctattttcccaaaaaaaggagaaaaaaagagaaagaaacacgtgccacggccgttggcagcgtttgcgacacacgggccgtgtgggtcggaagtgcgtgccacacctcttgatacacctcatatgataattgccagaatcaaatgaggaaacatcagaatcaaatggctgaagataaaaaaatattcttccaccttcatcccgtcaccacttaacagaattttttggaagtgcagcaactttcgaaaaaaatccccttgcttctggcaacaattctatttctaaatccatgcacagtaaagctaaaaaataaattgataaatgcgcttcagtgatgtataacacatctaatgaatcttttgttttcatataattaattgaaaaaagagggggtaaaggatgaaatgttaattttgctctctgaatcattcaattgagcccacataaatccatacactcaagcgcatttattatcaaggtactatactttagatgtcaagattaaccaaatttctccatattaaccaagactatgccaaattcacaaaagcaaatgctgtggaaataaacccgcacccaacaattatccatctacatatgtagaagtgaaaatcacttgcatttttctgaatagtttgtcatctatgataatttttcatgacaaacacaaatttcatcatttcagagatgagattcataactgttagtggccatgagaaatcagtaaagataaaattaacacgaaatgatgctgaacatctgatattggagttaaagtgactgtagcatacatattgaagcccccaattacactaaacatctaatattttttttttttcataaattcactactccctctgtcccagaatataagaagttttaaagtgtgacacggttattaagaaggtaggtagaagtgaatgggagagggttgtgattggatgagtagtggaggtaggtgggaaaagtgaatggcagagggttgtgattggttaggaagagaatgttggtagagaagttgttatattttgggacaaattatgaggactaaaagttgttgtattttgggacggagggagtaataaacagaaaaaatgttcctttaggtaatacatcagttcacattactaatgcaagacattttacatatccaggtgtcatgaataaatatgtgtaaaccaaatcttatattttaataaaggaaaaaaattaccactgcacaaagcagaagttggatgttaactaaaagtttttttttcataaattcaataataatctgaaaaaaatgttcctttcaatacatcagttcacattattaatgcaagacattttccatatccaggtgtcatgaataaatatgtgtaaaccaaatcttacattttaataagggaaaaaattaccattgcacaaagcataagttggatgtcaactaaaagtacaagaagctatgtcaatttggatgatgatgtattcaatgagaaatcactctcataattttatcggtttgaccaaatccatataacaaatagataaattgcattgtactttatcgccgcaacaatataatacttaaaggtagtatacgcacactactaattttttcagcttaaaaatgcaatgaaaaatataatccaaggtaagtacttgtataaagatccagtatatgaatagctcgaactgaacaaaactacaacctaaactgcccttatcgaatcaccattgaatatctcatataggctatagctacttccgaagagtatatatatactgaacccaatgtattcctagtgcttaattgaaaaaaaaaaactatattcgtagtgtccttgttgacaatgatttcctgggcatcaaagtccagccaagcaatacacagatagggtgaatactctattgcatgacgcaaacaggtaggcaccacagaaaacaacagagggatatatttattcaaagctaaaatccctgtgatgctgaactatttataacagcgacatgatgagaaaaaaacagggatccacaaatcgacacatatttcaggggacgaacaaataggcatggtctaagatccacaaatcgacacatatttcaggggacaaacaaataggcatggtctagtttattactgaattagctagaaaaaactcctaaatggctgtgcatttggaaaatgtcatatatagctacattgctgaacatttggcaaatgtcaaaataaataaatcaaagaccagattgtaaatttagaattgttttaccaaattctggattaaatgccatctgaattccaaaataagaaaaaagaacttcagaatcaaaatcccaacaccacacataaaccaacaccattctgatctttgactccattctgatttaaaccaacaccacacattcctagtgccgaacagccccactacagaaatacaataagaagcagcagatgcacatgattaagtacacacaattcaaacatgtgtgagcatattctggttctgtttttgtcagtgattttacgaatttggatttttcttcagaatcaaggcacaacatttatacgcaaacatgcatatgaatatgctagaacagtattactatttatagtaattatgtcattcctgatcaaagcagtacagggttagtataagcaaaaatcaaaacacctgtccagtcagcaaatagttagtctatgtaaagtctagcaaaagggatcaaatatagaacaattcagagcctagcaaaagtattcaggaaatatctagttgtaacacatggatggagtttgactgcaaattaaggccagttcatgcaccaataaaccattccatgcatgaattacatcatccactattcagatacttgaagaaatacagatacttgaagaaatagggttatttgaaaagacagtgaacaatagaatcagttggaatccatctccccgtctagattgaagtagtaaatatagatatccagggatcatacctgagtggggcagcctaaccgtagaagactgtgtcgatgcagattgagcactggagcaccgtcgccgacgtggaagagataggagcgcggcataggggaggggacctaccgtcgaccggttgtgggctctgaggaagaggggcgtcgagaccttccccagctttcggctgtgggcggtggttccccggcgatagggcaacgcggttgaggaaaatgcgttgaactatgggcggtggcagaacagcttgaggggagcgacgggagaaatttgggcctgtttggttgctaccaagaatatgcttggtctgagactagtctgactcattttattccttgtttggttgccaccctgagagccattctccctagcctggcctgaaggaaccggacaagtgattagcctgagttaggtgaccaaaatcggtcacctgagctccaggtgcacgcgtgcaacagaaatcaaggataacctatcgtagagatgtcccctgtgcgcacgaggcccacacccccacacctcacagtctgcaattctgcatgcagttggagattaatttgatgcatgcttggatttggaggtctcttttctcgcgttctcctaattgtttcccctcaacaggtgtgatgagggtgttaggccccgatcttccgataggtattgataaacagtcgatttggacggagtcgcgacacaactcgatccggcttctgaacgaacacgctactgagccccgcaatcgcagcaccacgtctcctctggttatcaaccgtgccgaaacccggttgacctcgccgagaaggctaatctctgcatgcgaatcgaagaacacaagcaagaacaagatagatttcaaccaatttgcatatgaatgattaagtacacgaatttggggttccacaaaccgatctagcagcgaaactgttcttgacagaataatctgaataaactgttttcgatcagcggctaggtccatttgaagttgatgctgtcaggaggcccgaatctgaatccaaaacgtgtacaacttgttctcttgtcttctatgggccaaaagtgacgtggtgagatgaaagaagacttggagaaggtcttggtttggtccccaatcaacttattcaatcatccatgcattccttacactcgatctcttttctttagcaacgtttgttcaaatatataacaagtaaatctaatatagaacatatgcacctttggttgattaatacataaagtagccatggttatatccgagctagttgtgttctcatcatcctccccttcttgattggaaatcgtcctcgatttcaccttgtcatggagcgtattaaacttatctttatctatcacatccggtgaggaacatttcttgatggtcatatgattggatcctaaaatctttgtagtcgaaaaaccactacactccccttcttgcaaaccaacctgtaacttatttaaacaactagaggaactagatagataattacatgtgcgcatgcggtcctctagacaatacatttcatcatgaaaaggaggtatagtcaaattcgaacaaatatatactcgatgcacattatattctcctttactatcataattgccaatgacatgaaaaatcacatcagaagtacatggcaattcaaatctagcaaataatttcttctctaaatagttgagtggacaaaaatcatcaaaatgaatatatccccaagtatttaaagaacatagcaatttaagctcttcattctcccaagcaatgtgaataacatgtttaaactcaacactaggtggctctactatagaactaacatgttcattcactagttgtggcatggatataagtgaagcatcgcacaactcttctttatcacaagagacatcaagcaatttgttttgtgacaaaggtatttcaacaattgtttccactatgagttgctctaacttagcagaagtagtggacatagttggcacatcataactatgcataccttgagcagttgtagcaccattactttttttctcatcttcagaaattgtaggcacttggtcaattaaacattcctcaagcatgcgtggagctatgtataggtttttttccctcttcgtctttcttctcttcctcattaccttcgttgttcttagatcctgcaaaatattagtatccaaagcaataggcacaacattacgttcgttttgtaataactcagacttagttgaaggcatcacaatagtatctttcctggtatctctgaaaatctcattgattctatttttcttcctttcaatactatctttgaaaatttcctcgattccaatcttcattctttcaagattatcttcgaaaatttcagtaaaactcatgggtaccaatttcattttccgaccattatgtctaaatgtgtatgtattagcaacaaaattatgcgatccattattagcgtatacccatggttgaccaaacaacaaagaacatgcttgcatagggacaagatcaaaattggcagtatcatggtaatttccaatcgaaaagtttattctcacaattctatttaccttgaacttaccacaagagttgaaccatttgatgtaatatggatgaggatgcggttgtgtaggcaactcaagtttctcaaccaaatctgaactcatcaagttattgcaactctcactatcgattatagtgcgacatgctctatccttaaccacaaactttgtttcaaataattcgtggtactgccattgctctgctttctccatttgagaacttagcacttgttgcaccaaagtactgtcatcacgtgcatctgtggaaggtgatgtagcagctacggtttgtctcccatccaactttatctcatgtccataagagatgtaacctaccattgttagtagaaaagagagaacaacataacaatattgttcctattaactatagaacatggattgtagtggagactagcaaatggaagcgtcttaccaagctcttacaagtgccttaccagcaatgctaaggacggtacaaccggtggctggttcgtgacaccttgaaggacatgatgtggcgattgcaaggatcaaagcagtgctgactagaagaatatatgtggagcttgggaggcacaatatatagtagaaaaggaacgcaattatgctaataagaaaatgcaaagttgaataatagttcaaagtactagtcaatgtgctggcctagtctagactcaactctagctcaagcaagcacccgaccacactaaggactagaagcagctcaaaccacaactctgcactctagatacagctcaaaagaatcactaaattttctcttctttttttttgctgcagctttttttaagcacctttctgccttttttttcttttttttaggtgcggcgttttctttcttttttttctttgcacctttctgccttttctttctttctttagtttttcttactatattttttttaacaagaactgaccactgacctcgaacagggactcaaatgtaaatatgaatattacatggactcaaacacaaagtgcaaaattaaaattagatcaccccaaaaatggaatgctcacatcacgtaggttccgtttttataaaaatatctcaaatctacaaccaccaaaatacctaacaatctgataatcgaggaagcggcatggaagaaacttgccgtgaggtggaggtggttgtcaaccgtgagggggaggtggaagttgcggatgtggggtggggggttcagcctcagcctccacaggataagagtggccccactatttctttttatctctaacagaactaacccacagcaaccaatctcgtgctttttttttatttctttctcacggcacacataagctcgggaacacacgacaagaaccctagcaagaaagtaactctctaaccgctcgataaaaatttctccacatcataaaaacggaaaccagatgatgattagattcgatttttcgaggtcccagcaacaaccgacgagatgaaaaactggaaccaaaactgacgtacaactcacaccgacttgagtgatgaaccctagacctaagtgatgaacagatgcaatactcaaaactaaaaattaaatctaaaaactaaaccagcactcgacacgacgatgcaatctagaattcaacaaagcaaaatctaatagaacaatgcaacggctcaaatttgtctaggtaaagaataaatatttttgtgtggcaattttctagttatgggaagataaattacctaatggcaaccgtgctttgataccaactgatgagggatgttaggtcccgatcttccgataggtattgacaaacaatcgatttgcgtggagtcgcgacacaactcgatccggcttctgaacgaacacgctaccgagccccgcaatcgcagcaccacatctcctctggttatcaaccgtgccgaaacccagttgacctcgccgagaaggctaatacctgcatgcgaatcgaagaacacaagcaagaacaagatagattgcaactaatttgcatatgtatgattaagcacacaaatttggggttccacaaaccgatctatcggcgaaactgttcttgacaaaataatctaagcaaaacccaaatctaaacgatgatggctactgaattaatatgattagggacgtcctagggttgccctagggcacacaccccgttgggctaagcccacgacacaattacaaggcccaaaacccgagtcagattcggactggatgagatacgtggcttgttttgcagattcctggcagctcggtaggaattttgatgtgggaccaaaaccatctgaaagtagactccataagctttccaacaagtactcatgggtcccaaaattccttctagatcagcggctagtccgttgaaagttgatgctatcaggaggcccgaatctaaatccaaaacgtgtacaacttgatctcttgtcttctatgggccaaaagtgacgtggtgagatgaaagaagacttggagaaggtcttggtttggtctccaatcaacttcttcaatcatccatgcattccttacgctcgatctcttttctttcgcccaagcaagtacctctgcaaacgaaaacacacaaaactcattgtgtagcaacgtttgttcaaatatataacaagtaaatctaatatagaacatatgcacctttggttgattaatacataaagtagccatggttatatccgagctagttgtgttctcatcaaggtgtgtgatagatttgtcatttgtaatagaaagctagatagctagcagatagatttttggtgggcgatgcagtcttgccaatattttgtatcttattccgattatcacttaacttagcaataatcatgtacagcctaatcatatttttacttctcaggcagcagttgcaaaccaaacaagcgaagcatccagctgcctgactaggcaaaaatctgaactcatcggatgcctttcaggcatgaaaaaaatcttaggcatgaaaaaatctcaggcatggtgctcaggacaccaaccaaacagacccaaagtcacggaggaggagatcgtgcaaggggatggagaagagatcccatcgtgatccatgattgggtggggcttgcgctacgggggagagagacagagagagagagagagagaggggggagggggagcgacatgaggcgttggatcttagggagaagatcctgaccaatgaggaatgagtaatgaagtctgtaacactgtgttggtgaactatagggtaaattatctattactatcttgggcagctgcaaagtgcacatgtagtactccctccgtttcacaatgtaagccattctagcatttcccacattcatattgatgttcatgaatttgtctagatttatgaacatcaatatgaatgtgggaaatgctagaatgacttacattgtgaaacggaggaagtaggtaggcagtgaagaaaatactgaattcagcaaggtaagcctatctccataagataaaaaggttgaattagcagatagttttctatcaattctaacagaggcaaaccaagatatgtgaaaggaagtgagccaacttgacaacaaaaactcctgccaatatttgtgctttttcctcatctatattaattggtatgaggcatgatttatgataattcactttgagaactgtcctctgtgcaaaaaattacagtaaagctttcaaagtgaataattcctttccactggctttgacatacaaaagatttcaaagtgaataattcctttccactggctttgacatacaaaagagtattatcagcatattgcacaattggaaaatctagatcattctcattagggataggttttgacaacaagccaagagtataggccttgttaataataacctgaagcaattctgcaccaagcacaaaaagcaaaggagatagtggatcaccttgcctgacggttgttaacgattagtttcgcccgtcaatattactaaaataaaggaaaactagttatgcttgcaatgcatattatgttagaatgagaaatattccactagtactaggattctaatggagaagaaccgacagcaaaatagacgattggttaatcagacgctgtcgagaagtagacttatggatggatgggccaagaacactaaattgacacgaccaaaacagccccaaaatttacaagtctacagaaaggagcaagcgaggaggccacctgctgaaaatgggctaggaaggcccagcccatggttcggccgaaccatgggttgggccgaaccctcccgggcgccattggatgcgaggtttcttctggatggcttggatcactccccaatgatggttggagggcatttccgaccattccaaccaccacaaccgtcattgggaggctatgtaaagccctctcatcctccactccatcacacactcaagcaagaagttctcatactctctcaagtttagtttagtgtcacaagttcaatttagaatagaatcttcatagaatcttcagttctcgacactcgtgcgggcttggaaccaactggggatgcacccggatggacccaagccccacgccacagcatcggaggttcaacctcgcagagtgccagtgagaaccggtgacaggtgcctcatcacgtacatacaatgggggaatatgaacgcccgttcctccagctcaagtggtatgcctccattctccaactagtggcgctcaatttcctctcgggacctgggtgaaatcacgaggaggttggatacccttgacatacggacgagagagatccatcacaacctcgaggaacacatagcccagatgcaagaatggcagcaaaatgctgatgctcagttcaccaacatcaacaatctgatgcagcaacaacacgctgttctccaagcgtacttctgcttccaggggttcaatccttaccaaggaccctgagcgaaaggcaagcttgggggagacgtctttccctccattgaagtaatttgtatcacattgcatatttccctttacaattgcatgtttgaatttccgcattgcatcttatagattgaaaacaacataaaaatttgcaaaatagaaaataccaaaaatataggatatattttattatgctaggtaagacaacttagttctcttgttgaaatgatgaatagttgttttgttttatatctctcatatatgggttcatggttaagtactctctcaaaaattgaataagagtatccaacaattattcgggaacctgatggaagtaagctgcactttgctaatccgagtttaggttgttacgagatatgagatagtgataagagttgctatgatcctgttctaagtttgacttgaattccagatattttattttccaaaatgataaatttgaaagttcctcatttgatataaattcctaccagaggcaaaaatactcatattgattaagtcatatacattgttggttacttgtaattccattgaactttatcaaatccatgtgacttgtctagatacttttcatgctctatgatcaagatcatacacccacatatatgcacatgctatacttctacactggaagctagcatccactcactccacttatatccacccgaggatcatcaaaataaattctccatgcttatatgtgctttcttctcctagaaaagaaaatattttttgaaaaaaaataaaaaagggagggaaaggcatggttatgaaaatgataaacatatgctctctcaaaaatattgagcatgagatgaaaaaaaaatgtagccatgccctctcatgtttattaaaggaggattttggataagaaagtaagcccccttcgtaagggttaggcaaggtaggagccggtccacgaagtggactacccaagccttgatcactagggtagttcttccttcactccgaaggtgatgaactccaaaccactcacaaaccggcaccgggatttctccacaatctccttggagagatcaccgggcaacatatccacaagccgtctagggggcgactacctccaagagtaacaagtaacatcccggctcggagatgatccggtgtcacattaactctacaatgaagtaatgaacttgtcttacctcaatcaactctcaaacacaccaaatggataaacacaagctcaagatagtgtgagagtagatgcaagggatgtatgtaaataaagcaagtgccaaaagaatccccttgctgctgatgggggagtatttatacccccatctacaaaaactagccattggggtcgaaatccccaacctctgttgcctgctggtcaaaccgcccatcagtgtaatagctagaaagttagccactactgtgcatttaatgcgcaggcacaactagcacggtctgactgccataggtcggcctgttagaccgcctgaggcttggttagacctccaggggctcaatcagaccggcctcgactctggcggctctggatcgttaagccaagggcatccaactggctcagagggggcccggtcataccagccaacacatgccgatcagaccggcttgggtctagcggtcagacaatgcaaatgatctaatatggcattttaataaactctttgtttaggtcataacccctcttgatagtatgtcaaaactataaataagtctagacaaaatttgatcgtccaacacctcgatcaaataaaataaaaccattagatttaccatcttcgtcgctctgcgtcatcaattttaatcatcggtgatcatcttgttaacggtgaaatttgataagccccgaagtcatcatcggcttagagtcagtatcgtttttagagtcctagaatcggccgatgggaattatcaagtcgccaatagtcggattgttgctatatttggttagggaaattaattcattaaaggaagcttattcagaagtgaccgagttcaaggaggatgcggcatgacagtttatctattaattaggaagagtatgttagtttccttttatgtttaggaaagtgtgtttaatgttcgataaggactttatattttccttttatctttagaaaatttctttcttgtccaagaagtactcgtatctatccatgggtataaatatgtacacacggggttattgtaaactatctcaacgatcaatacaactactctcagcacatcgccacccgaggttttttatttatcatccgatcgaacatggcacctaacgtggggctgcatcggctttcaatctctggcgaagtggttgttggcaactttttaatctgacaatcaagccgttgactgattttcagagtggtggatatcttagctaatctaatctggtaaagcgatttagccaatactggcataaaccctaaaacgaatattagccgatacaagtaaactgagataccaaactagattaactaagatatatgtgtcgacgtttgatgtcgcgattccagtatttgcatagtatggggattgttggtactaggatatatgcgagattgaggtaaaagagatggaggcgaggatttttatgcaaggttcgggcccctgaattgtcagataataaccctacatcctgttggccgaagccggtgttgctctttattcatctggatcacacaagtacaatatttgggatagcctatctaactattgtcgacttggcggtctgaagttctgactcgtagtcgacaacagggtagccttcctcctcgaatccgcatccggcgagatcagagacagcgctattgttgacggttgttatcgatcagtttcgaccatcaatattactaaaacaggagagaactagtgatgcttgcaatgcataaatatgttagaacaataatattccactagtattaggtctactaacctttttgcagagaatgacaataaagtgaaggagaatcgacatcaacaccaacaataaatcaatcggacaatgtcgaggaccagacttatgtatgaatgggccaagaactcagaatcgacatgatgaattgggcccaaaattcacaagtctgcggagtggagcaatagaggaggccaccagccaaaattgggctggattgggccagccccaggttcggccgaaccaatcctagcgccattggatccaggttttggcatggacgtccaggattgcatcccaataacggttggagggcacttcggacaattccccttccataaccgtcatacctaccttctatataaggagctcactctcttcacttcaacacacacctcaagcaagagctctctcattcctctcaagttttgtttagtagtatctagctggtggaatagaattagaataggaatcaggagtccggaagtcttcagaagagttcgggtatggctagtagctttcctttcctcttatgtaagctttgtacttttattagaatactcttttatatacatttatggtattgaaatactttccgagtatatgagtaccaactttacattatgttcttgttatactgaatatacggctagcttatctgggagatgctttggtgcgggtatagtgtttgcatatgcaattaatctatgtcatgacgatgatattagagtagtatctggtagtttaggcgtggtatctagattatgggatatcattatttggggttatatattgcggatgagaggtgggccgctgatggtgacagctcagtacgggtattcctccgcgcctatatataatcctaagttaatttcctggggagggtattcctccgtatttagccccggttggatggtcatgacgggctgtcgtaaggaactcggcagtcaggggtggcttctcgaagtaccaggagggcatcagatagagggtattagctagtatattagttaactagaatgtatgtatactatgtatattagaagtataggaatagattattctctttctcttttctttccacctagcttagattatttattatgaggatgagtagaaatgcttgtgtgtcactctacccttggattatcataacccctgcttagaatatgattatcacaagtaatatataaattattagttgagttttctctacatgatcttcccacgggataaaataaatacgatacccttggaatactctcgggtgaaatgctacaatggtatatccgtgtgcttgcggatgaactctgtaaccataatataccagaagtatttctgcgccattgctgggaattatatttctagtaatgtcgttaagaaataccaacagctatatctctcctaacggtatccataggcaccataggggactagccatgcctatctctgaagtcgatatccggcgtcttgtcttggcgtatgttggcttgtatgttgatcttgtgtcttgatctattgttccgtgtcctctctcctcccagagggccttgtatttatacctataggtgtccccttgtccaagtagaactagggaaaccaatatggatacaatccgagtggtccttatcatttccatgtagaactctggttgtctttccttatccggaactcctcctatatccgaaggttgtttccgtacaggacatgatatgtggtgaatcctgccgagatttagtcgactacttattaggtatgtgatatccataaccctgacaatatgatagatatgtaggaaaatttatcaaccaaaccagagcgatcgaagaggtcgaagcgatgcagttttcaacaacactaatgtagccgatacaattaccagggcccgcggaacgtaggacttaccccttcgct

SEQ ID NO: 8009 - DNA, 93749 bp, Oryza sativa
accaaccgggagtaaaaataattggggtctgtcttgaaccccacaacttcttgaaccgggactaaaaatgatctttagtcccggttgatgttaccaaccaggactaaagatcaagaagtacctctcaacttttaaaccgggactaaatatgttttttagtctcggtttttattagaaccgggactattgtggaatttggctgaccgaccaaagatggtttctccaccggtgaggattctagggttgcgtttctaagggttcccatcccaaaagacctccactatgtggcatgaccccttccttttatggtacaagcagggatttacgatgcctttatcaccgagggaatgcccatgtctagtcttgtcattatcccctctaaaacccttgaatttaatgggagaattaccatggacgattgtttttatcgtgcctcgggctccctgacaaggggcccaggacagctgggtcttgcttccctcgccacgtgctccaaactaggcttggtggacccaagccaagtcatagcacatccatcatcgtttttctcatttcttgatggtgaagtatgaaaccacctaccggtgctagcatctaactgtacatgtgtgtggccgtttagagctagcataaggtgaattactacctacctggagatttcctcccaaatggccccgttgagggtcgcttcctgcaacaccgtgtccatctcgggtcggatcgtgagcagctccagtgtatcctgccgaagccacctgttgtcagccgacgagccattctcgtcacccttcacgctggccagcctatcgtggttgagggagctcccgtggctccaccgagctgctcacctgcctgctcctgcttctgccttgttcttacagccagcgatggcgtctggggtttgagggggaggggggagggaagggggccaagcaaacggtgaaaaggcgagacagagcaacgtcaatggcatcttagagttcaaaagcgagggctgggacggtggattgggagattaggggagcgatggaggttcgaggcaacgacggcggcatcgtcaagggttaagagggggagaggacgagagtgatgctgcggggattggcaagggtggcgattgagggatggaagtatgctaggtgggaggtagaggcgatctgagacattggatctaacgtagatgggccgttggatttgacgaatgaggtgcgcaggagtgtagttagtgaactatatggtagatacctgtcgaaacaaattttcggcaatatgaaaagggggtagcgcacgagacctaaaagtggatggatgcggagacaaaggatttagacaggttcaggccctctcgatgagaggtaataccctactcctgtttggggatttgaatccaccgggtgtatattgatctgacgatcagtttgtgtcatgccccctagagggcctcctgtccaccttatataggatggggggcaggattacaagatagaaaccttaaccaatacggtatcggtttcctaaatctattttacaatattatcaaatcaggactttaggccgcttcataatataaaaggaaacgtaatacccaagtcatgatcggttaaatattccatagatataagctatcccctatgactagtcggataaccatgccgtgtgggtatggggtacccataatctccacagtagcccctgagaccttcacagtcggaaagataatcttctctcgaactagattactccaaagccgtgtgcttcaatcatcctcgccatgatctcccgagtacttttaccaaatatgaagactgtggagggctgaaaaataaagtcaggtgcatcgagtagatgtacctaatagatgcaccaactgagtggttttgataatcgtagtcaaacaagtaacttaatattaatatatagcatatgcggtatgaatccctgaataacatgatccgagtgatataccgacttatgatgcgtgcaacctaaagctgactacattattgaatacacatagcaaaacagctataaagaagcttgtatgttgtgaataaataactttccaaagtattgggcatacaccatgcgcacactgctttaacagatgtgcttgagtccctaaaagacacatggtttcactacacctgaaaatatatggcatatgtggtataaaatccgagtaaataaactcataaggatttatcaatcgtctgaaaaatgaccaaaatatataatcagcctaagccataatattggtcaataaaaatacacacttacgtggcaaaaagcaatgatgttgtatccaatcaattgcttgataaacccaaacagcgccatgactatataaaaaagtcagcggggcagctatataaagctttactgtttgacaccttttaagatgcattgtaccaactcctaaaaagttgagtaactgcggtataaaaggattttaaggtattggacactagatcacgcgcacttttgcctaagcaaaaagatgcctaagtccctaaaagaacgtgacatgccacacctgaaaatatgggctgcagacatattaggcctaggccaaaaaatatgccttcgacaccctttaaaggatgacgcatgtaacatgctcccgagtaataaatcttttcgggtgatatagaccaagtgtagctcatatgaataacttctgatctcagtgattatcctttatgggatactccaaaatagatataacaattgaattccgactggcgcaagtattcggttgataacccttacggggaataataaatagtccagtctttaagcataaaaaatagacccatgatcatcaaattcatgttgcatgtatccggaacaagtccaaattgaaggtatgacacttgtgtttgaggtagtaagcccctgagcatatagcgtgtccttttgttgtagtcacaattgtccattgatggtagctgacgcagttggcatagagacaagacgaccaatatagagagaatattgcccaccagaggtggcaaaaatattggtggtagtgaagatagtgataccaatcaaaagtgatgaagttgcacaaccgtgaaggcaaagaaaccagtcggcagcagtcaggtcagccagcaatgaagatgaaggcgcccagcgataaagttgtgtagccatggcagcgaaataatcagtcggtgacagacgatgcagttggtgaagaagatgaagatgcccattagtggcgacataataagccatccataaaggcgaggataccggtcggtggtgacgaaagcaagccgacggtgaagatgtagacacgcatcaaaggcgatgacgaaatccaccaatcatgaagatgaagaaaatagtcggcggcgacaaacgcaaccgatagtaatgatgataagcagcaatcatagatgatcaaatataatgacgaagttgcccatcaatagcagtagagtgggctatgttgaagaggctatgttgaatagggatattgatgaagatgacgatgtcgatgatccagtcaatagcagtgtagcaaccgatgataatgacgaagacgctcatcagcgtttgcatagtaggtcaaccgtgaaggcgaaataacaagtcggcaatgacggaagcaattggagacgaagacatagtcatccattagcaacagcagagatgtcagggccgatgaattagaggtgctggtgatgaagtcaatgacaataatccatcaaactgttgagaagatatcgaagctcgagtagtttccttggcgcgagagtgtgtataacgaagattgatgcaaagctccttgatttataaagatggcagtagaatttggtgttatagctgttgcagattcttcacttggaggaaagtagatgctcttgcccaactcatcaaaactgaacttattggttgataactccaaactcccgaacatgtagattaaatttcaaaattgatactggaaatatttggagtagattgtgacggcgtgaagaagccaaaattgccggtgtaataattggagtcgctgaaattaaatgacggttctgaagcgtagacgaagataataactccccgaattgactcgttgattgattgattgcttaatcttgacataaagcttgtcgaattttgatagtcttgtatttgtgtagcccccgactctttggttagttgagaaacaactgaacatagagtcgagaactgtagcttcttgtagtcgaatagtcattgcttgagtaaagatgcatgttgaagatgtccgagtagaaatattgaagattggaacaccacttgttgtaataatataacacggcatcatatttggtgacgcatgccgagatgtcgaagctcctgtagacgtcgtggttggtgaagtaggaaagcggtagtgaagacatataattgtgaagataaaagcaccagccggcggcggcataaccagtcggcgacggaagacgatgatgtccatcagtagtggtagctgtataaaccagacgtagaggcgagggcattagtcaacagcagacgagacgaccgacgataaagacgataaagccaatcaacactagcagaatcatgcagccatgaaagtgaataaaccagtcggcagcagacgtaggcagcttgtgttgaagatgctgacgcctattagcggtgacggcgatgtagccagccgtgaagaagatagcatcagttggcgtcataacaggctagccgtgcaggcggtgacaccagtcggcggcggatgaggcggccggtcagtgaagcggccggtcggtgaagacgtagacgcccaacaacggtggcataataggccagccgtgcaggcggaaacaccagtcggcggcggacgaggcggccggtcggtgaagatgtagacgcccaacaacggcggcataataggccaaccgtgcaggcggaaacaccagtcggtggcggacgaggcggccggtcggtgaagacatagaagcccaacaacggcggcataataggccagccgtgcaggcggaaacaccagtcaacggcggacgaggcggccggtcggtgaagacttagacgcccaacaacggcggcataaagcccagccgtgcaggtagaaacaccagtcagcggcggacgaggcggccggtcggtgaagacgtagacgcccaacaacggtgttgtgaccaaccaaccgtatagacgaagacaccagtcggcggcggcgacggcaagccagtggtgatgttctgactgatccattcctggggcgtaagagataagcttaaagccatgaatcccttttatgcatatctggatctggatcctgcagaacgaacatataggatgagtagtatctgatgtaaatataatacttcgagaaaaattcaagtattttaaaatatttataaatatgtatttcttctcttgtcaattttgatttcccctagcagatgactcattatgtttaaacactctgcccgactagtcatagccatcaagcaccgggagtcggcctaagcacttcccaaacatgcatatgagtgacatgagttcgtcattaatggaacaaagtttcatgggtcggagtttactactcgggtacttttgcaattattaagagcagaaaataaattatcttatctctatgcttttgatttattccgaataatacttagcaccttacgttattcggtccatccaacaagcccccaggtgctaggaatcggcccaaaggcaactatccattggcaaaccaaacggaaagcataggaagatggaactccataactcgataggcacttttgtattcagaatatgtcgcaagcaatcaagataaatattatgaaaattgtttaaaaaatatgatataacatctatagccccccgactcactagtcaacggcgaaccagttgatgtagtgaggcaaaggaaaaggcaaaatatcatataaagaataaaataaatgatgacttagctttgtcatattccccttgattatggcagaggtggccaatgtgggaacaaagtcgtccatcaataataatgaagacacccgtcggcggcgacgaaggcgatcgacggtgaaagtgtggacgcccatgaacggtggtgtggccgaccagccgtataggcgaggacaccagtcggcagcgacggaggcaggccggcggtgaagtcgtagaagcccaacaacagcggcataataggccagccgtgcaggcagaaacgctagtcggcggcggcgaaggccagccggtcggtgaagatgtggacgcccatgaacggtggtgtgaccaaccaaccgtataggcgaggacaccagtcggcggcgacggaggcaagccgccggtgaagtcgtagacgcccaacaacggcggcataataggccaaccgtgcaggcggaaacaccagtcggcggtggcaaaggccagccagtcagtgatgaagtacaagcgatgatacatgcaaagacaagaaattgcacatcaacctgtggttagatatttgtaaaaaaaaaataactgatataataatcaatagatccaaacacatggcttgattggcacttgatagagaggcctgcataaccataagcacaaaagcgcatgcacgattgcatgtggttcattggctcctcgttctgtccggcagctgccgtccctgtacaggacttgtataaccatcgacttgttcagcgagtagttcgacgtacaactgcatggtcaaaggactcggccgaatcgacgacaggaaatatatacagataatagattgatctgtaaaaaaataaataaatcaaagattaattttaataatctatgaattggaacagctaacccgatatctgaacaatttaataggggtgtgatctgcccggtcgacaatgacggatatggccgtcagtgggtatggtcgacaatccaatccagtcatcggtgttagatccattgatgagcgcgtgaggccgcaattggtggagatcatgacaccatgcgaacgtgcgacggccgtatagagtaacgtgacgtccaaaatgcatggatcaagacatgcagccggcgagttgcgcagcgacttgtgtcctgtactccgcttcagcctcgatatgatcatcaccgtgatagcatgatggcagtatgacatcaccacgcactcagcagtacatgcatgaaatcaaggagagaaaacaacgtagagtaacatgtgattagggatcaatctaaataaaattaaagtggaaagccaaaccaggtaatagttgcatagatcgatatatgtgatgatgccaaatattatggccacgagctagccggttgatcttgatctcaagcttctttatcgttccaccggtctgcatgcacactcatgattggttgccctggcaagcagtcggcggcttcacggcgtgcagcacgcacacacatcttgtgagcgagaatccagggaccagtgcatccatgcatgccaagatgatcatcagcgctgaacgtgcaaacgcccggcgacgttgctaattggatcgacattgatcttttttctttctgaagttgatttccatcgcactcgttgataggaaactcggcgtcacccctacctggcgcgccaactgtcgaaacaaattttcggcaatatgaaaagagggtagcatacgagacctaaaagtggatggatgcggagacaaaggatttagacaggttcaggccctttcgatgagaggtaataccctactcctgtttggggatttgaattcgccgggtgtatattgatctgacgatcagtttgtgtcatgccccctagagggcctcctgcccaccttatataggatggggggcaggattacaagatagaaaccttaaccaatacggtatcggtttcctaaatctattttacaatattattaaatcaggattttaggccgctccataatataaaaggaaacgtaaaacccaagtcatgatcggttacatattccatagatataagctatcccctatgactagtcggataaccatgccgtgttggtatggggtcattgtgttgttgataagcaggattcacaacatgaaggacctgtacattcaaagggtggaaatcttgtaccttcatatttttattgtgctcagatgtggagcttctgtagcaaggactgggatggccagccccagtgatatggccaaagtgatgacggccaacccaactgaaagtaacctgctgcaaaaacccaagtcagcagcacgtttttaggaggtgttgaggtgatgtcatatttttgaaacttaaagtagtgcgatctctaggaaatacaacacaactacaagatcctctttggccgaccaagagtcaatttctctaatttgaaatatatgccatcaagtcttacaatactgataattagtgggcagaattatccattagttagcaatatggtgcccaagtccaacaagatagttcccttgtcatatttcttctacgtgtactgaactgtggatttttcatgttcaataaagaataaactctgatgaacaatttcaatgtactgaaagtatcagacgtccatactcagtagagatttaggatatgtagtagatatcgtttatataggtgacagtaactgcattgtaccattagttagtcatattttttcgacatacactgatcttcagattctgctgttacactcaataaacactaatcactaatgaataatttcaatattatgcagcatcatagatatatatatatatatatatatacttcagttgaggcatcagacatgtaaatattgttcatgtagaagacaataacaatgttgtgcagctaccttactactctgatttcttcgggcatctccaatttaacaaaaacagaggcttgtgcaaaactagaaagatgtgaattactaaaagatgatgggcaattttcttttttggccaatggaatatgtcaaaagcatgtttatcccatagtaaaggtctgacgttggtacttatctctacatcataagggctaacattctgttactaactatagctctaaaagaatatcgcaaagagaaggatatccctaattctggcataagctaaaccattaaaaaccataaaagtctgattccttaaatttgcccaaaaaaaacaatagttgtttcagctccagacatgcaaagacgtgaaaagattgtctatagaataacatacaagattaacatcttttgagttaaaagatgatattaatgatccatgaccacattagaaatttctgtggagggcaacaatttgtaggtggaatccaagctcaaaggaaataatttcagaagagttagcaacaaaaaaaaaaagctatgttagctactatttggaaattaggttcatggaaagttcagtggttattcattagtcacaaatgactatatgtacctcagatgtcaggatcacgagagataagtggggcaaactgtttagaccaaaatatgcaccttcgttaattaagtcctcataataatggcacagaatgtcactgaattcttgaccgccttgcaaaatgtttgccacgctgtggaataatattatattttccagctcctctccaatggtctctgttggccaacaaaaaggttctgaactccttttcaagttttggatcagaagcaaagccattttccttcatttcatcataatactctaaagctctttgcatgcatccgtgtttgatcaaaccttgcacaactgacatatagtgtgaataagaaggtctgatgtcatatcttttcatttcattccagagcttcaaagcatgtccaggttcattcaattgaaaaaatctatcaataagcatgagaaatgtatcactcttaggaccacagccatcatccttcatttttttcaagaacttcagggtttcatcaatgttttcttgtctcagaaatgtatggtatgtcaaaatggttggaacaattcccttcagcatcatgtcctccaacaccatccgtgcttcatcaagcttgcgactttcgcaaagcggaactatcatactgttgtaagttttgacgtttggttggaggccttcatcgataattctagtgaatatattctgtacatccttcatgcaattctcttttgtcaggacatagataagagaattataaacagcaatactaggagtccaacccctctttttcatctcatcgtaaaccctcagggtatcaaaaaggtttccaacttttgcaaaacaactgaccatgagggtataagatgtgccatcaggagtaatgcagtaatttgacatttctctccaaattctctttgcttcagctatatcagtgattacattgcaccaaccatctagaataatattgaaaccttctgcagtaagtgggaagaatttctttctcacgagaagcaattcctcagcatcctctatgtttttatttttgcaaagagcacgaagaagggagtaaaatacagtttgatctgcttccgttttaaacttctccattgcatcaaatgtcttgattgctttgttcacttcattggcagctgcatacctgaaatagccatgtccttacagtgagatgaccgtcgaccattatgcaacaaataaaaacaactcaactaaaaaaaaacaaaaaaagaagtgctactacaatatggactgctgcaaagcaggcattatgatgtccccctcacagcaagacgacaaatggacccgtatatatttttcatccaatgcataagttcaacaagattaaaggagccaaatcccagaattaccactagttaaaacactaacaacacaggaaatggtaacttacggacttgcaacagctttatattcccaaacactaatccattcaataaatcgatccaaccatgaatatttgttgaccatcatagacaatagcacagttataacataatattcaagtggatcctggatccatagaagctgcttgtttgcaacagttttacttcctaatatgattgtgcaagctgataactgcttgttcaccaaatcaatatgatgtacaagtcccttgagggaggcgcacattcagtggcagtaccaatcagtaaggcggaccaaatcattcaaaatgcaggcatacatcaccataaacaagtagcaaacacataattctgacaagccaatcaacaacagttgaatactgcccaagcaatcaaatacttatgccatagcagtagcactatcacaaagctgtttcttatctcaacatggaaagctatatactcctctgtacagaaaaatggagacagattacgaagaggagagaacccacctctccatcacgatgaccatggcgcggctggtgagcaccccgcggcgcagcatgcggcgcacgaccgcccacgcgaggtcgaaccgccgcgccttccccgcggcccatatggtcaggtgccacgcctcggcaggcggcgggggagggggcggtggccccgcgcgctccccggcggcggcgcacccctcctccccccaccggagcgcgagggccgccgcgtccgggtcgcggcggagctcccagagcgcgcggacgaggaggtcgcggcgggaggcaggaggtaggcccggggagggcggcgaggacaggagaagcgacagcgcgtgcttcggggaggacgcggcggtggaggcgtcggagaggcggtggaggaaggcggcgagctcgccgtcgccgtcgggggcccgggggagggggtggtcgggaggctcgaagtcgctgtcgtcggagggggagggggagtgggcggcgaggaggcagaggtgccgagattgggggaggagggcgcgtaggacgtggcggcggagggcggcggcggcgagcggcggcggcgccatgcgaggtgggaggcgaggcaacggcgagtgggaaatgaggtgcggtgcggagagaggggggtgttttggggaagattttttggtcatgcgggttcaatctcgaggcgtcgtcgtctgtcgtcgattggtgtcatatcgtccgtttgatcacgagaaacatcatggaaaatgacaatccagtccaagctcttctctctttgcattgatccagtgcaatcatcgcaaacaacaactgtggcggcagctcgagctgaaatcaagcacaacgttaattcctttcatattattatgtttttcttatcttatgtttttccaatccgcaaataagcctttatatttttagaaaaaaaaattcaaaggtataggggttgttttgttctcccaaacttgctaaaggttgtcaccccttatgtctaacaagttcaattaataagttagtctattgattcatagtcacgcttgtgataaaattccatttaatttttctggtttcatatgtcaccaactcaaaataatatgttacaatttagataagcaattcaaaaaaagtatgataaatgttggtatccaagcaacctattagtatagcaacctacttgtcgacgggtgatacccgtagaccggatatagagggtattggggtacgttggtacaaggatctacgtagtacaacatcaagcaaacaaaagacaagaattatactggttcaggccctttgataggtaataaccctaatccagttgatgtgggattatatggtagaaaatacaggttacaaagggaacaagggaacttgtcggatccggcgagattgtagtcgagttgtttcgactagctcccgatgacttggctcctcgtaggctccggcttcgtaggctgtgttggttgtgttggccctgagattcaatgccctaaaccttccccggggggtcccttttatattacagatctggaggtctccacgtagaactcggaggtatcagaccctatacgatacgccaacgacccagttctgcccgagtatgattcttctcgtctgtagattccgtgaaaggtttctttataatatacaggaaatatccgcatgcgcgtgggtatgccatatcgatatgtaacgtatatcgaagggtaaagggtatgcgtaacccgtaaccctgacagtagcccccaacttctgcttaaaataaactcgtgcaaccatttgcaacttcgggtgtcgagattgttgttattcccggtgcgaggaccgcggagatagaccgtagtcgagcacgccatttgaagcccaacggtcacgagcgaattttaaactaaagtccagaaaaccgccgcgcgtaacggacccagaaatttccgacgggcatctctctctgttccctggaattcgcaccgtcgatagtgcgcctatttaaaggaattttgggagtccattttgaagtccgccaaacctgttaaacacacaccacctccaagcactctttgccttctccgccgccgcaagaaaccctagttcatcaacctaggctcgtttttcggcgaccttcgatcagcaatggacctcggcaaatcggcttccaccagtgcaacgttgaagaaactccaggaggatggcgctcttcctggtcgtggaaccatggagagggaagcaggaggtactaatcctcagcccatcttgggtcgcatgattgcgatcgaagattatgttctctccggttttctccctccaccttccgaatttcttctcctggttttgaatttctatggtcttaggttgacatgtggagtgcgcatgtcaacggtgcagccttcctatcttttccaggctagcgcttacacatgttttatagttgcaaaacctaattataataatccgcaaatctccatataacaacattaaactttggatcaccatgtcttggtcatacaaaatctgaatcgacccgttcaagtctcctaatatttgttataacctaaagaaccttgtgcctttctttttatgtattgttattgcttctttataggcttgtagctttgcttgtgtgcttcgcgtagcttctgtcgttctggaggttcccgaagcgtggtttgcggtcgtcgccgaaggttcggaaggccgttctctctgagcaaggcaagtcacatcatccttgatcatattgaatcccagtttataaaattattttgatttaaattaatgcattatcgctttatttaaattcccgcgttatcactgttttatttagccatgcctatttatctttgttatgaccttatcgttgttgttattgttattattaccttgttcaccctaggaaaataaaaccccaactagtgggtactctattcatggttccactagtaggaatttaggtagatgcttcgccgattaattaggcaacattaggtggttttataactttagactttgggaattctcatatcatttagacactatggaatggttggcttatgttggaattggacacacacctccccctctattcaaaacccccaaaatggttttaggctgggctcgaggtgcatggttgggttttgttagtcgtacctcgggtactataaggattaagctcgggcctctgttgcaaagcactaccgtacttccacatgtctagtgggtaaggcttagtttgtggctcagtctggttataaacaaaggtacacggatggagatggacgaagtcgggggtcgatggacatctctaggacaaatgaaggctacacgagctgcggcccggtagtcgagatgtcatggcacagggttggtgtccttctgctaggggctcaatcctgtctgcctgtcccggaggttccggccgtaggtggggttgggtcggtactcttgtttatggctaggatgggttgggaactatgtcacatcttccgtccgtatgccgtggtggtatgtggcacgtggttacacgtgaggaagatgtgtcttgtgggtaaagatgtacaccactgatcagagtataacctattcgaatagctgcgccctcggttatgggcaagccgagcaatgtacccaagttagtgttttaattcttaaaacctgcttaacaactaaaatgtggaatggttggcctgggttggcttgggacgagctgggacccagggtcgggttgccagttcggtctgaatcatcgtaggccttgggttaaggcaggttcgtgtgggttcacggccttgattaataatcttgtatagctctaggatcgtgtttaccaaatcgctttgggaaactaagtgacttttaaatgctgtttactgcaaaacttaacccctatattataactcccttgtactcccttgcatttattctgcacttgtgggtgtgtcttgttgagtacggtggttgtactcagtctcgctcaatttttcccaaacccagaagaggagttcctggaagatgaaggctttggtgtctagctcgtgcctgccgtcaagcgcctgtggttgtcgcgctagtcttccgctgtttttcgtttgtcttcttgtgtgctgggccttcaccgcccatgtaataaattatctatttacgcttccgcttgttaaactctgaattgtatcaacttttggtgtaccttgcctcctgggacaaggaataatacacgcacgtaaggaacgcccattgggttatttccggtcgtgacacgatctctaacaccggatttgaaggcgcgaattacaaaagcgtcggtgatttcaggaattgtgtttctgccctcgttgaaacgtcgaacatattccctcaatgattcacccgagttctgtgtcaacgcgtgtaggtcgtcttcgatcgcgtggcgcttgtatgttccttggaaattggcgatgaattgttgccacaggtctgcccacgaagagattgagtagggaggaagatgcatcagccatgaacgtgcagaacccttcaacgcggttggtaaatagttcgctaacgcgttgtcatctgctccggcaacatagagtactgtggagtagacttgaaggaactcctctgggtcggtgctcccatcatacttttctattgctccgggtcggaatctctcaggccatcggacatcacgtagggaacgaccgaaagctctacacccagcgttgggggcggtgggttgtcggcggtcgtgtgtgcttcgtggatgtctgtctgacgatgaggaggacgcggatgatgacgatgacgatgggtcgcttggttccagcgtacgattacgaggatgacggcctggatctcgggaatcctgtcgtcgtcttccgctgttgtctcggcgccgatctccatcgtcgtcatcgatacggcggcggccatgaccagtattgtctggcacccgtcgttcgcgatcgttgtgatcgtggtggttgtcgtggtcccggtcctcgtttgagtggtctcctcgatttccgttatcatggcgccgtgaagagacatgacgccgagagcgattcacgttgtctcatgtgcgtcgtgcttctcggtggccgttgatttaatctcgaagatcgccagtgccgcgaggtggaggggtagctcgttgaggtgattccctccgttccggatcttcaccattggcctcgctagttggtggctgctcctggtgtgctgcggtagcggcttcttcaaacgcgttgctgaggttagtcaccgattcccgtagttgttctgtccaacgctcgaggtcaacattcagaacgggatcgtaaggagtttccctcagtatcgcttgaacggccctgatgtgctgggctggagtagtcgattgattccccacttctgtgttggtgtgcgctgacgtgccaacgtcatcgatagccaatacctcccgcggcgcgctcgttgtcgatgacccatagtcctcaaggagatgtaagaccgatggtttgtgaggatcgatatcgattaccccaacgaatcgatttgaagttggagtcactctttgttacttgctgttatccctgatggggacatatgacttaggagatagagctttcatggcgccgagaaagactttgcagctcgagaggtcgtgattctttgtcttgtgaataggacaatagacatcccgagttggagaagtacgctgaattccacgttctttgcaggcgcgaatttcagcacagacgttgaggaaaacccagcaatcttgcagagtgtgtttcttggttttgtggataggacaccaagaccttgtggcttcggaagtcatctttgtcggctcgtggttcatgtcggaaggacaaagtttggccgtatcagaatccttctcgagcttggatgtcgtcgatattccgttctccgtctcgatgggaggatatttcgacatggaatcgccttggttcgtagccactgcgttctcgtctccggtcattggaggaccggttgagatcggcgtcgtggtgtaaaccgggaagacgatttcaccgacttgagtccataccagcattgttgaagtagtgagtacttggctgaggctggtgctgacgttgttgtcgacgaagctggatgacatagtagtagaaccttgagtaccaaggccccctacctggcgtaccactgtcgacgggtgatacccgtagaccggatatagagggtattggggtacgttggtacaaggatctacgtagtacgacatcaagcaaacaaaagacaagaattatactggttcaggccccttgacaggtaataaccctaatccagttgatgtgggattatatggtagaaaacacaggttacaaagggaacaagggaacttgtcggatccggcgagattgtagtcgagttgtttcgactagctcccgatgatttggctccttgtaggttccggcttcgtaggctgtgtaggttgtgttggccctgagattcaatgccctaaaccttccccgggggtcccttttatatcgcagatctagaggtcttcacgtagaactcgcatgtatcagaccctatacgatacgccaacgacccagttctgtccgagtaggactcttctcgtctttagactccgtgaaaggtttccttagaatatacaggaaatatccgcatgcgcgtgggtatgccatatcgatatgtaacgtatatcgaagggtaaagggtatgcctaacccgtaaccctgacactactatattctgagacgaaaggagtattaatttctagttttagcatcagctctaggctctagaataatcttgaattcatctatttatcaaaaaacagaaacatgtaatgcatttgctttacttttcttacatattatataaccaaataacacttttaaatatttcacactttcactggaaaaaaaacatttatgtcctatttcgcagaggaaaagtttcattttttgcacacagttgtcatttcatcgcttctccctatgactaatttgcctacaatcaaatttcctttgcgaattaactccaaactaaaaggggtacctataaaacattcgacagaatggaaaactttcaattgtaaatactatataattacattgtaactatattttataactatattgtaactgctatgtaactgcaatataagtaatatgtaactcatatataactctgaaaaattggatggatcaattggttagttgaatgagcatgcaagctacaggtctcgggttcgatccttgctgtgcagcacaaatctcaaagcatatcgtatggttaaaaattttacagttttcacccttttccatttttctctccacagcacaaatctcaaagcatatcgtatggttaaaaatttgacagttttcacccctaaaaactgttgacagtataatagcaaatccgaactaaaaaaaaataacaaaaataaaccttaataaaataagataaatccgatctcaactctaatcggatgtaaaaaaaaaatcataaaatagacgaaagcagcaactacgcacgtgcagccgtggaggcgtggactcactcgcaatcgcacaaaaacgaactacggcggcggcggcgatgggaggcgagaccaccggtgttagcggcggcggattccgcaggcggttggagtactacctgtacagcggcgagaagaagcacgtcgtcgccggcatcgccatcttcgccgccatcttcggcgttccctggtacttcatgagccgaggtacccctgatcatcactgccctcggcctgctctttatcattccgattttcttcgaatcaggcggtggagtcgttagattcacctaggccggagtcctgttccgcgttcaaatttgatccgcagccgtttaggggagctagggttcttggtaatctcagccttagcacagttcgtcgtgttgcttccccctttctggttgctggattggggcttcgaggtagtactagtagtaaggttgttaaggcgaaggttccattttgctcttgtagtgttaatggtatttggtaggacggagcagtgtgcaaaatagttcaatatgaggatttttggtttgagtattctctgtttctttttcatgatttgagaccattttttaggggaattgcgtgaaatgtatttggatcgtatgaactgctatggatttaaggttctatgtttcgtgcaaaacttgagacatttgaccggatagaaaatgcaagcattttatgtggaacgtattaacttcacaaaaatcataatagtagtagactattacaggccttcgttactacatcgtgttcagatcttctttaccattgtggttgcaatgttctaagattgccatggtcagtaagaagtataagatgagataacaaaagttggaagtaaatcgaacatgaaaagttgctattagtggataatgaattataagagacgtatgctcccctgttgattgatacacataacactatatgatgctctgaattttgtaaatttcttttgcttgacagcttcatttgacagctttagaatgaaagaagcatatgcatgtgcactgggtgaggagaattatagcttaaggcttcttgcaaccctgaattagcaacattttgcagtttagcatttgttgtgtcattaccttgatattcttatgaaccaaacagagcacacattaattccaaaccatgtagtattggatttcaatttgttatacactttctatatccttctattgaaattgataccccaacttaatatatggttacaggtgttctactcaaagtctcaaaccattcagcatttagttatggcttctgttaacttataggacacaatgtatagctttatcagtaagctatacgcataggtcatagggtgtgtttggatcgtgggcaagagagatactaacctaacttagcaaagagagctacttggtatctaaaataactctgtgcgcaagtttgcttgttttaactgttcataaagcttgaccaatgcagcaagccaaattggcttgctttcgttgacaatcatgcaaccccaagagaaaaaaaacactctgttggcagttactgcttgcgaggatcttaagagacatggccataacaaacaattgaaaagatattgatgataagaatctcatcagacttgactaaattaaagaagctgtttaaactaaactgaatccagatttattgatatgctactgctttttcagccttcccttgcacaatctactttgacccatatagctggagctggtcccatgacaatgtgtgcatatgatggtgttgttattagtgtatcattggaatctccacttcttatcgtctttctggttttacttttgtttactgctaaattctaatgaccaattgaaaatttgtggggcctttgttcctttttgaagtgtttttttaatgataaggacatcgaattgattttgtccctttttcgaagtggtgttatgccactaaactgttagctatttgtaacacacatttctgcattgtcagagtgatcaaagtgtttctcattaaaaatcagatatgattagtgctgatttttgtttcagaatgcatgttgatttttgttgaagtagcccttaaattaccgaagtttctgaatactatttttggtacatgaataccagttgattaattgattatgcaatgcatatcctgcagggacaaagcatcaatctcaccaagattacatggaaaaagctaacaaggcgaggtcggagagactttcttctggacagtcatcagcaccaaaagcatgaagtagtaatccgtaactcagatctgtgaaacctcagcattcatagttttgatctataatctagctgagcactttatctattgggtgaaataagcaggccatctcttgaatattgaccctgatgacatgatcttgtcagtttcagaaaccatgtgtaaacttcacatgaaattttgtcaaatgtagcctttctgttcactttatgcgcaattctgtaggagatgatcaacaagcaccagatttttgtctatcaaatattcaaatggtggttctcgagccaatttaacctttgcgtttgactttagaatcattattttcatgatgttcctacggtgtgtttatgatattgactacggggtatgccaagtgctgagatttttcagttaagtcgcaaggtgaatttagccgtgggacattttcaaaaataaatgaaaatgttgaaggaacacggttgtcgtggcgtttcgcaccatctgaacattactatgttgcgaaataaacttcaaattattttctcttatgcatgtagaccttttcctcaaacttgatgtttcttcgccgaatgtactacgacaaattttgccttttataggattgcctacaaatcctagcattggtacaaatctaagttattctaggaaatataaaaacaaactgaactaaattattctaaagtcacagggtgtagtgatcctctgtcctaaaatataacaacttttggctctaaaaatgtttatattttaggatggagggagtaataaatatcaaaccgaacaaaaaaaaggcaaattttgctacaggacatcgcgattatgtgtatttagatcagggacaccgcgaaagtgaagctttggggaaagacatcccataatcgtggttatttgctgatggacactgcgccgtctagcgtagacttgccatgctgacgtggctgacgggaggctgttttttgacgcggtcggacgtaaatacccctgcgccttatctcctcttatccactcagtttggctccattcgcaagcagtaccagtgaatctggcattgtagctggacggcggcggcgaggatcgtcttcgtcaaaggcggcgaccgcttgaagtcggcgtggtccctttggtagacgtagaggggagggagctcgttggcagcgacgatgtcttccgcttcttctttctcacgtgcttcttcctctcgggttcggcgtgattcacaggtcagtgagttgcctcttgtgaaatgtccattctgcaagggcgattcaacggtagtggagcggacatgcaagaaggaagagaatttcaaccgcaagttttatcgatgcctcaccggacaatatgtaagttgttctttgcaatccccaatttttctagggtttgagttgaaatcgagtttgtcatttgataagctgtgtgctcattgttgttatttttagacaagtgcacaatgtaagtttttcatgtggcaaggggattatgctgtttggttggtgaaggaaggtttccttcatggatggacagattgcaatgctcacaggatagaagatgatgtcccagaatcagtgaaggcttcattgaaaggactacatgatggaattgagaagataagatgtgagatgaaggaggcaatgagtagaatttgtatgtttgggattgcatttgtgactgcttttgttatgtttgttgccatgaatgtaatgaagtaggaccatgtaatgaagtaatgagttcaattgtgatgaatcaaaatttgtgcacttaatgtaatgaagtagaaccatgtaatgcagtattgcaggaaatatttgtgtttgcccaaaattgagatgtaatgcaagaaatatttgttgttgacatttcagaatcataaggcatatgaagtagcaactatatgaataacaaccattttcctccatttcagcaataggactttcatagataggtgaagtcatgtcttgcaacatatacataggtagctaaagtcatggcttgcaaaataagggatgtctttcagctggcaatttcacatatacacaaaagacaagtcttgctactacttcagctagaaatttcaacaaaataacctactctaatagcattggattacagcttctttgcagtcctggtaaccacagccttccttttgttggctttaaatggacttgcatgttctggggatgcaacactcttgctccttgtaactagtccagggatgtcatccacctgcatagcaacttgtgcaggggcttgatcaccagcaccagtaggggcttgatcaccacaagcagcaccaccaacaggggcttgatcagcagcagcagcatgagcttgatcagcagcagcaccaacaccagcagggccttgatcagcaacatcagcatgggcttgatcagcagcaggggcagcagtagatgtggcttgatcagcactatcagcagcagcaggaggaggcctgtgaaagagatattgaacaaatattttaaaaacaaaatggcaactgaaaacttgatcaaaacatgacacacttacatagtgttgttaccaccagtaggcacttgtttaggcttggatttcttctttctaactctcttaggcttgggtggagctgggggaggggcatctgggtcatatacaggttcattgcatgtcttttgtaggtggccaaagccatggcaccccttgcatctccttcttttctttcctgaaccaccttcttcaacaccaatgaacctccttgttctaggtcttccagctgatctcttcagtattggtggccacatcttgaatcctgtgtccactttctcccataggctcttgtctggcattggaggcacaactgtggaataggcaaccctgaacatggccactgaatagtaggggctgacatagtcttctagctccacttctctcagggatccaataaaagagatggcatgcctacatgggaggcctgttagctgccattcattgcaactacattcttgtttggtcaagtccacagtgtgtctccatgttgtcaagtcccttttttgcaccactgacttcacctacaaatggcagactcttgtggtgattgtagttgagattcctacttttgtcatggagttgcttcattacatttcctaggatattgccttgcagcttaagagataatttgtgccttgtacacatcctctccatgatcatctgcctaatcttgtcaagcaactcaactataggtagtgacttctctagcctaatccaactattaaatgtctatgcaatgttgtttatcatgaagtggagaagctagaccttgcccacaaatgctggtgattctcttcaatccattgcattgctcttggtgaagcctctttcatgatattaaaatgcctgtcaaaaacatctttcctatatgctcttgaggcaggccacaaatttctttcaaatacttctccatggaaccttttctgaaaattcttgtacaaatgcctcatgcactctctatgctctactccattgttgaacacccttgtcactgcagcatctatgcccttgcctgcatcagtagacagtactaggacttctggagatccaattgccttattcaaacaaaccatgaaccattcccagtttttctttgtttcagatccaaagacagcatagggcactgggaacatccaattgtggccatctataccaatagctgaagccaactgccctctccacttgcctgttaacacagttgaatcaatgcctaaatatggcctgcacccattcaaaaatccatttatacaaggcttcaaagcaataaacatcctactaaacctatgcttctcattaatcacatcatactctatctccactatactaccaggagatctcttctcaatctcagctttaaaactatacactacctcaaaactttgctcccagccaccaagtatctcatctaaagccatctgcctaccatcccatactacatagtatgacagggtgattaaatacttctcctccaaagtcttctttagagcagcagcccctatggttggatcttctctaagcttgttgataaccctgtctttaacccaagaattgctggccatgcaattattctccaatttgcctgtgctagcacacctatgctcatatggcatgttctttatctgcaaccaaaaagggacagtaaacatccaaaccattattcagttgcaaaacattaaatgacaaagaagtaaaacaaaagagctacatacctgccaagttctaccatctggcaacctagaagcatggatcctccatttgcacttctttgccttgcaataagctctgtatcttgtggcctcagagtagggcactgcaagctcaacctctttcaggacagcatattgtctcatacacctcttaaaacaaattacatcctaaaaagtaacaccaacttctatccttggattgcctacatcagttatatggattagaggctcacaacccctattatcattgacttctaaatcatctactggatcatcattctcttcatcaccatcagattcctcaggagtgtaatttggatcattagcctcatcatctgacaccagctcattgtaattctccctctcatcactaactcctacatactcaacctcatcaaactcaccccatggatctggatttggcattgattgatcagtagctttgtccctggacttgctatttttttttggtgggaaccttttttgtggtagcatctctggtaggaacattgtcagcctgacttgcttgtgtgggtaaaaccatactcagtggaaccactgttttagcttcatccacacaagacacaatttgggaacaaggctcactcactgtcacttgcaatggaagcttcctaacatcccagtattggttaaatgcctctaataacacagcatcagaacaaatttctacatccctacccactctcttgtcccagaaagtcactctaagctcctgcgcactaccacggatgatttcatcatccaagtccttcatcaaatctatcaagcttattgtgtctttatctacaacccacttatgtggagatgatacatgataatcttggctaccattatccatatactcaacataagcaacaaccctaaccacaactctgcatgcagagttcggatccatcctacaatgcaacggcaaatgaagagaaaaaggggatcccaaatcagatccaccaaaccatgcatcctaatgcatcccaatcgaatcaaagagaggaaaaacgaatcaaagagaagaggaatccaaacttaccctttcggaatccatttcggcattggcggcgctgccgccagcgcagattccaccgcctcctacgacggtgaagccatcaccgccggtcaaacttgcatcccaccagcgacaatgcctgggcacagccagtatcgagggtgacggaatcggtgggaatgggcactgtttggatggaatcggtagagctagggttctaccacccgtactgcttgcgagtggataagaggagataaggcgcaagggtatttacgtctgaccgtgtcaaaaaacagcctcccgtcagccacgtcagcacggcaagtctacgctagacggcgcggtgttcatcaacaaataaccacgattatgggatgtctttccccaaagcttcactttcgcggtgtccctgagctaaatacacataatcgcgatgtcctgtagcaaaatttcccaaaaaaaaaatacatccagaatgcatgcacacgaaaatctgacatatctggagagaatataggagcggctcgggcggcgatccgtgatggcgagctcgccgttcttgccgtacctgaggcggaacgtggtcatgtgcagctcgcacttgtcgccgtcgccccagcaccgccagtatcggggccgctctcacgacctgccctcgacgaggcagaacttgccgccgccgcccatagggacgagcgtcgcgtcgtcctcgactgtcgaggtcatcaccaccatctcgcacagcttccagttgggctcctcctcgtggctcccggcggcgacgatgtcgcaggagcagagtttgccgtggcggtgagagtcgcaatggaggccgacccacgcgtcgagctcgccgtcatagtgcgcctcgccacggaacggcagcagccagtcgccgtggcgcgtccactcgccgcgctcggtgtcgtaggagaaggtccccgccatcttcttcgcctccgcctccgccgcctgcgcggcgacgtggtcatcaccgtgcccggggcggggcacgctccaattctctatggagacgaagatggcgctgcctccggggcgcacggcgtgcgatgtgatccggcggtgcgcgtggtcgttgtcgaacgggaccggcgacgggtcgtggctccaagaccaccgctccgtcgccaacggatcctcttcgaggcggtgcatcgccgcgtcgatgcgagggcggcagtccactgaccggtcggacggcgtgaacgcgtacagcttgttcccggcggcgtcccaccgctccagcgcctccgggaggcggtgcacgaaggcctgcgccgccgtcttggtgtcgtacacgacagcgaggccatctttgtcgctgaacgggtagcccttggccacgatgttgctgcccagcgcggcgaactgcgcgctgctgcccatcatcttcaaccgggagtgcacgtactcgaatcggacagccggcgccggaagacgcctgtaggtccgtgccggcagatagtccgtggcggcgacggtgacgagctgatcgtctgcgtcggcctcgttgccgtcaaggtccatcttgtgcacgctgaatcccctgctccagtcgtcgagcacaacgtacaggtgctgcctttgcggcggccaccagctgcgacgcgaggacccctcaccgttgttcaccgacgacgttgttgaggtcgtcgtcgtcgtgggtgtgggtgtggagacgacgaagtcatcataatcgtcatcgtcgtcggtgtaactgtaatcatcgcaatccgtgaagtatctccgtggtgaaaggagcacaccgcctgcgccggccagagcagccaacaacacagcgcgtggatggtggcttgcggcggcacatggccggagatgacaattagatcggcggagaagcgattgcagcattcgaattttttgcacccactctcccgaggattccggaaaggtaaaacctaggtgtatatgactcggacctatatatagcggatggaaattttacagcactagaaaaaaaatgcttccatgatatgagaatttaagaaaatattgttggcaactttttttgacaagttgacaagcacgatcgcagcaccttaagctttgcggtgatcctagagtcgccaaccacctcgatctagcaaagagctaaacctagatgtgttttgataactaaaccggctagcggagccgatttctagataactacccgtctcgtgggcaaaacggaaggttttcaggacaaacctacaaagagatgtcgcactctcgcagcggcggcggacggtttacggcgcaaactgacaaagatggacaaactaagagaaaactaaaagcaatatgaaaaaacgattcgattgattgattgtagattggttttttacaatgaaccggccatgtccattatataggggttggtcttgccctctacaggctctcctccaagtccaactccgggtagaaaccaaaggaaacccgaaacatgccttcccgagcaaggaaacctcaagacccgacgaaacacagtcggactcggacctgccggtcagaccggccacacaccgccggtctgaccggccctcaactggcagtctgaccggccaacacacggcggtcagaccggcccactcggaggaaaccggtagatttccaaattttggcaatctttcctattttaatcctaggtgccaaatttgggtgtaaacacatgccccctgccttttttatgaacaacgtgaatctaaaagcatagaacatgttttggtctaaggacgataatccaattaccggccatagtacctcctaagcgtcttgccaaacgctcgggaagtatttcttcaagtatttcccgttgattgctcgctaaaaacgctccccttgaagtgtctctaaaaaatatgcgttccctcgaacaatgccgcatactcgataaggaccctcccaactaagagaccacataccgaactccttggatcgagtacccaaaggcaaaattgtcttccaaactaagtctccaactagaaacaactttgctttcacccttttgttgtacgccttagccaccctcttcttctctttctctatttcttccaatgccttcaagcgcttgtcgatgacttcatcaagattgtcttccatcaacgtcttgtaatcttcacttgacaaaccatcttgcttgatataacgaagagaatcaagatttacttccaccggtaaaacggcttcttgaccataaaccaactcaaaaggagcgactttagtggcatcatgtttagaaatcctatgcgcccacaatgcttcggaaagcacctcatgccacctctttgggtgttcctcaatcttcttcttcactgatttcaacaatgtcttattactcgattcgacttgtccattagcttgagcgtaataaggagaagaactcaacaatttaataccataagattcggtaaaactcttcacttccttagacataaaagaagcaccttgatccgtagttaatgtttgtgtaataccgaatctatggataatatgcttcaaaataaagtcaattacctccgtatgagtcatattcttcaaaggcatggcttcggcccacttggtgaagtaatccgtagcaactagcacgaacatatgcccctttgatgacgaaggataaatttgaccaatgaaatccaaagcccatcctcggaacggccatggtttgattatgggattcaacaaggcggcgggcgccaattgaacattgccgaaccgttgacaagcctcgcatcctctataatatttgaagcaatcatcaatcatcttcggccaatagaaccctactctcctaagcaaccaattcatcttgtgggccgattgatgagttccacaaattccttcatgtacctctcccatagccactttagattgatcttcatctaagcacttcaacaagacaccatctatatttcggcgatacaaatctccatcaagcaatgtatatttgaatgcttgccgccgaattttccgatcaaccttaagtgtaggatctttcaaatatcgaatcaaaggaattctccaatcctcttctgttcccttggcacaaatgtccgaattcacacttaattcggcctctaaattgattgaagcgtgccccccagcgctctgcccagaaccggtcagactggccacgcagggccggtcagaccgctcggggtcgccggtcagaccggcggcatgcggccggtcagaccgcccctgctcaccggtcagaccggccgtgcaatgccggtcagaccgcccctggtctccagttttgccaatttcgcacaaagatttaaaatcaagcaccggctcttctaatatcagaaataatcccttcttcacattatagccagatgcttgttgtgacaagtcatttgctctagaattatcatgcctagcaatatgtctaatagcaaaattatcaaaattggcaataatatctaaacatgaatcgaggtacctatttagtgatccgtccaagcatttgtagactccagcgacttgttgcaccaccaattccgaatcaccaaaagcctccacgtatttagctccaaccatctccataacttgtaagccgaataatatagcattgtattcagcttgattatttgtacaataatactccaaatgaaccgatgcttcatcacacatgccattaggtgaaaacaaaactacccctatgccctgaccttctttgcaagaagaacgatcaaaataaatcttccaaggtataactttaactaagcaaacctctccctcatagcaatatctatatgatggtctactataaaatcacatacaatttggcatttcatagatttcaatggttcataaggcaaatcatattctatcaaagcatatgcccacttgccaattctcccacttagaattggcctttgcaacatgtgtttaataacatcggcttgacaagtaactatgcatgtactagataacaaataatgcctcaatttgctacaagcatagtataaacatagacaaagtctctctataaaaacatacctcgtttcggcatccaaaagagggcggctcaaatatgtaatgatatattccttgccatcttcctcttgcgccaaaacggcaccaataactttgtcttcggaggcaatatataaccgaaaaggctttccggctttaggtgctcgcacaacgggtggagtagacaaatatctcttcaactcttcaaacgcctcttgttgttttgccccccaagtaaaatcggcttcttttttcaaacaaagtataggaacaaaagcatcgattttacccgctaggttagaaataaacctcctcaaataattcatgttacctagcaactttttaacctccttcttacatgtcggcgctttgaaatcacgaatcttttctatcttcttaggatcaatctcaactcctctctcatgcaccatgaatcctaagaacttccccgccgacacaccaaaagcacatttaagtgggttcatcttcaaaccataccggcgcatcctctcaaaagctaacctcatatcggctatgtgtcattccataccatccgatttgacaacaatatcatcaatgtagacctctaagataatacctagcaaatcatgaaagattaaattcatcgccctttgatatgttgcaccggcgttcttcaacccaaaagtcatgaccacccactcaaataaaccaacaaatcccgggcaccaaaaagccgtcttgtacatatcctcttccgccataaagatttgactgtagccagcattaccatccaaaaagctaatcaccttatgacccgaggcatcattaatcatcatgtcggctataggcataggatattcatctttgggattaactttatttagatctctaaaatctatgcaaactctaatcttaccactccccttcttctccaccgggactatgctagagacccactctgcataacgacacggcctaataaaccccgccttcaacaaccgatcaatctcctctttgactcggtcatatagcaaaggattaaaacgacgaggtggttgcttataaggcctaaaacccggtttaattggaagccgatgctcaacgagctcacggctaagacccggcatctcgtggtactcccatgcaaaaccatcaacatactctttaagtagctcgattatcttaaccttataatcggctctcatgtttttgtttacgaaagtcggccttggtttagtttcatcacctatatctacttcttccaaaggatcggccaatgtaaacccttttccaagcttctccacttcatcaaaatcttcaacagtttctccaatatcgttctttgtagaccgatattcttgcaccctcttttgtaaccactctaaattagcctctttactcattatacaaatttatatggcttagccgtgctacactagccggctttacagagataggtacaaatttgccatcggagatactaataaaatcatagctagaaagatccctccccgataagtattggatattcccatgacaccactcaaaagtagcatcggccattgcaacctcggctgatgtatccgcttgaacaatttcaacatcatctccgtcccattgaattaaacattgatgcaaggtagaaggcacggaacaattggcatggatccaacaacgacacaaaataacattgtagttaccttgcacatcgacgatgaagaaagcggttggtagcgtcttgtttcccacggtgagctccgccgaaaagatacccttcgcctccgttggttcaccattgaagccattgagaatcatgttggtcttcttcaactcatcatcctcacgccccaacttcttgaataatgagtacggcatcaagttcatggcggcacctccatccactagcatcctagagaccggcttcccatcaacatggcctttgagatagagacactacaagatatgtgtggctttttgacgtatttaataagacacatgccataatgtcactatatcatataatttatgatattttatttcaggcatttcaacttaatgacaataaaaagttgtgtgtcacaataaatgtcatatagctagtctaatgtcatccagtgacaatatttagtatgtcataagacctatttgtgtgtcacaaattattcggcgacgatgaagagatgttgtgtccatgccgtcagtgtttgaatcgggttccccaatttaaaggacgggtgcatgatcacttgcatattcatgggatggctactgcttacactagatggatacatcatggagaaccattggaggttgtaccacatgaaattgatgaccatgttgatgaggatactagtctcaatgaggattttgacatgaatgtggatgaggaagatgacactgatgatggaattcatggtatggtagaggagttgtacacagctgaagaagaaggtcaagggaaaaagtctatgtttgcaattctattggaagagatgaaacaagaactgtaccctggtggtccttgcacaaggttttcttttgtggtgaagttacttcatatcaagtcattttaccgaatttctaatgttgcattcacagtgttgctgaagttgttgtcatcatcattcccaaattgctctattcctgcatcaaacgaggaagcaaagcgacttatctgtgcattggggcttggatataattcaatccatgtgtgcccaaataattgtgttctatttaggaagaatttagaaaaaaatgatgtttgtccggtttgtggtgcatcaagatggaaagacaatggtggaaggaagaagattcctgagaaggttttgcgacattttccattgattcctaggctgaagagaattttttcttccaaaagaacggcagaggaggtgcaatggcataagttgaagaggaagccagtggagaatgagctcaggcatccagctgatggcgagtcatggaaaaactttgacagaaagtatgggtggtttgcagaagatgcaaggaacatcagacttggccttgctattgatggtttcaatccatttggtaaaatgagctcctcgtatagcatgtggccagtgtttcttatcccgtacaattttcctccatgggaatgtgtagagcaatcaaactttatcatgggcctgcttatccctggtcgagaatgcccaggaaaggacattgatgttttcttggagccacttattgaggagctgctagagctttggaaaggtgtccctactgttgatgcacttactaagaagaagtttgatctacatgctgctataatatggtgcattcatgattatcctggtttgagcacattgtcaggtagagtcacaagaggttattatgcatgtgtgcattgtgataaaaacccttgctccaaaaggataaggaatatgatatgttacattggccatcggcgtttccttgctagggaccatccatggaggagaagcaaggtgtttgatggtaatgttgaaaaccgtgagaagccagagaaatttaccacggatgagctgatggagcaactggagagggtcaaggatgttagaccaggaaagcatcctgaaagcaaaaaaagaaagtgggacgaagagggccaatgttggaagcgaaggtcatgtttgtgggatttgccgtattggtcgagtttgaagctgcggcataatcttgatgtgatgcacattgagaaaaatatatgtgagtacatccttggtacatttctaggcatggctgggaagtcaaagtacagtacaaattctaggcttgatttggaagatatgggtattaggaagcatttacacttgatccgtgatggagattcatatagttctcctcatgccccttacacaatgactaaaacacagaaggctgatttttatgattttttgaagagtgtaacatttccagatggatatgcttccaacttagcaacatgtgttactgcagatggatgcaacctccaaggattgaaaactcatgattgtcatattcttcttcaaaggattatacctgctgctgtacgaggaatcatgcccaaggacataaacgaagcacttgctgaattaggtaatttttttcagcaactatgtgcaaaaactttgaacttagatgtgctggaaagattgaaagctaacatcccaatcattctgtgcaagcttgagaaaatatttcctccttctttctttgatgtgatgctacacctggctgtccatttacctgaagaggcaatttttagaggtccagtacaatatggatggatgtacccaatagaaagaaggttattaacattgaaacggtttgtgaggaacatggcaaggcctgaagggtccattgcagaagcatatgttgctgctgagtgtttgactatttgctcgaagtactttggtgatgatgttgagacacgacacaatcgggagggcagaaatagagagcgtgttgctattgtgaaaaaagacctatctgttttccagcatggagttgatcttcttggagcaccaagtcttacatatcttgaacatgattgtgaaaaaatggtttggttcgtgctaaacaattgtctggaggttgagccatatattgagtatgtcatcgcatctactattttcattgtttcttggatcttacttattagccctaatgtttgaattaactatcatttttaggatatataagaaagagttggagaatgaaggatgtcctaatgttcaaaaaacccttgagaagcaattttctcgctggtttaagaagcacgtgagtttgatctctattactttatttcatcattttcttcctggtttaagaagcaaactttttatgtcaattatttttttgtgcagattacaaaacttcgttacgtggatagacaagacataaatgatgagctatttgcgctgtcatgtgagcctgatctgcgagttcgaatttaatcagcttgacttgtcaacggtgttcgattccacactgtagaccgtgagaaaaatagaagaacacaaaatagcggaattatggttgagggtacacatgataaccaggaaattgacttctatggttccttgaaagaaataattgagcttagatacaatgcagattcaagtggcgataggacggtggttctatttcgatgtgattggtttgacactcatggaaagaagttccgaatgaaggaagatgggttcttcaaaagcataaaccatggcagcttgtggtacaaagatgatccatttattctagcaacacaagcaacaaaggtattttatttgttagacaccaagtatcatgagaaatggcgagttgttcaaaaattttcacatagacacttgtggagtgtggctgaaaatgacaatgaggatatacccaatgctgtggtattgtcctaccaagacgatgattgtgaaggtgtgcatgttcaacttactgaaggatgtctagaaaatgaccagccagttagtgaaggtggttttcgtgttgatgctagtgtagttgatgacctccgtatacaaagagaagcggaagggcaacaagatgagtcgggcgacagtgaagatgaaactggatggcaatatgtgagtgataatgaaggtccaacattccctctagaagatgacgatgatagcaattatgagtagatttagttgtggtttcaatttagttgtcgatgaatgatgacttggactatgtggattattttgtttaaatagcctgtactgcaattgatgctgatgttgtgtgatgctgctgtgttgctggtactactgttttgctgctgtgttgctgcagctgcagctgctgtgttgctcctgctgctgtgttgccgtgctgctgtgctgcagctgctgtgttgctgatgctgttttgctgctgaaattgctggtttgctgcgaatgctgctgaaattgctgctggtactgctgagatgctgttgaaattgttgctgctactgaaaacttgcagatacagctattttgctgcagctgctgctgttttgtggctgttgctattttgctgctacagatgcagctgatgctgtatgatgctctaataatatagaactaattaaaaagtatatatgaatctcaaattattacaatcccaataataagagttttctgaaatttaataaaaataacattgttgactaacaaataatataggtatccacccactaatattggtctccatgacgttgccacaaatgttcgatgagatcctcttgcaaccggttgcgaattgtcttgtcattaatttttggatgaggaaatcagccacctgagtagtttttctctcttcttaatcttcaacatcttcgatcacgccggccacaacttcattgccgccgtggagctcgcccactccatgtgccatggacaagctcgaccatgccttcaccgttgaggggatcacctgaggtacgtggggccgacaggatctagtgacggcggcctccctcgatgccagatctggtgatggcggcctccataggtgcacgggagggggctcctagtgctcctagagggacgagagggaggtcggcctgacgctagatcaatctgagctgttcattttgatcagcagctctttttcccttccccaccacgaactgcctctccccctccgccgctccgtctccgtcctccctgttccctcaccggcggtgcctctccccctccgcccctccctctccctcgccatgaggttgcaggaggactcgacggtggtgggcggcggcaagcggcggatgacgtacttaaaacccaactcaaatacggatctggatttccaaaagcaaacgaacataaaaactgggcacatacacggatgacgtaccaaagtaccagcaaaaacatcttcaatttttataatagtagagatagagattttcccatcggagaaggattgaagcgggatcgatcgcacgcgcgttggatgattttttttggtgacggacgaaaattctcacccggaagccttacatatttttttaagtaggtatagatgtgtaacaatgaataggaaaaaacggggcgtgcgccatatttctattatccttgtaaccttacatattttaatccaccaagaatgttctgtacaacttgaaaataaaaatatgtactgcattgtgaccttgcagatagaattattttagagaccttggttcaatatagtgctgcataatctagagttgacacttgtttatgctgcttgttgctcgctgttgctgcacactcccagggtatcatttgaatgctatttaatgatatgttcatgctcttgtccagagtcaattcacaatcaacacagatgctgatccagtgatagctgcattttctgatttgctcaaaaatggacagcggcagatgagatacaggctaaagaagaaatatttcaatggtataccagcaaatgaagttagaacaacttcaccgctaagctctatgactgacaatgagtggaaacaactcgtggacatgtggtctaccccaaagcataaggtatatctttccttaatatctatcataaatgttgccttacaaaatatgaattgtctgtccagtaatgtttgtctttctataggaaaaatgtataaaaaacaaagatagccgtgagttagttcaataccaccagatgacaggatctcggagctatgttgcacaatgctatgtcatggtaagataaaccgttgcatctctacaaacttttgtgatttttagttgatataggagcttgtatatgtccagaatgtccactagcagcttgtatgtgtcttgagtgggttgaatattcagaactattgtctaatttacagaattgtgctttggtggcgtctcggctaaaatcacccatattcaggatatgggtgattttatcccagccaacaaggtcctgcatgtgggtgattttagacaatatttcagaaaagtagacaacagtttggtgttctatgttttccttgttttggtcataagtggctgctattgttcagcttggcgacaatagtgcagccagcttttgtcgcctgcagctgttgccctccataaatgatgtgttcattgtcaataatggtttgctcgttcatctctagactaagggcattaaattggatttttgagctgctactattcatttaacttttcacgtgcttttagttaacttctttaaaaaaaatatgcttttagttatttatttttctatttgtatgtaatttcaaaagcaaaccaaatttaaggatgtgccaccaactgcgattgatattttcaaggacacccactgcagtagcaagtcaggttttaatgagaacgcaaaggatgccattgtgagtacctttccctatctggttactatgaacaacacaatagattactacatatctccatatggacatcagataatacctatatatattctggacactatcatagaaggttttattccaatcatttcatttcttccactaggttgcatttctatatggacatcattacacatatattgttctgggtacacatacataactagcatagaaaatctgattttttttttggttttattgttgctaggctcaaatggaggcctatgttgctcaaccaacagaagaaggcaaagatccaaagactcctgttgaagctgtagctcatgttctgccaaaatcaacttttcttcgcaatgttggcatgcagtccacagagatgaagaaaaatgccaaagctgctgcaatgaatgatcatgtacgtgagctagagagtgaattgcatgctgagaagatgggatcagccagaatgcaattgcagatagctgatctacataagcaattagaggaccagaaagaggtagcaaggaagaatgaagaagaaactgagaagctgaggcatcaaggaagtgaaatccaaagcttccttcgctccttgtttggcagcaagtttgcatcatcagatgctcagcagtaagctctcatactcaattaggttctagatgatattttggtaacactgaacttgcaaccattgtgattgtgggatgttattttggtgctgttgtgcttctggccgttgtgctgttgctgctgtgcttttggccattgtgctgctgctgctgctgtgaagctattgcaaatatgctgttgttgctctcaatgtagcaggaagatgaaatttgatactttggatatgtattgaattagtggatagatgtactgatattgaattttaagacttgtggaatgtgaaatgcatgtgacattgcaatcatttgtggaatgttaattcatttgaatctgattttgtatgtgctgaaatattgtatctgggctgaattgtatgggctaaaaaaaattagttgagttatgtgggctaaaaaaattatatgggctggaaaaatatatgggctaaattgtaggggctggaaaaatcatatgggctgaattgtgcgggctagaaaaatcatatgggccgaattggtgtgggctgaaaatttgtacaggctgcactcattaaaaagaagcaaataatatgctgggccaactagaaacaaccccagaaaaaaaaatatttgtggcccatgagctacatgggctttagcaggccgaatcttattttgtgacgttttttttcaaccatgtcaactgccaagtcagctgccacgtggcaagccctaggattttgtgacaataaagcaatgtcatatgcttgtgacaatagatgtacaaacgtcacatactaaatttataacggtggctttttgacgtttgaaattacgtcaaccgtttgtcacaaattgtaatttttgacataaatttcacatattatgacataataaaatgtcaaaaagccacacacctcttgtagtgagaggcttcatgtgacggtttgactcatcgggcttctcaaaaaccgcgtctttatgacctaatgagaattgagcaacctcggcttcatccatagcacaaaactccataggcaacatacataccatgttgatatccatgtcttcttctggagatgattcacctttatcaaccgattgctcctccttctcctctacaacaaccggcttttccttctctatggatttatgcctccataccgtggtggtcgtaactcattaaaccttttatctctttgttcttcggcttttttctctcttatctcttgagcccgaagacgttgcaaccttctcttttgagtagccgtcaaatccttaggcatccacctaggattcggctctgttccaggaggtaaataatgtcctctattgattttgcttagagacgatgaagccctcacatcaccctttgcaatcctcctatcaaaccggcgctggagcccggtcagaccggacgtagaccaccggtcagaccggccagatgcgcctgtcagaccgacatttggtgcgggtcagaccggcctgaagcgtcggtcagaccggtgtcggttgggcggtcggaccggcctgatggcccggtcagaccaaccacatggctgcggtcagaccggccagaggacccggtcagaccggccgactgcgatgagctggtatcggcttcggattttttgtttggggacactccaactccatctccagaaggtattggcacatcatgagaccccactttgatagtaatcacctccgaagtcctcacctccaccttgacgcgctttccttcccttttttcttcattagcccgattcttaccataaaaccggctattgtttggtgaagacaaacgctcatgaattggcctcctcggtcctccccacccttgattgaattgcattggaggcatatgattgaacattggtggcgtcgccccccatggcatgaagtaaggataaggataacccagcggtggcattggataagaaccccatgacatgtcttgtggatgatgatatgaaggggaatgtgaccgtcttggtgaatgaccaaatcgctccctaggaggtgatcttggtcttttccctttgttgcgagccctctcaccaccttgcttagctccactcttattctccttccaaacgtcaacctccggcttctttggcactatcatcttaggccttggttcgccaatgaccactcctttttccttagcagatttggcttgctccggccgaatcaactccttatcattgaaattaattgtgttcaccggaaaaggatcatgatcaagcttcatcttggagccatcggtgaacttcaatcgtccttcatctatggccgattgaacctgtcgtcgaaacacattgcaatcattagtagaatgagaatgagaatcatgccatttacaatatgctcgacgtttcaactcttcttgagatggtatgacatggcctttaggtaatctaatttgtttttcttgtaaaagataatcaaaaatcttatcgcacttggccacatcaaaactatatttaacctcactttgccaatctttgcgaggagtcggcattaggttggagcaaacaaaaggcttgtttttgttagtccatgaccattcagcaacatatatatcatgatcaccctcctcctcactatcgctagcctcagggtaatcaatcacattaacattaggctttttgtcatatgttctaacaagttttttattatccttgacccggctttcttgagccaaagccatttgcataagttgactaacatcaagaaattgttggccatctagtctttctctaagaggagcaattaaaccattaaaagcaagaccagccaaatctctatcagttatattcaagctataacatcggtttctaacatccctaaatctcttaatataatcaatgacaggctcattatacttttgcttaaccgatgttaaatcacataacctaagctcagtttctccagtatagaaataatcatgaaatttttcttctaattgagcccaagtatgaatagaatttgccggtaaagaagtaaaccatgtaaaagcattaccggacaaagataaagaaaacaagcgcaatttaaaagtatcactattagcctcaccacattgcgccaaaaattgacctacatgctcccatgtggtcttaccatcctcaccactaaacttggtaaattcggaaactctataattacggggaaacggcacattatcataataatcaggatacggctttttgtaaatcctagcacgattcctagtttcaatcccgaatctattcctaataatctcactaattatatcctccatattattaggcccatgttgatttggcggtggatttggtggcctaataggttgtgtttgtggcgcaatatgattatgttggccttgtctaggatcgggaggataccccctagcaacatcattataagcattaggaacatgtgggggaacttggggactacttgtagcagtagatataggcggatcaaatgttctaagatgatacaaataactagcattagtcattggatctattccctgtatcggaataattgtgccggtctgaccggcccagggcctggtctgaccggcatccagaggcgcggtcggaccggcctgagtaccggtctgaccgccggggtaatacccggtcggaccggccgtttggccggtcggaccgacggctaagtcgcggtatgaccggccgtcaggcccggtcagaccggccgtgtgtgccgctccatcggtttttctacccgtttgatctataggaggttggttagcagtggtaaaggctttatcctttgacatgtaatcggccataagagggccgaatttaacccttaaaaactcatcaaacttaccctcaaaagttgcatctaacttatctttaaaagaaatcatagatgaatctattgtagatgctacttgttgttggatagattgtgttacctcatcattacttaccaaatcgggggcgagcttaggacgtggcccgggcttgatgatcacgccttgacgagtcctagtgcttgccctcatcaacgcctcccgtgtgagttcgttgatgtactcctccatagctttgtggtcctctccttcgaaatcctccaatgtgaccagtatcacattggatggctctacctccgtcttggatggcggcttcgtcatggcgaagtcgaagttgagttgacgatgaacggatctcctccctagcggagtcgccaaaaatcgtgttggcaactttttttaacaagttgacaagcatgatcgcagcaccttaagccttgcgatgatcctagagtcgccaaccacctcgatctagcaaagagctaaacctagatgggttttgataactaaaccagctagcggagctgatttctagataactacccgtctcgtgggcaaaacgaaaggttttcaggacaaacctacaaagagatgtcacactctcgcagcggcgccggacggtttacggcgcaaaccgacaaagatggacaaactaagagaaaactaaaagcaatatgaaaaaatgattcgattgattgattgtagattggttttttacaatgaaccagccatgtcccttttataggggttggtcttgccctctacaggccctcctccacgtccaactcagggtagaaaccaaaggaaacccgaaacatgccttcccgagcaaggaaacctcgagacctgacgaaacacagtcggactcggacctgccggtcagaccggcggtgtgtggccggtctgaccggccctcaaccggctgtctgaccggccaacacacggcggtcagactggcccactcggaggaaaccggtagatttctaaattttggcaatctttcctatttttatcccaggtgccaaatttgggtgtaaacaaatatattcctaaaaaattaagaaagtttaaaaaaggaataaaaaaaggccactttgtaccccgccggcctgctagggcatttgcgcatgcagcccatgtaaaccacaggacccaatggtgctgcggcccaagaatggaggcccacccgacgggggatcgatccgagtcgttcattttgatggacggcacggattgatgctgaatccatcaaaacaatcgatgacaagaaccctaaccctaattcacattttcccctcccctccgccttccccactacccccatcaatgctctccctcccaccaccgttggcccctttcctccttgtcgggtgctgctgcctccccgctcctcgccatatatggccttaggaggcggtggcagtgcagctcgaccgagccaccgccggcagccactccgcgcccccttctcgttgaatctggccataggaggcagtggtggcagcttgaaagcgacagcgagggctgaagctcgacggtggcaagctcatactgctcatgtctctggtgaggtttggtgactggattttttgttcgatttgtgtttttttttcccattcaccattcttcaatttttgtattttcaaactgaattttaaagttgattttaagatattttcaatgtagtttctattttagtattaaattttaagtcgctagcaatacatatataaatgttttagctataaattaatttttatctccaaataagttgtttttttgacttattagagaatactgacaaccaatgaggaccttaatctgtgttcgacggtgtgagaaagtgaaaataaatcttgttttctgcatgcatgttacccgaattgataaatgacgtgttttttcaaaagaaaaatctgtagattttttacttaaaaatcatattaattcatttttcaggtttaaaatagttaatactcattaatcatattgtaatgacttagttttttgtatcttatcattgttatcttttctcatttactcaaacactctaaggttgtgttcggcacttagggatgggaattaatccctcgcacacgcaaaacggagtaactcattaacacatgattaattaagtattaatcctattttttgaaaaaatgattaatatgatttttttaaagcaactttcatatagatttagcagtttgaaaaaacacataatttagcagtttaaaaagcgtgcacacgaaaaaaagagagaggtgagatgggaaaacttggaaactaactcagcctaagtggtggtaattttgggataaattttaaacccaaaatagcagcttttttttttggaagggatggagtaaattagcgacctcatattttcgcttatgcttatgcttatcaaccaaaatttgaattttcaacctcaaatttgaagttaattttgaggttttttcatcgaagtttattttagatcgctaagaacacgtatataaaagttttatttgcatatcacttttcgtttgcaaatatgccgtttcacttattcaacgtgaataagcaaaacgatggggctgtagaatgcaaagtgggcccacagggtgtctatgtaattgtttttctcatatatggttcatacgataaaaaaatgttaaaccgtgtgttttttgcaaatgaaaagaagagtaaatcactttgggccattttttattggcgttgtttcgctttgcatcaccctttaaccatttttttacacttttgaccgggttattttacctttatagcactttgtaccaccgtcagttgttttatccatccacatctaaattgtcatatatcaaataaacggtttacatacagctaacggagtttattgacgaataagggcaggagtactcgaggtcattcatatgcatgagaaaagattaacagaggcaagattacccggtctaaagtaaaaacattggtttaagggtgatcaaaagcgaaacatcagtaataaagatggtccaaaataaaatttactctaaaagaaattttatagaaaaaaatatcttaaaaaacatattaatccattttttaggtttaaaataattagtacttattaatcatatgctaataacttgtctcattttacgtatcttaccattcttctcttcgctcaaatacaccctaagggttagttaatttgggacaaattttaaaccgaaataagcagttatttggagatggagggagtaaattagatcgtgaagtgggcccatagctgtacgtaattacttttcgagagaatcccttatatgccactacaaattggccagtccccttatgtgccactcaaaattagcttctcccttttatgccactggttcaagtttttcgccgctcccaacactatagcgttagttgactgttagtcaaatgttagttttttaaatgaccaatatgccctctcaactaaaaaaatgtgtaaatttcaaaaaaatcataactaatttattttaaatcttttttgagtgaacaaaattttgtcagaaccagtgaaaaatgctctttgtataagtattgttggaaaactatatgttttgtgcttatattgaaaatttatttgtgatggtgatggctaaaattgcatgtgatgaaaaaaaaatcaattttcatatgttgtatccagtagctatattagtactaaaatacctaccattggttgtataccaactctcaagggcaaatgcgtctttttactatgaagttagcggtcaactggcggtggagtgacggcaatggcataaaagggaggacaaacttgaaccggtggcatagaagggagaagccaatttgaagtggcatataagggaaccagttaatttggagtggcatataaggaattctatagttcataaggtaaaaaatcgaggaatattaattaataaaataagaggacttaaatagaagaggtagagagctgacatacaaaatctaccatcggtacattaagattatcgtgtgtcctgaaacatatgtgcttccattgtgaatatctcaaaagtacacgatcttcacaagaattcaatgaaaaattgagctaattcctataaactctaccaaaatattagcattaattacccttagcaattatacaagccatacaaagagcacgccaaccagcacgtttatttttccgaagagctggctcttgccttctccaaaaactgttcattacccttattatattgaagacttgctaaatagtacggcatgtgaaacatttacataattgaccgaataaaacattctgcattttagcacattaatatgtttttacttgttggcccattatgcggcaaagccacgtctcttttcatatgttattttgagctcagatttttttttgcaagttttcatttatctaagttatcacaaatgctaccgatcattgtcacttagttaatttatactccatctcatatatatctaagaaatcaaactaattccaaataattatttatgtattctaacgaaaaatataaatattcacaggatatttttagttggtgcgccaaaggcgcaccctttttctagtctactaatctaaagccagcacttttgccgacattccattggtccacgtgacattccattgcacatatatgtagtaattgcttattttatgatatatggagcatcaagatgcagacgttgttgctatctaaaggattgtggtatattgttgagaatggctacaaggagtattctggtagagacactcttacggcggaacagaagaagtctttggtagagtatcggataacggacgccaaggccttgttcttagatcccacaaggagttgcggaaagtctatttccgcgtattatcggggccaagaactccaaggcagcatatgacaagtttgtggtgtgacatttgtcaaaaatctagtcatactgcagatatgtgctggaagaaaatgacctgcaacaaatgcaaacgaaagggtcatattgcaaaatattgcaggtcttgagaaattaatcgggctaatttttcacaagaaaaggaaaaaaaatctgaagaaatggttttctcttgccatactgctcaataagaaaataatgatgtttgggttattaatagtggttgtacaaaccacatggctgctgatccaaatttatttcgagaaatggattcatctgatccaaatttatttcaagaaatggatttatcatatcatgcaaagattcacatgggtaatggctctatagtgcaaagtgaaggctaatgtacggttgttgttcaaacaacagatggtccaaaatttataacggatgttttgctggtacccgatctaaggcaaaatttgctaagtattgggcaacttctagaacacgggtactctgtttattttgaggatttttcttgcaaaatattggaccgtaaaaataatcatttggttgccaaaataaatatggagaagaataggaattttctattaaggatgaaccatccaactcaaatggctctcaaaagtgaagtcgatatttctaatctatggcacaagagaatgggtcatctcaattacaaagcactaaagctactcagggcaaaaggcatggttcaaggccttccatttattactctaaaatccaacccatgtgaaggttgtgtgtttggaaaacaaatacaagcttctttcccacgcagtggagcttggagagcaagtgcaccgttggaactagtgcgcacttatatagttggtaaagtgccaacaatctcagaaggaggaaattggtactttatcacatttattgatgattatacagaatgatctgggtatattttctaaaagaaaaatcagcagccctggatattcaaaaaattcaaggctatggtggaaaattagagtaatcgaaaaattaaagtattacgcaacgatcaaggaggagaatatatctcaaaagaatttgagaaatattgtgaaaatgttggcattcgaagataattaacgacaggctatagtgctcaacaaaatggagttgctaaaaggaaaaatcgaacaattaatggcatggcaaactctatgctccaagacaaagctatgcctaaatctttctgggctgaagcagttaacactgcagtttatattttaaatagtagtcctacaaaggcagtaccaaaccgttcatcttttgaagcttagtatggtaaaaagcctatcattggacatatgagagtatttggttgcatttgctatgctcaagtgctagcacaaaagaaagtaaaatctgataataaaagtgattggtccatatttgttggctatgctgatggtatcaaacgctatagactttataatttggagaaaaagaacattatcatcagcagagatgtgatttttgatgaaagtgctatttggaactggaagtctccagaagcctccggtactccattattgccaaccactacaatcacactaggccaaccacatatgtatggcaatcatgaagtggaagatcaaactccaagtcaagatgcatcaagtccaaggtcaaggtcaagcttcagttcggattcaagcccgagtagtgaagagcaaatttctacaccggaattagctccaagatgtgtaagaagtatggttaaattattataatctacttctcaacaaagagggacaaaacaatatgaattttccaattattctgttgttgagtcactgttttcaagaagcaaaaaaaacataaaaattgggttaaagccatggaagatgagattcgtatgattgagaagaataatacctaggagttggttgatcgatctaaagatggagaagttattggagttgaaatgggtttataagacagctaaatccagatggctcaattcagaaatataaagcaagacttgtggcaaaaggctttatgcaaaagcctgatattgactactatgagaaatatgctcctgttgcaaggctagagacaattcgtacaataattactctagcagctcaaaacaagtggaagatatatcaacttgttgtgaaatcggctttcttaaatggctatcttgatgaagaaatttatgttaaacaacttgaagggtttttagttcaagggggagaaaacaaagtattctgacttaagaagacattatacagattaaagcaaacacctagagcatggtacagtcaaattgataagtactttattcaaaaaggatttgccaagagcataagtgaggctactctatatgtcaagaggctagatatggacattttaattgtctcacactctcactatatgttgatgacgatatataccagtaatagtgagaagatgatgcaatattttaaaaaggacatgatgaatacatatgagatgagtgatatgggcttgttgcactatttcctaggaatggaagtgcatcatagtactgaagggatatttatatcacaaagaaaatatgcagaaaatattctgaagaaaattaagatggataactgcaagtcagttacaaccccttgttgccaaatgaaaagcaaaaggcaagagatggtgctgataaagcagatccaacaatttacagaagcttggttggaagtttattatatttgaccgcaacacgaccggatattatgttattatgtttgcggcaagtttattatcaagatatatgtttagcccaagtcagttaaattttactactgcgaagagagttttgcggtatatcaaagggaccacaggttatgttatatggtacaagccagttaagaattaaaattaattggctacacggatagtgattgggctggatgtcttgatgatatgaagagcacatccggatatgccttctcacttagctcaggtatatgctcctggtcaacaaagaaacaaaatattgttgctttatcttcagccgaagcagaatatgtagcaacatcaaaagccgtgtcacaagctgtttggttaagaagaattatggaagacatagacgagaggcttacacaaatttattgtgacggtcaatttgcaattgttatcggtgaaaatccagtcaatcatgacaggacaaaacacattgtatccgggaaacagttgatcgctaggaagttaaattgctatcggtgaaaatccagtcagtcatgagcagttggcagatatatttgccaattctttatccaaagaaaaattcatccacgattgagaaatgattggagtatgcatgaagtgaattaacggggagtttgatagagttaattcacttctataaactagtaatatgcccgtactaaacgctacggtgcaatttcatttctctttaataatttttagaatttcatgttagcaaaaaaatatttttatatgatctatgcatttgaactttaattcaattcatatcgtacataaaatatatttcatgtaaagtgcagaactatgatattgcgtgggcacaataaaactttacaaggtgaggcccacatgtaagtgataagagaaaaactaaaaagcgtagggcccacttgttagccctattctccctctctatcctttcccccaaaaaaacagcagagcaagcggagacggcggcgatggcagtggtgcgggtgatggcagtggtgcggtggatggcgatggcggtggtgcgggctgtctgcggtgcattatccatttaagttgtatggataaccatataaaaaaataatccagaacaattttgtaagcatatatatatatatatatatatatatatatataatacagaccataattacaatctcaaatgacagcctagtgcaaactgacgcatctagtgcgagatagtatgtagaagataatcacacgacattccatataaaaggtgatggcgtgctgtacaaaacaagaggacgatggtgagtaacattccgatgagcaatttactatattctgcaatatttttttgaattaatttagatcatgcgaacctacctttgctcaccagtcaagaacatctttatacacgatatttctagtgctcttccctgttgaatcaacttctttctttggctttgccaaaatccttgttgttagccttgacacaccccttgacaatgcgacatataggtgaccatgtgaaaacacgggctctggaagatagatcccaacatttgggatggtttgtccttgtgatttgttaatggtcattacgaaactaaaacgtattgggaattgcttcctcttgaatttgaaaggtagagatatatcgtcggagggagacaaagggatccgtgggataaacacccttttgctggcatgttgtccaccaacaatctcagcatcaattgcattatcttgaaaagctctaaccattagtctagtcccgttgcacaatccattatttggattaaggttgcgaagaagaatcacgggacaattgatttttattattagctcgtgtggtgggagaccatttagagtaatagagttaaggtagtctagaggatagctattgtgagggtcatcatcaacagagtcaaagctgtgattaaccttggcctgccctggaaatctgtcaatcatattaacattcagcttgtccacataatcattttttgtggatacaatggcacgtgtgctcatataagatgcagagcttgcattctttttatcatcaaacgagggaaacacatgattaatcaattcgtgtactaaatcctcgctatccccataagcaatcacaatttcatcaggcaaacgaacattatcatttctgatagtgttttcagtgccatttccaattctaaggagatattccgaaaatcatgtatcagattgagccctatgttcaattattgatccaattctaaggagatattccatcaattattgatttgtttcatgatattgaagtatattattcaaagggattgtgactgtttggataacagggagaggcggtgatattttgtcacatcaaattgagattttaaatagcatccatgcattcaaattacagaaaaaacttgcataccatgacttataagcagctccttaatatgtggatatgcacatatacacgtaatagatatgtgacactatagttcacaatcacatccactatttaccagcaaatctacatttgtacttgaatagtattaccttctctgtcgtgcagtggagagggttccggagatcactttgtggtgtcgcagtagagaagggggcacaggggcaaggagtcctggtagttggcatcggcgatctggaggcgaaaatcggcgccaacatatgtttagtctatattggtgtaagcttgaatgaaaagggaaatgcaaataaaaaacatatgagcctataacatttcatcccaaaatataccactgattattgtctagtaatttgttttctcatccttctccaattcaatacatattagagcccaaccataattccataatctgaatctacactaaataacttgaggtatttattccaacacccagcaattcaaggtagctgcccatccagcttcttttacttagcattctactgataaaagaaaaactatcgtggatctctaaaagaaattagagctagcatgactaaaaatccgatatgttttattatttcagaattaattcttggcatgtaatactcaattgtagcagaaaatagcaacagatactgatcattcacgcaataacaatcacaattgaactgtatggtaaattgatatggatcatgtccaagaacccgctgtcaactggaatagaaaatatgaatgaaatgctaatacagggaaagtgctcagttcagagtgaggtaaaaacatgaccaggcagcatttttgggcagaacctcacaaaaagcaccggttgtcctactattcataataagaatatataatgtattgtaattctaaaacactaaccatgattctattaaagcggttgtcaacgtccatggccgccagtctccatccagactacaacacgcacaacagtaacagccaaaatccgtcaaaacaaacataacaaagaagtcagtctctgtatatggctcaaataaggggataaaatcaatattctcaaagatatatggctgtccttagagagtaatagaaaccctgaaaaaaaattgtcctatcaataaaacaggtaaaataatactcctacctgagaagctaatagaaaagagcattcaataatatacacggtcggcgtggaggggcgccggcggcgtcacgcgcgaaggcggggtgtcggaatcgacagatcgacggcggcgcgcggcggcggcgggagagggaaagagtggagcggcgacggttagggttaggcggcgaccggcgttgcgcggggtaggggtgaggagatgcgacgacggcggagaggcagaggggcggcgcgggagaggagagaaatcgaggagcggcggacgcgggatcgacggcgaactggcgttgggatgaactcaagtggggaggggcggcgctgcgtggggcgtcgggcatcgacggggaagcgcgtgattcgggcggagatgggggagcgcgattctggacggtgtttgcgtggacgatttcagccgttagattagatgattctggatcgttggatttgataattcaacaactcattttactcatactcatccatcattggacaaatccgatggcttacattcatctgcgttgattcaacggcaaagatcggtccttgtccacccgcacttttcctttccttcctcactctttcccctaatcactcccggatttccctttcctttccaaccgcgcacaccgacacaccagtacacgaccaaccagcccaacactgtcatgcttgtggcactccacgccggcgagacgccgccgccgtgtcacctgctttgacggctccgcttctttacgatggcctctatcgacgacgcagcttctccgcacgccgctgacatccacggcgagagtccgtcgccgacaccaagtctcctttgtcggatcgtctccccataaccgcgagtccgtctcctgcagccgcacctgccgtcgactgtgtggggatcgattttggagatgaacagtgggcatggcggtggccgtcgttcgtgcttggggggataccaattgcgagcagtgagcctggccttcctatcccatgggccatggcgccgctgattcccggaacagatacccggcggcgcccatgccgcccatctcctgacgtttgcttccacgagtccccacgcgccccagcccatggcgccctcctgtgtgttaaaaatttggttataattcgacatattttaatccaaaatattaagacaataaacatgacatacataattagaagcgatcttgtgataaggctaaacataaacatgagcatgcttaagataaaataagcatagccatcgttgacattcacataagattgaaatcctatggataacattgtgaacatgtaaataacaagaagaaaatcaaataaagttagaatcttatatccagagaatggtgcagaagatattgaggcattcgtattgcttccgttgatgttgtctcctccgttctctcaagtagaagccatggtgaaccagaagtagtggaagatgaaacgttgtcgtcgaagaacgaagaacaggagcagtcgcgcttcaagcgctacccaaaaacttgatcgcccacctacccgtgcaagttctcaagcggacggagtttcggaggcacctgctcgtcccgtacacctgtgcgcgcaggtgaacagaaccggggaaggattctgcagctcaggaacagaggaggaggaactcgaagtgcaagagttgggaagaacttctccacgtccttcacgtcgctgcagagtatatacatatatatatatatatatatacccatatgggactccatggtgcccgggctccaaggtataaaacacacaaaatctcttgaaatttttttaaaaaaataaattgtgagtatatacttaggtatatgaatttgattcataccaatacctaacaacaaaataactcaaactcaactttatttcacaattcattattacatacctagcgaattatatgctttgatgttatataactagaaccaaaatctaacaaaaagaaaagttcaaactcagttcaaacttgtttgaacttgttagtaaagaagttaaagttcatacctaaatatttaaaaaaaattcatactcattcaaattgggtatatactcaattttaatcttcgagcccatactccatgtagcaccagttaaattacctatatatatatatatatatatatatatatgtgtgtgtgtgtgtgtgtgtgtgtatgcgagcgcgagagtaacgttcggagtcatcaaccgccgtgtttaatttcgtaaccgacgcgctcgttagttcggaatcaattcacggcgtttaattccgtaaccgacgcgctcattaatacgaaatcaattctccatgtttattaccgtccgttacaaagtgagagagagaaaacagctgtagctgcctgcctcgcctcgtcccaccccacctggctgtccgcacaccatctcaaccggtcaacagagacttttcactagttccgtatttaagttgagacctcttcacatagatttccaaggtggtattattacccatagcacttaatgtgggccaatggaatttattaggatttaattgggcctaacccattaatctaacaatccccaccaaatttcatggctcacaagaaatgctctcgattctgatcctgtttgttataccagtgtttcggtggagacttttaagttggacatccacctaggaaaagagctacaccagatcacaactgaacagtggactatgccttgaattatcagtcttgtgcgattcaggtttcactcaaacccttaaatggtactggactatcgtttgcatcccctctgtttggagcatataagtcatactcctggccttttcatgagtatctagagatcaccaagatctcatagactgtgactagcagtcggactcatataggtatgttccttctaagatgttctgtaggccaacatctctgctttatgaaaagccactcggatcacattaaagtgtataccatcctaccatacagattagaagagaagtgcatcatgaagataggctcattttagggtctcttctctcagctacactatagtttgttttgccatccaaattcacgggatctccgatcacaatggacaggtttccactattgtccaactctaagtgggtctcaagcccatctccctcgatgcacagtctatcacattacgtggtagccccttggtaaactgatctgccagattttttgccgtctagacatagtcgaatgctatcactccggagtttttctgctttctgacagacttcagtcttcttttaacatgcctggatgacttcatgttgtccttcgaactgttcactttaataatcactgtttgattatcacagttcatcaggattgctggtactggtttttcaaccactggcaagtccatcaggagctcacgaagccattcggcctcaactgtggcagtatctaaagctgtgagttctgcttccattgttgacctcgttaagattgtctgcttgcaagacttccaggaaacagcgccccctacaagtgtgaacacatacccacttgtggcctttatctcatcagcatcagatatccagtttgaatcactatagccctccagcacttttgggtacccggcgtagtgaatttcatagctcattgtcccttttagatagcgcattactctttcaagagcatgccaatgatcatctcccggatttaaaacaaaccggctcaacttgctcacagcaaatgagatgtcagacctcgttgcactagctaagtacatcaatgaaccaatgatctgagagtatctcaattgatcccttgctattcttcggtttttccttaatagcacactgggatcataaggagtaggagctgccttgcagtcactataaccaaagcgactcaagaccttgtccacatagtgagattgcacaagtgtaatcccaccctcatctcctctcagtagtttaatgttaagaataacatgtgccactcccaaatccttcatttcaaagcttttggacagaaagtccttgacctcctcaatcacattgaggctggtcccaaagatcaatatgtcatcgacatataaacacaagatcactccctctaccccaccatagcgatagtacacaatttgtcagcttcgttcacaacaaagccagcagatgtaagtgtattgtcaaactctcatgccattgcttaggcgcttgtttgagaccatacaaggacttcaacagcttacacaccattcccttctgaccttctagtacatacccatctggttgatccatatagatctcctcctccaactctccattgaggaaagctgtcttaacatccatctgatggccgagtagaccatgagaggctgccagagcgagtagtactcgaatcatggtcaagcgagcaaccggtgaataagtgtcgaaaaagtcctcgccttctttttgggtacaacccttggccacaagccttgccttgtacttttcaattgtatcatcaggcctaagctttttcttgaaaaaccattcgcattctacaggcttgcacccatatggacgctcgacaactttccaagtaccattagacataattgagtccatctcattgcttaccgcttccttccaatagtcagcgtcaggagatgaatatgcctcttcaatggttcttgcagtatcatccacaagatatacaatgtagtcatctccaaaagactttgcagtcctttgtctcttactctttcgagttgctacaatgttatcctcctcaggattttcctcaagcgtttgatcaatatgttcttcggcacaaagtgctcaggggataaaataggttcttgactagaagtgctaggtgcatttttcataggaaattcattctaaaaaaatgtggcatctctggactcagtaattgtaccaacacgcatgtcgggtaatccagaatttactattaagaacctatatcccacactgtggatagcataaccaaggaacacacaatctacggtctttggtccaagtttacgctttttggctataggtacatttagcttggccaaacagccccatgtgcgctggtgagagagatttaatttcttcctttcccattcctcgaatggtgttacttccttatgcttagaaggaattctatttaggacatgacacgcagtcaatattgcctcaccccaccattccttggaaagtcctgtagtgtctaacatggcattcaccatctcagttagagtgcggttctttctttcggctaccccgtttgactggggtgaatagggaggcgtcttatcatgaataattccatactcttcgcagaaagaaataaattcattggaaaaatactctccacccctatcagacctcaaccgtttgattttcctttccagttggttttctacctcagccttatagatcttgaagtaatgtaatgcttcatcctttgatttcaataggtacacatagcagaatctagtgcaatcatctatcagtgtcatgaaatatttctttccccctttagtcaacacgtcgttcatttcgtacagatcggaatgaacaagttctagtggtgccaaattcctcgcctcagatgccttgtgaggcttgcgaggttgtttcgattgaacacaagtatggcacttagagcctttgactaaagtgaattttggaattaaactcatgttggctaagcgtgtcatacaaccaaaattcacatgacagagtcgtgaatgccacacattagactcatcatcatcattgcttacatggttcacaactttattacacatatcatccaaggaaaagcggaacaagcctccgctgtcataaccttttccaataaacgttccatatttagatatgacacatttattggattcaaacacaagtctaaaaccatctctacacaatagagagccgctaactagattcttctttattgaagggacatgctgcatgttcttcagctgcacgatctttcccgaagtaaactctagatcgaccgtaccaacaccatgaatagccgcaagcgatccgtttcccatcaacaaggagaaacctctcccgacctgataagaagaaaacatggaaatgtcggcacacacatgaatattagcaccagtatcaacccaccaatcaggtgagtgacagacagagagaactgtaggtaaaaatttaccatacctcgatgttcctccgccctcactaataaccatgtttgcagacttcttgtccttgcgctcaggacaatccttagcccaatgcccagacttgccacacacaaagcaacctccttttgcctttctcttgcctttcttcttaaaattggttgtagccttgggtttgacgtcaggtttgacttttttgttgttgttgtgggatgcgtgagggtcttcttctacaccaaattggcgctagaacctctctcgatctttttgccccggttgtcctttaccctcgcattctcctcaacacccaaagagccaataagatcagtaacactgaactcttgcatcttgtgttttagagaagtagcaaagtccgtccaagaaggtggcaatttgacaataatgccacctgtcacaaacttgtccggcaactcacagttgttgttctcaagttcctttgccaacatctgaatctcatgagcatgttccactacagaacgatcatcgaccatcttgtagtcatagaactgctccatgacatacagctcgctgccggcatcggaaaccccgaacttggcctcaagagcatcccacatgtccttccctgaaggcatgtgcatatacacgtccacaatattgtcggcgagcacactgatcaatgctccacagaacaagcaatccgcagccttgaacttagcctcctcctcaggtgagagaggcggttcactcggtttgccccgtgagacaaacaaacaatgcatcgccgtcaaccacaaaagtgcacgtgctttccatcttttataatttgaaccatcgaaagcatatggttttagtgatgcaacaaagtcaactaccgaaaaagacctatcaagtttttggattgttggaaatttggtcataattcggcatattttaatccaaaatattaagacaataaacatgacatttgaaatttgagtagatctagcgacagtgctagatgtgtaatagtgaaacgttgtaccccgagaatggccctccgttggagtttgaggcagtattgcctccgttggtgttgacgagaggctccttctccttgtctccagtgttgttgttgtcaccggttgtcgacatgttggtgaagatgatgtagagcagtcgcgcttgaagcgctacctaaaaacttgatcacccgcctacccgtgcaggttctcaagcggacggagtttcggaggtacctgctcgttccgatcacccgtgcacgcgggatgaacagaaccggggaaacaaagagacagcgcaggaacagaaggagagtatcgccaaggaacaatagtaggaggaagacacacactttgacagcctttgccttgcgttatatgtagagagagagatctccattaccacacaaataaatctcatttgttgtgaaggttaccacaaaattaatctcatttgttgtgaaggttaccacataatgaatcttccatttgttatgaaggttacaacaaataaatctctcatttgttgtggatgttacaacacaatgaatctctcatttgttgtggaggttacaacacaatgaatctctcatttgttgtggaggttacaacacaatgaatttcatttgttaatggtgactttattctcatctgttacaaaacgaaagagcagcaggcaggctcggctcggtcggccgcctcgcctcgctacgcccacggccgaggccgactcggcatgcgcgcatgcgtgtggcagtccaaccatcacctcaaccggtcaacagggaatctctaatatcaccctatttaagttgaggttcttccacctaaattttcaaggcagtattattctctctaacattacttgtgggctcttgagattttagttgaattaaattgggacatatgagacaagaaagttcgcttcatttgatggcttttaacatgatttcacactttttcctatggttcgtccagatgagtacaggcctagcagtgacttccatgcatactcttttcatgtcatcctaccataccctctgatttggtcccgttagtggatacaagcctaggcgagattctcgctctcaggttcggtcctctacgagcggatacaaatcacggatacaaacataaattttgcataattcaccataaattaaacaagcacttgcttcggtcatgcttcatggcttcgagccatgctagtagtgatacaggcatagtgataaacaaaattaattgagcatactaattaattagcacgcacatttgctagttttgacatatgttcagccatatttctctaacaagaattaaaataaaatggcgtttattttctttccgtggtcagagataggaaatagatgtgcgcatgcatatattttctccttccatctattcatctacaaaatgttggataaatcacgaactacgccgagtcatgacggccggccataaaattaaccaacactcgcttcggttacacttcacggcttcgagccatgctagtagtaatacaagtggagtgaaaattataatctcaaaatcatctgcatacatatatttgcttaaaacagtgtatatatactcactgcaccatatataaagtgtagtataaaaaataatctgatatacgcacatgcatgcatccatatactctggccgtgcattttccttccaattgcaaattaaccatgtacgcacaacaagtggcgacatcgtgatagtcgaccataaatcaaacaaatacccacttcggttacgcttcatggtacagggccatgctagtagtaatacaggtgtggtgaaaatcaaaataggcaatgcaatgtgccgcaccaaaatccagtgacatgttgataataatggcgctaaaataaatactcgtttggctacgccccgcgagtgctcaggaaaaatttatatatgcgtgctacatataggaaaaaataaagtcacaatgccaaacaaggaagctatgtataaatttgctaccatacacgcagtgatattaaaaaccaacaaattagtgggcatctaaaatacttggacgcccaaaataaaataaacatataaatggaaatctacagaagattctacggctgcgacatctggagctttaggatagattttcctttttagccttttagcggtcatgtaattttattttctttcatgttggaattcctaatcaggggttttctctacggagatgtaattaacagaatttctatgtaaatgtatgaattctggaagtaatggactcgcaatttctgatttttatttatttattgcatttaaatcaaattgtctgtaatgatttgtagatagcagacctactattacgactgtcccggttttcccgtcgtcagattctggcacgcccggtgggacatacttctcccctcatctctgagttccaacatgtagaccgcaaatatgcaaaaaaaaaaggagataaatgcacatatccttagtagaaaaattcacgtactcatgtgcttcatccaaagcgctttatgaaattattatatgcatgctatggttttacagaaccagatcggttactcaaggagagggacctaaaccggtcaaatgtagtcattcacggcttcaaccaagcaggccaagaagccttgagcactatatcgttggtcctaaaactggaaccattgtccacctatgtgaccttccgtataattgatgccactacttcatataacgcgttacttgggcgcccatggctgcacgagaaccaagtagtgccatctactctacataagtgcatcaaatataaggataaatcaggagaaactgtgagaattttcgccgatgaaaggccattcacggtggctgaatccttttacacggatgctaaattctacattgagcccatcgaaaagatacagaaaccaaaagcaaagtcgctaacagaacatttcgtcacaagtggaagttatggtgaatcgtcttcaaaccggaaaatataccaatatataccaagcaaccggagaaaggagggtgagccaatatttcgtataatgaataggccatccgctagcaaagcaaatgggatatgacacccttaccggaccatctctatgtgatggccgagggcagctcgcgccgttcgagaaaatattgtctcaagcacagctcgaagcgttgcagcaagataagaaattaaaagagaagaaatatggacttggttatcaggtttgcaggacctcagccaagctcgtggacgcaacgatggcatctccacaaatggaggatgggaatcaacccaccatcgatgaattggaagaaatagatattgggacacctgatatcatcgcccaatttttattagcaagcacctatccgaagaaaataagaaaaaaataccataactttctttcagctaacaaggacgtgtttgcttggtcttatgaagaaatgcctggtttaagccctacggttgctgtccaccagctagctgtgcaggaggatatccccccggtcaagcagccgcagagaaggttccgaccagagctcctcccaaaaattgaggccgaggttgacaagctcatagctgtcgggtttattagagaagtcaaataccctacatgggtctcaaatattgtacctgtaaggaagaaaaataaccagatccgcgtatgtgttgattttatagatttaaataaagcatgtccaaaggacgacttccccattcccatttccgaaattctgaatgatgccactatgggatatgaaatattctcctttatggatggtttttcaggatacaaccaaataaaattagcaccggaggacgaggagttaaccgcgttccgaacgcctaagggcatatattgttatgaagtcatgcccttcggattaaaaaacaccggcactacttaccagcgcgccatgacagtcgtcttggacgggttattatatgaaattgtcgaatgctatatagatgacatcgtcatgaaatcaaaacgcgaagaagatcatctgcaacatttagccatagtgttcgagaccctcagaaagcacgaacccaaaaggaaccctatgaaatgtgcatttggtgtattgtccggaaaatttctcggatttatagtcatgaaacaaggaattcggatcaacccgacaaaaatacaagcaatagtgaaaatgccaccacccgtgaacctacataagctgaaaagtcttcagggtcacttagcatatattaggcgttttatctcaaatttatcagggagatgcaaacctttttcccgcctgatgaaaaaaggagttccatttcagtgggatcaagcgtgtcaaaatgcattccaagatattaaaagatacttaattaatcctccagttttaagtgctccagttaaagggcggcctctcatactatacacggctgcgatgcctacctccctaggtgcactgttggcacaaaataatgatgatggaaaaaagacagcattatattatctcagccgcacattagtgggggcagaatgcaattatttagacgtggaaaaaatatatctagcgcttgtcttcgcagcacaaaaacttcggcactatatgctagaacacaccatacacctcgtgtcgggggcggacccattctgatatatattgagtaaaatggtcctctcaggaagattagctatatgggcgatgtttttgtcgcagtttgacattatatttgtcccacaaaaatcaataaaaggacaagccttagcaaacttcctcgctgcacatccaattccggatgagtttcccattgatgacgacttacctgacgaggaagtatttgcgacctcaatttttaacccatcatggaaaatgtattttgacggcgcgcgtcgccggtcgggggcaggcgcgggtgtggtttttgtcacacccaacgaaagcataattccatattcgttcactttaacgacggcagtgtctaataatgctgctgaatatgaggcactgattgtaacacccaaaaaaaaaggtttggttgttggttttgagttgctttacagaagtaaataagttcgatagaaattaatggtagaaaaaaaaatacctatagaagtggaccaacctgggaaggcccataaacccagcccattgtttcttctctaataccctagaggaggaggggccggattcccccttctttccccccaaacgacgccaacactgctgccccctccctcctttgtacggtcttgggtgttctctcctctccacgacatttccactttcatagatctgttgcgtcgtatgatgaatcaagaaactagttgtaaaaacggaatgagaaggaggagaggaacaagaggagtggtgaattggtgtttcccgtcatctttattcttgttctccataaaaccttaggtgagacttccccactgttttaatgttgtttttgggtgtttttagagttgcaattcgtgggtaattagggtttagataaggaggttttgttgctatgattcggattggtaattctactctcgggaagatttacgaatgtaacacccaaaaaaaaggtttggttgttggttttgagttgctttacagaagtaaataagttcgatagaaattaatggtagaaaaaaatacctatagaagtgggccaacctgggaaggcccataaacccagcccattgtttcttctctaataccctagaggaggaggggccggattcccccttctttccccccaaacgacgccaacactgccgccccctccctcctttgtacggtcttgggtgttctctcctctccacgacatttccactttcatagatctgttgtgtcgtatgatgaatcaagaaactagttgcaaaaacggaatgagaaggaggagaggaacaagaggagtggtgaattggcgttcccgtcatctttattcttgttctccataaaaccctaggttgtggtgctccggatcatgcttggtatcgtctctttattgttcgagtcttttcatgtatttgctgtgacatgtttgcatgaaaggatgggattagctacacagtcgcacaacatgatctcacttagtcatgagtattgtaatatgctgataagattacttgtgtttagaaataatgggctaattaattactagagttgttgaccattggttaactacttttttcaagcctatccctacatgtcagtcaattgttgtatcataaacttaatctatatgttgatgcttctgcgatgtttttttttctaaggtagttgttaccgaaatttgcttgttttggcacttatgtgtggttgtttagtggcatctagacttatgtggttttctggggtgttacactgataatcggccttgagatagccttgaatatgcggctagacacactctatatatgatgattcacaactgataatcaaccagcttgctggaaaatacgcagtaaaaaaggaaggtttaatggcttactccctccatccaaaaatgtttgacaccgttgacttttttaaatatgtttgactgttcgtcttattcaaaaaatttaagtaattattaattctttttctatcatttgatttattgttaaatatccttttatgtatacatatagttttacttattttacaaaagtttttgaataagacgaacggtcaaacatgtttaaaaaaatcaacagcgtcgatttaggaaaggagggagtatttcacgagagcaaaacaactcatggccatgttcgcaaatctaaatatcgaacatgttgttagaagtcaaaatgagagagttgacgctctaaccagcttggctgctagcatgtcagtcaattcttattaaataatggacattcaagttgagcagcgtagagtattaccggtactcattgaaaaggaggaagaaattccatcggcagctatgataaccgatgttcacgaaatagaggcaggagattggagaactcccctcctggaatatttattgcacggatatttacctttagaagcatccgaaagatctagaattagaaaaagggtgactcgttatacgtgcattaatgacacgttgtactgacgtgcatacgacggaatgctactgcgttgcatcgcgggtgatgaggtcgtagacgctttaaataaagtgcatgctggagtttgcggtgcacatcagtctggatctaaattgtactatcaattaaaacacttaggttattattggccgactatgtttgaggattctatgaaattctcgaagaaatgtcatgagtatcaaatacacgctgactttatccatcaaccacatgagctgctgcatcctactaacatggcatggccattcgaaatgtgggggaatggatgtagtcggacaaattcaaccgccatcatctaaaggacataaattcatcctcgccgctaccgactatttctccaaatgggcggaagtcgtgccattgaaagaggttaaagctgaaaatgttgaaaattttattaggacacatctcatataccgttttggcatcccttctcggattatgtccgataatggttctccattcaaaaatgcactgatcgaaaagttgtgcgcgaagtttaaaattaagcataatttctccacagcatataacactgcggccaatggacaagcggaggcgttcaataaaactctctgtaaacttttgaagaaagtggttacaaagaataagcgagactggcatgataagctgctcgaggccctgtgggcatatagaacaacaacacgcacgccgaccggaatgactccttactctttagtgtttggaggggaagcgatcttacctatagaagttcaaatcccgtcactgagggttgctattcatgaaaatatagcagaagtcgaagcggcaaaacaacgcggaaactctaatgcgcgatcgatcgctaccgcgatcgggtagcgatcaccacctctcccccctccctccctccatgtttcattttttggcaccgcattactttcctattttagtaaatttatgtacctaaagtttatacacctaaagtttatagacccaaagtttataaatcaaaagtttatatatccgattcaaatttaaatttgaattcaaatatttttatagtatttttatacatctaaagtttatagacctaaagtttacaagtcaaaagtttcaaatttgaatttgaattatatccgattcaaatttgaatttgaattcaaatattttctatatatagtatttctatacatctaaagtttatacacctaaagtttatagatacaaagtttataagtcaaaagtttacataccgattcaaatttgaatttgaattcaaatattttctatatatagtatttctatacatctaaagtttatacacctaaactcaaagtttataagtcaaaagtttacatacccaattcaagtttgaatttgaattcaaatttttatatatagtatttctatacataaatttttctaactttttgtttttttaaattttttttgtggtttactgtagtagaaggggaggaggaagaggggagagagagggggagtagggggacggaagggtgatcgctggagcgatcacccgcccattaggcgtgcccaaaacaacgcttagatgaattagagaaattggaaggtaaaaggctgcaggcgttacaaaatttggaagcctatcaggctagagcatcgcgagccttcgataaacggctcaaaagaaggtcattcaaacaaggagacttagtgcttgctcttatccgccctatgaatattacacatcgaatgtagggaaaatttgagccaaaatgggagggtccctatgtcatgaggaagtagcgcgtacaggatcatctcgccggacggtgaatattatccggcacctataaatggaaaattcttgaaacgctattatgcataaaaaggataaaataaaaataataacaaataataatgaaaatactgcaccaagatctcaagtgcctaaactgtgcaatatataagaaataggggtgtgtgtgtatataagctaaaaatgaatcatacacactccatcactaaaataataataataataataataataataaaacaaacgctccatcgccgcacgagcttaaactgtaggcgacgaaaaaaaatcactcgcgctccatcgcagctcgagtttaaactgtaggcaacaaataaaaaataatcacacacgctctttagctttacaggcctacactataagcgtaaaaaaaacaaacaaatcacaaacactccatcactacaagtaaaaaataataataataataaaacaaatgctccatcgctacacgagcttaaactgtacgcgatataaaaaaaaatcatgcatgctccaccgctgcactgcacgagcgtaaactgtaggcgacaaaaaaaaaagcccacggctccatgagctcaacctctgggtgatatgtttatacatgtatatgtgggcttaaagactagtaaatgatgatagttaataaagttaaaacaattaaacactccaaagcctcaggtattcggagtgtggcgtacatgtgcaaatactgacaaaattaataaaattccccaaagtccgcaagtgctgaccaaaacaaattgcagcacagagtattgaccttcagagtcaagcaaatgtgctccttaattttctcaacaacgtttcttacaacgggcacaggaatagttgtgactataaacctcacgtgcaacaagtccctacgaatccgaaattatatgtcgagctccggatgcaaaaacaaaattttgacacccgcagctcgagggaggatctgttgacaccaatttcggctcgtgtcttaaacaaggtatattcgatataaattaatgtataatctcaaatataatgtaaaaatataataaaaaataaagaaataaaagtggaaataaacagtcaaaacagtcaaatgaataaatagagtaaaatggcgaccaaaaataaatgtccacaatataaaatctctcatttgttgtagaggttacaatacaatgaatctctcatttattgtggatgttacaacacaatgaatctctcatttgttgtggaggttacaacacaatgaatttcatttgttaatggtgactttattctcatctgttataaaacagatgttataaaacggaagagcagcaggcaggctcggctcggtcggccgcctcgcctcgctacgcccacggccgaggccgactcggcatgcgcgcatgcgtgtggcagtccaaccatcacctcaaccggtcaacatggaatctctaatatcaccctatttaagttgaggttcttccacctaaattttcaaggcagtattattctctctaacattatttgtgggctcttgagattttagttgaattaaattgggacatatgagacaagaaagttcgcttcatttgatggcttttaacatgatttcacactttttcctatggtctggccagatgagtacgggcctagcagtgacttccatgcatactcttttcatgtcatcataccataccctctgatttggtcccgttagtggatacaagcctaggcgagattctcgctctcaggttcggtcctctacgagcggatacaaatcacggatacaaattgcataattcaccataaattaaacaagcacttgcttcggtcatgcttcatggcttcgagccgtgctagtagtgatacaggcatagtgataaacaaaattaattgagcatactaattagcatgcacatatgctagttttgacatatgttcagccatatttctctaacaagaattaaaataaaatggtgtttattttctttccatggttagagataggaaatagatgtacgcatgcatatattttctcattccatctgtttatctacaaaatgttggataaatcacgaactacgccgagtcatgacggccggccataaaattaaccaacactcgcttcggttacgcttcacggcttcgagccatgctagtagtaatacaagtggagtgaaaattataatctcaaaatcatctgcatacatatatttgcttaaaatagtgtatatatacttgttgcaccatatataaagtgcagtataaaaaataatctgatatacgcacatgcatgcatccatatactctggccgtgcattttccttccaattgcaaattaaccatgtacgcacgacaagtggcgacatcgtgatagtcgaccataaatcaaacaaatacccacttcggttacgcttgatggtataaggccatgctagtagtaatacaggtgtgccgcaccaaaatcccgtggcatgttgataataatggcgctaaaataaatactcgtttggttacgccccgcgagtgctcaggaaaattcatcaatttatatatgcgtgctacatataggaaaaaataaagtcacaatgccaaaaaaggaagctatgtataaatttgctaccatacacgcagtgatattaaaaaccaacaaattagtgggcatctaaaatacttggacgcccaaaatgaaataaacatataaatggaaatctacagaagattctacagctgcgacatctggagctttaggatagattttcctttttatccttttagcgctcatgtaattttattttctttcatgttggaattcctaatcaggggttttctctacggagatgtaattaacagaatttctatctaaatgtatgaattctggaagtaatggactcgcaatttctgatttttatttatttattgcatttaaattaaattgtctctaacgatttgcggataacggacctactataacgaccgtcccagttttcccatcgtcaattttctatatggatcatctatgtgatcctaatccatgcaagatttgggactaactatttgattgctcctgaactgatcttcagaaaatactctactgttaggtgttagattcagaaatgctgtcttttccggtttgttgaaattagttccaatttgaagaaatcatgtttgacttttagtgattgaattaatttagtggcagagaaattagaacaatagcctagttaactactttttctcaggaagtatttaggcccttcatcagtgtatttgcagaccttgctgaaacattcaggccatacctcctggaaggagaaaatgttgctgcgcagccttgctgccctcagatgttctttatacactgatgaagaacaaaaaaacatagagagcaaaaaaaaaagataaaattttgatagaattataacgttaaaactgttagatttttttcgacggataaaatataatgaatttgaggttaagattttacacgtaagtataatactattgaaagtacatgcattattttttctagattttttggtgatatttattagttggtatgtacggtgtatacaagtgagaacttgtgtggataggatatgtttccaacttgtttatgcccacatgttaatggaatagctcttcatcaatctatttatgtggacatatgttgtcttaaaatatgtattaaagtgactatatataatggtgaatgttcttaattattttttctagacaatataatatttttgcattttgtcttaaatatatttttttatatgatcgcttaattggatcgattctaagaaaatcaattttactgtcatcaaatttaatgatttattaactaaaatattatgtcatcgtagcgtagcacgggcatattactagtaggagtgtagttggtgaattatagggtaggtttgtagatgtctctctaagactgtgtttagatccaggagtgaaaagttttagcgtgtcacatcggatatacggacactaatttgaagtattaaatgtagactaataacaacacaaattatagattccacctataaactgcgacacgaatttattaagcatcattaatccattattagcaaatgtttactcagggccgtgccatcaaatttgtaggccctgtacaaggctctaagtgaggcctaaatcaagtaccaaatatagctaaaataatgtatatactgcagagcaaatgcgatatatcaacaacagtacatttttgaactcttgttttataatcagaaactgtcaaactgaaaatggagaatgttcgttgctgttgctagcttgctgcctagtgccttgcttgttggttgcttgctaagttgctatatgctagatgaatgaaaatatgaaattagatgagccggctagcggcctggcgctcagaagagacgagacgtcgagactcgagacgaactgaataagtcacagatacgaaaaagaaatacaatacaaaaagccgtgaggcctcggggctcggagtcgagaatacgaagcgccacgcatgtgaagtcgccacgcggagatatgcgcgtactcgaacggggttctggcgctctggcctcacacgaatacatgggccttctctggttgggctgattttttgaggccctggaaatttggagaccctgtacggtcacacaggtcgcacgcccttctgcatggccctgtgtttatgtgtttattgtagcacaacattgtcaaattatggactaattaggtttaaaaaattcgtctcgcaatttatacgcaaactgtgtaattaattatttgtttatctatatttaatactctatgcatatattcaaacgtttgatgtggtaggataaaaaaatttaccagggaactaaacaggccctaactctccctaccatacttgatactagtaccaaaagtcaatgtgcagtacaaccattatctgtaaaaatctagagaaagtgtagactctccctacatgtatgcagtgtagtagtactaggagagtactagctaggatgggtagatttcttcggcttctaccatagggtgtgttcgctattcatggatcccaatcggatccttccacacggaaaacggagtagttcattagcgcgtgattaattttgtattagctttttttaaaaatagattaatttgattttttaagcaacttttgtatcgaaactttttgaaaaaaaacacgccgtttagcagtttaaaaagtatgcacgcgaaaaacgagagagaggttaggaaaaggggcatccgaacactccaatagagtgtcttcgatactcacgtttgggaacggtactctctaccacggaaaacggattagtttattagcacgggattaattaagtattagctattttattaaaaaaggaacaatatgatttttaaacaacttttatatagaaatatttttaaaaaagcaccgtttagcagtttgaaaaacgtgcgtgcgaaaaacgagaaggaggggttgggaacccggaaaaaccaatgcatgtgtaagtgcctgatgatgtatccattcatcaaacaagcaagctactagtagggcctctcacagtgcaagctatgtcgcccgtacccctagcccaaaaggttggtccaaaaacacccacctcatagtgcaagcacccatatatgtatggtttaattggatgaaggcactagtaaaggtaccaagcccacagtgggtgtgaccctagacgtgttaccacacatttatttctctcaattaccctcgcctgctactcacgcgagtattcttctcctctcctcggcgcgaccgcctcctcctctctcccgcatcgccgcgcctcctcctctcctgccacgccaccgtgcctcctcgcctcccacgccacggcgcggtccacggcgccgcctcgtcgcaagaaaccacgcgcgcaccggcgagtctttcccctccctctctgtcccacgctctgcttctcctccctcacacgcgccgaggaggaagcgggcacgggagaagggcggaagcaggcggcgtccccggtgacggcggtccggagtagggcggacttcgccggcggtggtgttaacgaccaaatttgataagatatgaaccaggttcgacattggaatcgaagcagattcggcaaagagatggattcgaagaacagagtgtgcatcggttgtgaagacatcggttggggtatgcatcggctgagatggatcggttagaggatggctgatgcaaccaatagagctgatatagctgatttcgatggagatagcttcgaggctgtttctggaatcaatcgatgtgcttaacaaggattgccacaatggagataaagctctcagataggcaattgtatctattaattaggatatcttatgtaatttctttagagatatgtttgggcaaaagtctgccgcaaagacttatagtgtcttagagtttgttagagatagtagtcgtgtccggcaatgacatattttgtatctcgggtataaatatgacccgaacccatgtaatcaaacaacacatgttcaataacactttcggcgcatcgccacccttttactttcgttctattttgacgagttcttgctttcgggttgagctgcatcgattcaatcttcaactagaggtaaacttgtcatgacggtttgcgttctcaggattagtgcttccatctttataacactctaatcttgtttatgtaattttttgagttatcatatatactttataatctctattagtttcgctatataacttgtcatcggctagtttttactgttagagagtagccgatagagttagatctcattattaatctagattataccgtatatctaccatctcttataggttttcatcatcttgtttagatcttacagttatctttatgcttaatgctgcatcggttgagtttgatctattaagtttatctataattgtgatatctagcctgttttatgatcatcaatagagatagtatcagagtttcagccgatcttacctgatttagttattcttatctcatatgcttgtttgttatgctaaatctgccctttatattaagatcttgttgcattgaagttatattaggtttattatttaatatatcttgcttgtctcaaatcttgatatagagtggtatcggagtattagccgatacatggtagatctatctgatcggctatgctataaacttctatataatctttgctttaatatatatttcgacttaagtaatttatactgtcttggcatgatgaccgatctatcccaatcacttagttcaagtatataccgaagtaaagattatatgttgttaatatctacagccgattgagtagatttagttttatcatttttattcattattgccgatcgagtcaaacatgacatcggctcgaagataaatgatatgtcattggcaactagccgatcggctatcatttatggatttaaccacggtttttcttattcttgttgattgcatgatcaaatcaactggcacgctcatgaacctaaaggcgagattttggacctgcaaaggagttaagcagatcttccaggccagtgtgtgtttttcacatcaacagacgactggcgcactggcgcggcggcgggaggcgtccccggtggcggcggctggcgcggtgtggcggcgagcagccggagcgtggggctgcagttccggcgccgccacaaccggatccagcggttcagcgttcgatctggccggggtcggcaagagtggacggctcaacgccgacgggcggctggcagcaggagcggacggcttctccacctcgccgatttcccccttccttttctctaccaaattactcaagaaatattgttggtttggtccgcatctgtggtggtttccttccttttctctaccaaattactcgagaaattttgttggtttggtccgcacctgtggtggtttgggagggaatttgttgtgcgtttggggggatttcagttcgtcgatgattccgttggagggtgatttggggttttctgtaggtggattcggcgcgagggcataaggcagtgaagaaacgctgcccacagcgcgcgtgcctcgcttttccctgtccgctcgcgccctcgccgcaacaaagtttcgcatagctcaggtaggggacgagaaacctagctaagggacgggccccgtcgccacgtcgacctgaatccgagctggcgcgacgaggtcccggtccagctcaccgcactgtgagaggcctaaagagctgtctactcttgagctgtccactcttgcatcacacttgctcctcctccagtacatcctctgcttcagaacgtgctcaacaaatatttaagcaccaacatcctctagtttggaagctgtgttcggaagccttggttgagaacccaacttctatgcatggaaaacggagcattccattagcacatgattaattaagtactattagctaatttttttaaaaaaaaaatggaacaatatgatttttttaagcaactttcgtatagaaacttttttaaaaaacacaccgtttagcggtttgaaaaacctgcataccgaaaacgagagagattaatgaaccctgagttcctctcaacactcaaggctgttgttggcccgatctttcggtgagttgtgataactacgatttgggagaaacgttgacgatccgactacaaccgtacgagacgttgtgttgcgccttagcgatcgatacacctctccgtgggttgctgatcttgccggtgcagataaaccctattcctgcaagcaaatcgaagaaacaagcaagaacaagataaaagcaatctgatattgcaaataggaatttaatacaaatgataagttggggttccaaagaacaagcagacggatggtctagccgacacgcgcgctgcaagcaagtagcaatggctaaactttaatctatcaaaaacccaagaaaccctgaaggggtacctaactatttatagaggtgggaggatgaccaagagggtccaagggtcatgctccaccagattggggcgcaccccacatgggccccacatgggccagggtcccaaacaaagttacaagcccattggcccaatacaggagacgcagcaccttgcttttgtgattgcggccaaacgagatagatttccgagatgaggctggatccgttggaaggaggacttcgagagctttccatcaagtactcacgggcccaaaacggagcacgtatgtagatttggcggccgtttgaagtcagcaatgtaacacgtggccgaatcagattgcagcacatggaggacttgatcgtgctccacctggctggggcgcaccccacatgggccccacctgggccggggtcccagacgaagttacaagcccataggcccattataggtgacgcagcaccttgttgcttcaattgcggctcaataagatggaattttgcaatgaggctggatccattggaaagaggactccaagagctttccatcaagtactcacgggccgaaaacggaggtcgtatgcagattcggcagccgtttgaagtcagcagtgtaataggtggccgaatcggattccagcacttggaggacttgatcttgatatcttcttgttgattcatgatgtgagcaatggtcgtatccatagtagccatggtcacatcatcctccccttcttcacagaaaaccgtcctcggtttttccatatggtgctcttcgcgcagtccactgaaaacaacctgtttcttgcaatcaaaacaagacaaactcgagacaatatgattagcagtaacatgtctctctagcttgcatattttatccggaactacaagatgttctaaatctgaacaaatgtaaactctatacaccaaaaatattcctctatcattatattcgccaaagatatgaaaaatagcattagttggacatggcaaatcagatttagcaaataatttctccttcaaattatcgagctcacaaaaatcatcaaactgaacatagcccaaagtatttaaagaagatagcaattcgcgttcctctacttcattagcaatgtgaacaacatgcttagaatcagcacacaaagaaatagtagaactaacatgttcattcactagttgtggcatggatataagtgaaacattatcacacaactcttctttatcacaaggaacagcaagtaaatcaacttgtgacaaaggcaactcagtaattgattccactaatggttgctctactatagcatgaaaagtggacaagtgtagctcaccttgagaatactcaccttcatttctctcagcaccatttaatttaccttgcgaactttcttcagataatgtagctgcatcagccttctcctcattcgcgagtgatggaaatgacatctcaaacatatcgttcttctcattttggagacttttctgaacttcctgcaaaacatcagtgataggaggcacaagcatatcttgttgctccattggattctccaaaattttgcgctcaacaatacaagcaagcatgaacaattggcctatatgattatatgtcacattaacaagcccagcctgaatattgaaattaagccctctgaaaaatctagtcattgtgttctcattagattcttgtaaaccactataagtgatacaaattttaaaatcatgaaagtactccctaacagttttgtcaccttgttttagatgttcccatttctcaaggagagcacgtctatagtatgaaaacacaaatctttttctcatcagtattttgcattcatcccaagtttcaagcttattccccacagtatgccaccaaaaagatgcagaaccggtacacttattactagcagccttaatcatttgagcattagaaaaatcatactcatcaaattgtttttctactgctagctcccaattaatgtatgcagcggaatcatactttccatcatagactggtaacttacatgcaacttgtgcaaaattatagtcatgtacctcatatgcatcacgtgaagaagtcgtcatatctcgtcgaaggtgtagatgttgacgttgagcatgaccatcttgtttccccttgcgcaatcctgccatggttagcagcaaacaagaaacatacacaagaatatacacgctcctatcaactactaggtactggcagctcaaatctcacacacacactcaagcttttaaccaagctcttacaagatcttaccaatgcaagtggaatggtgatgtacaccgactcaaccaagcaccccaatagaggttggatatatcgatgcctcggcaaacacttgccgtacggttgcaatcaaatctgtggagctctgggtaggcttaaatatgtagcaaaggaatagcaaatgctcaaatcagagaacgcaaagttgaataattgttcaaagtcaagtaccgtgctggtcctaggctagaacgtactagagacgcgagcctagacacaaacggtaccacaaaatagcaccagaaacaactcaagcacactctgatgtatgaagttcagctcaaacaaaacaatattttctcttttctttctttcttctttcttcttttctttttttttccttttcttttctgattttttttggtgcggctttttttttcttttttttttcacctttctgccttttttttctcactttttttcttattttttttaacaaaaactgactcaaggaccttaatgtaagattacagggactcaaacataaatataaaatttatagggactcaaatgtaaaagtctaaacccaaaattaaaattatacaaaaaatggaatgctgaatttatgccggttccgtttttccaaacagatctcaaaaccgacaccaaacaaaaattcgccaaggtgtttgacacaactcggaacggtggaagagagggagggagtcggactcggccaaaggggcgagtgggactcggccaggaggtggagtggatggcagccgaatttggtgtatgggataaaaaggaaactgatttttaaccaatccaatctactatatctttccaaaacaaacttgactacttccaaaatcagatatggtaattcaccttcctcctctcgtgcacgacacaggcacggccaaaacaaacacacacaaggatcggcaaactctagatgcaactcaagaactccaaaactaaccgatagaaacttctgaaaactacaaaaatagaaccgtggcagcgagccgattccgttttcgtaggtcccgacaacaacagagacacggtggcagcgacgactgtggtacaaaacgtgaccagaactcgagactctaaacgaactagacgctaagaccagcaacacgacgtgacgatgcaacacaaaattcaacaaagcaaaaactgaaaagaacaatgcaatggcacaatatggctaggtaaatgatacgaatttttttgtatggctattttctggttataggaagataaaaactcaccgagcaacgaaagctctgataccacctgatgaaccctgagttcctctcaacactcaaggctattgttggcccgatctttcggtgagttgtgataactacgatttgggagaaacgttgacgatccgactacaaccgtacgagacgttgtgttgcgccttagcgatcgatacacctctccgtgggttgctgatcttgccggtgcagataaaccctattcctgcaagcaaatcgaagaaacaagcaagaacaagataaaagcaatctgatattgcaaataggaatttaatacaaatgataagttggggttccaaagaacaagcagacggacggtctagccgacacgcgcgctgcaagcaagtagcaatggctaaactttaatctatcaaaaacccaagaaaccctgaaggggtacctaactatttatagaggtgggaggatgaccaagagggtccaagggtcatgctccaccagattggggcgcaccccacatgggccccacatgggccagggtcccaaacaaagttacaagcccattggcccaatacaggagacgcagcaccttgcttttgtgattgcggccaaacgagatagatttccgagatgaggctggatccgttggaaggaggacttcgagagctttccatcaagtactcacgggcccaaaacggagcacgtatgtagatttggcggccgtttgaagtcagcaatgtaacacgtggccgaatcagattgcagcacatggaggacttgatcgtgctccacctggctggggcgcaccccacatgggccccacctgggccggggtcccagacgaagttacaagcccataggcccattataggtgacgcagcaccttgttgcttcaattgcggctcaataagatggaattttgcaatgaggctggatccattggaaagaggactccaagagctttccatcaagtactcacgggccgaaaacggaggtcgtatgcagattcggcagccgtttgaagtcagcagtgtagtaggtggccgaatcggattccagcacttggaggacttgatcttgatatcttcttgttgattcatgatgtgagcaatggtcgtatccatagtagctatggtcacatcagacatgagttgggaaacttcggtgtacttttttttccaaaagaaattagggaaggcccaaaaagtaagatggaattgaacgggatcagatcgtccgcgtgcgagccgtttcgatccccctacctcctcctcgtacgataagtacgcaccccgagcgctcacgcgcttcgcatcccgcaaaaccccggtagaacccgcacccgcacccgcacccgcaccgccatggagttccggtaccgcgacggcgacgaccgcagccggtcctcccctcccccgccgccgccgcccacggcgagctctggatccgcccgtgtgctcccggccaacgaaggttacttaattaattattctcgatcgatcgatcgatctcgctatctgcgtctttttttttggtatcgtttcctttcttgatcagacgatgggcatcgtggcgcagacggcgggggcacgggagactacaacgggggtgattcggccgtgtcgctggggcagtcgtcttcaccgtcggcggctggtcgcgacgagctgcggcaggcgaagaagcagaagataatggagcggatcctgcgggaggaggcggaggaatgggagctcgagtcggaggtccgccgggagatcatggagcacatcttcccgttgctgaggagatctgggaatgcacggccgccgacgccggcggcggcggcggcgctcctgcaggttcgatcatcatgtcttttttcgtctacctcgattttgggttgttttaattttgatcgatattgaatatttgtttctagattctagcttaccttctcctactgctccgactagccgcttggactaatagcgtaccactaaatgttccgttaaattaatatagaccgtgtaatgaagaccatacccttagacattttacaaaagctatagagatcaaataataatattgtatactccctccattccaaattgattattttataggtgcaccaaaacaaaaaaaaataataactctctcatactatatttactcgagcaacaaactcaatgtatgcaccatccccactatttcctagtcaataacaaatcaagatattgcatgtgggttatatatacttagggggtggcccctctctcccaaacacccccttatgtgcatggatgcatgcatcaatgtccatttactccaatgcacaaataacgaatagacttaatgaataaacataaatatatatagatcatttaggaataaccttaaaaaaacctatatgtagatcaatttggaatggagggagtaacgtgtatctcgatcgttcatgtttttccattacatgtcttatttgatgacaatataacttttttatgaataatatactaataggattgataatccatatatggattcattactatagtcatatttcatcttcacaatgacctaagaataagtaattctatttattatccatttaaatattctactagttattccttgtaaacacgcgattcattaatatttacgtttctcaatgcccatgtagccaatcatgtgtagaagaatagacaatcatgtgtagaagaatagagagtcacgcattaaatccgagaaagtcaataagaggataggtggttggattgaaatatgtctatcaaaactaaatttttcagatttggaaatatgtctatcaaaagtagattgagggagtataatatagtacatttttatgtaaattgctttgggatttgcgatgacatgccgatgaagaagcacaataggaagattaatactattgtttaaaagcaatgaatttcaagtcgtgtcgtttatggatagaaattaatgcaatcaccgaaatgaggtgtgctatgaaacctcaaggatatatgctctcctctttagaaaactcttggtcaaaaaaaagttagaaaactggaaaagaaaacacttagaaattgtgtcaaccacctattgttttagaaacatacactgtcaaaatactaaagttgtggatggtatttcacattattaattatatggtcgtactcacaacatgagtccagttgtggatgatatttagaaggaaaaagtacgaattacctcccccgaactatcacagtcgtctgaattacccccctgaatcacaaaaccggacattcttcacccccaactatgcaaaccggacgaattaccctctcgacccaatccacggtggttttggtctacgtggcgtacgcgtggcagctgagtcagcattctattcattaaaaaaataacgggacctacatgtcatactcttcctctctctcactcttcctctctcttctcttctctctctctcactattcctctctcacgggcgggaggcggacacggagctgcggcggcggtggccggcgggtgacgctgaggcggcggcggtgggggatgagggtgacacggagccggcggcggtagcgcggcctcgccggagtcggacgtcgctacggcggaagaggagaggtcacgcaatgtggaggcgaggcgggtcgtgtcgcggcggcggagcacggcgtgggcctcggcgaggagctgcttcagtgcttgagcaccaggggcagcggagggggaccgaggacggcgacggccgggggcagactagttgggggcgacggtgccgcgcgcgcacggggaggcacacggcggcgtcgctttcttcccgcgctccagggccgcgctcgcacgagggggcaccggcggcggcgacagcgcacgagggagaaggctgggccggcgagcatgttcgtgcgggaccggcggcggacgggggcggaggccctgcggatctggaaagacgatgcgggaccccgacggcccccgtgcaccgccgtccgccgcctgcccccacgcgccgccgttgtccacggcgtcgggccgccgagcgcacttgtgccgcccttactcgccgccgtccgccgcgcgcccccacgcgccgccatcgtccgcggctccgcgccgctgtgcgcacttgcgccacccccacttgctgccgtcgtccgcagctctgcgccaccgtgcgcacttgcgccgcccctactagccgtcatccgccgcgcgcccccacgcaccgtcgtcgtccgcggctccgcgccgctgtgcgcacttgcgccgcccccactcgccgctgtcgtcccctccgcacttgcgcggttgttgcgcccgcgtgcaccagtgagagagaacggagagagaaattaggaagaggtgaagtggaggcatgacaggtggaccccaccaatttttttaaaaaaaatggtgactggactgccacgtgtatgccacggggtcaaggggggtaattcttctggtattgaaagttcgaggtgaagaatgtccggttttgtggttcagggggtaattcggacgaccacgatagttcgggggggtaattcgtactttttcctatttagaaacaaatctatttggttttctcaacattggtgaccagtctacaccaatccatgagttgtaactgtatgaacaatgacatgaactatctaataccatctaaataatcccaacggtcgattttgaaggtcggtttcataggccataattatgcttgcaagtgcgatataattcagttgtttgtatggcttgccacatcctcgtggatctatttttagagagttcatgggtaactaagatggtcacagttcctgatttgttgtatattggcccccgatgttcatgtatctgaataaactagtttctattaatctacaacatgcacttctattatcgagatatgatcaaactgttaaaaaactaagaaaacactttgaaattgcagcaaccatctattgttgaagaaacatgcaatgtttgtggatgatattttgcattattaaccgtgttcatactcacaacatatgagtcaagttgtggataatatttagaaacaaatctatttggttttctcaatgttggtggccagtctacaccaattcatgagttgtaactatatgaacaacaccatgaactatctaataccgtctaaataatcccaacagtagattttgaaggttggtttcatagtccacgattacgcttgtaagtgcaatataattcatttgactgtatggcttgcaacatcctcgtggatctatttttaggctcagttcggtagtacaggtacccaactcctcgttttccgcgcgcacgctttttaaactgctaaactgtcagggttatgataccacatacctaatagtagttgactaaatctcggcaggatccaccacataccatgtcctatacagaagcaaccttcggatataggaggagttctggataatgaaagacaaccagagttctacatgaaaatgacaaggactactcggattgtatccatattggtttccctagttctacttggacaaggggacaactatgggtataaatacaagcccccctaggaggacagggggacaaccatcatgagacgatcaacacccaatacaatcgacatagaagccacaatatagaagcctacatatgccaagacacgccgccggatatcgacttcagggataagcacgactagtaccctacggtgtctccagatactgtcaggagagacgaaagcgttatctctgatctcgccgggcgcggattcgaggaggaagactaccctgttgttgactacgagtcagatcgtcagaccgccatgtcgataacagttagataggctaccccaaacattgtactggtgtgattatcatgaataaaagcaataccggctttggccaacaggatgtagggttattacctaacaattcaggggcccgaacctgtataaaaatccctgtctccatctcttttgcctcagtctcgcgtatatcctagcaccaacgatccccatactgtccaaataccgtagtcgtgacatcaaacgtcgacataaacggtgtgttttttgcaaaaagtttctatacgaaagttgcttaaaaaaatcatattaatctatttttgaaaaaaaagctaaaacttaattaatcacgcactaaaacgttgcttcgttttgtgtgccggggagtgatggttcccaaccctcactcccaaacagagccttagagagttcttgggtaaatgagatatgatatatagtcatagttcctgatttgttgtatatcccccccccccccaatgttcatgtatctaaatagactaggtgctattaatctaccacatgcctttctattactaggatatgatcaaaactgttataaaactaaaaaaaaactttgaattgcagcgaccatctattgttgaagaaacatgcaatgtttgtggatgatattcccattattaactatatatttatactcacaacatatgagacgagttgtggttgatatttagaaagaaaatctatttaaccttctcaactttgtggtcagtctactccagttcataagttgtacctatataaataataacatcctgaactatctagtactatctaaataatcccaacagtgtgtttgaagtcctattttataggccatgcttatgtgcgcaagtgcaatataattcagttaccctgtaaggcttgccacccacatcttcatggatctagagatcaagcgtaattgagatagtcattgttctgggttgtactatatggcttccaatgttcacatgtctaaaaagggaaactctattcatcactcgaagggatatcctctcgattttcatgctacttaaaaggtcataaaaatattaaataaattaataagataaataaatatatgatatatcacttcacgaacatgtatattcaaattcaacttatataagtagaaacaaaaataacaaatttgattcggaatagaactttcaatttgcagtcaaatttgttatttttctttctataattgtttaattccaatttgaacttggcaactttgtgcaatgacatctatcttgccaagtttttaaatattttttgatgactttttaaataaaatgcacaaaacaagagaatattctctggatggataaaattccatctctgtctaaatatattactagttcttactatttctacaacattcggttctgtttttaaggatggctctaatattaatttatgtatgtgttgttgtaccttaatttctatctccatctttgtttcaaaatataagtattaaaatataagtattaagtacgaaggttagttaagttgaaaaggtggtactgtgcactagaatttcttttattttgtatacttgattttggatttaaaattttttatgtcttactatatcgatgttgtcaatattcactattccctctgtcctaaatgatgaggtttatatttttttctacacgatctttaataatatactttaaccattaatttattacgtgttatgtttccgacgaatatgaaattagcttaatataaaaatatttaaaatataaatctagtaatataatatgtatatatatggttagtataattattaatcaaaaacttaattaggacgccgtataggacggagggaatacttccttccgtgttgttcttatatacgtgttctaaaagttgacgagcgtgttcatttcacgcagggcgccgtcacgaatgcaaacgcatcatcatcggcggccgccttgccggccaagaggaagaagaaccccgccgcagcagcgtccgccgtctccgccgcgacgagtagcaagaagcccaaggccgccgacctgacctgcgccgtctgcggcatcacgtcgaccggcgagaaggctatgcaggaccatctcaacgggaagagccacaagaagaaggcggccgcgctcgcgctgtctgcaccgccgccgccgccgccggcggaacccgagcccgagcccgagcaggacgaggaggatgcggcgtcgatgatcccgccggcttcggacggcggcggcggcggtggcggcggcttcagtccgacgaagctgagcatgctgacgagcgccggagtcgtgtacgaggtgatgcagatggacggctacctcctctgcgagggctgcaatgtcaggacggccgaccgcgtcaccatgatgtgccacctcgacggcggcaagcacgtctccaaggccacgaagctgaagcagcagcaagccgggaagccgccggcgccagcgacggcgactgcctctcctatgaatggcgtgaaagcagcgggggcgccgccaacaacagctgctgccgccgacggcgagcatggaacggtggtggtggaggtcgacggcgagccacacgccatgcggaggctggacgaggtcttcattatctgcgatgtctgcaacgtgaaggcgccgtcggtgactgtcatgcggtcgcacctcgccgggaggaagcacaagtccatggccgcggcgacggcgaaggcgaagggtgccgaagctgccgcctccaccaccatggccgctgctggcaaagttggcgggaaccttgaggcgggagccatggcagtagcagaaggtgtcgccaccaacaacgtcgccgacaacacttgtccggagaagggaaccgtcgacatcgtcgtcggcggcgagcaccacgccgtcaagcagatcggcgagttcctcgggtgcgcgtcctgcaacgtgatggcgacgtcggagagcggcatgaggctacacctagccggaaagaagcacaggaacaaatcgatggctgaaaaggcggccatggacgacatggagattgtgaaggccaggtcgaaggaaacggcggccgccgccgccgcctcctcgccatcgtctgcgccgcgagctgtcgtcgctgcacaaacgggcgatggctctgtggcgcccatggaagtcgaccaaactgcagaggccagagatggcggcgcgccggtggccgccgacgccgcggcggcggcggctgccaccggcgggcagcagcaggtgaaggtccaggtggaggggaggatgttggcggtgctgcgtgaggcgaacggcgcgctgctgtgcgagccctgcggcgtgcgctgctccggcaagaccgacatggtgctgcacctctacaccaaggagcactcggacaagtgcggcgcgcatccaccggcttgagtcacttcacgcgaacgtggagtggatttttaaacttttggacgtcctcacattatttacatattatctaaatgaatttcttttaaaaaatttcctcttatagataggacgaacaaagaacaaagttttttgatcacttacttcgctcgccctttttgatcggggaagataaattaatatgtgatgtatcgctttataaataataagttaaaatttaacttttaaaattaagaaaataaattaaacgactgttaacatatatttattgttaaatttgttttttaacatataaaatttaaggaaaaagtacgaattacccccctgaacaattgcggtcggccgaattacccccctaaacccaaaaatcagtcattgctcatcctgaactttcaataccggacgaattacccccctcgatccaattcacagcggttttgtcctacgtagcgtacgcgtggcaatccggtcagtattttctttcttaaaaaaattgtgggacccacttgtcatactctccttcctctcttcctctctttctatcttcactctctctgtgtcacggtgacggggagtgcgagcggcgcgtgggggcggactggcggtgtgcggcggcgcgagcggcagaggacggcggtggaatggcggcgagcggcgcgcgggggcggacgggcggtgggcggtggcgtgagcggcgcgcgggggcggactggcagcgagcggcggcgcgagcgaggcacgggggcggactggcggtgatcggcggcgcgagcggcgcgcgggggcggactggcggcgagcggcagcgcgagcggcgcgcggggtcggactagcttctcccctccgccgcctcctctcctagcctcccttccgccgccgccgccgcctccacgctgccatctgccgtcgagagccccggttctccacccacgcggcgacgatggcgggcgttctgcgcggccacaacgacatggtcatggcaat

SEQ ID NO: 8010 - DNA, 15224 bp, Oryza sativa
  unsure (1)..(15224): unsure at all n locations
cgaaaaaattccaaaaaatctcaaatttcgccctataaatagggcatgaaccccagccatttctcctcatcccacactcctcatcttgtgctctcaagtgttttaagtgctctctttgttctcaagtgtgcattttttttgattttgacaaaatttgctcaaattttgtcaaaaatcaaaattagtttcgtagttcaacagtttgatcgcagaggtttgaagagctcgcggttggaaagatgtaagtaatattcaaatttgtgtattatttgtattgtgtttgtgaattcaataaatattcgaaaatttgtttatgtcggtttaaattttcagaatggatccgaactttccataccagtcgccgtcgttcaccttgggtgatttcgaccccaactacatgtcggggtttgacggtacctccggatcggctccaactccaccatctgtggaggaggtaccggttcatacggctgtcgttgaggaggtaccggttcaggcggagacagcttcggaaggattttccggaaccgcgagcggaagtgtttcgacacacaccggctcgaagagatcgagaacctccggtgtgtggcaaagcttcgacgagataaaggaaacatgccccgatggaagggaggtatcgaaagcccgttgtagaatatgtaggcaaattttatctgctcgttcttctggtggtacaggtcacctcaagcgccatgcggagtcgtgtgccaagaagcaaggaatacaactccggcagcagcaacttatggtaaacccagacggtacggtacgcagttgggagtacgatcccatggttgctcgagaatctcttgtccggttaatcgccaggcaagatttacccctgaactttggggagtcccctgcttttgaacattacattcagcaatctcataaccctaggtttaaagctgtgagtaggcaaacatcaactagagatttagagaatgtttatcacaaggaagcaactgcacttaaggaactgtttagtacatgtactttctctgttagtgttacttcagatatatggagtagtagagctagagaggattatcttagcgtagttgttcattttgttgatgatgattggcaattacaaaagagagttttagggcttaggttaatagatgtctcacatacaggagaaaacatagctgaaagaattagggaagtaattaatgaatttaatcttgctgataaaatatttgctgtcaccctagataatgcatctgctaattctagggctattgaaatattgcaacctttattttgtgtgtatgctcaatcttttctactccatcagcgctgtgcatgtcatataattaatttgattgttaagactggcatgaagagggtaggtgaccacatcgatgctgttcgtcaagcaatcgcgtggttaactgcttctaacccgcggattgctgcatggaagaggttttgcaatgcggccggtgtgaaagctcgtaagtttgccaccgatgcagagcatcggtggaatgcaacgtatttaatgttaaaagttgttttaccttatagtagtttactttctgattttgttcagtcacgtggtggcccaagaaacagtgacgggtcttcagtactgaacgagcatgtttgggcaattgtccaaaaattttaccaatttctagaaactttttatgattgtactctaactttgtcacaagtttattatccaactgctaatataattttgcacaaccttcttgaaattgctactttatttaaagaatacgaaaatgatgatgttctaactgaacctgtctttcacatgaaacaaaaatatttgaaatattggaaaaatatacctatgttgtatgctcttgcttttgttttaaatcctaggtgtaaattaaggggattgtctgctattttatcacttgttggagatactataggtgtagattatagttctttttatactgaggttagacgtaaattatatgaggtttttggaagatatgaagtaaagtttcaggaagttcgccagcagagaccccctcctatccccactacaggtaagaagaagatacagtggggtaggatttggggtggatcgtcttcaagttcaatccaaggtggtggcagttcgtcggctacaagtggagacgcctcttcgcatgttgtggccgaagagttgtccggttatttggacagcgacgccatccaccacgaagcacaagatttcaacgtcctcgggtggtggaatgaccacaagataacatatcctgtgcttttaaaactagcacgggatgtgttgacggtgcccgtgtcgacggtgtcctccgaatcggccttcagtctatgcggccgaatcatcgaagaccggaggacgactctgcgcagcgaccacgtcgaaatgctactaagcgttaaagactgggagcttgctcgacaacatgcccaatacactgcggacaaccaagaattggccgcccagttcgagcaactctacctggatccagaccaaccccagtagaattttgttagaagtagttctgacctttgagctgtactcttttctttgtcatggttttctcattttcccctatgagtttttacatgacaaagtttttaacgaggcagcatgtatcattgtatcctgtaatgatataaacatcaataaaggtcattactatttttaacaaattcttttgcaatattttcgcaagtgtggatttatctttaaattatttcaaaataatgaatcacaatctatatttttaaatttttcaacacaacaaaaaaaataccattttttcttttttttaacattagcaaatcattacttttttaaaaaacttttatttccattttttaaataccattttttcattttttaacattagtaaatcattactttttttaaacattttatttccatttttaatttttttttccttatacatttcctttgcttttttttttaaaaaaaacactgtgcactgcaggctggcgggctggcggcctgccttcacgggccgccgtgccccgaacggcccgtgggccgcgggcgtgccgtgccggcacgggcacggcccggccatccacgggccgtgcttgggccagcggctcggcacgtgggccggcacggcacgcccgtttcatcagccgtgcctaacgggccgtgccgaaacgggccgtgccggaaccgtgcccgtgccgggccgggccgtgccgcccgtttggacacctataatcggctcggttggcatcttcttcccccattgctgccctggttgccggcttcacctccgccgcgtctcctcccctctccgcctctccgctctctccttgctccgttgctctcgccaccacaaccaccatgggtccatggctacagccaaacctaggtcgtcgtcactcttgcctggccccgcctccggcatcgccgctcctccatcctgctcccggcaactaccaatagccgcgcagacagcagcgaaccaaccctagggtagtcacttcaaggaccggaggaagttggatggtatgtgatctgcttcttctctgtgttattgctgcttttgtcttggattatttcggttggatatcatccgatatatgcacacagagttttggaatcattccccaatttaacaaccaaacaggtatatttagtatttaatcctagattttatttccatatacatccatataggtacatttgaatttgaattatatttagaaaatcagaatcttcggggatgcgaattggattttgtgggaaatggggccaacaagtttatttttaccatgtcatggtgagaaatcattttatgatgataatcagaggttagggcaaacctgcacttaagcgcgccctgtgtaaattgcagcctaatatattcattcatcttatagcaagctacatttctcaacagccatttacacaacatcgacatttagatgacaggcccaaaacaaaatatggacattagattaaaaattatagactcaagaattttgaagcagttggtaagtggagacttcacaatcagaaatggatgacagaaaaataaacttcaaatcgttaatgaccacaccaaaacaccaaattccttgtcgcgagaattgcacgccgtccgagtggatggaaaaacaagaaagcaacggtgccccaaaacgccaggacgaatgaggcagcactgactgcatagagcactggatcatctgccatactgtctcttccttccgatggcaagtcacctgctcctgaatctggagagcatatgtttccctttgacatactccgaagattactgttgccttggtagctatccataccgtacgtgccgaactgaccagagtttggaatacatcctgataagttgttatatgccacagagaacaccgctaatgacgataatttggtcagctgccatggaatcaatccactcagttcattgtgggaaaggtccaagctttcaatctcgctcatgtttgcaaagcttgctgggatttgaccagtgaagaaattgttggacaggttgagggatttgatatggctcagattcccaagctcccatggaatttctcctgacagcatattcccggataagtcgataccagacatcagatcgaagaagttgtaaccatatgtatattgtcccccttttgtagcaaaggtgaagtctattgggtcatgaacaattatgtaagcctctattataacataaataagtagcaatggtgaataattttgagctgccgtatcactctcacaagagatgttgccaacacatggtggcagtgagcctgagagtttgttgtgtgagaagtcgattatccttgggcactttagtttacacaagtttggagtgatttggccttcaaagtcattccatcccaatgaaagtgtcttgattttatcaagatgccgtaaccaattgaggttaccagtcaacttattatgtctcatatccaaatacataagatttgatgtgttgaaaagatcatccgagatgtttcctgataatgaattcccatacagattaagcgaacttagagatgcactggcacatcttggtatagatcctgataagttgttgtttgaaagatctaaaatttcaatgcttgccaagctgcaaattttttgagggatactgccagttatatggttcccagaaagatctagtacctgcaatttagacagattccaaaatgaggtgtcaagttcaccggacaggctgttatcatgcaaatccatgattactagtgctcctgacagattacgaggcagtgttccttcaaatttgttgttctgtaggtgcattgcaaacccgatggacagttttttcatcccaccaaacaccagacctccaagctggttgtttgaggcactcaaggtccacagctcaagaaaatcagtgaacacacaagtcggcattttaccagaaaaattattgtttgataagctcaagtccttcatgtgtttgatgctgcacagtgacatcggaatttctccatgaaagttattgtctgacaaatccagagtggacaagcttggaaatattgcgctgaagttggcaggtagcttccctgtaatacggttggtagatataacaatagattgtagagctgtttgggggtgccatatgggacttagagatccagttagcgagttatttccaaggtttaggttaaccagagttgcttcttttgtaaaaagccaattcggcattcttcctgacaagttattgtttgacaagtcaagctcctgcaaatgatgttgtgtgcgtagaaagtgtggttctgcaattatgcctttgtcaagaccacaaccagagagagctaactgtttcagttggaatggaggtgcccatccaggaatattgacatcaactgctaaattaatattccctgacaagttgatttcttcaagtttagtgaggttcctcagccaaaaaaatgagagtttaccactcagattgttctgggaaaaccgaagacctttgagagacagagaaagatttgaagatggagttatagggataggtccttcaaaagtatttcccgagagatccaatcgttcaatatgtggaagtgaaagcaagaaagtagaaatgtttccagtgaagttattggaactcaaatgcaattctcgtaggttccttagatatccgaatgctgcgcaaagtatgaatacaatgaatcagttataatcagcatcatagaaaatcttgcccagatgttatgatcaagcatgaaatgtccattatttttacctcgttcggttggaagagctccactcatcctgttgttgttgagatttaatacttgtagtgaaactggctccaaagatgaattaattggagtacgtcctgctaacgaacttcctgagggatcaaggtgaggtagttcaagtaatgaccccggaaggcttccgctgaatccgttggcactcaaattcagctccttcagattcgtaagattttttaaaactgcaatagtgttacaaatataacagcacatgtacaagatgttacaaatataatcatcacatgtacaagatgctaattctttactgaactatgttcattctaaatatccatttctgtacctgcagtgggaacaactccactcatggcgttggagctggcatctaggacttcaagcgaaaccagttccccaagatctgcgaggatactctcttgcaaccagttataactgaggttgagatgctgtagcttgggcagcttcagccctaccaagctgatgatagtttgtctgaaaatattagtcattgcaaaagcaaggagcaatcttggttattcaggatggacactgtgcacataccatcgatatttagagaactgggatagatactggacagatccaggaactgaagctccgggaatgaggagaagaccgtcgtgttgaaacgccaaaacgagtcaccatgtgcatttagcacttccagagaatcatacaggtttgagaagtagagatgtgatactcgcccagtgatgttgctgcatttgacgcgctcccacaagcagcagtcgtcgtcaccgtcgccgcgcccccatgatggcggcaccgtgccgtttgagcgcgtcagagaggagccaatgtccatcagcgccgtcctctcctccacgaagcagccatgggacgtggagatattggaatctagcaagcatagcacaaccaagaagaagaagaagaagaatctcatcctgaaataaactccgtcttctcctgcgctcatctctagcaggctggagacacctgaggatgatcgatcagtggtggattactactagattgcgtggttttatcatgctgctgcatttgtcctgtttccatgaactttcatgggtacacacggctggtgaagcaacttttgattggaccaggttttcctggtcgtacccggtccgtgacttttgtgagttgacacgcgacgaccctgtagctagctttgtggttttaaagttttgcagtctgggattctggaaggacaagtgggagtgtgggacagcaggaacgcggagatctcatgatgagattatctgctttcgtcgataactgaaattttaaggccaagttgggagtcaccggagctgatccccctttcttctcccgtggtgtacgggctggtcgacgtcgttaatttcactttgggattttattgtcaaagtttcactttggactaggtaactttacctttgttgcacaatgaagcaccccaaaccacatcttcagttcttcgatgactttgagcgaattgttactgacgtgctagtaaattttcatgtctaaatgcttgctatacctttatcgaaagaacgctagacatcactagcgtaaagagttatggtggtttattgtgcaacaaagataaagttgtctagtccaaagtgaaaagattgtgtatagagtgatccaaagtgaaactttggcaataaaacatggctcaaagtgcaattcactcttttatttttttggttctgggtcaccttcgcgttgcgtgccctcagcatctgagtttagggtttgtttgaaaagcttctagcatctatacctttttctagaatcagaaactctcttaggctgcgttctttccacaagtttcccaacccctttccctcgttttccgcgtgcacacttttcaaactgctaaatggtgtgtttttttgcaaaaagtttctatacgaaagttgctttaaaaaaacaaattaatccatttttgaaaaaaaattaactaatacttaattaatcacatgctaatggaccgctccgttttccgtgcggtggagttgggttcccaaccccaagtatcaaacacagccttaaaccgttcaactttttcttcagtttttgagaagttgtagttataagaaatctagcttctctaaattctcagaaactgtttaccaaccaattgttttttagaattttaagcttcttaaattgagctttagagattgaatgtagcattgcattatacattctccgtcctaggaaaagatcatttatgtcttttttgtttatcccaaaataaatttattttaagtaattattatattagatttcgtgaaaaatagataaagtaataaataactgcattaagatttggtgaagtatgcggtattttagttttgttttctaaattcgtgttgatatgtgtaagacgagcgaaaaaataaacttacttcgatacggaggaagcaacttgagcagatgcaaagcccgatcgcatacagtcaagtcgcaactcgcacgtcgcgtccgtaacggcgcctggaagcagcttcgtcttggtgcattctgccaacaacttgacgataaccgggacctcatagttgaagccgggaacgtcgagctcgatggcgtccgcgacggagcctgcaagcaacttgtacagtcatctgtacatcccattcccaccaacaacttacctggcacggtcctgcaaaatctccaaaagaaatttttggcccaatcttctgtttcccccggccttttgggagcttcttctgtgattgacttggggccggttaccagtggcagcaatcaggctggacctgccacaacgcctcctcggcccatgaaagcttccttttccaagagcaaagttgtaacatcaaccggaccggacgaacaggtcctgccatgcgattccagcaaaggacgcaaagatgcaagcatctcaagtccgatggcgaaaacgacagcgaatagcgtgtgaaaataggttgagaggtttgatgagcattggtgaagccgattggtatggtttgcgttgcgctgacaccagactgatttatttgcatcaatgatatcaggtatgctctagtggtccttttaagattggtttgatgaagtggttgaagattatgacgatttttgtccgtcctcataccgtcgtacgtatgcttgcccattttctagtgtgagcaattgtttttcttgatgctgtatcttagacttattaaacaagctactgcagggagggtgcttggtgtgtttagttcacgtcaaaactggaagtttggttgaaattagaacgatgtgacggaaaagttggaagtttatgtgtgtgtaggaaagttttgatgtgatggaaaagttggaagtttaaaactaaggctgtgtttagttccttctaaaattaaaagtttgggttgaaattggtacaatgtgactgaaaaattgtatgtgtatgacatgttgatgtgatggaaaaaattgaaagtttggatccaaagtttggacctaaacacaccctaaattcggtctcaaccagtttggactttggagtggcacatcacctcaactagagccaactctgcacctcgaaatatcaggcgagaacttacctgtcaataatcaggcaggattcctatctgttgatttgttatccaggctatgtttagattgaggcaaagtttgaattttggttgaaattaaagatgatgtgactganaagttgtgtgtgtatgacaagttgatgtgatgaaaaaggactgaagtttggatccaaacacaaccccggtagccatgcgctcctctgaacttgcaaaaaaagaggagaaaatctgcaactgaggctgtgtttagatccaaagtttggacccaaacttcagtcttttttcatcaaattaacctgtcatacacacataatttttcagtcacattatctctaatttcaaccaaaatccaaacgatctcccaagtttcggatcgtgaacggagaacccgtgccgcatgctgacccttgactttgactgacagtgaccgatccactaattaggcaatttcccgctgtcaagtatgctacttatgattatctcctactatctcgtgtttatgaaacactgaccaatttgactgtaacatgtgaacaggggaaaaaaagagatgcgtcatgcgtatagggataagtagtctaagaggaattgtacaacggataatacgaacgacacgttgcgtgtgccggctctctggcttggagcacaacaccacaattactcgtgagcaagttactacttgtacctgttgtcgcgatccatggagactagtaaggcgtccatgtgatgtcattgttgatgggcaagtgcctgtgccaatcaggacacccaaattgcctgtcaatgcacatgcgtcccaactctcccaagtctccacttgagatggcgtcctcagttcgtcattattaggataagattgtccgggagtccctattcacacccagcaaatcggcgattacacgaactaatctatcattatctctagccgtcagggctttaatactctccatgattgtccgcgcggttcgccagcagcagcagcaacaacccccgcaaaattcccagattttgtgggacgcgcacgcgaaaaactccttccaatcgaagaggatagagagcagtgtggtggagacgtggagtggacaaggaaatgggcattgacttccacgcccaccttgttgcctccgctgcggcgtcgttgcctcgcctcccccaccaatcggatcggcgcgtcgcctataaaatttcctcccaactcctaactgcccactccgatttgacgccatctgctcgtctgcctcctccccgatttcctctcctctctctctctccctctctccatccctcccggcgtccaatctgttctgcttctcgctgcgcccccggaattgtggtgaggttttgtgagggtgtgggggaggaggaggatggcggaggaggtgtatgtcgcgtcgatcgaccagggcacgacgagcacgcggttcatcgtctacgaccgccacgccaagcccgtcgcgtcgcatcagctcgagttcaagcagcactacccggaggctgggtaagtgtgctgaactgctaattagtgatgctctttacaacgatgtgatatttcgggtggagattggcattagcatgggattattatgtgatctgtgtgatggattctggggctgaatgtactgctcgattggttgacctggatggaattgaggtgctgttagttttaaatatgctacctttttgtggtggttgtgattcattttgttttgtttgtggaggttcatagtagtagtactgttaattgcttgttgctgtatcaggttttccattgccgtttattttgatggcttaattgtcaaattaggattataatatgtgatgccagaaataggatattttgctctcctttatttattttttgcacatatctctataattttctagtgctagataataaccagaaatgcacacccttatggccttttatgtttcacaacaaagctcctttcctcctcctttgaacgattgagatttaagctatatagtgccaaacaaattcggaatatgataaggataggttcatatttttctacatgattatcatgttaagtgttgcttgctttcttactgagttaatggagtcgcaaaagtctagtcttcttgattttgagctatcatctggggacaggggtacttaaatctatggtgcgttaaggatcaagctctttatctgcttgagtaatttgtttccttgacaattgatctgtgaccatcataacttgtgctttgaaatttgacttctcaatgctgtattcatggagatgtctgattagcctgagttactttaaatctattaaaattttaataattaccttgatgcattttaaggggggcaacttctttattgtccacatgagtatacatttcttgcatgaatagtagaaaatttagaatcctgttctgttgttttgttgatttgtgcaaggagaaaccgaccaaactgaggcgtgccttatgctgtgacattctattgtctctgtttctggtcagtggtcagactcactgtagcatgttctctttagtgccacatatatgtgcgatgcactgaaaaattcgtcttgaatttttgttgatgtttgataccactttactttgccttttagagacaacttatgattttgctttacttatttgtgagttgtgactctgtctgctggtatgaattaacagatgggttgagcatgatcctatggagattatggagagtgtgaagatatgcatggcgaaggcacttgacaaagctgcagctgatggtcataatatggatgttggactgaaggccattggtattacaaatcagagggaaaccactgttatgtggagcaaatccacaggccttcctctatacaatgccattgtatggatggatgctcgcacaagccccatttgcaggtcttccctttgtccatcatgtttgacatatcagtgttatatagtgcagttttctcataatgtttgacctttcaggagattggaaagtgatctttctggtggtagaacccactttgtcgagacatgtggattgccaatcagtacctatttcagtgctttgaaggtgttatggttgatcgaaaatgtggatgccgtcaagaatgcagtccgagctggtgatgccttatttggcacaattgacacctggttaatctggaacctcacaggaggcattggcgggacagatcgtgatggaaataaagtatttgggcaccatgtcacagactgctccaatgcatctcgcacaatgcttatgaacctgaaggcacttgactgggacaaaccaacacttgagacgttaggaattcctgctgagatattgcccaaaattatcagtaactcggagagaattggtgtggttgccaatgggtttcccttggcgggcgtccctattgctgggtgcctaggagaccagcatgctgcaatgcttgggcagctgtgccagaaaggtgaagccaaaagcacctacggaactggtgccttcattcttctcaacacaggggaggagcctacccaatcctcccatggtcttcttagcacgattgcttataagcttggcccaagcgcacccactaattatgctctagaaggctccatcgcaattgctggtgccgcagttcagtggttgagagacagccttggaatcattagcacagcagctgatattgaaaagttggctgatactgtgcaggattcaggtggaatatactttgttccagcattcaatgggttgtttgcaccatggtggagggatgatgcaagaggcatatgtataggaatcacacggttcactaacaaggggcacattgctcgagcagtgctcgagagtatgtgctttcaggtgaatgatgtcctcagctccatgcacaaggatgctggggaggcaggagaagtgaagagtgcagaaggggagttcctgctgcgcgttgatggtggtgctactgtcaacaatcttctcatgcagatccaggtaataatccttctcacgagatttaaaaagaataataaatactctgctagcttttccattggaacagtggaacatttactatcacgcagatgcgaaatttctgggttgatgagcaactacgtttaagagtaaaataattcaaataggttatcaacgttgatgttaccaccacctgaaatgttcatgcttatagttgtgcttttgacttggtgaaaatgaatgaaatgcaagatgttggctctttgtgtccctctttctatttaaggttaaccaaagcaccaattgttaccttttgcacataatgacctcttacttctgtgagtcatacttgacatgattgcagccacatctgtacagcactatgctatcaatctcaaacaggaaaaaaatatataagtactgtcttcatctgtaaacaaaacagtagtgctatgaactgttatttcaaaattcactatcttattgataactgatctttggctaatttacttatatcctcctacagtacagcttactgaaattagaagcttgagctaattagttaaatcctcttatagtattgcttactgaaattgtcttgaaaaacaatctttttaaatgcactgggtgtaattgtagctgtagcttagtgaaacgtttctctttgcaattgtaaaatctctccaaattcccataagatcactgattttgcatgcacacctgcaggctgatttattgggtagccctgttgtcagacctgctgacatcgagacaactgcccttggagctgcgtatgcagctggattagctgttggagtctggtcgaaggaacaaattttcgctggtttgcacaaggagaacaccagagtcttccgcccgaaattggatgaggcccacaggaggaagagagcagactcctggtacaaggccgtttcaagatcatttgatttggctgacctttctctttagaatgacgagggatttgtgaattacttctggattgtataaggtgcttagcacttgttatgtccatgaataagttggtcaatggaacatccttcaaaagaattagttgattccccacgctttgctgctggaattattaagtaattttcaatatacttttttaacaattgagataggagtaaaaagaaaaaataatgaaatgtcagtgtttattcagtacttatcctgaaacaaacaaatgatgcctgcgctttaatgtggaacatgttgatgagtatatgttaaatattataaaaatgatagatagatttattaaaatattgtaaaaatgatgtaagagatgattggatatgtttgtatgttgatttgtaaaattaaatagattatagatgatattgcatattttcatgaggttaaatatttaattattgctagtgggtgatgatgtagaatggttgtatgtt

SEQ ID NO: 8011 - DNA, 8535 bp, Oryza sativa
cctttctcccttactttactaacaaacttcctccaactcccagttgacgcaacctccactactctccactgccatccatgttgacccctcactggccacacggcatttatgacaaatttatcgtgcactggatctaccccaaacatattatacaaccaccctaacacgtcgttcaaacccatatgctccggtgcattcagactagtatcatggaaggcatatagagtcaaatccaccccgctatcacatatttgtataggagcatcgccataatacagacgaatgggcatatcacctgacatcctgataaaacatgacaaatagtctcacgtttaatcatttaatcattcgataattaccctattacaacttatactacattgccgtgtactaatttacaactattagtaacaaacaactagtttaataatccaaataaaatataacacctttgtacatattttaacacacaacatatcaataatatgtactaactaagaactaatttaaccgtacaattacttaaatacctctaccaacatttagcaataacaaatatgtgctaaccatacatactaacatcgaacaatgcgaaacaattaacaactcttaaaccaattttttattaaactttcatatgcattgtacttagggattactaatgtataccttaacttcactgctggagggcgtcgccaaccctttcctcccggccggcgcctcctctccggcctgctattccctcccctcgctccctccggcgctcacggcgacgatgtggcgactctcgacggcggctggcgatgtggtcctcaaataaatcgaacaagcatcgcgggctggggagacggggctttaaaccggcttgtcgaacgcccattgttcgacagggtcggtggagggacctgtcgaacgcccccggttcgacaggcctggcggcgcggggtggtgggccctgtcgaactctctccgttcgacaggcgagcgtgtcgaacgccagccgttcgacagggctctgtcgactgcccgtcgttcgataggtgccctatcgaattgcacccgttcgacagggacctactctcgcgattttccccggttggccactacttttgcgattttccataaaaataatattaatcctcaaaaaaatccgccaaagctaggtcgtcgtcactcttgcctggccccgcctccggcatcgccgctcctccacttgctcccggcaactaccaatagccgcgcagacagcagcgaaccaaccctagggtagccacttcaaggaccggaggaagttggatggtatgtgatgtgcttcttctctgtgttatttctgctcttgtcttggattatttcggttggatatcatccgatatatgcacacacggctaatacagttttggaatcattccccattttaacaacctaacatgtatttagtattgagtacggagtacactttagtatttaatcctagattttatttccatgtacatccatatagatacatttgaatttgaattatatttagacaattcagaatcttcgggggatgtgaattggattttgtgggatccaaatggggccaacaagtttagggcccctttgaatcgcaggattgagaaaacagaggaataggaaaaacttaggaattgaatgccacatttattggattcctatgggattttgaaacacaggaaagttttcaaactgttgtttgattagcacacggaaaaaacgcaggaaccttagacacatgaagaggaaaacatgaggtgagacctcatgcttattttcctccaaaattgctcaggtaaggttcatttcataggaatttcaaaggaattgataggaaacaatcctttgtttcaaaggactctataggattatttaccatagaataaaatcctctagaattcctatggtttttcctttgattcaaaggggcccttatttttatcatgtcatggtgataaatcattttatgatgataatcagatgttagggtaaacccaggtttgtcctttgtaagccaaccgacccggtgagagtactagttccggttcaaccgtcgggctggtatgttttttttactatggctacagtaaacatttgctaatgacttttactatggctacagtaaacatttgctaatgactttatttgctaataacgtattaattaggcttaataaattcatctcgcggtttactgatggattctgtaattatttttttattagtgcccgaacaccccatgcatcactctactccctctgtcccataatatgcggtttactgacggattctgtaattatttatttattagtgcccgaacaccctatgcaacaccctactccctccgtcgcataatatagcaacctagaaccggatgagacacttcatggtacaacgaatctgggcaggaagtatgtccggattcgttgtactatgaagtgtctcgttcggtactaggttgctatattataggatggagggagtatataatatctgatgtgatacgtcaaaactttacacccttgaatctaaacaccccccaaagtcagaaagtgcctttttcttctccaacgtgcgcacggcacacaaaatctctaaacctatcaatagaagctcccgctccttccaaaaaggactctcaccggaagcatttgttgaccgcttttgttgagagtactttttggaagggttaaaccacagcttctgttgatagctaattaagagtttataaacggtaaggccatattgcatacgtgtctctactgtcgacaaggaaaaaaaagttacttcagtagcacatatgcaagattacattttctttaggaaataatatacgtttgagtgaacagtacgagtagaatgttggatggtactagtagctgttccctccgtcctatttaaagcgcaactataagtttctgtgtctaattttgattgattttttctgaaaaaattaaaaagcataagtaagtattattcatgttttatcatctaataacaataaaatattaatcatgatttttttttaaataagaccgacaattaaagttagacacggaaactcatggctgcgcttaaaataggacaaagtaagtattaaaaaatctgaagctctacattcggaagcttgtgaatgcgaaagtaatccaaaatgtcactacgaacgaggcagcagtgaccgcgtaaaggattggatcatttccctttccatctccatcatccggtagcgaatgacctgaactgggagcacactcgctcccttctgacgctgggtgtaggaggttgtttccttggtagctatccatatcaaatgagccgaactgaccagagtttggtatacatcctgataagttgttgtacatcactgagaacacggacagtgatgacaaacgagttaactgccatggtattgctccactcagcttgttgtgggataggtctaagctttcaactgaactcatgcttgcaaaggttgctgggattggtccggcaaagaaattgtaggacagattgagggccttgatatgtcccagatttcccaactccctgggaatttgtccagacaacatgtttgcagataagtcgatgccagacatccaattgatgaaattgtgtttgtatatgtaaatgttgcctttagtacggaagctgaagcctctttcttcatagcatccgatgtaatcgaaaattgggtacctaaagtgattctcacagattagcgaccataaagggataccaactggattttgtccaaatgagaggtttccaatacatgatggcaatggccctgatagactgttgtgtgagaaatcaagtatccttaaagactggagctgacaaaggctgggagatatctgcccttcaaacttgttgctgcccagtgaaaggtacttactttcacctagatattgtacccattcaatgtttccgttgaattggttgtgactgagatccaaagccatgacagtagagctattgaagaaagaaaaaggtactatatgtccggacaaagaattatgagagacgataaaaaaatcaagctctaatgcggtcatacagtttggtatagcccctgaaaggttgttatgagatagatccaaaagcataattcttgtcaaattgcaaatgcttggatggatttcaccgattagactattgcccgcaagactcaaggtgcataaagtggaaaggttccattgtgaaaaatcgagtttacctgataaattattgtcatgcaaatccaatgttccatgagcatcgaaatctgctgttagatatcgcggcagtgttccttcaaatttgttgccatcaaggtataatgcatgtttgatcgacaaatgattcgtaccaccaaatatggggccaccaagtttgttgtttgagaccttcaaggttgtcagtataggatattcagtgagcaagcaattaggcaattctcctgaaagactgttatttgataggtccaggtattccattctagtaatgttgcacaatgatgatggtatttctccagaaatcgtattgctagaaacatcaagaaaactcatatttggaaatactgagctgatgttagccggtagatgtccggagatacggttcataggaagactgatagcttgtagattcatttggggataccatattggacctaatgaccctgttagtgagttatttccaagattaaggtaaactaatgtggcttgctctgtaaataaccaattgggcatgctcccagacaggctgttattcgacaaatcaagcacttctagttgatgctgtgtgcgtaaaaaaattggttctctaacaatgttcttatcaaggttgcagccagagaggactagcactttcagttggaatgaaggtgaccagctaggaaagttgaccgcaacaaccaaattagcatttcctgagacatctatcttttggagcttggtgaggtttctcagccagaagaaggaaaattcaccactcaaattattcattgaaaaattgaatgtctttaacgctgacgtaatatttgaagacagtgtcacaggaatactcccctcaaagagattttgtgagagactcaagtgctcaagacgaggaagtgagaacaatgatgaaggaatgcttccatttagtcgattggaacttaaatccaattcccgcaggttccgaagactttcaaaaactgcaaaaacatgcatatggatgattattataaattgcaaaacaataataaacatcaatatattttcttctgctccaggaatactaggaagtgttcattttggacctgaagacggaagtactccaccaacgccagtaaactgaagatgcaagacttccagggaaaccaatttcccaatagatgccgggatagtaccattcaagcagttgttattgagcttgagataccgaagcttggtcaatcctagtaaacctggccagaacgtttccatttacaaaagtaagttctgtcaaccgtggatcatacatgcgtgcgagacatggaaggctatggagccatgcgactcgtacttaccatcccagctctggaaagtagcattgttcatggacaaatccaggaactgaagctccgggaatgaagagaagaccgttgtgtcgaaacgccaaaacgagtgaccgagtgcatctagcacttcattagaatcatacaggtttgagaaatagagatgtgatactcgcccagtgatgttgctgcagttgacgcgctcccacaagcagcagtcgtcgccgcggccccatgaacgcggcgccgtgccatttgagcgcgtcagagaggagccgatgtccatcagcgccgtcctctcctccacgaagcagccatgggaggacgtggagatattggaatctggcaagcatagcacaaccaagaagaagcagaaggatccccacggaaagctgcagctcatcttggaacaagaagctccaccttctcctacgcttggctcactgagacacctgagaatgatcaatggtggattgctagattgtgtggttttatcatgctgctggggaagcaactttgctttttaccactcttgggctctgtaaaaacacgggtatttagctataagttttaatcatgttaatgacttagtcacacttgctgagagcagtgttgattgtgtcacgatgttaactaggacctattaacgtattgaattgttgattctaatttgaatttcctgagttatttattaactgttcatcgcttgatattaagtcatatgcatatgcatatgcattatcgatatatttattagttagaataaattctgtgagagtgcattatttcaagaatatcaagtatggttcatgccacgttgttggccattatctgtagcgcggattagttgtcactggagaggtagtgaggtacacgaatgcacaatagaaattagaaatcccattctttataatttaccagtacaagtctgcaacatacacgcagatacttgtacactaaaattcttacactgtatgcatcttatatatatagtacatatgcatggttatacaatatcaactgaactcatacactgcatacaagtctaaagaagaaaaatatgatttatcaagaaatgttgtgctatattagagtatacaatttgattctaggaggttaaggtcataaaagtaaaacccagaaaataaaagtgaaactagcgtgttttatttttgaatgcatataatctaatggtcacacaaccaaaccatatataagtgcaaatagtaattggacaatatagtatcatcttaaatttaatggattcttaaaaggataattcaagtatagatcagccatctcactacatagttaacaacaagaattatctctgatgatctacaagtgcatttgagttaaggattatatctttatatagttctataaatcaatgctcagtaaatccatcataggatgaattttgaatgcatgcatagttagaaataatcatcgttctatttaacctcaagagcttaagataagatcaatattgtgctaccatttcaagttaaataggcagagcataaatggttagacattgatctattctcagtgtagaaactaaatagagcatctaggatccattagcagaatcataggtaagttggctcttactaagaaatgagccgtagaccggtattttaccttggaagtggaatacgagggttgctacaggctctcggtatgggcatggtacgtacccctattttgtgacttgtgagtttgacatggacccgtagcttaagttaatgagagtgtcggagaggaggggaatggataaattgaaaagatacgtaaaacgagatgagctattagcatatgattaattgagtattaattattttaaacttgaaaaatgaattactataattttttaaaacaactttcatatataaaacttttacagacatcgcatcataaaacttttaccaacatcacatcgtttagtatttcagaaaacatgcgtgtgaaaaacgagataaatcttttctcaatgttccgcgggcgaagttgaaagaaaaagattgagaagatatgtaaaatgagatgagtaattaagatataattaattacttcatccgtttcatattataagactttctagcattgaccacattcatatatatgttaataaatctagacatatatgtgtgcatagattcattaacatctatatgaatatgagcaatactagaaagtaagtttaattattttaaattttaaaaaatagatttttaaagtaacttttctataaaaaaaatctttaaaaatacgcaccgtttaataactcaaaaaacgtgcgagccaaaaacaactcaatttcagctagcaagactcgtttgcacctgggttctggaaggccaagtgggacaatagtaacgcggttacgcggagatctcatgacgagaatatttgctttcggcgatagctgaaattgaggcaagttggggagtcacttgaagattatgacgaattttgtccgtcctcatacgtatccttgcccattttctaaatttcttgtgtgagcaattgtttttcttgatgctgtttcttgactaattaaacaagctactgcaatctaccgagtgcttcaatcagtttggaccggctcagcatctcaactagagccaactctgcacctcgaaatattagaagagaatcaagctcaatttatgaggttacccgtcaagaaccagccagaattaatgtcggttaatttgttatccagtaactatgagctcctctgaacttgcaaaaaacaggagaaagtctgcaactgaaaggagatctcccaagtttcggatcgtctctctctcacacacaaaaaaaaaaaaagtttcggatcgtgaacggagaagcagtgccgcatgctgacccttgactttgtctaacagtgaccactaattaggcaaattccctgtcaagtaagctacttcatgattatctcctatctcgtgtttatgagacactgaccaatttgactgtaacatgtgaacaggggaaaaa

SEQ ID NO: 8012 - DNA, 3686 bp, Oryza sativa
ccactcctcctggtcatcagggaagacatcctgtcgaaactgattcaaccaacttttcgtaggcccgtgcccatctgtgagatcctccagtgcaacaggcagcacaccaccaaaactggccagaaggtcatccgcccatccagcattcaccattgttgggccaactgctggcccagctatcggcagccccaacaaataagacacatcctgcagagtgggcaccatctctccaactgtgaggtggaaagtgtgggtctcaggcctccatctatcgacaagagcactcataagcgccgcgtcaatgtggattcgttcggaccttgcacgtgaaggctcgactaaccgtgcaaacgtcaacaacccagctgctctcagcctacaacatgacagagcgtaagttattaatacatgaaaatataaacaccttgtattagtaaaaacaatatattttcacacaccttggaacccaacgaggatcaatacgccaatattgatccggtcctcgcatctttagcacattgcagaaagttcctgtactaagacgtcgcgatcgatggttcctatcgatctccttgtctatcagctgcccatcattttgatcagccatacctgcagatcgaaaaccacattagtacaatgcacgtatggtaacagtacaataaatgtatgcaacataattcaattaacaaatttgcatgccatttcaatttaaaattacagtaccagcacacatagatacagataagaatagttcagtacatttcaatttaaattacaattccaatacaaatacatgacgatattaaaagtgcagtgcagttcaaaatgaaaattacaaggccattacaaatagattcgggtaataaaagtgcaagaaagttcaaattaaaattacagacgcactaaacataaattgaacgataacgatcttcaaagtagggagtccaccaatgataatagcgaattaaggattatttttcttcttcgacttcccctttggaacgcgacgaacatcagcgcctgtggcatcttgccctacattgtacatgctgcaatctttacgggaatggttctccccgcaaagaatgcaagctttcttacgacgagaacgatctttcacttcagcttcatccataaggttcttgatcctgcgtgactggcgacgacccttagtatcaactaataaatttgagtcaggaacccaattggcttgccctggaggaggacgagtgaaatcacacacggcacgccaaccacgcaattcaccacgccaagttgcctcccacgattcctttctaaagtagggagaaacaaaaatgtttccatcaatacccccttttgcggaagcagcaagaacatgggaacatggccgatgtaacaggtaaggcttgttgcaattgcatttgcaagcgtgatactctggccacaacgtgcattccaatgtgatgtcagtagtcccaatgccgacaccactcttgtcacgaagtcgtatctcaaataacaactctctattcccagcaggccacactctgtggattcctcccttcttacttttctcatccatgtactgtgtaatagcggggctatacttaacactgggtttgctgaggttcagactagccatggaataccttttacagagatacttctgtgtacccctcgtgatgccctccaggatagcaacaagtggtagaggtcgtgtattcttcataacccaattatacacttcagcaagatttgttgtcatcacaccatacctcgatccatctgtatcgtacaacaacgaccatttctcccttggctcaaattctacccactccgtgaagcacttcgtggcccttccacgcttcctgcgccgagtaatacttggtgcttcattaggaatgggttcaagtccctccgtctcctcctgtctggcaactatgggttttttcctaacctcttccatgtgtgtagtggtcaaacgatccagttgctcccatatggcatcaaactttctttgttgattctgcttgcataacttcttgaacaggtccatcaatctcttactcttgaattgtctataaaaattagccccaaaatgtcgcatgcaccatctgctatgtaaatctggccatggcacggactgtgtgacatcttcttgaagcttctgtatcgctgatagcaaaccggcgtgtcggtcatgcagaacacacacatttggtctgttttcaacaacacacattttaatgtgccgcaaaaaccatagccagcttgatgtgttctcgctttcaacaaatgcaaaagcaacaggaacgacatggctatccgcgtcgactccgatcgcagttagaattgttcctctatacttgcctgtcatgaaagtgccatcaacacagagcaaaggaatgcaatttttaaaggcctctatcatgcacccaaatgaccagaaagcccgacgaagaacattctccccatattcattcacctcatcgagaatagccatgtgtgtgcccgggtttcttgcctgcatcacctccaatagtgggggaagattgtgataagaatcctcataagttccaaacctcatctccaatgctttctgttttgccctccaagccttgtcgtacgatatctcatatccgtactctttctcaacgtcatgcattatggtgaaaggggacaaagatgtttttctaaccacctttgaatataccatttgtgccacaaatgccgctgtcaggtttctgtgcaccagacgggtattctccaacaaacacgtatgttgctcaaccctcgaagctacccataaagtgtcatgttgtgtcttgtaaccatgcactctccaaggacatccaccctgtatgcacttcacgtcatacgtcgtcctatttgaaaccttcaccctgaactcacgcttctggacaaatgcccacctcttcaccgcatcttgtaagtgacctttgtcatgaaacatctgtccaactttcacctgcttactatcataacaccagtgggcatctaaaccatcgtttaccttcatacgactcattgatatggtcgtccaattatcgggtatgtaagtttcgttgtcccacagtgttgtatcttctccttccactacaagcgcaatgtattcctagttttccacttccatctgatccactaccgcctcattctcctccgctgcatcaacacgcataggcgaatccggttcttcatcgtccgagtcgttggcctcacgattagtaccacgaacaatgacctctccttgtgtattaccctctactacttcttcccctcgaccttgctcagtccgccaaacattttcagcttgtccaccttccaacggagtttcttccaccacggcatgacttgactcccccgatcgatcaacacattttgtcttctgcaccactattgccaggctatagcctttctcccttactttactaacaaacttcctccaactcccagttgacgcaacctccactactctccactgccatccatgttgacccctcactggccacacggcatttatgacaaatttatcgtgcactggatctaccccaaacatattatacaaccaccctaacacgtcgttcaaacccatatgctccggtgcattcagactagtatcatggaaggcatatagagtcaaatccaccccgctatcacatatttgtataggagcatcgccataa

SEQ ID NO: 8013 - DNA, 24416 bp, Oryza sativa
ctctgatgctgatgagatctccagccgctgtagacacaatggggaaagttgattgagttgtaaaaaaatatatataataaaggtaatactttttcgccgggctcataaaagtattacccccaaaaaaaccagacaaaataaaaaaaaagacagataacagaaacagagtgaatgggtaataaaaaaaattgtagcactactaaatggtaataaatttatatcacgtcctattcaacttgactcaaaattaaagaaacaaaaaacatattaagcaagactgactgctctttatttgagcttgcctgcaatttgtattacaagaacaaaagcaatgctatatattacagacaggattatcatcggtggagcaaattacttgcagatacaaagcacaaatatgtaacacattctccaaatgaaatacctaatacattgcaaagtacaaaggcaagttccagaataacaaactaacaaagtcaagaagtaaaataatgtggatcttaccatctgtacatgctgatcttcattcctagaaacacattttggaccttctttagcagggaaactgtttagaaataactgcattaggcataatactatgaaggctaaatgatgaaaaataaataactgaaagaattaccgttctagctgaagcttggattcaagagaagacactccgtgttgattgcccttgtttatgtcagagttggatggtttcccaagttcattgattgtggattcaccatcgacaccatgtgccatcatttttcctgtttctttcaatgcattaagctctgctcgcaggcttgaagcttttccttctgattcctcacatttagagactggtattttattcctgaaaatttctgagtcatcatcagctttatatccaatatccattaagcttgatacagatactatcgccatctgcatcttgttaggcgtcctgggttcacacatgccatctgttgtttggattccggtgtgcttaattactggaacaacttctagtccggaactgctatttatctccaagttctttatgatagtctccctcatgtctgatacatcttggagtgaaaagcagtggctgattatccagtctagtgtgatattgatttcaagcacaaatctttcaacatctgtactcccatacaaaagctcgttacacccaaggacgaaattttgtagtacagaagtaagttcagacgttttccacaggaatgcacgtgcaacgtagccagtcaatgtgttagagcggtcgccctcactgccaccagagagcacaacagtgctactataatcttttgatgatctctggacaacaccctcaataagttctatcaacttcaggactgccttctcaatcttgtgctgacggagttggtcagatgtttcaataggaccatcaactgttactagctctttccctgatgattctctagactccctccttgaatcatacgattctgtaggtttcgcatcacatgccaatgctaacttttctatctcttcaaagtcgtccatgaaactcaagtctgatactccggtactcttacaagagggtgtagtcagcttccccttcttgaagtgttccagttcagaaatcaaggcagacgcccatgagcttgaacagctgacattatcttcattgcaaccgtcctcggagattgatgatagagggttctcgaccactgtaggactgcattttactaaatctgttgcaacccgacctcttgataactcctcaagctgagcttcaacttgggaaagtttagaggttgtgcgagcaagcatggtccgcgaatactggagctcaccatccttactagaaagagattccttcatagtcttattttcgtcttccatcgcatgcagccttgcaagcaatgaagaactttcatgtgatgcatcataggagttctgcactagattgcctgagttgaatgatgttgtagaattgaaccttctcgtccttgttattactgcattgttacccagtgtttcaacttcatttctcattttagcaatggcagcagggcctggtagccttttacgtaccattgaacgcaatctctggcattctgcttcaagttttgtaatcttttttacattctcaagatgttgtttatgtgcagcatcagcagatttcaggttaaatttcctttcctcacttcgaatatcaagttgcttctgcagcatgcaaacctcatatctaagagaagaattcaatttgtccgctgactctagttttacctcaaggttcttgaaatttgactctatcacaccctttgcttcagttaactctgagatcattttctctttcattgagagcatttcagaaagtttcctattctcggcatccaagctagcaattatgtttattttctctactacatctccttccagcctctcaactttaacttgctcatgagaaatcagtttagcagtgtcctttatcaataactccctctctaccatggcaacatttagagcctcatcaagatggcaaatcctttgctcaattgcggctttctgatctagagtatcatcaagttgtgtcttaatagctattgcttcaccttcagctttctcccaacctagaatagttgtaaaccaataacatgaattgcagaaaaaaagaattgcagaactttaattgccattgtatctgcatacttgcagctgtccatttctcttctaggatggaaaaatcatgtgcttaactagttttgaaacaagaacatgtatcagttagcgaaaagtgaatggagttttacctaatattgcttcttctgccacttttgcttgcttagctaaaatagcatccttctccacgcattcagcttgagcaaatgaaatctgttcatttaagcattgcaaggatctctctaaccgtgcaatcttctctttctgcagggaaggaaaagttgaaaatccagataggaacatatcataattcataaggcttcttaataatgttaaagagataagtgatgtacctcctgttccctctctgatatattggctttgttcttcgttgaaattgtcctttctgaggatttttttctccaaagccatgttttattatccattagtgagatgctaaatatctatcaatattcaacgccgttctaaactccctagaaattaataagaaatataaatgttagtaagatatattcccaccaaattgtacaaaaggtggatacagacagaacatttccttgggtgctattctattaagaaactgaaattgtgtgtatcaagtcatctttgcaaaactatcccaagctaacataatctgaaagcaagttgtattttatcccagttaaattcatataattatatcgtatacacgttagttttttattccatgagacaaggttgaaaaatacaagaatttggactcgtggactaaaacaaagaaatccctttgaacactttctaagcttaataaaaactttggctggcgtatgccagctcagcaagtattttgttaaccaatgattgttcagaagtaaagtactgttaattatctgccatgttaatagaaattgaccactatctaatctactattcatgattaataagtttcttcatcagctaaccataatatcattttcctttcaatgcagaaagcgatgctcagctcagaaaagaaagtaaaggatatagtgaagcttgttctgttccactctctttgtacctaccacttcaaaaggtaaagtttttggcaaaatacagctatagagtttcttaaaacaaattttaacagaattgcccgtcaacttttagcttctgtgtcagctccaatagtggaagcccattgacattgaacctatcactttgatccagaagcgtcaccaaccgatgcaattaaaaccagccggtacaaaggcatttatgtgactcaggtacgtcctctcagaagtcaaaagaactgaagtacttaaacacctctaaaaacgaaatgcttcttctttgtctcgacaatctttagggcgtactattttgatggcatttactattttggacaactcgaatatagtagtaaaccttaaaacctctgaacgaagttttattgctaactggagtgaggcccaacctcacaatatctatttagacagtatttatgcaaattgattgcatctaaatctagacaaatatacaattcacaaggagggcaagagaagaagatgagagaaaagaaagatgcagaaacaagcagtcagagctcagaagtctaactctaaacccactagaaatattaactcaaaataagcttccttctgcgcagcaggaagtgaaaatggtacatcagctagaactgatggcgaaaaccccaaaagggctccacggtgaaacaagaagacaggatccctaagagcaccagcagtttagcaagagcggcttctgcaatcggcatgcatgttagtgtagttaagcaattaagccaaaaacatcaccatctaactagctccaaacccattaggtccttagcccaagctctagatttccccatcgttttcccagccagcaaacaaagaagaagatggagtgtgctcacaccgcgcattgacaaaggatccaaaagggcaagagtaaaatagaaggaagcaagattttcaagaactcaagaaaaggcactagtagccagtagccagtgaggtgaggtgagtgagctgaactgaactgacctccagtgacaacaggtggtggctctgctgcagctcaccaagaatgaactgccgctgcctcactgtgagcctgtgacggcatcctatggaggagggagatgaagacaaggacacaaaggtggatggaagggagaaaaaggtgacacgggtataagaacaaagcgatcgttcagcttttcccgtggggcaaccgctggggtctcactccgtaatttttttcttagtagatccttgcaatgacacatgtaccagcggatactgatgctgcgtattggctcactggcctgtggacccggggctcaaatttagccctttctcggattttagctatccgtatgcgcggtgaatcctgtgatgctgtgatgaaaagtcgatttagctcgagagtgtttgcctaagtttggggcttttaagtgtcggcggtgccgttggacaagagtagaatggagtgcaatagcagcattgcactccccattaaattactgctcctgttgtccccataagtacaggagtatcttgtgattccagcaagttatgacaataattacctgttttttgtccaggagagttcattgccagcttgccacagtacaaaatgattttcgtgagcacattcatcaatagtgtagagaagggatcagtgatgacagaagaatactagttgttggcacatatagtactaccgctactacaatggtttacttagtgattaattacatggatattggataactaacctgagagtggataggacctgcagcagtggcccataaggagggcgtgcatcagtggcatcgaccaccgtcagcttagaacgtttgtgaggtttacccacctaaatgattggcacttatcacatgtattaatggtttgatgcatgaatcaagggacagcggattgaaagtacggacaacttgtttgtgctacttacgttggaagtgtacacctcaagctagtgtgacatcggttcatcaatccatctgtcgggctgtcttgcgcaccaccaggaggaaagattgccagctatgttcctaaagcgacacatatatttgctgcacgataaatttagcgtcatataccagtcagtggcatcaatcttaattcacagtccacaagccaacagatctgtgaaatggatcggtcagtgtctcagtggctgattacttcaacgattagctccacgcagatgcagtcaaacgctaatttgacaatctgctgtaacggtcgttggacagatcgcagaggtgacaagtggggttccatgcagcgcagtgcagtaccacggacaagccttttctctgaagcaaaatatgaagaaaagtaacccgttgagaagagaagaagaatttacttcgagtaaaaggctgagctgaacatccaggtccagtccatgcaggctggcccggtgccaatctgctggaccaccagcccatagccaaaccaagctaagtagacttttgggtccaccggtccatcccgccgcatccgtggagtcacgtgtcctcatcgctcgccccatgctgcaattgcggccctgtcccgggtttgatgggccaatcgcgcgggcgcgcatgggcaaaacagcctcgccgaccgccgcgtcgcgcgttgcgggtgggctccgtgcccgtgccgccgcgacgacgatctcctcggtggcggcgtctccgcctgtcgtacgcgtgatgccgcgcgcgccgagccgaacaagtaaacaaccgatcggtccgcatcacccgccgtcgatcggtgagacggtgagtacgtaatccaagtgatgcacgggccgtatgcacgcgtgctgtgccggtcatatgtatacgccccagaaaaatgatttcatccgtaaagcggcggcggcggcggcggcttggaacgacacacgtcccattcttgcgtcattacaatcggtgtgttgattatgccgtcggcttcacagctcacacaagtcgcccatgtacgcctcagggtcatctcacgcgcacttgtgcccgtgctaaagacaagttcttcgatcgtcggtggtgccaaagtctaagcttgcacgacggttctacaggagattagtgccgcccggccggcctggaaccacaatttcaagggggcttgctcggacaattatacttggcattattgattatggctcaagagtactatacatcatatagatacggcgtcataacaggtcattggatggaaacgaattaggcatgcgggtacagcgtgtgtacttcctccactatccgtgaagtggaagtcaatttctgcaagatttccatttacctatagctaggtagcactactaactactccagtacagcaagccgtcctaaactcgtatcaaaacgtccaaacttcagctgattttcgtggaaattctgcttcatcagcagttccgttttaacccctgctcgtcgactgcctgccgggccaagcaagcaacaccaattcgatcgaggcaacacacaacacgacacgagacggtggcgcgtggcgggcgatgggcgatagacggatgggaagagcatcggagcgcatgctaggtcgtagccagtgagacaacgcgacgcgcgagagaggtggtggtggtggcgtccgtgcggagccagtctcacgtcgccatcgcgcactggcgccagatctggaccggacgggcgggggcgcggcagaaaaaaaagaatacgatatacaatgcgaccaatcgatcgatcgggagcggcttttgctggtgaatagctgcgcgtcggtgcccactttccctttggggaaggtcggggcaggccgtgaacaggaccgacgacgcgagccaccgaccgaccggccgtccttccttcccttccttcctcctctctccttccctccagggaaatccaccactactactcccgactattctaccggcaaaaagtgaatctagctagtagtggtacctaagctaccggccgtggctgcatgtattggcctagatagctagctgcaatgtagcgatgagccgatgcgtgtaacgctgccctgtgcgtgcgtgcgtgcgtgcgtgcttcccggtctccgcacctttgtgcttacctttttccttcgtccatgtagcacgcacgtcgacccgtcgttgcatgctggtctcgtgcgtgtgcttcagcagctgacgtacgagtcgatcgatcagctccgcgctcgcttgatatttccggtggccggcacgctggggccctacgttgcacagttccacgcagcaggggatgccgagagcgcccgggccgtcgagtggaagcatcgatcatgcggcccgaggggggcatttttgccggggagaggagggcctgcagccgcgcgcgcacagtgcgcgcactcgcagctgctcatgtctcgctactcgctagcgacgccccgcgcgcgcgtcgtggggtctcacgctcgtacgtacgcgctcgcgcgcgcgcgccatcgggtggtttcagctagtttcgtcccgtgaaaccgagtacggccgcccgcgccgagaccccacgcggccacgccttgccggccgagacgtatccattgtggcacttatccatttactcgatcgaccgtgcaaggaaaccacttgcaacggccattgatgaagagagatttagttgcctgtatggtatgcatgccgttttttgtcatgagcttagtgaggataagctcatggatcatgtgggcctaaatgtgatatagtacaggagtttcttcgcgggtatatcaagagttcaataccatttgcgcagattatttcttgtagccacacatattaattgagagcctgcatgatgcatatgccatcgatcgttttctagctgcatgcagacccaggtccgcgagtcgcaaggggacaagaggaaaattttctttccccctgctattgcacaacagttatagtggctagtagaaatgcatagaacgcatgtgcatggcaccctcgcgagctggcccctagcaaagcttacacaagaaaagctacaagacacttgcgaacaagtcacgacgactagtcctgattgttgcttcggttagacgtactacgtccctacttactaagaatgatgctgaacacgcagccaattaatcctgccttgtccttgtcatatatctgatgctagcaaccggctgaaccaccgctcgatcgcattgcattttttttcatagattgccacaaacatgcacacggcacggaaactcaagggatccatcaggaggcacccctgttcatcaatacacacaagcgaaatctagaacgaacaccaaaacgatttctgacaagctctttccctgcccatccactgcgaacgataaaaaccaggaccaagtcctgaacgaggaacaggtggacgaagtgaggtgaaagtgaccaagcgtctgatgactgatgagatctggtgctagcaataagagcaagttcaatagtatagccaactactagctccaattcatctatagctaatttaatagctcattcatataatagttacatactacactattaatacctagtcccacctatcatagacacactgtgtcttggagtccgtgctacagctggctacaaatctgtagcccgctgctcttctctctcctaatttatctccttaaaatatgtttgcagctggcttatagtctgctattgtacctgctctaatggccacagggagactgaaaacggccaatgcgctcgcctggttggttgccggtgagaggcagctaaggtaaagcttagctccagggggcgaactgattcggagagccgaggagagcgacacggcatcggatgagaccacattaacttgttttttaccgcgagaggttggctctcatggtcatggcccagccagtggctggcccagctcgcttttgtgaaccagtcgcatacatacacatgcttgccttgcttgatgcccggttgctgctgatgctaccctgcactgcactgcacttcacttcactctctctcatctcgccccacacacattcaattattgcaatgcccaaattagaaacaaggaatcccctttctctagcaaaatgttacgcccacttgcatctatgccccggcactattctcttctcttctttttcagggaggtgcataggcaacacattttaaagcatctccaaggatataaaaaagcgagcggaaaagagatacatgcatctgcttattcctctttttctcttttctattcgggaaatctcatgataacatttttgttttcgcaacaagcaacagcaacctaaagatccgtaccttatcaaatgatcaagcacaaccgtacgtggtgggtctatatacattgattcatttttttttctttttggaagattgctatttaatcacgctttgaattcaattccaacaagtccagatgactgttggttgtctacttgtcttcgagatgttagatatgtgtgcaagtaacccaacactatgaaattaagagattattaggaagattctgcaaggaacagttcgatttttcttttcttgcattgcagatagggcccacatatctgattcctgttggtataggataccaaacgcagtcgtatgtcttttttaatttagaagaccaagcaccataaaacatctcttcttagagggagaaaagaaagaacattactttagtaccaacatctagaaggacgaatacttctatatgctccacatctcggcagttacgtttcttggaaagcaaagagccaaagcttaaatagttgacatatatgttaatctgatcgtctcttttgatgatgatagattacatgacagtagtagtagcgtaaagctagcactccgtaggatttataaagcgatgaatagtagtagaaaccgtgggtgtttaaggatgcttactagagggcaagtgttgtcggccaagcggaggtgcatggagcaaattttcccgaatcatggtcatcatgcagtgaatgatgcaacatgagaccgaacaaaatgagctgtgatgttgacacccagagtcatcgttgttggccatggtgaaagaaaagaaggaaagaaagcgagcgaaacggcaaaagatagatactcctacactgcttgaggcgacgcttggccaatctctctcgccttctagggagctcctcatttacatgcccacttgtgtcccattcatgatcagatccatctccatctcgctcgcccaatcaagaaacagagaagaagaaagagagaagaaaaaaggtagagcaaaagaatagcatccagctcttgttcttgctggtaaatctgcattgagtttttccctgcgtcagtgacacacacctctctctctccatcgatctttgccatgatcgatcgacgaggagacgatgaatgcagcgatcttgaattttaaatctttgatcatcttaggtgggccgggtcagggaatggaacccgttcttctgcagccaggttgaggcttgcgtcgcaatgtagggagggaatcgtgatgatgctgcagctgctgtagcggttgcggcggccgcggcgttggtcggcggcggcggcgggtgcggcgggtgcggccagctcatgccgccggcgttgccccacccctgctgctgctggggaggccagtgcccggccatgcctgcgccgatcgtcagtgacaggcctcccgctgtccccggatcaccattgctcaagaactagcagcacagacatcaagaattcatcagctcacggataccggtgaaaccaaacgcgagaaattcagcagcaaatggagcgaagtggagtggagttgtatagtgagctacccacttggtgatgatgcctgggactgaatggcaggtgggtgacctgcaggaccggaggcatctggggatggttcgagttctggtcgaactagacaagaaaacgaggaatttttaagcctttttattacgtgatgagaagacaatcggctgatgcggaaagcaaagtccccattctttttttaccttagctttggtgctcctcgccgccgccgtttgccagtcaaggtcgaacgccatagggacgcgctggtcggagcccgcgccaccgccaccgccgccggtgatctcgtcgtccccgccaccgtcaacgttgcccctcttggagcccgccgagctcccaagcgagaggtccaggttgtgctcggcggcatcacccgtggccgctgctgcaaaacagtgacagattttgtccggatgagcagtcacaactcacaaacgaacagcctagccatgagcagtaagcgcacacatgacacacccacccggcggctcgaactccccggcgtaaatgcttggatcgaagttcgtcaccgcatccttgccattgcacttgatggcagcgcggtcgtacgccctgtggccaagagacaagaaacatcaatcaccatcaccgctcgcccatctaacccagaagcgtaaactcgcaaacggcgcagcagccacactcgacattcaacaacaatggccgcgcgcgcgcacagtgcggcccaataattttacctggcagcttcctcctcggtgtcgaacagccccaagtagacgtacctgcagtgcaccaaaaacccacaagatgatttacgggagattgcccaagaacgaacgatcgaacgaaagaggaagaaacggtgatcgattaggacatacttcttgccgaggaattggcccatccgagcctcccatctcccgcacttgtggagcgtcacgcccctgtacttggagcttccccgggggaaccccgtgctctgccgccggagcacgtggacgaactcctccttggtcaggttgctcatctgcaatgatcccgttaatcttgcagctacagtaatagtagtatgatctaacgaaaccgtggcgactcatgaaaagaaaggaaagttcaggtaataataatcgatcgcgctctcacctgcttcaggtcatcctcgtaatcctccaagctgaaattgatgtcggcctccacgccgcggaacttgatcgccgcccgatcgtacgccctgcgattgggaaatgaacataacaaaaaagattagaattttgacagcgccggattcgattgggcgagcagggaatagaagtcagcgattggaagacgaggaattgagtccaacttaccgagccgccgcatgagcagtgtcaaatccgcctgcaaattcagtcgtcacaaaggcagccattgtgaggaatcgaaaccgcgcccatagagaaaaaacggctccaattggcgagccaatcgtggaggccgcttgtagcagttcccaagtatggggggtatggacaagatggacatgaatgaaacttacccaaatagacctgcttgccacaatccctgcattgcacaaaaggatgagaggagagagagaagacaagaagatggtgagtgatgagagaagagaagagagagagagagagagagagagagaggagagagtatggcaagaataacttgataagatgttgctatgaaaggtaaaaggagcagaagcaagaaatgcccaaaacaagacgaatccaataccaaacccgtccatgctgctcttcttttgctcccctttgcctctctctctctccttcttcctccgttgagctctcgaaaatggaaagaacgagcaggaggagacgaggatgcttaccatatgtgcgattcccatcgcccggtgcggcggtagaacgtgacgccgcggtactgcgagctgcgcgaccgcggcccgcgccggctcttcttggacaccgccgccgacgccgccggccccgttgcagcgaccggcggggcggctccggccaggcggagccacccggcgcgcgcgttcccgggggcggggtcgccgccgccgcccgggacggccggagggaagaactggcgcgtgacgacaaccacagcggccgagtcgtcgtcggcgtcgtcgggtatctcgacgacggcggcggccgaggacgaggaggcgccggagtcgtcggcggacggcgacagcggcggcggcgcggcctcggccgccggcgagtcattgaggtcccacatggcgtcgcccttcccccttcggtgagatgcctctgcctcgcctcctccgtcctcccccttgttgggtcttggactcttggcactgcaggagatagaaagaaagaaaggaagagaagagagagcaaggagaagcagagaaaagaaagagagggtagcagcagctgttgccttgttgggctatgcaagtactttctcttttgcctatctatctcgttggcaaagccgctgctaacctaggaggagagcagaggacgcgaaaagcaggggaggttgtgggtgtggccttgctgctgctgctgcgcattgcgcccgagcgattggggggagatggaatggagagaacgtagtaaagggggaatcgtggtggacgcgcggttataaaagcgcggcgtcatcgcgtgtttctccgtaagcagaggggcaaaaaattacacatgtttttagtagcaaaccttagccgaccgaacgggggaccctgatcgggggaggggggcggccgtgggttttcgcgcttggattcgattcgattgcttgtcttctcgcgtcttctccttttggtggcggcacgagggggggaggggccgcccttgcccttatcttggtctgcactgcactacactacactgcagccagggagggacggggcctttgctttgcttcttcgctttaccgttcgtccgtcctagctttgggtctgtgggcgcccgggctccgcctcagcaccgcccggatggactgtcacgtgtactcttgctattcgggatgcaccatcgtagtagtataaacggtagctcaacctcggtaccacgtacccaggttttaacgagcaagtctatataattagatagagtaattgagaaacatgagtttaaatagttactatctctgtcataaaatttagtaatctgagacccaacctaggacatgtctagatacattgtattaggataaggtcttatcccatactagattgttacattataggatggaggaagtacaaaaacagaacagacttactacgtgtagggaaagacgtggaaaacgactccatttttacagtagcagagatatgatttacgaatcggtttctttagtctgtatcatcttgataaatatggtagctacaatgattaagccgttactattatccactctatcttaaaatagaactgatttaaaattttaaaaatgtttttaaaaaaaggtagctaccttttacttgctcctacatcactattataatttctcccatataagaaattggtttcccacagcctagattggcatcattttcaacgttggatatatgtttttagacaagagcatttgatatatcaggtgtttatttccacctgtaaaagtagtaaatgttatacctaaaactttgaacaaaacttgaacaactacgagtggcactatttaccacagtagtcccagcatctttgctagactagagtacgtagtagtacgtgcatagctaggacctctttccatctttctctcatttcttgttaccgggatgccctctcgatctctcagtcaagaactcctagtcactacgctgccgcggtacttgacattctgacatctactgctctgcgaccaacaagccaacaacctatctagtcggagtacctcagtatcaatgcatgaagcaaacggcttgacaaaccggacaggtccctatataacgtcgtattactactccttactaggaactactaacaataaacaaaattggtccggaagaatatgaattcaatttttaaatccaaattaaaattatttgtttctggttaccgatttgcttaataatctggcttggatcacaacaatccgaacgtccttttgctctacacgagaaattatgatccttacatgctccttctgtctccaaatatactacctacatcccaaaataaattcagcatttttcacacatcccacacatgccaatacaaaagaaaaaaaatagaatatccatactctattaaatcctaatacaactattcatttttttatctactccaatacaattattcactgctttttataaactccaatgcaataattactctaaaaataaaattattttaggacaaataaaatgaactaaaaaaaacttaatatgagacggaggaaatataacacgtactttacagattcgcaatagtaagatatatcctattcaatataagattgctactcctatacatattttaagaatgagttattagtgctatgatcctagcaccagcagtcacagctgcttgcatctacaaacaccatagcctatggcatgaaccatcaaaggcatcacccataattccaaaagcttccgaaagaacgacgagacaacttggaaggtgagcagtcagcgatcaaggaatgcctcttagctaacactagcagccatctcctatcggcaaaaattgtttgggcttatttatatacgatcgcttaattaacctgtggaaattaaacaagaaaattacagctactacacgggtcaaccaagtgcacgtctgtgccctgcatatcatatctggctttattaatccaaactctaatataatgttggtacctggacggtagtacttggttctagttttctcgcctgtcgactttggagaaggacgtacaaagacggtaacttgtaatctatccaacggtgtgttagactttggatcttgttggttttagtcggtatctgaatatctgatagcgagagtcatcgatgtaaaactgtgtctgattctgattgattggctcgcgtacaggtgaattgagtcagcatctactattcattgcgacatcgctctctccccaactatgtgaaatagtgaaattaaggacacatatatgaattctttttgtcgaattgttacatctataaaccaagaagtatattttgtactcctctcgtttctaaatatataaatatttctagattatttatcgaagattagtaagaggaaatattcattttcagtaacctcgttggccacatttaaatcatatatatatagaaacggagggagtatcacataagtttttctttttatttctttgcaaaacttctaaaacatttataaagagtacattattcctagcaacaagttataaatcacccatatatcgactttttgttgtcgtacaagatatatctgagatgttaaatcaacctcggactgaacggtgaagtcagaatcctcccaatcacaatttgatagtatattcttcacaataacactactggaaaaataatctttgctgggtcgacccaaaaccacaatagtcccggttccaaaaagaaccgggactaaaatgatctttacccccggctgaaaaccccacagccattatatgatctttagtaccgtttgttgttaccaacagggactaaagatggtctttagtctcggttcattccctgtcagaggcatgtcagggccgaggatctttactcccggttggtgacaccaactaggactaaagatcgccactttagattaaagatcatctagatctttactctcggttggtattaccaaccggtagtaaaattcaacacattgtatataatccatatcccttatcctctcctccacaattgcaaccactcagatcctccccttcctcctccccttccctcctactgtcccctggagacagacgccctcctcctcttcctcctccccttcctcctccctcccctggagacggaggccctcctccccttcctccttcctgccctggagacggaggccgcgccgcgcggacgcgtggtcccctccccttcctccccttcctcctccctgccctggagacggaggccgcgccgcgcagacgcgtggtgtatggacgaacgcgtgacgtgcggttgcagggtgcgcgcggtagtagtggcgccgtgattggagcttgttttctcttatgtgtgtgtgtatatatatatatatatatatatatatatatatatatatatatatatatatatatatatatatatatatatatattgtgattcactaatatgtataatctgtgatgtatttgatttgtgtatattagtaactttaagatttgtgatgtggattgggatgttactttgatttggggatttgggatgtgcatgccacttgattcgggagaaaataaaaaagaaacaaacaaagaaaagggaccatctagactgccgctatcctctatttagtaacaccaaccgggactaaaaatctttgactaaagatgggcatctttagtcccggattcctactcccggttggaaacccgggaccaaaggatcgttaccaaccgggagtaaaaaatgtttctccactagtgtaatttggagaaattgaagaggtcagctatctagatatccatctcaaagtcattttcgaaaggggaagtgataacatggtcccccgccattgtcttggcacaatcctgagggggaggactggtacgccgtgaggattggttttccccctttttttcgatttagtggtgaattgtgtcgtacgtgtactatactgcaaatagcacgttcaagtaaaagtttaggatacgcttctgatcgatgcttgtcaattcttcctactgttggctccattttcttgcaacatccatccttttatgtgccgtgtcatctttttttgcgttcgagagatatagaaaattattccatttgtacaataatttggttcactcatcgtgtgaactgcgcatatcggtatttcaacatccctttttgtttgcgtatgtaatttttctaggattaatgtaacctgtcatgaacgatgctgctttgcgttccctttcacataaccgtgaaaccgacaagggggaacaacttaattgccgctcttttcatgacatatactactttctctcttttatttctagctacgaaccgcacaacaacgaccgtcatatatagctgtgctaactgcctaagcttgataatttttttggtagaatatattgacaattcttaaacttgaggatattattaacaactataaaatatgaaaattacaatttgatcctttaaacttctaaaaccatgatccgtcatagccgttgtttagtcccattcaaatatctccattgtccctgtcgccacaaagtgagacccgcaccggtatattttactcttttacataagacaacagtaaacaacaaaccaaaatttctgcactcttgaaggaagccttatacaaaattaaagatgaacttctcttcatcagccatgcatatatgcagaggtgttgactctctaataaggcccttaaacagcgtgatcgatcgagattggcatatgcatatactccgctgtgcacgccgtaccaagaacgatatgttcagtacgaatattctcccctatccaagtttaaaaggcctgctacaacgcagctgtgtgcgtttcaggagttcagacgtttaaaagacgagattttacatatgcagcacagggctgaacaacagtgtccatcacctttctgttgttgaccaggagtacgtgctactagtatctatctatctatatagggccagaaagaaaaaggatggagtgatctgcattctgatcagtacaagtatactacattatcgtttgattgtacttcacttcgttgatcactttgcgaagtacttgtcttccacatggtcattctgagatcactttgacgcagaaacacgtctcaatgaacaaacaagttccgtacagccactaacatgcaatgcaaacttgttaactatttactccctgcacgttcacgttgttcgacgtgacccagctgggagagataaacagtgcttgtgcacatttgcatgcagtgtttacttgggagaagggaacgagaacaacaacagtaagacagtgtagttgtaaagtaaagtagtcgtcctagtgagagtagaagtacacgcgaataaggaaaccatagtttatgcctgcatgtcgagttggtccattggaccttagtagagcacggggtagagtagtctcacgctacagtgacgtctccccgactacaactacgagtccgtggctggctggctactgcctccatcgtgtataggttcgccccagattgggatcggtttccaagcccaaccgatgcttttacatgcatgcatgtggcacagccgcccctaccctagggacgtagtatcactgtagcacaagtagcaggacagctgggttagatcctatagcaagggttaaaaaaaattgtgtggttactctactgctcggctataagtaaaaaactcataaaattcaaacaagttttgtcgtaagtttttattgggtagtttctcgatttgtacgtaccagcttgaaaaactcgataaccaaatgtatattgttatatttattaacctttgatctcagcatatatattgatgtgttatttatgtacatgaaaaaaaatcaaacagctaagactattgtaaccaccaccgagtctacctcctctccttccttgatcacctaccaccgccactgatggaatacttctttttttatcttcctgatatgttgtctctctcctttcatgcatcgcacgcatccctcccgcctcatcgacgccagaagccatcaatggtgtcaaggagacccacccaaatcggtcccttccccacctcatgtctgaaccaagcagcggcgggtgttaatgccccgttgtcttcctcgtctccggtggctcacaccgtcggagacgcctccatcttcctcccaaatcagatgtgatcccaccaactatccttctctagcctcgcgtccactgcctccccgactatctctcttgacggagcgtggggctcctcaccgggagaccgcgtaggcccccctttgccggttcggccggggactcagggagagattctaagctctctgtatgtggaaggctcgcgagacaggaaacacacaagacacgggcgatgtatacaggttcgggccgctgagaagcgtaataccctactcctgtgtttttgggagatctgtgtatgaaggagctacaaagtatgagccagcctctcccttgttctgggtttctaatctggaaaagtccagtcccccctctaagtgggcaaggtcctccttttatatcttaaggggataccacatgcaccatttctctcttttttgtggggacttaccccaccttttcataaacagacggagacttgtatggttgccgtccgaatgaccttctgatgggacgacccatacctacctccacttccgccggaagcaggcgcgacgtgggaacatggctgtttgctgacgacatggccagtgtcagaccggtcacaaatcggtcattcttgtccaccacgcgtcagtttatcaatctgcatgttcgcccttcttcatacaatatcttgcctgtaatggttaggatgaagcctggcatatatctgaccaggactaacgtgccatctctgggaggtaacacgttagctccagctggggacgagcgcctagaagccctcgtcctgacgggatggggcgaggcgtgtgtcagatcgcctgtcgccacctaacccgcgatctgaccggtctgtgactggtcacagaccggataaacgagtgcactgcactgcgttacatgcggcgtgacacgctcagccaaaccgcaataaatgtggttaggtgagccccactgtgctcacctaacccatacacgcggagcaaaaacccacgaggggtcggggcgcctcggccctcggggctgaggggggtgcggcccgaccccctcggggggactaagaggagggcgaacacatcaccctcgggcccgacgtccctcgggggtaccaggccacgtgtgcgattgtgtctgcctcaaacctctagtcatgatactcctgatcccatgtcaccgacacctctaaagcccaacgtaactccaccatctctcaaccccaagacgctaatacatgtcttctgcgccctagcaacaaggaagatgaaccaatcattgaggggctcgcatagtcactgttggtaagtcctagctatcacgaggaagaggctcaggatggttgtatattcaaaatgtgaagaggcaaaaacttattttaccagctatagggtattgtgcgaattgtcgaattgggctattagacttgtacgaattagattgtcaaactggactactaggatatgatattcttttcattcctaggttaaatatggcattttaaaaatgttttcgtaatatatgtatgtaatactgttcatacctatttttccctaaaatagttaggtatgcatctaaatatccttcaatttaattgggtctgccccccctagctatcacctctcaccccgtctcctctctacgtgtgtcaccacccttgctatctatgtttagcgttgtttttatgttagcattgaaaaagatatactccgtagaaaattcgagaaatttgactaaaaattagcatacccatcgattttcatgagattttataggatcctacggcagggtggtttgatgcgaattgggaaggacagcgactttgaccgagcgccgatcagcggggtcgttggattaggtaatccagtacagtacaggcctctggttcgggaaacatttcccgttccgtgcgttggcgtccgaggcgaaatcccacgctgccactgcagccgtcggatgcatccgacgcacgtagtgacaccgaagcagaaccaatcacggctgggcagctacaccttccccaatttggatgcttcccacacacggctgtcttcgcatcaattaatcgctgacaaaggcatctctgtagcctagtgcttactaactgacggcgatattggatatatagctttgctgatgcggcaccaaagataatactagtataaaaacggcgccgatgttcgcacagtttctatgctgcacattagtattagatttgtgcgtaccattaggggaagcaaagcaccaaagctgcattaaacaacgagatggtccactgagagttttgggcaagttgcaagcattgttaagtccggagctcgcttggggccctcgtggccatcttcctccccacaccaagtgttcgaccactacctacgttggatgaacaaaatacaatatctcctgcccaccatgtagtattatagtgttattatatttatacttttcattagtagttatactaattaagtactcctactaatactaattgattgggggggggggggggggttggtcactggtcagtacttcattatgacagtgcagaggattgtgtgggaggcatcgattcttgatgatggctgcaggcgaggcaagggtgtttgtttgttcgttgtgcttgtgcacatggatgctttatttggcacgagactatcctattggaattaaggccctatttagatttcaactttttttaagagaggttttacggtgtttgcattccaaaaagggtaaagattcaacactcctcaatcacaggtaccatgttaaaagtatttaagtattgatataggtacttaggtactaagggtaaaaacataattttgctagtagagagaaaatggtagaattgtctctcaaattataaaaggtaccgcataggtataacggtacgtattaacaccgtaaaacctctttgcactgtttaatttcctgttttgcgtggtttattgtagatttacgttgtattggagttaagtcgtttactgcgtcactaaggtttaattttctgatttgcgtggtttcttgtagatttacgttggatttgagtctagatttacattgtgttcttataacacattattggcccaattatgttattttttttctacatttacattttattccaacgaatacgtaaaaactcctaccttaattatgttgaaaattatattttatttctagcaaaagatttatatcgtcgaccatacaatctagtctcctattcaaccctcaaccatacctacacttttccctctgtctctttccggtgaaacgttcaaaccctagaacaagaacaaagcagggaaagaagacgatgcgatctggaaaagaagacgatgcgatctggtatagatcgattggatatccgtgattttctttttttttctgatggcataccgatcgatggatattagatttactcttttttctgatggcataccgatcgatggatgttagtattcaattaaagtataatggccatgttttataagttaattacaccactgccatcatgttacaataaatttgttccgtaccttacccctctcttgatcaacggtgcacgttgttccacctccaggtacctctaggtacctcgcaaacaccgtaaaacatctctttttttaaacttctaatttttctgtcacatcaaacttttttacacacactttcaactttttcatcacattgttctaaattctttaaacttctaattttagcgtgtaactaaactcagcctaaggaggcaataggagttgcattgtcaacatttaagtccttgccttttcgtgtcactctcgtcagtctaccgtaacgtacgtacgtagtcctacccccatggaaaattcttcagtttcatactgctgcagaaacgcctgaaggtgatctgattgtataaaaattactacttacttgggttttggacttttagtggctaaactaagcataagcagccacaagaacgttgggctgcaggaa

SEQ ID NO: 8014 - DNA, 35972 bp, Oryza sativa
gccccctccccccgaaattttttatttttgttttatttgtttgatatttttttcacgcttaaggacacacaagaaccaaccatagaaaaattgaactcaaatggacgtaatatgtgacctgtaaaatttttcctctcctctcctctctctccgaactagtgcagaggagagagatgtgcaacttttttatttttattttatttttttgatatttttttcacacttaggaactcacaggaaccaaccatataaaaaataaactcaaacagacgaaatatgtggcatgtggaattttccaaagctctaccgaaaaacttctctcgaaaacacaatcttgcaagcggaatttggaggttttaatatcgccgaacccgacaaagcggggaagaatcggatgtaactttttctgtagatgtccgtgtatatattatttgcctgattccgagtccgtatgagaaagttacgcctattttaatagatgacatattttgtccgtttcggtagagttttggaaaattctacatgtcacatattttgtccgtttgagtttattttttatatggttggttcctatgttctcctaagtgtgaaaaaaaatatcaaaaaaatgaaataaaaataaaaaaaatgcatctctatggactgtttaacttatatatgtcatttcatgtggttatattttgaattagattaagtaatttcatatagtggtagagtgcattatgtttaacatgctgatcaaagggttttactaaaggagttatggtctaattttagtgaaggtgcaaagtagactaagtgatatgctagctattttcaaacttagctaagtggtagttcgagtttaatttttttttgtggttggttgtatcgtgatcctgagtgtgaaaaaacatccgaaaaaataaaataaaaatgacaccgttgcaactccatacaaagaaacaagaatggaggcgccggcgccagcatagctggcgccctcctcctgccacgtcggttcgcgtgcgccacggtggcagaaggacggcgccagccaccctggcgccccaaaaaggaccatttctgggataagttttttcagagatctatttgcgaaataagttttttaaaaggagcaaaatatgaaaaatccagtaatgaaggatgcacagtgacacaacacaagtggcctccctcaattatttgttggaacgctcttagctggctggtcaatttagatgtgaatgctttccttatttggcagtgcacatcgaatcatgttgctttcgcagcacacaaaaggccactgcgtttggaccaatggattcccgcgaaattaactgccgggccagctaattgagacgtaacgtagtactgctacagttatggagaaagtgttgcgttctgttggctgttgcgagcctaactcgcaagtggaaccaaaaaaaaaccaagagatgtttcatactagtactaatctggaacaatttgacagaaccataactttttcgtagctttgtgtttaaattgtcaaagacatctcttttctcaaactccctatactactacagtttggagaaagagttgccttttgttggctgttactccagcttgcatgttaatccaagaaatgtttcatgcagctaagcatgagccatctcacaaaacaaattgccaaagacaacttcaactctttactcgaatttcacaaaactacaactgcgagaggatacctctcaaaacaacatatttggccacatgattcttcctcctcaaaacacctccatcccatgaaatgtagtactgcttgagagcaatggcgtgtggagaccaaccttttcttttctaggttatcttgtcttccccaagagatacccacgcatgttgccggttgccattaaggcattaacaacagattactactactgatcacagaattttcagatgatgatactactgcttgatgcatactacgtggttcctgacttcacaacgaagtcatgctcctggcgtagtatcatgtcagatagtggtggttgagaccttgaaacttgaaagaccacaaaaaaaattgcagcttcagacttcagagtcgacagaccgccaacgagaacaagaataacacaggtgacaagtatggccgtatgggcatttccttctccttttcagtttgtaattactccaagattcaggctttcaataaccatgtgcccagcttgatccattttactgctagctgctggcctgctgccactcgatgcaaatgaaaagagaagatgtcagcagaaagtagcaacaccaaaccaccctgcagaaacagtcgttcacaggttcagaagcgtggagacactataacattttcctttccggtgaaagttgtccttctgtgttaagcagaagtggttagtaatgcagtgatacagcactgtactttcctgcagaagaaattgatgacactgtcaaaattgaccagtaaagaaaatggtgttgatattggcttcggctggccattcatcaagaacaaaggacctctggttcatctactcttcgggtctctgtttaatttaatgccaaaaaaaaccttatcaaattttggtatagttgctaaaattttaatgaacttgtcaaaattttggcaggatttcttatataattaccaaaatttgatagcaaactaaatatagccacttttttttggtaaatttgaaaatgacatcaaattaaacaaccccttcaagtacacatcagagcatcgagtgacccaccaaccgattttcatctcctcttcaagctgattgctcaattccccatcttttcctttcacttcttgcctatattcaggctgtacaagacgactagcctggcctgttccttcttttcacctctactagtaggagtactaatttactgcctcgccaggcagttttccccgcatgcagcatgcttcactgaaatgccttgaaagcaaaagccttttttgggaggcagtctccctgctcgggactctgtttcctccatctcgacagggatttttttactgggctatggcttgtgatgcctgcatttctcatgcaacgcgacaaatggtgcctgtacttgtgcaaaaaaaaaacagcaagtttcagacatggtacacgtcatgtgcagacgatatgtggaaacgaggcaagctgctctgctgtaaaagggggattggttgctgctgtaaaaagaggatttggtccagacacatggaatcaatgcaggccgtagactgaaaagctgcctcgtctcacaacagaggaaaacgaaacatgcaaaccatatgctcaccgtaaggaaaggaaccattttcatttgagagaactgcaaatatgcaatgcattggtccttggaggtgtacggtgtgctcacacggcagttcagggaaaaaaaaaagaacttgatgccttgcacattgcacaagcacaaaggtcaaaggacctgtttggactttggggcttggaacggaaagtttttggtcaggatcaagctttctccttgaatttcccgatctgagcgattgttttgtactagtactacaaaaaaagtacggttcatacggactacgaactgcattcgtctgcaccgtttcacccttatcagagagtgcaaatgaagtaccccacttaacggcaatcaaatccatgtacaatcatctttcagtacaaagactgaatttcggagagcttctgtgtgtggtttactggagggacaaaactgaacagtgccaaataatcaaagataagataataacgttgcttaggacagatcccgtggttcatcatctgtttgatattttcatgggtagtttatgtggatcagttttgctcaacatcaccatgtacgttccagtgatccagtctacgtactatacagtactgcactgctgaaatacagttaaatgctttcgatgtcaaatactcctgttgaaacacgatgcctcacacgtatgctgaccacacttatcaaaatttcaaaacatatgaaattggaacctgtagcaacttgcacccgacaaaccagggtagtttttcctttttcgttcatacggtccgatttatgataagttaatttgattactagtttttttttcctactagtactatatatgttcaaaagtttttccgatatcaaaattattatttttctcgctagattggcgttgttcctactagtactatatatctgttcctatgttccctcaacctgatgcttgcgttgttgttagcagctggcacatggcgcccacacatagaaacatcgtactgcaactcctcggaaccatcaacctttcggtgcgttgttactccaaaccttaaccactagtgtaatcgatggggtgttagctcacggatcacacattttggcatccgaaaacaggagcggcaaaaataaactaatgaatggcagcatggcacatcgtcataaccaactctgatatacttatcttgtgaattgataataccctatacataaacaagatgctcagtaatcttaggaaaccaccacacacgcatgcaactgatgctttgctgcgttaatactatactagatactcttacttagatcttgccgtttctttaagggtctttaatggaaatgggagagggctttgcctatctgttattagtacttctacatactcgttctgtaccaaaataaacttaatctatgataagatatgatatattccgaaataacgaatctagataagtagttgtgcagatttgttgttttatgcatgatagattacattctaacttgatttttttataacggagagaatatgaaagaagaagtctactactctgtcctacctaatgtatagtaacttactactgaattggatattttataatattatgaatatgaacatactcttatctatctaattcatagtagtatgaaatgtcaaatctggttctaaattgttatatatttttttacgaatggagtactactaaattatgagtatcaagcaatattagttcaaccacattgtcgtttctcataattacttatcaatcatgtcttttttcccctcgtgatgttatcttatcagtcctttgcttgggcacaatgatagtatatgctcagcttggtaccggtagtaccgaaggaaggccacatgggaagaggcccatctacggtcgattttcaatcatatcgttttgatgggagcgtgcaatgcagtgagtagaatcgattttccttggaatggcaccacccctaaacccttttccggtagaatctctcgtggtgagttgaatgtagtgacactgctactgcgagttgctagaagtgatagatgttactcgctgtgggctgccccctgcctgtctcgtgcggtctagtctggtgtggtcgctgtcgtctccactagagaccactactactactcgcttgcatcacctgaacagtagggttgctggcctggcacgggcggctggggatttttttcgggacgcttcacaactgtgtgtcagtcattgtgtatcaatgtacaaatgtttgctcggcgaccagcactgccgagtgatacttacagctggttagcttcacggctaatttatagtagtagtagcagcatgtatgtacggttcgccacagtttcttagcaccgtgtctcacgtatcatggactcaaaatctgtagcctgtgacactcgtttctttgcacactttttatgacccgtcgaattttcgccatagctagacgtgaaccaaacaggcacttaactgcggcagaccgctgtttgcatctcagcatcctcagtggagtgtgttaacattggtggtttaaatggtgatgatcggtttctgccaattgttttataggaaaaatgaaaaggaactgtagcatgggctccgttttgggctgacctttgctatatccggccatctgggcctcagtccacctaataacagacccagagcacaacaaagttggagtaacctccatatataggaataagttcattataggtccctcatctcttgacgttgagtatgaaattcgtccctaaaccacaataacaggtataacaccccctctcacttttcaaaaccgatatacgcgacatcccaaggcagtatagcagttggtttcggttgacttgacaattgagttagtatgggacccatatcagggcaaccaatccaaatctaaataataaagattggtcaaccacacatgttagtgacacattctcttctccctctctacattttttctcggtggccgacgatgagactgtatggtcgtccaggtgttggaagagggcattgacattggcatcggtgagaggaggtcggcagcggcatgtgagcaggcaccgcatttaatgcatgagccatatagcgcgaacaacggcatggaggaggacattggtatcggcagagaaggacgaatgggatcctacggaggctgttgcagcctcgtgagcagtcggaccatctctggtcaacctctccacttatgcactggtaggcatcggcagaggagttagagggacgaggatcctggcagcacggccatcacgacgaggtgcgcaaccaacagcagtaatgccctatctcggatggcgctcactgtcaccacatcgtgggttgcctcatcagatcctgtcgctgccaccacaatgagaggagaggagaagagaacctatcgtaacctcgcaagtagtcgatctgcctctaagcgacctctccgcttgggcgctgtcgcccggcacggagtcggcccttctccccgccgcttgccaaattccggcccctacccctgtccacgccgcctgtggcctacatcttggcttggtgaagatggggatgagaggagaaaagagttaactgctaacgtgtaggacccatgtgagccccacgctgactcaacaaagctgaccgaagttaaagcgccacatcagatgaaaccgggagccatattgcctcgagacaaaaagttgatatggtttcgcgagttcgtggatggactatacttggtatagcggttgagagatgaattttaaacttggcgtcaagatgaggaatctaaagtgaactcattttccatatatatgcagatcatggtccatcttatgggctttcactgggctggaagcctggaaagggccatcgctcttcataggctacgacgcataaagtggcacaaccacggcccacaggcatacgagcccgtccgtgcttcttgatgatgcatgctttgtcgaagtacgtagaaacaaagaacatcggggatgccaggatatggacatcactcagttcatctcctacacattggcagattgctgcatctacaagaaaaaaaaaacgcatcaacctgccatgcagtgggtacgttacgttacgtagctgccgaagctggctgggaataaaggggaaaagggagtgagacgatgtatggttggcgtcgttgccgtggtcctcgaccggtgctcctttccaacgttggtgaatcatgatcggtcaatttgcaacgagagagtgatggaggccagtagctagccgcccacgcattcttcctcttctctctctgtgtttggaggccggccaagcggctaactagcgtcgtccaccgtagtgggtttcctccttttgaagcaaatgaacaatgatcggctccgaaaagaagagcaacttgtcaggtgtggtcgactatcacaccataagacctggcccatttgagtatgttccgggaattaagccctcaatcggcacaggcgaggagttctcatcaccgtcgcaaacacacaagtgtttgaaaccgggcaccggcaactagttgggctcgacatcaacacgagacttcgctttctctctttcttttttttccccttttcttttctgacagccactgtctgccccgagcagagcacgcatatatgatgatcatcatctaggactgtagtcttcccaagtgtacacgcccctccctttttacctttccgaacctccgacacccacgacatgttcgttagtagtactggtgctggccatgcctggcggcaaagctactactagcccccatcgtatcagtatagattcatgcacgctagtgggagcacgacgcacccagcgagccagccatcacgtaagctgataagccctttgccaaatcatatccccaccacgcaacacgggcaattcggcgcgcgtgccgagccggccgttccgatcctccgacgcgagtgggcgacgcgtcgcttgactcgcgcggcccatatccgggtggaaaagggggtccaaaaggggggagtgaattccgagttcgcggcgggttggtgcgcgccgcgccgcgcgctcctgcttgtcggcgcgcccgcctggcagcgaccgaacgaacgagcacacatgacacagcggagccggcaaagcagtacacgcgcgaggcgcggggggccacctcgcgcgcaccaggggccaggtacgctcgtccgctcgcgtcgctagtttaatcggtgggcatcaaacgctggctggaaccgtccaactgccggcgggcggggcggagtcggcagtggaattccagagcacgagcattatccactctgtccctcctctcatcgccccggtcgctctcaccgctactcccccaccacgcccccaattccacccctatctcgctcgcttattatatagcggcaccagatgaggaatcaatcaactcatgccgctgcacttgtttgtttatctttaaagctactagtatgtgtagctaggaacggatccatccatccatcgttgcattcctcgttactccaccccgtccttttgtttattgggagccacagataagatagcaacgccctccatccacctccctccccacttcgctctctcgtctccggccgcgcgcgcaagtccctgtcaactgctagccccgcctgcttcgctcacctcacccaactaacccctccctcccctcgtccggataacaaccaatgcccaccatcaacacatcatgattatgatatggccatgattgattgcagcagagcatctgcttaacaccactactaatactagagtatccatctctactgtgtctctgcgactatcacaagggcaggtagccgggcgggcggctggctggctggcccgttttggctgtaagagcatgtacaataggaggctataaaccagttataatcatatatcgagaagaaaagagaagagagagaagaaagcgggctacagatttgtagccggctgtaacacaaacttcaaaatgttatatgtgtatgagaggtgagaccgggtattaatggtgtagtatatttttatagttaactattgtatgaataagatattagattggctatagatgttttggagctagtagttggctatactattgatcttgctctaagggatctggatttggtgcacgctattcctggttagttattggacggacaagtacaattagaatatacagctcggcacgcgcatgtactgattagggcacatcgtccctgttggataaaaataaccaagccgtcccctagaggggatccaaacagatcgatcgagctgatatatactactcctcgaacacttaaaccatccacaagtaggtgtttttttcctgaacaatataatcgatccgaccaagcaataaccaacgctgccagaccaagcgaggtgttttactcctcgctttggctctctcagcttgtcttttgtgccttgcttgaacgaatacggtatcctatcctgtcatgccctggcctccccgtacgtcggcggtccagcaggaagccataaacgcgggccgcgacgtataaatgacccgtcaccgacaacatctgtgaactggaagtcgttgcgcgattcctaacagaagcagagaccgaaatcggtgcgcgcgcacccacacctacctacacggcggcaacacaacacacacgagcgcgcgcgtccaccccccgtgaaggccgtgacgtgacgtctcaaaactcggaactcgccgcggttggacggattcctcctcctcgcgctcacccaaaccctatcccgcgtctacacgtcgcgttcctagctaagccgcaccgacctccacccggaccgatccacgccgtccacatagtcgcacgcatcgcggccgtccgttccaactccgccgaccccgaccaaggtgggcggcgaggggggatggacgtatgtggcggggacgggatgacgatgcgctcaaccaaaaaaaaagtggaatggacatgacacgatgcgatgtgattagcccgagcttgcgctgctaatcttgcgggaaatctacgtcattagggtggagacgatgagtagtagtagtagtatgattgggattaggagagggaggggccggggatagtgggcgggcgttgccgtcgctggcaagcgaaaattgacgtcgcttgtccggatcagcacgagcgacacgtacgtgtgttggcatgggcgggcggatggaattagctagtgctctgtgcgctgcggtgcggtgccgtggacggggagggaaacgtccacgtcggagcgacgccacctagccgcctcctcatgtcgacatgtcggtgcctgcctgccggcgcgcgctacgctagcgagagctagccggaggagcggttgggggctggcccgaaattagtggtgctctcgctcgcgtcgcgtccaccgaacgttgtaccacccgatgccggtgcggatggatcatggatgggatggccgtttgtgtttatcccagccgcgacgcaaaagcagccgggctttgcaaccgtacggccgcaggctggaaaggggggggggggggggggcgctgcatgcggcatggagtaactgcgaacgtgcgcgtgtcagtttttaattgtgccggtggtgcaactactactccagtcaagagcagcatcaacaccgaaatttgtcgcgcgccgtacgtacttaaccccgcgctatcggttttctgctttgtcaacgcgtgcataacctgcgaggtgaaagtacagttaatcatatattggtactgttttgtcttgtgcgagagagagctctaccctcctatatatacgatcgatgtttccaagcacaaaagggaaccggatatactacagatttgggcgaaaacaacgttgacgacgtaaaaacgaggccgaacagttcttccgcgtgtggttgcgtcccagcaccggaactgaaagcgtgcacctttttcctggtttccgcatgcatatgcgtcccggcttttcttcgcctacaccagctttaggcctttagctactagtagtacattgaaatcctaccgtaccagcgcgacacgcgcatgcaacgcgaaccatcaagccgagctgctccgttagctagagccagccatcatagataatcagattcattcgtggtacgacgttattgcccacctatctcgccctcccgctccgacatgtggtggtccaatggcttccttttcacgcgcgcgcgcgggcgcgcgcaagcgacaaagccagcgatccgagccgagcccccggcctgcgtgcactactagaaaattcaccacgaaaaaaatcgtggcatcaatactaaaattatggcaatagatatatattatcataattttaaaatcgttgctagccgtggtaataaatagtggatttttatttagtggtaataaatttaaatgttgccacggaatagatgtggcaaaaagtcatattgcaacccactccatatgtggcattagttttacgtaccaaaataaaagttcaaatattaatctaacatcctatctatttatctatttgtttttttatatcgtgtcttggctaggattcaaatccaagacctatccttcacgcgtgctctactttaccaactcacctacacatcagttctgttggaaaatgcatatcgttccatttgagcctatctaactgagatttgaatcataaatttgaatatctaaaagatttcaaatgaaaaagttatcacctataaaattgtagatctcatcaagagctataatttccatataaaatttgtctcaatctgtgtccatatgaaaaaattaagttaaattataagacgacaatttttttattgcaatgaatttgttgatcgtgacaacaaaaaatagtgaaaagtaccatgtactgtgtaaattgccacaaaaattaaaattatagcgatagaacatgtttttttgcaacaatacgattttttttagcgatatctcattttctattgcaacaaaagtactaaataaaacaacgattgtatatcgttccattaaaatataattatttgctacagaaaaattatcgttgcaatagtacaatatattgctatgaattattttttgttgtaataatttggtgataatagcttaattatctggtattggtgtcgctccccgcttcgcgcgcgccacgtacgcgtacgctggcttgcttgcatatgcacgtccctgcgcctacccacgctacgtacgcatgcaggtcggtcctaacctaatgatgcgtggggggctcatctcatttgctcctggccggcgtgagtcgcgcgtcgacaaccttgaatctgcccagcccagccgggggccacggtgtactgttgtaatagtactatctatctaatctagctagttagatttgcatgatttagacccggagttctggacagggaagccggccgccggccacacggccagctattcccgcccaattatgcatgggggcggctagctgacgattgactccacctaaaaggagccaattatcaagggacaaattagcataattaaagtgtgtatattggctttggactacaatacatactgtataacttcgctgtaaagtttctttacggagaaaatgccatacgttagtaacggcccagaaatgtcgtcgtctcaagcttttggcgcaaagacagttaacggttttactttagtgaatgttaccgattgtgcttctaattaattaatggcattgacctgtgtacgtggcttgctgtctggtgtaaacaggcagttcgatcaagtacatatatacatatacatatttctgaaatgtgtaacgaattttcgacagctagaacttgaagtgaaagtacatgcatgcatggctacacggaggctcacccaaggtcaacacgatcacaaatgtggcgacaaagtgtgtatgagggttggtggagaagagaaaaaaaaagatggatgtgacgtaattagagatagtcataattttattttattttcttcgagctgcacacaatgtacggtgatgtggttgaggatggaatttataatcaacaaaacaattaccataacaatggcatgcatgatcactaaattgattcagcttgtgcagaaaccttgtaatattttagtgccaaaacaagcagcgcgacaaaccattttagtcattaaaatcgaatagggtcatatgtatacccacatgtacataggccaaaatgacgaaataccactattagtttttccctgacttaatgttatttcatttgccagtttgcggtatatgcgattttaatcataataagttaatacggtaacatgatatatacaattccttgtggtttctacgcaactaattgctgaccctaccatatgtttattgaacctggtttcaccatgcaaagcaatatcatctctctcatatctaagatgaatggtaaacaccataagtttttgtggctagaatagaaaggcaggcgcatggtgttgtctagtccaattgtggaataacacaagttatctcaatgtgttgtgtaggtgttggtgttgtaagatatgaatgatagcaataacaccaacaattaaacgacaattagtaacaaaatttgatctcaaattacatatttgtgtcgacgggagatacccgtagaccggataaataaaatattggggtacgttggtacgaggatctacacgatatgacgataaacatataaaaaacaaggattatactagtttagacttctcgtgaggtaatagccataattcagtttatatgagattgatatggaaaaccacagagtacaaagagaacagatgaatccgacgataccggcgagatcattgttgagatcgttcgatgagatctcccggcggcttcggcttgtgtccttcggcttcgtaagctatggcgggtgtgttggcgctgtgattcgatgatcctgaactccttcgggggtgtgccttttataccatgagtttccttagtctccaagtagaactcggagacaatgaaccttgccgatatagaataatccctatcccctcctagtgggactctgttaatcgccggcccgtgaggatatttttcataatatcttgtatacttcgttattgcatacggaaatatatcgtatgaaagatggtataccaatcttgcatattcggtaaatcgtaggatagaatgtatgccttatccgtaaccttaacactttgaaactctggttattaattagttttccaattgcctaattaacatattagattagtcctggaaagaaacatattctcatcgcctcaaaatataacaatttttagggatggcatatatatgcacgagaggagttgaatttgtttttaccttatcgggatgggtgaagtagttccgaactataagagcaagtttaatagtatagccaagtattgacctcaaatcatttatagtcaatttaatagacaattcatataattgttatctataaacctataccacacaaataatatttggttccacttgtcatacacacatgtatcttggagtctgtgctgcagctgactataaatctgtagcccactgtttttctcttttcttttttatcttttgaaaatgtttttataactggcttatagtctgctattgtgtatgctctgatagttccaagggatgataggtgcagtgcaacggagttatggagctaattctgatgatgtatttaaccgatttcgtctgtaggacccagcaaaggggcactagctaatcctgcagtatcatgtgtttattgatcataatttcatcatgtgacacaccataagtcactatgactggaatggaaatggaaagcgcatggctcgttgtccaattgtgacggagcgtggggctccttaccgggagaccgcgctggcccccctttgccggttcggccggggactctgggtgagactctaagctcccaatctgtggaaggttcgcgagacaggaagcacacaagacgccggcgatgtatacaggttcgggccgctcagaagcgtaataccctactcctgtgttttggtggatttgtgtatgaaggaactacaaagtatgagccagcctctccctcgttctaggttcccaatctggaaaagtccaatccccctctaagtgggcaaggtcctccttttatatcttaaggggataccacatgcaccatttccctctttttttgtgtggggacttaccccccttttcataaatggacggagatttgtatagttgccgtccgagtcaccttctgatgggacggcccacaactacctccactttcgccgggagcagatgcgacgtggaatcgtggctgtctgctgacgacatgaccggtgtcagaccagtcacgtcggtcattcttgtccaccacgtgtcagcttagcaatctacatgttcgcccttcttcacacaacatcttgcctgtaatggttaggatgaagcctggcatatatctgaccaggactaacgtgccatctctgggaggtaacacgctagctccagctggggacgagcgcctagaagccctcgtcctgacgggacggggcgaggcgtgcttcaaatcgcctgtcgccacctaacccgcgatctgaccggtctgtgactggtcacagaccggataaacgagcgtgctgtactgcgatacaggcggcgtgacgcgctcgtcaaaactgcaataaatgtggttaggtgagccctgccatgctcacctaccccatatacgtggcgcaaagcccacaaggggtcggggcgcttccgccctcggggcctagacgggagcggcccgaccccttggggagacaaagagaagggcggccgtatcaccctcgggcccgaccccccccaagggagttaggccacgtgggtgatcgtgtctgcctcaagtctctaagtcatgatactcccggtaaagaggagggcgaacacatcaccctcgggcctgacgccccctgacggtgccaggccacgtgggcgattgtgtctgcctcaagcctctagtcatgatactcccggtcccatgtcaccgacagtagcccccggcgttatgccagggcgatcgccctcctcgagggaagcggtcgggcgtaacgccacttcctaaggcctggtgacaggtggggaccggtctccacacttgggcagaaacccaacggccacaaatcacgcatatcggcaatggtaactcggctgtcaataatgagcggtctcttcaagactgccacattactcgagtagcacacgaatctggacatggcgattcgtttcgtctagagatatggtaacgtcgcttcggtcggcgagcgtaattaacgcgcgcacgatatgatctatctcgactgccacaaccgcatatccacctcatgcgccgcaagcgggcgaatgggattagtggaagcgtgggcgcgagaaacgagggggcgaaatagtgggcgcgagaagcgaggagccaggcacagcgttggcaagagtataaaggcactgaggaagggatctgtttccttcctttcgccattattccccttgtcttcgccgcttgcgccctaactccttctttcctgtgccctaccttcgccacacgtgctcgctcttaatcttctcttcctccggcgccatggcacggggctccgctctgctcgatggtagcgtgctgccgccttcccgcattgtgagcgagaggcaggctgggctggcgcgccgtttcatgccgggatctgccaccggccgggagatagtcacgctgggcgagggacgcccggcgccagactacccggggcggtccgtcttctttctcccctttgcaatggcagggctggttccgccattttcttctttcttcatggatgttctggagttctacgatctccagatggcgcacctcacccccaatgcggtgatgactttggccatcttcgcgcatctgtgcgagatgttcattggggtgcgcccatctcttcggctgttccggtggttcttcaccgtacagtcggtgtcgccgccatcggtagttggtggctgctacttccagccacgggggccggtgctgaaccgctacatcccctgcgccctccgcaagaagtgggacgactggaagagcgactggttctacaccccccttgccgacgaagcgcgcctccgacttccgagccagcccccggcgcaggcctctagctggcgggcgtcggtagatctgggggatggctatgacgccgtcctcgaccgcctggcgggcctgcgatcccaggggctcacaggggccatggtgtacggcgactacctccgtcgtcggattgcgccgctccagcggcgcgctcggggcgcctgggagtacaccgggtccgaagactttatgaggacccaccagggagtgagatgggactgggctcctgaggacttcaagatattggtccaacgggtgctgaatctcaactccgtggaggcgtccctcattcctcaaggaatcctccccctctgcagcgatccagaccgcgcctccatcctgaccattatgatggcggtcggggcctcagaggagcgagctccaaagggccacgacggcgcaggcgggagccgcaggggggaacaatctaccccgggagggggtcgtgcttctgggtcccgcgacaggggcccggggagtagccgccttgccgacgcccgggggaagagcaagcagggaggaacacctcccccatctcctccccgagggggcggggcggtgcgtgccagcagcaggcgcccggagggggccgcgccgacatcgcagcccgagagggagcgcaagaagaagcggctccgcaagacgggggagacagaaccatctcggggaaacctcatttcccctccaaagtggtcgtttaaccgaccccctcgcaggttcgtctctcacccatcgtggctgtattcattctctcaacgcgagttttcactcacccatcttgttcgtcttctggtcttttcttttgtttcagcgagatcccgttgcgtccctcccgccattccaagtccggccagtctgaggccgaggatccggcggccgcagaggcccggaggcgggaatctgaccggcgagaggccgcggatcgcctacgggaagccgaggaggccgcccaggaggccgcccgggctcgccaggccgaggaaaccgctcgggaggaggccgcccgggcccgccaggccgaggaagccgctcgggaggaagccgcccgggcccaccaggccgaggaagccgctcgggagaaaaccggatttcgccaggacgaggcgatggcgacttccgaggcagctcgcgacgaggccgcgggcgcgtcgcttgggcccactccctcgggcgacgctcaggcgacaacttccggggcagctggcgacgaggctgcgggcgcgtcgcttgggcccactccctcgggcgacgctcaggaccaaacgggtccgggggacatccccgagtccggcacttccatcggcggcccgagccgcgtggcctcctctccaaggcggctcttccccacgccttctatcgctccactgaacgcagagccccttctgcaggccttggccgccgcaaacaccacggtgttggatgggttaagtgcccaggtggaggccctacaggcagagcgggcggagctcgacgccgcgtgggcgcgtgtcgaagaggggcgacgctcggtggaggccatggtggaggtgggccgtaaggctcaccgccggcacgtctcggagcttgaaacccgtaagaaggtgctggcggagatcgccaaggaagtggaggaggagcggggggctgccctcattgccaccaccgtgatgaacgaggcgcaggacaccctccgccttcaatacgggagctgggaggcggagctagggaagaagctcgacgctgcccagggggtgcttgacgctgccgctgcccgagaacagcgggcggcggagaccgaagcggcgtcccgggggcgcgaagaggcccttgaggcgcgcgccatggcgctggaagagcgcgcttgcgtcgtggagagggatctggcggaccgcgaggccgccgtcaccatccgggaagcaacgctagcggcgcacgaggctgcctgcgccgaagaagagctcgcgctccgcctccgcgaggacgcgcacaccgagcgggagcgagctctcgagggggccgaggccgcggcgcaacagctggcggacaatctgtccctccgcgaggcagcgcaggaggagcaggcgcgccgtaatctggaaggtgcccgcgccgagagggccgcactgaaccaacgggccgctgaactcgaggcgcgggcgaaggagctggacgcgagggcgcgcagcggcggggcggccgcgggcgaaagcgacttagccgcccgcctcgcagctgccgaacacaccatcgccgatctgcagggcgcgctggactcatccgccggggaagtcgaagccctccgcttggcaggcgaggttgggcccggcatgctttgggacgccgtctcccgcctagattgcgccggtcggcaagtgggcctctggagagggcggaccgtaaagtacgccgccaaccacggaggtcttacccagcgcctctcgaagatggccggggctctccaacggctccccgaggagctcgagaagacaaataagtcatcctcgagggacctcgcccaaggagcggtggagctcgtcctggcgagttaccaggccagggaccccaatttctctccatggatggcgctggatgagttccctcctgggaccgaggaccgcgcgcgcgcgcaggtccgggatgccgccgaccatatcgtcgacagcttcgagggctcggcccctcggctcgcgttccccccaactccgacgaggagggcaatgccggtggtgcagacgacagtgacgacgaggccggcgacccgggcgcatcggattgagcccccagaccccgccattcttcagttttttcttcttttctttcttctaaggccttcgggcctcttttttgtatagatcaacttaatctgtaatcaaaaatgaagaaatttttgtatcaatttcatcttgctgtgtgtatgagatgaggatgatctgtgccgtggtccttttgtgtcttagcttgattaagggttcgtgcccaggtcccagtcctcaaaaggcgcgggtcggggctagtgcctggggagatccacatgtcgagactggccaggccgggaacgtggtgaccgagggttatgggtgacccgattgtgggtttttgccgattcccccccggagttcaccacgccccggggcacggctcggttctgggccccgtttggcgattttagccgacccgagcccccgagggcaggattgagcatgagtgacctatttcaagtcaagattcttcaaaaggaaaaaacagcacagatacagcctttaggaaattgaaactgcttttattgaaatactgaaataagagaaataagaatgtgcatgtgtggcagcccccggccaaccctgcacgcccgagggggtgcggggttggcccgagcccgaaacctgacacccgaccccccctcaggggtagaagcgacgaaggtgttcgatgttccacgggttaggcagctcagtgccgtcgcccgtggccagccgtatggagcccggccgggggacgccgaccactcgatacggaccctcccacattggtgaaagcttgctcaatccagcacgcgtttggacgcggcgtaggacgaggtcgtcgacgcagagtgatcgggcccggacgtgacgctgatggtagcgccgcaggctctgctggtagcgcgcggctcggagggccgcgcgccgccttcgctcttccaagtagtcgaggtcatctctgcgaagctgatcttgatcagcctcgcagtacatggtggcccgaggagacttcagggtgagctcggatgggagaaccgcttccgcgccgtagacgaggaagaaaggcgtttccccggtttctcggcttggtgtagttcggtttgcccagagcaccgctggcaactcctcgatccatgaatcgccgtgcttcttgagtatgttgaaggtcttggttttaaggcctttgaggatttccgcattggcgcgctccacttggccattgcttctggggtggtcaggtgaggcgaagcagagcttgatgcccatgtcttcgcagtagtcgacgaagagttcactagtgaattgggtgccattatccgtaataatacggttaggcactccaaaccgggccgtgatgcccttaatgaatttaagagcggagtgcttatcgatcttgacgaccggataagcctcgggccacttagtgaacttgtcgatcgcgacatacagatactcaaacccgcccggggcccgcctaaacggtcccaggatatcgagtccccagacagcaaatggccacgaaagtggtatggtctgcagggcctgggccggctgatggatttgcttggcgtggaattgacacgctctacatcgccggaccaggtcgaccgcatcattgagagctgtcggccaatagaaaccctggcgaaaagctttaccaaccaaggtgcgcgaggcggagtgggctccgcattcgccttcatggatatcggcaagaagcacaacgccttgttcccgaggaatgcacttcaggaggattccattagccgcgcgccgatagagggtcccttctaccagcacgtagcgtttggagatgcgatggacgcgttcactcccttcgcggtcctcgggtagagtcttatctgtgaggtatgcttggatctcggcgatccaagcaatcaatctaagggagctgggagcactcccctcgggtcccgaggcctggactccgacgggcctcgggggccggtcaggcgcatccgtctcccctaaggggtcgggtcgcgccgacggctgggcaagcctttcttcaaaggcgcccagtggggtctgggctcgcgaggacgcgagccgtgagagttcgtcgaccatcatgttatcccgtctgggcacgtgccgaagctctatcccgtcaaaatggcgctccatacgccgtacttggcgcacgaatgcgtccatctgcgggtcagagcaccggtactccttacagacttggttaacgaccagttgggagtcgcctaacaccaggaggcggcggatccccagtccagctgccactctgagtccggcaaggagtccctcgtactctgccatattattggttgctcgaaagtcgaggcggaccaagtatctgaggacgtctccgctcggagaggtcaacgtgacccccgcaccggcgccctgaagagacagggagccgtcgaactgcattacccagtgggcggtgtgaggcagctgcgaggggtccgtgctggcctcggggattgagacgggctcgggagccggggtccactctgccacaaaatcggcgagggcctggctcttgatagcgtggcgtggttcaaagtgcaaatcgaactcagaaagttcgattgcccatttcaccacccgtcctgtaccctctcgattatgcaagatttgaccgagggggtaagacgtaaccacagtgacccgatgcgcctggaaataatggcgcagtttcctcgaggccatcagaatagcgtaaagcatcttctgggcctgagggtatcgggttttggcgtcccggagggcctcactaacaaagtagacgggccgctgcacctttcggtgggtccgaccctcttcgctaggggccgcatccctggggcactcttcgtccaagcagcctcgcggggcgcacttgtcttccgtgctgatgacctcggggtcggaggataacaggtgcggccttcccacagtggcctcggggccttcctgggggtcgggggctcctggcgtcgtcggacaagcgggcaaagggccaactccagtcgtcaggggccttaggcctccgttcggttcgggggcctcttctccctgctttttcccgggtcgagtcagcacagggttagcctcggggtcaaagggcgataggtgcggccttcccacagtgacctcagggccttcctgggggtcgggggctcctagcaccgtctgacaagcgggcagagggccaactccggtcgtcgggggccttgggccaccgttcggcttgggggcctctcctccctgctctctcccgggccaagtctgcacaaggtggggtgcgcggaatgaggattgtcctcatcgcgctccacgaccaacgccgcactaaccacttgcggggtcgccgctaagtagagtagtaagggttcatttggctccggggcgaccagaaccgggggagagctgagataggccttcaactgagtgagggcacgctcagcttcctccgtccaagtaaacggcccggagcgtttgaggagcttaaataagggtagcgccttctcccccagcctcgatatgaaccgctctatacttgctgggggggcgcatccgctctatagctcgtatcttctcggggttggcttcgatgcctcgggcagagaccaagaacccgagaagcttgcccgcaggtacaccgaacacgcacttatcggggttcagttttatgcgggcggagcggaggctttcaaaggtttccgctagatctgagagtaacgtttcctggttgcgcgtctttacaaccaagtcatcgacataagcctcaacattacgtcctaattggctacccaaagaaattcgagtagtacgccgaaaagtaggacctgcattctttaacccgaagggcattgtcgtataacaataggttcctatgggggtaatgaacgcagttttttcctcatcctccctagccatgcgaatctgatggtaaccagagtatgcatctagaaaacacaaaaggtcgcaccccgcagtggagtcgacaatctgatctatgcgaggcagggggtaaggatccttaggacatgccttgttaaggtcggtgtagtcgatgcacatccgaagcttgccgttcgccttgggaacgaccaccgggttcgccagccattccggatggatgacctcgcggatgaatccggcctccagaagtcgcgccacctcctcgcggataaaggcttgacgttccggggcctgccgccgcactttctgccggaccggccttgcgcccggccgtacggcgagacggtgctcaatcacctccctggggaccccgggcatatccgccggtctccatgcgaagacgtcagcgtttgcccacaggaaagagacgagcgcgtcttcctatttgccgtccagaagaccactgatccgtgtggtcttggacgggccgtcgcccagggcaacctccttgaccgggacctcatcgcacgtgactatccgctgcctcggggcggcgggggcggatgtgccaagcctctcgtcgccaccctcgggcttggacacgacggcgaggcggtccgcgcgctgctccatacaagcgagcgcgactttgaggtcgccatggacagagatggggccaccggggcccggcatcttcatctgtaggtaggcgtagtggaccgccgccatgaacttcaccaacgcgggcctccccaggaccgcattgtagggcagactgaggtccgccacatcgaagttcacccgctccgtgcggaagttggcgggtccaccgaaggtgaccgggaggtcgatgtgacctaacggccacgtgtgccccggcgtcacaccgataatcggctgggacggccggagcatcatccccggggccttgatagcgtcaaaggctgcgggggaaaggatgttgagggccgctcctccatcaatgaggacacgccccagcttcacgatgcaaacagtgggggaaaccaccattgcgatctgtcctccccgggcaacgcacggtgggtggtcggtctggtcgaaggtgagggcaacctccgaccaccgcgcccggcgcgtcgcctcatgagtaggggccgcggccagaagctctcgcttcatggccttgaggctccggcgagaaacgtgagcacacgctcccccatcgacagtggcaatggtggccccaggctcttggaaacctaggtcatcatcgccgtcatcgatgtcctcggcgggggccttctgcttggcctcacttcgccgattgccggaaggaaccgccggggacttgccctctcggcgctcctgcctcctctcctcctcccacttcctcgtccgctcagccaaacttttgaccgcacggcagtccatgaggtcgtggagggaggtgttgtggacggtgcaccacttgccggctgggcgctccctgctgggagcgccggcctttttctttttgtcgctcgcaggcctccccttttgggtggcccgcgaagcgccctcgacggcgaggacatgaccctcgtcgtcggaatggactgacctcttcttcctcctcctgtcacgccgccctatctgagcggcggatccgggggcggccgaagctgccacaccggaaccggaggggttccaagtccaggcctcctccttgcgagccactcggtccgcgagctgaaaaagctccgcggtagtctggggctccttggaggcgatcttttcgagcatgcggttgtgccgcacgcccccccctgaacgcgtagattaccgcatgtgcagggatgcatggtatggtgttgcggacttgacagaaccgctgaatgtacgagcgaagtgactcatcatcccttcgctgtactgcgtgtaagtccgcttcttcacctgggcgcggatatgtgccctgaaagttcatggtgaactgttggcacaaatcctcccaggagtggactgacgcgggtggcaagttcattagccaaccccgcgcctgccccttcagggccatgggaaagaaattcgccatgaccctgtcgtcacccccggcggcctcaatcccgatcgtgtagacctggagaaactcggcggggttgacgctgccatcatatttttcggcgatggtgggccggaaccttgggggccaacggacattccgaagactcgccacaaaggctctacagccgacaccaccaaccgggggcacggagggctgattcccgcgtccgtgttgaggtgacactctggacgaggaagcgccctccgttgcgtgggtagcacgtcggtcattacgccgccgctcgatgctggtgcgggcgtccggccccccacgcagatcttcccgggtcgaaggagtcgacgaaggagtggtggccgaatggcgaacggcagctgccgctcgccgcgcccttcgtcttgacgacgcggagccggtggtagcagcaccagaggccttggtggcggaggaccgcccaccagcatctagacgctgtcgtgcagtcatgaccaatttggccacatcgtccagccaacgttgggctggagactccgggtcatgggcgacgggcgggtgacgtaggagcgcgcccgcagcttggagcgcgccctggggcgtgctgccgtcaccgtagacgaggaggcgacgctccccatctcgccgtttttctccatcgcccgcaatcggtgaagtcgcggatctttcgaccctctcgagtgcctccccccgcttaggactttggcgtggagggggcggtggagtacgagctcgacggcgtgggttcggctccccgtcgtcgccactcacactcggagagaggtcgtgcgcctttgcttgctcagccatgaggctgaacaggaaaagcttggcgcacacgaaagagtgcgagagctcagaagatcactcgcagagccccctacctggcgcgccagatgacggagcgtggggctcctcaccgggagaccgcgctggcccccctttgccggttcggccggggactctgggtgagactctaagctcccaatctgtggaaggttcgcgagacaggaagcacacaagacgccggcgatgtatacaggttcgggccgctcagaagcgtaataccctactcctgtgttttggtggatttgtgtatgaaggaactacaaagtatgagccagcctctccctcgttctaggttcccaatctggaaaagtccaatccccctctaagtgggcaaggtcctccttttatatcttaaggggataccacttgcaccatttccctctttttttgtgtggggacttacccccccttttcataaatggacggagatttgtatagttgccgtccgagtcaccttctgatgggacggcccacaactacctccactttcgccgggagcagatgcgacgtggaatcgtggctgtctgctgacgacatgaccggtgtcagaccagtcacgtcggtcattcttgtccaccacgtgtcagcttagcaatctacatgttcgcccttcttcacacaacatcttgcctgtaatggttaggatgaagcctggcatatatctgaccaggactaacgtgccatctctgggaggtaacacgctagctccagctggggacgagcgcctagaagccctcgtcctgacgggacggggcgaggcgtgcgtcaaatcgcctgtcgccacctaacccgcgatctgaccggtctgtgactggtcacagaccggataaacgagcgtgctgtactgcgatacaggcggcgtgacgcgctcgtcaaaactgcaataaatgtggttaggtgagccctgccatgctcacctaccccatatacgtggcgcaaagcccacaaggggtcggggcgcttcggccctcggggccgagacgggagcggcccgaccccttggggagacaaagagaagggcggccgtatcaccctcgggcccgacccccccccccccccaagggagttaggccacgtgggtgatcgtgtctgcctcaagtctctaagtcatgatactcccggtaaagaggagggcgaacacatcaccctcgggcccgacgccccctgacggtgccaggccacgtgggcgattgtgtctgcctcaagcctctagtcatgatactcccggtcccatgtcaccgacaaattgcaaaataacataactaatatcttatcttttttttacggaaagaaataaattagtatctcaaacctccgtgtgttgagtagttatatatatagatactgtgatatgaatgatgacaacatcataaagaaataaacaccatgatatttgatgacagagttcgatcatactcccaccttttatagatgttagatttattctatattttgattttctttttcaaataagttaatcttatttgttgttttcatgtatttaaaatttaaataaagagacaaattaaatatttaatcagaatctgatgagttttcttaatactcattgattctatgcatgaacatactccttgatattttttacatgtaagataatataacttctcttttctcttgatgataaaagtaatatgtataactcttatagatacttatagatagaaggaagaagttccatatatacatctttgaaactctaatatcattattccaccctaattaacttagttttacattgattttaatctatattgttattaccgtttgaaatccaactataattttaatttctttcagaaacttttcaaattaaactttttttaagtatatgttaagtgaggcatcgagaaggaagtacattagtagtacatagagaggccggggactcggcgaaaggcagattcataggttgatcgatgccgcctgcagtatactgttccgaaatgctgctttttgcacgggtggttgtactccaagacggtggtcgtcgacctatacgatgtccggatgcaagttagccggtggacctaacaaattacgctgccgctcgctcagctcaggctcccctccaaacagcacagtacagtgctgccgtcgacgtcttcctcccgagctattttatcattatcgcaaccaaactctaatcataccaccccccacccacaaaatcccaatacaaataccacccatcaaatagatagcgagaaagaaaagagaagagaagaagaagccgcccaaccaacgccaaaagctactgctgcttgcacaggagagggcagagagagagagagagagagagagagaagagggcggctgcggcggcggcgcgcttcgctcatgcagggcgagtaccaccgctcctccagcgaggactcggctgcttctgctgctgctgctgcggcggcggcggctgcggctatggctcctctcgccgcggctgcggcggcggttgctgccaaggaggagcaggcggcggcggcggcggtgctgccgctgcagcagcagcagccgaggcggcagtaccgtggcgtgcggatgcggaagtggggcaagtgggtggcggagatccgggagccgcacaagcggacgcgcatctggctggggtcgtacgcgacgcccgtggcggcggcgcgcgcctacgacacggcggtgttctacctccgcgggcggtcggcgcggctcaacttccccgaggagatctcctcgctggcgtcgctgtccgagggcggcggcgcgagcgagccccgcgagcccgacggcggcacgctgtccgcggcctcgatccggaagaaggccatcgaggtcggctcccgcgtcgacgcgctccagaccggcatgatggtcgcgccgacgacccaccaccgcgagcggcagaagcaccaccaccaccaccaccaccaccacccgcacctgcagccgcacggcgaggagcaacaccaccaccacgagcagaagcaccagcggacggcgtggagcggccgcgccaagaacccggatctcaaccaggcgccaagcccggagaactccgacgccgagtagaagccaacaaaaccgcctccgcgcggcaagatcgatcaacggcttcgtcaacatgcagccagcgtatgatcacctccaccacgtacgctcgctgcatccatccacctaccacctattcgtccacccctcatctccacctcggcggcggcggcggcggcttcgtggcgagatttttcgatgcggttttggataagaacaagggaagggcagcgtcgggaggagggcggtggagacgggggaggaggacgccacaagtggcggtctttccaaatgtcaaaaaagacagctgtaacagtgataaaacaagtcatcctctctgtttttttttcctctctctcttctccgtgttattatcgactagataagcagcgattaattaatccgtccttccccctttaattcttctttggttgcgtcgtcgcacacacagtacagggagtatatacaatttgccaagcttgatccagttgctcatctgcctcaccccttaatccagttgtctgttggtgagcaaaccccggccggcgcgcgttaggttaggcagccagccacccacatcgttaatcactctcacagttaagcatctgcctgtaatgcgtgtgtgtgaacgtgcaaaaacgcaatcatgcatgggatcagtggacggcgtagtggtggtgagccatgtcttttggctaatctaatcaccaattatgagcttaccacattaccactagtactatcatgggggaggtagcaatcaggtcggtgtccaatggcaggagcccgtagtacaactaactcggcaggagtgtccgccttcctgcctgtgcctgccattgaaagtatgcgtcgcgtactcgcgttgcatatttgcatggggatcgatggttgttagcctggccggccaccacattggaaaaacgtcgtcgtgattggtcatgattgcagtggcgtgtactacgttttctcatattttgcatgagcttcaagtactcctacaaccgaccttctattgcgaaacaatggctgttcgtgccggaaatcgaatggattgattcggactcggcgtggcaggttatgaatcctctgggctgcatcatatcaacgatgggtgaacaagaacaacccatgtagtatgtacttacgccgcggcagtaaattttgctggaccatcagcacatgatggtagtaatgcaaaacacgggctagctgcagacgcatgcagaggcgacagcagtgcaattttttttcgtacgtacagacagtgcgtgccggccgcccccacccctccactgttctacctccccaattgttgtggaactaacttttgcatcaaactcgtcctctctcgcccgttaattccctcaaaactcgattaaattttcgaatggacaaaacactgttttctccttaagagagtactacattttgttactatttgtaccacaatctgacccttttccagcgatccattcatcaattgtcatcaactagctctccaggatgttgttactgttctttgagatttgttgtagccagactcagccagaccgaagctcgcctgtactacaaaggccaaagggaggggcctcggcggtgtagtttgcgattgctgaaagggaaggcgacgttgcctgccgactcgctaccttttctggcctttttgggcgccctaccgatcggacccaacaagccacccacgaaaccagcacgccatgacacatccgcttgtgtgctgctcctcccacgaaaaaagggccccccgtttgggggcgcgcacccgaccagccgcaccccaaatcatctggctgcatccgcatcgtctgtagccgatcacacggctcccacggctcccccctcccctccaaactgggcccgtttcgatcgatcaacctctgccaaccgcagcccagcctcgaatcaacaaggcccataacacgttgtaatgagcgcgcgaaaaactttcttgtgaaagtacaggagtcggaggaaggaatccgtatctaacgatgattgtgtccgtgttgtgcttgtgcacaaatcgtgatggggcatggaatcgagttctaacgtgtccggccgctgctagcgtccaattcgctgagcttgacggcgaatctaaacatgcagttccaaatcagggccctatctagctagctactactactagtagcattagcagcaagtgagggctagcacaaagcagtcgagtcgcgagcagtagatgagtggagcggagacgataccctgccggtgggaataccagctacagcgaccggtggccgcgccgcgacgtgcgtgtttttttgccgctttctgtggcgtcgcgcgcgtgccaccaacaccaagtcaccaacccctgcgtttgccggtcgcgatgccgcggcggggacgtcggcgtgtgggcggatgagagggaaaaggctccaaaagaggccgggggggagtttggccggcgacggcgacgtcggcaattgcgtgccggcttttcgcgccgcgggcgtctgtggccgacaagaaacagatacaaggtgcaacgaacaaaaacgcattggatcgatcaggcagagaggaaacatgaattactgcaaaacagtagtaccaggttggttggcacatggtagtagcatgcgtagcagataaggcaggattaacagggcacagacagtgaaaaaaatattgagccatcatccaatataccagccataaatattcagttgaatgcagagcgacagattccagggattatttactgcaggagggggcagtttgcagggaccagttcttttacctttttttttaatcaaatttgtaggtcaatggcaaaaaaaatttctaatcaaaaaacggcacggtaatatgaatcactaaacgatcttgcgatcgaacaagcacacagtgtttactgccctgtgctttttctaagacttcagagcagtatttttgcatatgggacaggtgttcttcacaaccagccattgcctgacgcatccaacatggaagtcatgtccacagtccagtgtcccgagatcatccccatcaacatactcttcctggataaacagcgagaacgaacatagttagaagacatcaatatgaattattagtttgcagaattgccaaaacttttcattgatttaagaagacaatgaagaaaaaggaagatattgagcaaagacaattcctcaagtgtatcccaaggtaagatatttgcttgggtaggtcagtatatgcagcactaggaatcttgaacaaaatcatattcaactttcagctacaagttttaaaagttgagcattgttgtccaactggtagtggttcacaggcctgaccgacttaattgataattacagctacattattgatagatgagtgtttttcaagttaaaatggacatactcacaggcttatgtcacctattaggtatggcgtacaattaacaaagctaaatgcacaaagcactgaacctgctagatttcaagttaactaaacaaaggaaactatgtcacaagcttctgataggcctgagttatacctggcagatacagcatggctcttcttccacagatgcttccaacctccatgatgagaatttcctttgctttaggagctttgtcacttcttcctcactgaggccagtgctaacattgcctattctttcttccagtgccaatagctcctggaagacaacagcaattatcagagttttgctggagaaagatccagataatattgtgctaaggaaaaccaacctcataagacatgttgtctatgtcaaggcgcatatccctgtgtctgtcatgaatgtcgactccaccatagaaaatggactgtagcaagaacagatatacgtggaagcaagagtaaatacctcaagaaataagcaaagattttagaaaacaaaaaagggttcagtgcaagttgttgcctatttgtttctctctgttgaaatgatgactatatttttctgaattatagatatactatggtctttcatgcattcactatatactatttccatattacaagaaacttctgttttcagaaacaaaacaacaccttatgcgatctctcttttataaaatggattagaatccagcctctacatccaaactgaatggacagagcaaaccttatgtaatcctagcatcaactagtattagtcagccagtcttgctgtgagtttttaggacataatatagtttcatcaatctctacaagtccgtgcagataaaaataggcaactgtaggtaactccgaaaccacagttgttactgacctcaaatcttacattttcccctctgtgaatcatttcaagcgcgttccggatctggtgacaagcaaaaaggtaagaaacatattgtcttgcatagacttcatggttacacaagtaaataaatgaacgacgcatccaacatggatggctcactagttattgcctgtccaagccacatagttctagagaataacatgcggctagaaacaaaacgtagcatgcataaggtaaacggtccattgaattttataactattaatccactgtgtcatttaaaaccaaaacaagatatgtgctctctctctctctctctctctctctctctgttgagttaataaaattaagtgtcactactaggtacaagatgatggtgcgtaagggggggggggaatttagcaactgccgtaacattttcagattggtgagaaactaaagtttatctttccaccgcagaattaggtggatggctgcagacatgcgaagaagcatgtgagatcaaaggggaaatgagatttagaagatcgtcagaatattattcctaatgatgcttctgtatgtccactaaacggatgtaaacataacattattctgatttctgacctagttcagaaacaaggcaggcaagagaagggaaaaaaagagagcagaattgatacctcaattaatcttcttccttccctgctcctagttgacaacggaacaccccaaacaccatcaccttgtcgttctaacagaaaaccggaccttaggcgtgggtgctgatggccacgaagagctccagataaacgacttatctcctataaaagaaaaaaacgcaagaagattactaaaagataaatcgatttgaaaatggaacatattgaactgagcaggcgaaaagctacctctgacaaattacgaggattacgtctatgcaagttttgatgggcaataaatggagagcctgctggtggattaaccatcgaattggtattagctctcgatgaagaaggaacatttcctggaatggtagtagctctgccatctacattccaactagatggttctggtatcaaatgcctcatgtctagtgcggccggaggaactgcatcagggaagctggtagccactacattcctcgcgctaaattcctcactaccaataattctgttctccaaattgcctgttcttgatgatgaggcccctggaccagtgaaccggtgtgacatctgtggaatgccaggaacgacattcattggatgctggtattgaaagttcaggctactgaccactggaattacctccggtggttcatcaaatgaactctgaaagggaggtggctgatgattccatgaattggaatgtctgatagtacttgaagatggccacacaccataggggccaatatgttgagccaggctagttcttggccgaaaacttctttgtgagcctcctgaattgttattgcctccactaggatcatagctactagatgacaatccagctgtagtagctccataacgcgggagttgttcatcaagagtgcttggaaccaacagacaattaggagagggtaaatttgtactaggagagggattatgactcgaagaagcaatgttatggaaaatactatcgttcctgtgggaaaaactagtgctagcacctgccgagcactgcccattaactccttctatatttttcctcttgcatgccagccggcggcc

SEQ ID NO: 8015 - DNA, 40756 bp, Oryza sativa
aattttcaccagatagatcattaccattgatgttaaggcctatatcaacattatccaaagaaaggttgcgctcagctaccaagcgcctttcaccaatccttaggccaccaccgatattacgttgctcagctttgatctcattagagcccccaaaatgtagtgaactgccacttgcacttgcttcgcctgattcccaaaaacctaaaaaagtgccattttgatgcacaccgtttccatagggaatagttccatcactacggttcacctgataaccttgaaggttatgtgactccactgaaccaagaatgttgttccaatatccttgttgatccatgacagggtttcctgaactggatgcatggtcaaatccaaacacatcagcaagctgctcaacagagttcttctgtccttgcattactgaagatgtgctctttatcaattgatgtctggcaatagcatctcaggtgctgttcatctctttcaacaattgaagcaagtggtctgcaaatgtaagaaagattgtaagatattagaattttgggtaaaaaatatgttcttagcattgcccgtacagaagaagcaaacaaacagtctcaaattgaaggaatgttgaatgctacggttcatcacacgctaggttctgctgaatttcagtcattatgttactgaacaacgcaagtctaatcctattgttatatactatctttaactaattaacatctatagaaatgtgaacagacaaatcttttgttcatgactcggctatcagaaagttattctttttgataaaagggttactatccagaagcaggaagactagtttgggttttacagaatagcaattcattctgtcattgatgagagcattaactaattttactgtagcaatcttggcatgaaccgcatttggtgaggtatatggatgcaccaaacttgatggtttgggctgttgtaagcaaaggttgtgctgatgcatgcaatttaatgagtgtgagacacggtgattgtacattgcatgcgacctaaacagatggactgcatgcaagatgggccccattgcctctgtggacaatccaaaaaatatactactactactctcattttatttgcatttaattcccttccttttcggtttgcaaaaaaaaaagaagttttaagtaaaaaagacaaacggaaagaaaaggtagaagcggcgatccacggtttcaagggacaggttgattttctcgtgacgaaattgaaaggcaaccaacacagggaggaatttaaccaaccaagaacaccaagtcatctctgtttctcaccgtaacaccaagcaaagagaaacgtaccgtttacaaagtttgaagaaatgtgtttatgaaaaagaaaaacacgaatttttcacggtttaatagcatttgacacattccggactgtagaaaacatctcgtgggatgaaccacgaaagaatcaacacaagaaaggacatgtattgcaaaggaaccatagatttccaaccaaagagtatggcaggccaccatgcagaatcaaaagaacaagagaaattaaacaaaaacatagacacagagagatgcagcaaaccgtaccagcaacaggtgcagagattttccaaacagcagctctcaagaaccacacgagccaaaccaaagaacagacttttctcgatttcccttctcctctcctctcctccctcccttcgtttcttgatcctctccaaggcagagagaggaagaaagaaagagagagagagggagagaaagaacgaagaatcagcacaacaaccggaggaaacgaccgattgctagaagagaggaggagagaaagatggtgcggaggaggcgaccgaattcagagagatcggcagggtgggtggagaagggaatgggtggaggaaattttgtcaaggaggagagagcgagaggaaggaggaggagaaggagaaagacagggagagaaggaggtggggtggtggtggtgatgagaggatgtaagaggaggaagagagagaagtttggctgaatttggatttatttatttctccatctcatctctccctctctctctcttcctgtgggtcttggttggaaggatccctttcttcctcccccactaaaacccagcctttaaatgctccccaattcacacagagaattaacatctcctttaacaagggccaaacaaagattagtagagagcagagagccactgttgtgttgtctttcacatgacctccctccccccatccacttttggatttttgcagcactctttctctgcatgctcatcctctccattgaatagtgtattatcctgctctcttttttttttcttccttggttgagcatccttgcattgattatttctaggtgtaatccaagtgtcatgcctgcttattgaaatggctgcgttgtttgtcacttcatgagtaattgtgaaagggagctgttcactgtccagataagttaccagaggtacaactgtaggagtactattaaattgtgagctggttcttttaggagcactaaggccagtcacaatgggggtttcactggtgtgtcatgcacatttaataggggtaagactgaataaaaaatgattatttgcatgaaatggggatgagagagaaggaaagagtttcatcctggtgaaactcgtcagcgtcgtttccaagtcctcggtaacagagtgaaacccccgttgaggccgattcgtttcattcaccggatctcttgcgtccgcctccgccgtgcgacctccgcattctcccgcgccgcgccggattttgggtacaaatgatcccagcaacttgtatcaattaaatgctttgcttagtcttggaaacgtcaaagtgaaacccctccactgtggggattgtttcataaaagatttcatttgagagaagatggtataatattttgggtagccgtgcaatgacactagccattgtgactggcctaattgtgttactgtcattgaaagacagccggtttctcttcaaaaacattatcttttccctaagtttatgctaaaccaagaggcttttccttgcaaggaagccattgattgtggtgtggtgttttcaatattctctctatcatgttggctgacacgcatatattcggatgggaacgcttaaaaacgagggttcacatgaattttgccatatagtttgttcctcctgtgcatcaaagaccacctttctttttgctgcatttccgcttctttccagctcaaacgaaataaaaacgtataattaacacctccggaaaatctgcaaacgttcttccaagcacctcaatccaacacgtgttgagccgagagaaatcacatggttattaatcccccaattaaatcctctttgatttttttttgcattcacaatacaactaattatcacaaaatcgcctaaaattcatttgaaaatttttgccgtcacgaacctcacgtagccacaacatgcacgtctcggggcccaccgtgccaccatcatgtagatggagtgaagtcaaaagccgatacgtgtcctaagcggtgcacggcatgcatgcgccattccagcttacgtccatgcacaaatcatcatctgaaattatcaacaagagaaaaaaaatttctctgcacgaacaactccccttttcaccggcacttacctagaagaacaccacacaaatgttttttttcccatactaataattacgagcttgaaattttacattcggtcaactgattggaccagctgcacgcagagaaagatgaggctaattatcagtggctgtttcagaggcgattttttttctctccatgagaacaaattatttgtgtcatttgtgtgtttgtgtggccttttttataggtcgttgcgggtgcttggaatgctttgccgctttactgatggagctcgtgctatgtggagtacttggcaggagaatatacggctggaatgcgcttggcccggctagctatgccattttgctttactttccctcttcttcctccatctcagtttggattggattctctgatctttagcaaccctctttaccatggttgctttgggctaaattgcgtaaagaacctcggctgcagactacctcctcattgggttcagataaaaaaaaagtgggcgaatttccatccgggtcatcaaaagccaaagcacattttaaaaaagcatatcgtttgggggagttaaagttattacagagtgtatctaatgagaccgaggagcgggcggaacgggttagaggtgcgaatgcgacaggaatcgttcgcagtactgtgttagaaatacgcataatcctgttcttttgtatcctaggatttgcatttcattttttcgttcttgcatatacatgaccgtatgtcgcagcgcagtggtaaacccagaaaaaaattattggggttcaatacatattaattatctaattattagttaatatataattaatgtgttacaaattattaaaattaaataatttacccaaggtctgacttggaaaacaaaacactacaaattcccatgccgcagcgtgggtgttgtgttgtggtcatgtttgtgcctagagagagtctttatagcaattctaaaagcaagtttaatagtatagccaactattagctctaatttatctatagccaatctaatagcttatttatacaatagttacatactacactattagtacctggacccacctgtcatacacacactgtgtattggagtccgtgctacagctggctacaaatctgtagctcgcttcccttctctctcctcatttatatccttaaaatatgtttgtagctggtttatagcctgctattgtacctgctctaatagtacatcccactattagctctaatttatctatagccaatgtaatagccaattcatacaatagttgattactatactattaatatatggtctcacctatcatacacatagtgtgttttgaagtccgtgctgcagctagctgtagatctgtagccgctgctcttatctcttatcgtttatctcattaaaatatgtttatagttgactaatagcctggtattgtaactgctcttactcttactcttagtagtatagcatgtgaattgcttcaacatatgggatgtcaatttcacgtggtcgattgaagctagagctagttagttgaggggattctcggacttggttgacacactgcacctataatagtcgttgatgatatgtgggattgggtccacctgttaatcactatcaccgcaagggcagcactacaggtaatccaccatgtgcaaatgtacgtgtttcttaaattaaagctacatattttttaaaaaagttatttataaattttaattaaaatactaatgaaaatgattccatttgattaatattagcaaaattatccatgcgatctatattgtatatatcattactgtcaaaattttcaaattaatatatttcaaaaaataattaatagtaggtactatcttttttatcattgttcgaaacttttggaattcagaattaatacaagttgtactagattggagtctcaattataactattcatcattttaaattgaaaattttggagcaaacaattattatgttatagttatttcttctttagtcagtaatattataattatatctgactgctagatttattcacaaagtgtaattgatatgaactcttatttcaacatgtggagtccaatacacttttccaatggcgtgcttattttacaccaattcttgatatgaaccagatcatgctgatatgatcgatctaatcaataaacggattgtttttacatagtgcagttagagcaggtttaataaggtagattgagccggcgatatgagctacacgtcagattggatgatgacatggacgagagaaaggtggaaagagggtgcgagcggatggtaaattagtcgctagcgcacacgagctcctaggcgcctgtgcattgctttttgtcagtgttgcagcggagtgagagagggaagggtaaagaagaaagagattgaggtgattaaaaaattaataaagatattacttgtttaacgtgtcaacggcttactattgtactctctagctataagatgacatggtacacatttatagcctgtagccggcgatactattaaacctgctcttagggctcctttggaacacggaatgtgaaaaacgtgtgaatactgaataggaaaaaaaacaagatcggaatgttaagtatgtgcagattaggcaggagttcaaaacacgagagttttaggcatactatgtttggatggttaaaagaatataaccaaagaacttttatagaattaaaagagagataaagagaggaagtgcatttgccttctcaacgtaaaaacaatgaggttagagctcacggtaatatcttctatgaaatcggtgcataggatagcaattcactcaaatcctctgctccgaagaacacatatagaaaaaaagtatccaaatataatcctttaaaattccttttattttcgactgcgtgaattttacattataaatgacaaattcttttcaaaattgttgcttaaataatattgtcaaagtattcttttttagaagccaattagtgctactttttgtcgctctcttaatttatttttagccttggaccttttcaaatatggaggcatgtctctgtaattgttttttctatttgtcttctcaatggtgaagattgggaggaaaaaacaaactgtaaaggcgcatgccaacctcctagtactagtagcttaaacagctgtgaatgacaacggaaatagtttcttgaaagcaaaggatcacaaggcaagcacaaccagaggcatctgcatagattattctcacaagttcaattgtcactaggccggcataacaaacaaatgaaaagccgatatttggagagagttttcattgacccgtccaagcatctactagcatgtttaccggtcagccaaccagccaactaaccctgataaaaacatgcagacaaattatcacaaaacactactagctaggactatgagaaaaatgccatgtgacagccaggaaagaaagcacggttgctactgccatttcctaacggagacgtaaagaaggtgattagtcgtagtaggcgagagagcactctgatcttgatagctaggcagcaaatgtaaagttggcgccattgaaaggcaagcaaagcatacatgataaacattgtagaccagctcaatatactttttgtgcttttcagtttactagtcacagccgtttttaattgattagggttaactctagtactacatggcttcacacgatatttttggcttctttgttttgttcgaaagcatctttctaatggccatcattgcaaggttttgtttgcgttttctctctctttttctccatggctctctggtcatggacatggacgctgcttaaaagctggcaagcgcctaccatggacagcaaaaggtaggggccattttggtctctcttcaatctctggactgttaaagcctttgactaccgggcgttttaatgccctgtaaggtcgccgctgcaacaagattcgtacactacgctcctcaattcaagccgtatgatctgtgcctccgtacatggtagatcaagatgatatcttttttttcctttgacgttttgaccatctgtactagtttcatggatcggtcggtatatatgtgagtgaaatgggtttcatttggaatacatgtatggtccatggttgatcgatgatcaggtcaactgtacaattactgctgctgtaagctcagggaatccaagaccaaacctatggaggaaaggaaagaaaacaaccgtagcatacaaaagcaaagggaaactcagaaagggacccattttttatttgccattctgtgtgacctgaagtcaatcagctttatcaccacacctagcagcatccatcacttgtttgctcaagtagcagcagtcaatgcgtgcacacacatcagacggatcagcagtatatacatatttatttataaagaaaaaaacgatgagaaaactactccaactatctcctgcaaacggtgcttcttcaaagtgcctttattcccaggccacaatgctagtgctctcctggaagaaagaaaaaaacggccgagtcataagcatcaacagcagcactgctccttggaccatcgccaaccaaattgactagtaggatttctgggttccgatctctcatccacgcacagtgcgcgcacgatccatccatccatccaccggtgccggatgatgatgatgatggagcctgcgaatttgccgtggtttcctgctgatttctctctcttttccggcgcaaaaacgtcggacgcatcagctatagccatcgcgatggactcgtggggaatagaccggttttttctacgcctcggtggtggcatcggaaaccgcgattcgttggtgcaaagcagcatcataatttccggtgttgtctttgctgtgtcaaagcaggcatgtgctcgcgctcttgcaggcgagcgggcggctcgagctgctgatgctgctgcctgccgggcctggatgctgtgccgcgccgcgccgcgcctgtcccaacgcgggcgaagggctgcctggttacttcacgtcatgggctaatgggtaataaaattttaattgggaaccggcgttttcactgtacgtacttacgggctcatgtcccccgatgctgctgcctgttttcttctgtcctctgctctgctcccgtgtgctaacttaggctgtgtcggcaaatgtggttggaaactaatctctgtatattatgattaattaaatattggcttaaaaatttataaaataaattaatataatttttaaagtaactttagtatataattttttttagaaaacatatcatttaacccttcgagaaaattatgcgcgaaaaactataagttgaaaaattagtaccaaactttggttactgtgaacactttgccacttcccatttttagctgtcacagtttgctagacgtgtatttggtttatattatgacctgttacacatttttaatagatgtcccctatatcatatatttaattttaccccattttatgattaacaatttattcgtcacacttttataaatgccacagcttacttaattttggttgtggctttgtgggtgataactaaacacgtgattaatgtagacccccgaaaatgggtggtacttgcagcacggaacaggcgaagacagtgggggtgggattaatgggggtgctttggtacaaggcgtgcaccaaatctggctataaattacgtcacgagacttggtgcgccgcagatatcaccgcaatcatgccccgcgtttacgcctcctctcccccgcattcatcaaggcgctacgcaagttgcagcctctcctctcctctcactcgtgatcgcgctccgtcgtcgcgttggcgcacagcgtccgccccgccatccgtccaaccatcgtgcgggcggggacgcgatcgcgctgcgtttctcacgttcttttgcctcccgcgtcgcgcgcgcctcgcgaaatcgctcgcaccgctcggctttgcggtggaacaccgaagcagcagccagcagcggcgttttccccgtttttctctactactcctaggttggttgcaacgcggggacacgggcacacggcggtacgtactacgtagccgctgggagaggtaggataccacggcaattgatttgattcagactactactactactactagtggggaattgattacaaactgagtaatccagcgagctggaccatgtgaccaatcgactgggatctcgtcatcttaaacaaaatcttggggctggccgtgacggccccccctctccttgtcagcgggcgtgcgtgacagacaccgtgacatgctgggacgggcaccgcacgcatcggtgccatgacgttacgtcgccaacccaacagcagatgtttgttaattcatcttttgcattccatttcacctgtcatttagccggcagcgacccaactgaccccggcgacggccgtgacaatgaccaggaggaggagaggggacaccctggaaaactggcaccatatgccacaaatttcaaacctgtggacgtttgaaagaacatgtccataaatttgaaagctggtgtgtgcgatggcatttatcacagtcaaaacagcaatatatacaagtgccccctaccctttaacccagtggttgtatgcctctatcggagccagatagcatgggctcatgtaactttctccttcttttcttctgacaaatgcatggcaatgcggggctctctctcctctcgtcttctcctggtgaaagcaaaggcacatggacatgttaaagcctaagggccgtatagcctatagctgccacacaaatcttttaaaaccacgtaagcgaatactcgattgtatcggagtaggtatacggtcatacaactagtagcaaagcatgtgaaggtactactactagttgtgtgcgtgagtgactagtgtgacctgctgcctctgttgcccaagcatgatatggctacagggtcatgtgaaggtagtggccatgccttggggattcctttctttgggacgatgacttctcatcatcaagaatcacagatgagatgtggctatgtgccaaggattgcctgtaaagaatgttcaccggtcactaccatctaggcgtctacctgtgcatgatgccgtatccatgtgaatatattcaattctcgtaggatttgtttatcccctttagcttttacttttgccttgttgtgacatgcaaactatgtatgttcaaataagatgactttagctgtgttgttattcgcagaggcagggaagacaaaagcagaccaaactcgtatgatataatgtttttttaccgtggtatactaataaattgtgggtttactgcttttgaaggaaccttgagcacacagccagccaatcaagaaccaacaagcacccaacaagtaaagaaattgatatgggtgaagctaccttactataattaaggatggaccatgtctatcacaagctagagtgcttggataatgtaaacttctccccttgtgaaattgcatcatgacctcatcatagcaagcaaagaacgggtgtggctggggccccattttttgttggtccaccaaagggttgcctaagatactcgaattaataaaaaaaacacttgtcattgcgcttaagaaacataaaaccagcggtttcaacaatgccatgaatcttgcaaatgctgcatgtgatgataagtgggtttccgacaatcgcgtacaatctgcctatgggcatccttttgtgcatgttgaaacacagcgtcactgcccaaggcacatgtcggcttcaaatgcaaggcaccggcagcctaaagattaatataaccatctctatgaagagattagattgtatcctttctcactaggcaaaatgatgaaacgggtgaatcatcaggcttcatttggcattggcaatgtgctgatggggaagatcgtttgggttgcaacaggaccaggatttcatgaacagtcttgtgattcccacgcatcaattccatcctatcttctccattttttaagcgtttcttctgaagaattatccctctttcggctgaggtggtacgtttgcttgcacggtatagatccttgggtacattgcagaatcacgcctctgtggaaattcaggacagggcaatctgatcgactgcaacaaattctgcagaatagagtgaaacagctaccaactactaccatagatgaaatcgccaaaaagcatattctgaacgaaagttactggaaatctagctacctgtagttgtactctgatcaagatcggtagccacaagcagttgattaatgcgagtaatcgtacagtgcacggctgcgccttaaggtaccatacattacactgccgacacgcacaaatgcagtgccgttcaatatgttttttaggttccagtaccaacctatttacttgaacctttctcaatagtcacgaactttacaaaagttgcaaaattgctgggacctatcgtgttgctatcacacagaatagggtatcacagcctatcatccagatatctagcagaagttgtgtcatgtcttcagtttacgataatttcatttttatcgatgggtagagagcacattaaagtgccagccataacaagtaatggcttcagcaccaagaacatcacattaactaccttgaagcttcatctaaacaatatggacaaaagggccataaatacaaaatcgacctttcatgatttaggacgatgtgagcatggaaggctaagctaagctccacgcctatcaacttccacttctgccgctccattttgtgccatgagaattgtgtacacttttttagagcatgctggtccgagccttctcttaaaatcacccagaggaccttccaacctcaagtcttcaagcaaatgttctttttcatgaacctgtcaaagaacctgtcaagaaaaccgaaaagccaatgcctagcttttagtcttatttagaacctgtcaaaagggcagcactcacagatttactgtcatccatatacacattcagtagtgatctcatggacgggtacttcttctcaattgcaatagcttgtcctggactgactccgggaatagcaactaaagacttcagcctgttacagatgatttgaagaattagcatagtgacactctacaaatcattaactgtcaagaaaccaagaacactatattcgaatgcatagttgggagctagaactgtcaaaagtatgggggaccaaaattatcaagttgtcacaattaaaataggtagcacatagtcagaacatctctactataaaatcagaaaaaattaaaggccacacaatccgaaaatccaaaagtccatgcatggtctccatccacgggtccacagaagcatcacttaaccaccatgctaaaccgttaatgtaaatatagcttgcaaaccaacatcaaccaagcttggctgatatccgatgttggctgaatagatgatgtcatctacaaagaaaagaagtgccacaaaatatttatagacaaggttggattacaaacactgtcagttctgatttgaacaattcgatttgattgtaccaaagtaccaaaggaaagaattagatcaaatactaaatgtatctgaggtacctagacaggctaggctagatttcatagaggatcatcagtttagcaacaaccaaatagaaatattcagaaatgctggttcagaacttgaatcaacaccatactttgcaaactgcaagtaaaccttgtacacaagatgaaaactgtgaaatgtgcttcttctaatcatctaatgtactgtatatagagaaaggaacattatttcaattagtggacacaaaaaggcaaagcatacagcaacaaatggaaatttggttcagtatacagttctaagcacaacttaccaggcacttttcttaatccgatctttatcaacgcaacctttagaaatatttgaaccattagcatgcacagataaccatgtcaatggtttcctgcagaacagtcagcaggggacagtatcaaaacatggacttggttgttcattgagtgaaacaacaaaaatatttctgcaccaaatgtgcgtgaaaggcacaatattggccagaagaatgtgttaagtatttatattgtcaaacgtaacttgcctgaacttgcaattcgcaagactatatgtcaagccaacaatatgctctgtcacttcagcttcatctgtgcagtgccttgagcgcactctagcatagtgtgtcgctaatttgcataaggcctaaaagaatatgagacatttcaggatacagtagtagttcagaacagaaattgatagcgttgcaaacagacctcttccactggtggacgcttccaactattagaatttgatgtggtcttgttgtactgattctgctcactggcatgaaaagaaggtgattttagcaggacgataggcaaacacaaacaatacctcacataactatgttttccttccaaaccttgagagtcatgcatatttctccagtcttgtgcgtatgtgtttgtcatggtgtgaacagtgcaacatattacatattacttcctctgtttcacattataagacattttggattttgaatagattcatgcatggatccatgtatgtgcttcatatgtgtccaagttcatatatacattagtgaatctagatgatggattgagatgccaagacgtcttataatgtgaaacggagcgagtacaatgctttttctcagaaatgctgcttttcattagccataaagtaccagcagtccaaaactatgtgatcgtatagttcaagcaaaaatagactaatgacaattaagaaacattagcacacaaaactaatgttgactgccactgaacttacatgcactaagaaaaaccaacatgatttgaacacaaaatcagaatttaaagcagagttcagaccaaaagaacagtaaatataagataatccatacttccaggaactaaccgtctttttatgaagctcatcagtttattagtaacgtagcaaattgtgaattctggatactgtcttcgaactttctgaacatgatccagtaatgtaccaccacttacaagatcgcagaattcctcagcttgaagcacaaagagaatatatggcacttgtgatgttgaagcttggtcctgcacaaatgtatggcactttaggatatttttcctgtgtcgccagtatttacacagagaaaacaagaagataccagtcaaatgcgcagtcttccgtgactttttgtggaactgtatatatacatcaaataggagattttttttatctagatttatcggctggcaccccataaaaatggtttaatttcttcaaagcaaaacatgaaagcagcaaagggtgatgaattctataagagaaccttctacctgactacccattctttgatcaactctaactttctgtctagaatttatggttgataccacatcactgtgaatgcattttgcaaccattcatgttttgcaaccattcatgctcatctacagtaaaacgattttggtgttgatacttctgaaatttaaccctttcaattttcccataagctaacagaattataaatttactatgatgtgtaattgttcattctgagagtggcagatcgcctctgtatggtataatggtaatattctttgcacatactcagccaatttagcaaaatggacaaagtatcaagtttgactgaatgtgttagcagccattggcttgggaaaacactccacatctaactaggtacaacgaaaccactgattgaacatgattgattaactatcatgtgaataaaagtatcttctttaggagttgggcctgaggaagcagcattggctgttcaattacacaggcagctctctttaaaaacacccggaacgcatttgtgcgttggttataaggatgaaaccaaccgtttaagtagaaatatatcatttttttttcttttactttggaggcgcaagttttaccaacgtacgcatgccagaataaggttgaggccaacaaaacatttgaagaaccaataaagggatgcaatttctaatggaaaaaggtaaacaaaggaaacaagttatcctgtaagcggtacctgggtaaactcattaggaatttgcatcttccataaaattgaccccttgattgaattagatgttactcgaaaacaaaggcccttctcatgaaatccttgcacaagatgacctgtttggaaatccgagcagtggagaaaggtgagacaatgaacaaacattactagtattaattaacttacttttgtttaacacacctccaactgagccactttcaataacacttgagtcaatctcagcaacaatacattttgtagctaacttccctgattcccacttctttttttctttctccagcttcttcaattctgctagttcagctttcatagcttccttttgctttttggtttcctagaaataaacaatatgctctgttaatctctagatcatggcatgaataaataaatacacttctgttagatttcaaaccagtcgtttttgttttttttcttcgatttctctggctttcttttccttctttagtctcttctcttcctatatcatgcaagaacaagaatttcaaagctaaacctataatttgtgaaacttgaaacaagaagattttctttatgccacacctgttgtttcttcttcctttcttcaatcggtagggcattttcttccttcaaaaacaagacatctccttttttgttagtatacatatacagctattaaggtgtaacttttgtcttttggattgatcaatatctttgttgtataatcttaagtctcagctatttccactcacataacaattaattacacctaaaactacaatatgatctccaacagcgtaatcgtaatttaacatgcctaacggcatactaggtcatacattcttctgattcagtcaaatatcatttccatgacatttctgcctagaaaatataaaaatatgcttcaacgtttataacagatcaaattacaaaccacttaggttaacatacctgcggacaatggttattgataaaaggatcagcctccttcaaggtagaatcttcacaaggagaattagcacgagggggttgattgtagctggttgttcctaacaaaagcatacatagtcaatacactaaacaataatgtgttatctacattgtttacaaccagatatatactaaaaggattttacaacacatatgagtgtcaaatattttatttttactgtcctcactttaggtttttcttaccattatttttgcatgcagaattgtttgtttgatatccaacatttgattttgaataatccttcttatctgtactttttgtattctcaactttatcagtacaggaagtagtacaaggctgaattgcgtgttctggcttcgccatattgcttggcgtcctggttaaagactccctgtatacagtgtcatccaattcgtcatcactatccagagatattggacaagatactcctgtaaaatagaaagaaagagagttactccacataagaaccataataaatattaaacatgctgtcatctactaatcaatgtgatcgctcagttgcctcccacataagaaagcagggtggagataaatcttaacccaaaaaaaaagttacaagtggacatgctgtgtcgtcaacaaagcaatagttagtggagtttttttttaagaaaaaaaatctctgcctcctcctcttgataaaaatctgtgcactttctaaactttgacaggtgtcatttgggtccaacatgtaacttaaggtttaaggacccttcatatatcaagtagagtaaagaaacaaatgatgctcgaaagaatagtcagatacactttgtttattggtaattccaaactactattaaggacagattaatcatcgaaatgtttgcaatcattaggatttaggtctgattccacctgatgttaaaaccaaaatgacccaacaaatcgattcagaatgttgcaaacaagttttctcaaaactgtatagaaacccctgccataaatcaccaagaatagctatattgataaatgataaaggccaagaaaaagaacacagaaatgagctacaagctccaacgctccatgactagaactggacctaatccttgtctattttgccacacggcaaattcaatggatgaagccaaatgagcttaacctaggccggtagaattcatgaaaactcgaaaggaatgcatctaatagttaagaaacttcaccagaaaatttcctcgcggtcataggagacgtcaagccaggcacggccgggggacgagccaagcgtggggagttgaagcccggggtctcaggaacaatgtcgtcaagcccgacggagcacgggacatccgagccaggggtcgcggaatcgggagcgtcgaggtggaacgacgggctcgggagaacagaatcgggcgtatcaccagcaatggcgcggttgcggagcgagcacggcacgaacgaccggggcgtatctgccaccacggaggcggaccggtcggcagctaccggcggcggccgccgcttcggaggggtgggggtgtcgtcgagcacgatggttgacgccgcgagctgccgccgcttcgggtctggaggggaaggggagaaggcgtcgggggaatcgggggcggcggcggcgaccgcatgggagcgcttgtggagggcgggaggggtggaggcggcggcgacgtcgtcgtcgtcgtcgtcgtcgtcgtcgatgatctcgacgacggcggcgtgggacgccatcggtttggtggggcttcgccggtggatttggggatttcttcgccgagatggcgattttgattttgggttttggcgggttagggttccggcgaatggtggtcggctcggctggtcagcctcatggtccgcttcacagatatcgatgtggtgctcgggccatctgcgggggaatttactatttgccactctctcaaatgccagtgctcaaataccactctcccaaattttcattcccaaatgccatccgggcccacatgtcagtctcactctccattcaaacgaaagtgatgcgggacccgatgctgagtgaggctgacatgtgggtccggtggtatttgggaataaaaatttggaagagtggcatttgagcactggcattcagagagagtggcaaatagtaaattctcccggccatctgcgtggtagtaacattttgtatgggcctaatttggatagctaccattgatagcgagaaaaaaagttcaatatgagtccctcaaatataggttggatctgattcatatactcaatcgcaaaaccaggtaactaatgcctctaactattaaaactggtgtaaaataactcccttgatagtactgacgatgattttcccccctctctctctctttatctcatcgctacacaaacaatcttgagcaaacctcgatgatgtaagatgacaccagtggatcacccttgcgccgtcctcgaactgcaccatgacgtgtagagttcctccttgttcctccttcctcgagtactcctcgctgcttatacacacatctagattcctccttcctcaagtactccgtagtgctagtgtcattggctccgttagcacgaacatctcctcgtcctcacgtcgcacctcccatcctcgttatggcaaggtgcgggactcgaaggctccttctgagtgggaggaagagagacggaacaagcaacagctcccctcttttgtagcttccatcctaagactcacgagtcgttgcagagtcgagagagctcactagcaaccttacaccactaggcggcaaacagaaaaggaacataggggaaaaaaagagtgggtgctgacatagaggccctacaattttaaatttttcccattcggttacatttggatcccactctctatttttatttcccttggtgatttggctgccatatagacgtcatgttagccaaaacaccctcaaaaccagtcgagtgagtcattttgcatgattttaatagagtaattaaatacctaagttttacaattgaaggacacgtatcacatccaacctaaaaatagttgaggaactcaaattgtactattttttgagggtttttatataccagtatctcgttcaaaaatgggatgatactgggttggtatcaggtcctaatatctaaccagtatcatgcgattcttaccacatggtgggtgatgcttgcgatgtatcaggtcctgatacctagccagtatcggtgatacctaccaggtatcatacgattctaccacgtatcaggtgatacttgtgaggtattagataataactattaggtattatgcgattcttacaacatagaagatgatacctatcaggtatcatccgattcttaccacgtagaagatgattctaccacactctacagccagacatgaccaagttaacaagctctttgcacccatctttgtctctttgctcctccgaagcagcatatggatagaatgaaggtccggactcgggatcgacggccggcgatgaaggcggcgactgtagagggcccgtgacggagggggcgttggtggagggcgcaccagctgaccacgcgggtggagcagggggtgggcattaacggcggcgccgtcgatggcgagcggcggtgttggagctccaggcggcaattcggcgaccatgtcgccggcgacggagttggggcgccagcggaggacgcaccagccggccatgcggatggagccgtaggtgggcgttaacagcggtgccgtggatggcgcgtggcggtgctggagcaccaggcggcaatccggtgaccacgtcgccggcggccgcgccctcctcttgccgagcgggtcttcttccccagcccgcgccggaatcgccgacggccacctcctcctcacggctcaggcgctcaaccttgttcctctttggatgggaaaggtggacgaggggtatcccgtcccgacggtataccggtatatagcatttatgtattttcttagccgtgtctttcttcgtacaaggcagtaacgaaaaagggttgggccgtccatctcaatctggaccgtgtatttctaatctaacggttaacaagtatccaacgggtgcaccgcggccggaaggggcccctcttttcccctgtcggcggcgccggccgcctctcgccggaccgccggcctcctccgtccgtccacgggagacagaaaactggccgcgcgcacctgttccaactgggaatcacaacaattcacagctcatcgtgccgtgcgcctgggtgggttgtccaggacaacttgccctctctctatctccctctctcgcgcgtccgggaaattggcgcgtgacgccatggccatgagtcaaccccgccattgccggacacatgtgagaggagaggagaggagtacgcgacgctgtcgttacccaccaacgagcagaggcaggtactccacggcatcgagaaccagcacgcgtcgcaccgtttctcaactttgcgcgagcacagtgcctgcactgcactgacagggcgagcgagcgaacgagcaaaccaagcagaggagagaaagcgccaagccatgcaggcgcaggcgcgcacaggcacagcgcaaggacgcaggaggaggaacagcatgggagcaggcgccgcggggggaagctaagctagcgaccaaaactcaagctgccaaagccccaaaggcattgcacgttcactcgttcggccaggcttttttcatacgggtaaaataattacacgccacggcttttcagagcctcccaacgatgcggcaatggtcttcttcgcccccctccttttggagaacccgagatatgcattggcactcttcttcctcaagatccctctttttctgttgcgatcaaaaaattgtgttaattaggaaccgattgacagcgtgctttttgtggtttatatgtagtacaattcttcaggcaatagaaccttgttttgcaaagttaatgcagacttgtctgaggtctgaggacaatctctgaaactgaaacagcctcaatctgatcacttgacttgacccctctcctgtatcggtcttctgaaaaaggtagtactaagtttgaacgatgaaaaactgcaaatgcttatattattcatggcgtaagtgcgtggctaagacaaatgatttacgctcgatcatttctgtttgcaccacaaaaatattttttgagtaacactttcgatgattctatccatcaacatgacaaaccaaatgagcaaatgaggcaaacaaagttagttattgttagagaaaacctgctagattaaaccaacaaaacccagcaaatcgaaggaccggacatatcaaagagagaaaatcaatgaattcaatcgagctctagctaacaagcactgcactactgctaaatcaatactccatatggatactacaagtaatcctccaatctgtcacttgggtgaccaggaagagaagaagtgagcggtgagattggacgacgacgaggaggcccggttggtgtcggtgaccgtccccgaccacgccgtcagcgacggccggccatcggtgaagcccagagacggccggccgtcgatgaaacccatcgatggcgggggacacgccacgacgcccaatggcggcagcttcctcatcacggacaatggcggcgagaactcgccaccctcttcttccacctcctccgtgatcccaaatggcgacggcgaggcgtcgggcgtctcgaatggcgtgtccgtgtccccacgaacgtcggccgggggcgcggcgccccgctcgtacaccgggttggagatgcacacgaagcggtcgctgttggcggaggagctggaggacggcgacgagcgccgggccggcgaccacctccacacggcggactccagcttggggatggcgaggaggaggtccttggtgtccgccgccgcctgcatgacgccgtgcgcgtagtagaacggcggggtgctcgacagcgcctcgcgcgcggtggtggtggtcgccgtcgtcgccaccgacgccgcgtcgtcgtcgcccgcggcggcgcgcgacgtccccgccagcccgagcttcgcgcgccgccgggacaacgcctccccctcctccgcgcgcatccagcgcctgcggaggtgggagcagaagaggtcggcgaggaggagcaccgcgatggtgaggaacagcgcgaggctgagcgccagcatgaggctcacccccaccgccaacctcgacatgccgtcggtgaacattgccgcctcgccccgcgcgccgcgcctcgccgagctcaacgagagtgagaggactggagtggagagccgcgccgtggcgagcgcgtgcgcgagctaacaaagcaacaggtggcgcgcggttcgtgtcgcgtcaaaagggcaactactacgactcgcttggaccagagcaaggttaactcaactaacctctaacgcatttcagccataccaattttttaacaaagctgtcaaaattttggctacatttagttgttgtcaaattttagtaattacatataaaatcttgataaattttgttaaccttgtcaaaattttggtaactttactaaaatttggtaatgtcaaaacttggtaaggttgaaaatggtaacaaattgaaccaaccctaagcttcaattcatcttgcttggaagtagcttatacatataatagttacctataaacatatattacaccattaatatatggctttatctctcgtacgcacaaatttatagcccgcttcccttctctcttcttttctcttgtctatatgtgtttacagtttacttatagcatagtattatactcgctctaatcattttcttatctaatctaatccaccgtttgtctcgtcacgttttccgaggcaggttagtacttccaaaagctagtgggctagtgcaattagccgggggcagattatggtggagccgtgactgttgtctgcttaaacccaagcgtactcacgctttggccaaccattttcactgtcgagtgggtcccagccatgtggggcagggttgtcagtggtgattagggggatgatgtcaagtgtaactgtgtagcaaaagggagcaaaagcattgctctgttgctgatcattggaggcagggaaaggactatggaggagacgatgtgtgttttttggcgggaagtcgacgatctgcttacgagtgcgaatccaaagattcgggggtttctgatctaaccgcacgaccggttgcttgttcatcattttgaggtgatcagtcagagtcaggcgatgatgtttgagtagtttgacgaatctcctccgtgcagtgtagtagagcacttatctccgatgaccctacggcatgattggcgtttggcgaagtcgtagctccactttcacgggaacggtatcgggcttcatgattggcatttggatctaaggctaactttgccatgaacttaatttgcgatgagtatgaaaagacaacgactatgaaaaattttggctagaaaataaaagtataacatgtaatcaattcctaataaagtgggattcagtttaaatgtggctctcaatcaaacactagcttaagaaattataacgtgtccaagatttagtgtggtaatatttggtcatcaaccaaatagcctcaatatttattccaacattcatatgttgttcaacattttcatgtaactagttaaggaccacacatgttgcaatggaaatccaaaatttacacatagctatgagtagggcatgtccagttaacttatacttcttccgtttcataatgtaagtcattctagcatttcccacatttatattgatgtatatatatatctagattcattaacattaatataaatgtggaaaatgctagaatgatttatattgtgaaacggagggagtacatagaaatcgtttttgcttatgttgcaagcaagtcactctaaccaggttggttaagtaagattgtgatggtccgttttcacttttttagtcatctacaatttgatgtttcatggagcgttttttatacggtgataggtcgtcgttgcaagtagtgatggttttcatgtgggagaaaggttggctttttacaggatgtctttttatccttagtgagttgtttttaggtgtttttatgtgaggcgggttacctgttgcatggacgcagtgcagatgttttcttttaaaaatagtacagaaaataaaaaatgataggtagcacactgttagacatttgatcattcacattttgaactaggtcttaaaaatggctgaaattgcaccggaagacgaaaaaaaaatcaatcattaattcaccaaaagaaaaaaaagagaaaaataattaattaccaaagaaaaaaagaggaaaaaaaatcaagcagcgttactacagtatacagtctacagactaaaactacaaaaagaagagcaacggcccaaaaagcccaggaagcaaacatgttcagccttctgatccagtccgtcgacttcaccgacgacgcggccgcggccgcggccaccgccgtcgccgccggcgaaaccagcggcacctctcaccccctctccccgcgctccggcgaccctctccccaccaccacctccgcctccgtaacggcgcctctcgagctgcccggcgcgacctccgcctcgcccgcccgaaaccctaagatcaactacacccgcggcatcctacacctctaccgctcctcctcctcctcctcgtcgaccgcctcctacgcttccgccgtcgccgccactccatcctcctcctcctccggacccgccgccccgcagctcgcctccgactgcctactcccggtaacctctcttcttggtaccatcttatttactaatttgttcatttccgcgtgttctcatgcctcatcgcctgcgtatctcagccatggcgcggcacacggctcctggtgctcgccgtcccaacccacgtctcaccagacgacttcgtccgcttctgcggcccttacatcgagcacgcctccgatatccatgtcgtcaggtgaattatccttctcgttgaagcaatttgtgtccgactttgcccgggaagctatggttttacatatgtgttgtgtcggtagggatgatggggtggaggaccggtatagcgtgctcgtggagtttgaggatcagaagagtgccgatgggttctacttggacctcaacggttggaggttctcgtcatccgaggttactaacattgtcgattggatgtatgtctagtttgctgatcatgtgtaacattgctcctaaattgggaagctcgctcgcttcttgttccatggtgtaggtagaggtttgccatgttctgtttatagttgctgtccaatatacaccatcaaccaagcctgcggtgactccaccagttggatccactgagctcccaacatgtcctgtctgtattggtgagcttatttatatttttctccttgttttgtggtcattcaacaatgtcagatatgaattttgtccactacaattttgcttcgtatcacctccccataggctgggaagatatcaatttgcaatgccccctctgatcaaaagattagccacttctcttctgagaaactacacctgtgaagttgagacttgagaagctacatactcaccacatgtttgtggtgtcttaggggctgtttggttgagtgccaacatttgccaaagttgtggcacccaagtttgaccaattaagcctagtgtttggttcatgccacaagtgagttatgccacaattttttagcaagttggctcacttgtcactgagttatttttttgccataacttgccacaattgtggccaacaaattcttagccatacaatgtgtggcatgccacactttgccaaatattttgtggtaaactatggaagtcatccacactttgccaaatatttcaccatatatatgttaaccttatttttggaggtatacattgcctatcgatttcggtactgttttttttctttctttctaaaagctgactttggggtgctatttttccaagctactactataccagtaagctctgtcaaatctagggaccatgttatttctccttgggcaatatggattacataattatagttaagacctttgttttcaggtctatctattaacttatgttgtttaactatctttgtgcaagtatgcataggtacacacttcctctgtttattgggaagagtttttctgaacattttaatgtatcattttttttctcatcttttcaccatcttcttatgcatgttatgaaacagaaagattggatcaagacatcagcggaattatggcaacgacttgtgatcattcgttccagtgttcatgtgtttcaatgtgggtcaattcatcttgtccggtaatgatcattttgacaatcaccatttctcaattagggcaacaaacaaccatttgttatggctgtgattcttttcctgcttacatttttacatgatactgaatttgcctcaattttatataaatttatgagtcaatccattctatgccattgacaaagcgtgggttctacaatatgccaccgacaaggctcagttctacaatataccattgaacaacttgttttcttccttatctgccattagtcaaccattagtcagatgcagctaagggaggaaaaatgaccaatgccatgttgcattaaataatcttggaagataaaaacacaatggattcctatttttcatcaatgagaaaaaatagtggatcatgaccaacgaaatccatgagcacacatgataccctaggggtaaaatggatatattctcgcccttagagcaggtacaatagcagactataagccagctataaacaatagcagtgcggactctaagacgtaatgtgtgtatgacaggtggggatcaggtattaatagtgtagtaagcaactattgtatgaattagctattacattggctatagatgatttggagctagtagttggctatactattaaacttgctcttaacatagtttgactaatggttgactagcggctatggcatataaggaagaaaactaattgctcgatggtatataatagaactgagctttgtgacatattgcagaatctgtgctttgtcaatggcatagaaatatagaatggattatctctaaatttatattcttccaattttgaatttttgagtaatcttctatggcactgattaacgtagtagttcgaattccataccaatacccaatatgtggccatttatcaagtgtgatcgaattccataacaatatccaataaaatatgtggtcatttatcaagtatgatattgtacatttgctactcagtaggaactaaccagggacagaggtcagggtcatttgcagaatgttcaccttctgtatttttcttgaagatcactgaatgtttatggcacctgtttacccgtgtcggtgaatcttaagacatattgcgctaaccagatttatggagcgtagagttgtagatgtgccaatgtctgcctatggctataatacaaatatattattgccaccactcaccactataaccatatgccattgatttccttgtattaagatcctccactgccttttcacattaccaagctttcttgatcatgacttgtttttattcataatatttctgtttcaggtttgccagttttgtcagaagcagtctaagaatcctacatgttctgtttgtcaaacctctggaaacctatggatctgtataatatgtggttttgttggatgtgggaggtatgctactctgctaattgaatttttggagcattttgcgaatctctttgtatttaataatctgaaggaaagaaagttaatggcatgattactgtttgtgaatttctttgttattacaggtatgaagaaggccatgcaattaggcactggaaagaaactcagcactgctattcacttgatttggaaactcaacgtgtttgggattatgttggtgacagttacgtccaccgacttaatcactccaaaagtgatgtgaagcattccaagttcaagtcaaagtgtaaatattctggtgacaaatgtgcaaactgctcctgcaatgatgaggaagatatcggtggtgctattttcagcagcaaagcagaaacagtaattgctttaagattcattcatttcagttaatctttgacacctcattgccagtctggttcctcaaatcacatatgcttttctcataacagattgtggatgaatacaaccgtcttcttgctagccaacttgaaactcagagagaggttcatcccttattagtgcttatcttttgatgtcacaatctgtactaccagagcttgtcatataatttacattacagtttatatctgatatatttatctgcctatgtttccttatattcatagtattatgaggctcggctgtcagaagctaagaaagaaaaggaacaacacatttctgatgcagtggataaagctgtaaatgataagagtaaagaaatccaacaaaagattgagaatgcaatgttggagaaaaagaaacttgcagatgtgagcatctcaaatcatgcacctttcagttattatcaagcatagttgctgtggttctttgacatgacttggtactttgcctttcctgcagatgaatgaaaaactcacgaagaaccaggatatatggcgtcgaacactaaaagaaattgaggaaaggtatgtttgacccttccaccagaaaatggaagtagatggcacagcgaaaggtgttggatcgtgctaatttgtgtgtgttggttgctctttttttttcctttcctttttttttttggggggggggggggtatatctttttcatgtactactttgtaaagaatctgcttgagccttgtccttttctgttaggcaaaaattggttatgtagcacccaaaattctggtttttagatttctagttttgcgttcctatcataaagatacacaactttccctttttctttcctgataaatctacacttctacactcaacagggagagggctcaactgaagttgaaagatgatacaattcgtgatctagaagaacaggtgctaaactctctttcctcttgaaaacactggagcttgtacaaaggccattagttaacatgccttatacaatttctgcagataaaagatttcaaattttccatcaagttacagaaatcgatcgagaagaataaaaatgctgatgatctcaaaggaggtttgctggtgccactcccaatggtgccagattctggaaccaaaggtaaaagatcgtcaagaacaagcaagaggaggaaccagtagctgcatctgttgtacatgtaacaagcaattgcttggctaatctgtgccaaccaggataatatgatacattctgaaaaaaagagagagtgcaatattattctactacagatagctgccttttatggaacagaaaattgaaccaaaggatagcatagtttacaattttacattacatacaggggtagatgtttcagaaagctcttggctatattattgctcatacagtactacttttctgggtggactacattttgagtattgcagatcggccgtatgaatggcaaaatgagaatgcaacggtggcacagaacgccaacacgaacgaggcagcactgacaatgtagaggactggatcgtcgtatctctcctccacatcttcctttggcacatgaccactaggagagcaccagcttccctgtgatgtattatagaggttgttgttgcctacataactttccatgctgaacgaggccagctgaccatagttcggtatgcatcctgataagttgttgtatgccacggagaacgctcccagcgacgataactgagttaactgccaaggtatcggtccactcagatcattgtgagacagatccaggctttcaatctccttcataccagaaaatgttgctgggatttggccagtgaagaaattgtaggacagattgagggacttgatatggctgagatttcctagctgccaaggaatctctccatcaaacatgtttgcagataggtcgatgccggtcatcaaatcaaacaaattgacaccgtatatatacagactccctttagtagagaaggcgaagcctgataggtaatagtagtaagtactcatcaggtgagaatcgtacagctcgataaacggttcgacataaaagatctgcaggatatcatgatcatgcacatctccaaagaggatgttaccaatacatgctggtaccgagcccgataatttgttgtgtgagaagtcaattatcctcaagtattgaaggttacatatgtctggagagatttccccttcaaaatcatttccacccaaggaaagtatgtcaattcccaaattattctgtacccaattcaagttgcctgtgaatcgattatgtctgatatccataactataagctcggatgtattgaaaagggcatatgggatatctcctgacaaagagttgttagagaggttaaggaaattaacctgcagtgccatactacaatttggtaaagaccctgttaagttgttatttgatagatccaaaaggctaatgcttgtccagttgcataaatagggttgtatttcaccggttaaagtattgtcagcaagattcaggcccactaacataggcaaatcccaaaaagaaatatcaagtttcccggacagcttgttatcatgtaaatccatgacgaataagttcttagctgatagattttgaggtatgctcccctcgtatttgttgctatctaggtacaaatacgacaaagaatcggacatattatccattccaccaaatattagtccaccaagcttgttttttgaaaccttcaaggattccaacacagcatggtcagtgaataagcaagctggtacttctccagaaatgctgttattcgataggtctaaataccgcagctgacgtatctgacacaattctatcggtatatgcccgtaaatttcgttatttgaaaaatcaagaacaagcaagtttggaaatatcgaattgatattgtctggaagttgacctgcaacacggttcattgatacgttgatatatttgagaaaattttgagtataccatgttgactccaatgatccagttaacgagttatttccaagatctagcttataatgtcttgctccctcggtgaacaaccaatcgtgcatgctccctggcaagttattattggacaaatcaagtacctccagatgatgttgtgtgcgtagaaaatgtggttctgtaataatgctcttgtcaaggtcacagccagagagcgctagttctttcagttggaactgaggtacccatccaggaatatttacatcaacagctaaattagcattatctgacaggactaccgcctcaagtttcgtgaggttcttcagccaagagaaagaaaatttgccgctcaaattattatgagaaaatcgtaggctcttgataaacgcaggaaggtttgaagatgaacttataggaataggcccttctaagagatttcctgataggtccaatagttcaatatgtggaagtgagaataatgaccttggaatattcccagcgaatcgattgaggctcaaatgcaattctcgtaggttcccaagattttctattgctgcaaaaaaacatatgcatcaataagcagctccatggacaatcttacctaacattatttgcacttaagataatcagcaagtgctcatttttctgtaccttgttcagttggaagagttccattcatgttgttgttattgagatttaacacttcaagtgagactgggaatgaagatgaattaatgggaatgccaccctcaaaaaaattcccactgagatctaagaccttaaggtgaggaagtgaaaataatgacgctgggaggcctccatggaatttattgaaactccaatccattttactcaaattcagtgctctcaagtttctaagattctcgaaagctgtaaagcatgaactttcaaataccagcacatacaaggaatgttaattctttacttagcactaagagaggtaaaaaagaaattatgtacctgaagccgggagagtcccattcatggcggtgttgcagagattaacaacttctagcaaaactggttccggaggaacaggaaaccctcccttgatgaagtcatttccacagagatctaatactttaaggtgaggaagtgaaaacaatgactttgggatgctaccttcaaacttattcgagctcagattcagttcttgcaagtttgtaagattttcgaaagctgcaaagtataacagttgtttttttcaacgatcaattttatcatcgaggaggtacttagtgaaatctttagcttaacataaggaggtacaaaatacactaaaaacgtggtgcttctcggtacattctcaagaatggtaaaaaaatctctactatgagaagcaaaagatcatttatatacctgcaaccggaagagtccgttcatgttgttagagttgaaatcaatgacttctagataaaccaaattcccaatagatgacgggaaattccctccgaaccagttaccaccaaagtagagaaaccgaagcttggtgagtcctagtaatcctgtggattgagggaacagttcacgttagagagacacgatgaaagccaaaatccagcacgcatagactgatgctaattacttattaccatcaaaactcggtgaaatcagtttattctgtgataaatctaggaactgaaggtcgcgaaatgcagaaaaaactgtgatgtttaattcccaggagaaaaagtcatctgcaatcgacatgctggaaaggttgagctgatatactctccgtttgctactgtcacatcttacacgctcccacgagcagcagtcctcagtctgtccccatgaacggggcaccaacgtagagtttgcttgtatcagagaagccctaatatccatcagggcggccctttcctccacaaggcagccgcatgacatgtaaatcatgggctgcaatacacttagtatcataaccagtgacctccatggcaaccgccagctcatctcggaagaatgatctgccttcgccgcaagcttcaggtttgagacattgtaatcttctatgcactagtacaccactacgctggattgctatttgctggtagatgattgccctggtaaaccttttataatctcagatagccgtggagattacgatgcaaactgtccaaatcgattagttgaagattgatgacttgggcgacttaagcaactgcaaatctttatggaaaaagctgtgttgtttctccctctagatagcctcatagccatatgttgacagcaactcacgttgactttgacttctagagctctacttaacacctacaatgattaatatgatagtgaaggtaattgatagggacaagagtgtattagtacaattgtacaaaggtgagctatggtaatttgagtagcctgaaaactacgggctagttcagattgatgtcatttgaaaccatatcattttttagcagagttgtcaaatatgtgcatcaatttagtttcttgtcaaactttgataaatacataagaaatcctattaaaattttagcaatattaccaaattgctaaaaatttggtaaggtttatttttgctacaatttaagcaacccctactggatcaggcttggatgcatgcttcctcgctatacatttgaaggaaagcttgaccacctgcccgctgattcggtcgactgctgagcccattcgtcaagtccgcaagtcctgcacattgatgggtttaccgtgtgtctcaagtcatgacgtcctgaactggtaaacaggccgacagattcatcgtctccgctaggaataagtccacttgtcatctctcaactttacatcgaatttgatagctgtccgtaaaccacaataccaaaaatcttctcccccatctttacaaaaccatatacatcgggtctggtagtataggctcatatttctgcttacataacaagttgaccgggcccacctggccacctcgctaagtcaccaatgaccggacccattgttaacgccaaaatttagtaagcttcaaagttgtcatcggtctagagacaatatcagcttcagagtcccggaatggaccaatagaaattgtcagtcgacaacagttagattcttgatggattgggcaaggaaattcatatttaaatgaagtctatccagaagagatcgacttcaagtaggatatgacaatgtcaatttatttattaattatatagaattagttagtttctttttttatttttaggaaaatgtttttagtgtacgatcaagacttgcatatatttttttctctttaggaaagtttgagtagtgtccaattagaactctgatcggcctatgggtataaatatgtacactcgggatccctataatctatcttcacagaacaatatacatatattttcggcgcatctcatgaggttttatttcgacgagttcttgttttcgcgcatgggctgcatcgattgagttcgaccttcggcaagaagtgagttccatcatcttcgcttgcgctggcgtagctaggactttctcggttgggtccgatatactaattgggtcgacgcaagggttgcctatccggtatatcatttctatctttatttccattactgtttataatcacatcggcttagttaggacttcctcggtcatgtttgattatcataatactatctcgtgctgcatcggttacggttaggtccgacctactagattgttattaataatctaaatcttgttaagccgataggttcatactaatattttatcggagggttagccgatcttatctgttgtgttaattttctctttgatggttttattgtcttggttaatttaatgcatgaccagtttgatcggtgtcatatcagtttgcttaaggaaaaagtacgaattaccccccgaactatcgcggtcgtccgaattacccccctaaaccacaaaactggacattcttcaccctcaactatgcaaaccggacgaattaccccctcgacccaatccagggctgttttggtctacgtggcgtacgcgtggcagtccagtcagcactctatcaaaaaaatatttgtgggacccacatgtcatacacttcttcccctttttccccctctctctctgctccactctctctctctctctcttggcatgacatgacagcagcggacggcacagtaaggcgaccgaggggagccgacgactctagcggctggggcggaggagcgtggcagcagcggaggagcgcggaggagttcgggctcgccggagtgtggaggtacccgaagccggcgtcgcaggagatgtgccccgggtggacgcgccgcggtggtgcgcgtgcctcgggtacctacacccgaaacctgcgtcgcggcatggaggaaccgggcggagtatgctgggttggtgcggcggaacaccatggacgacgcggcgatggccgattcgtgtgtcgcctagccggccgccggcaccggcagatgaggatgaggtggaggcgatggccggctcatgcgtcggctagccggccgccggcaccggaggaggaggaggctaaggccaactcgtccgtcgcctagccggctgcctgcaccggaggaggaggattttggcactggccgttgtgccgccaagccgccaccgtcggcttgctgcccgtcacccaccatgcatccccgcacgccgccgcccccgcccgtccgcccccacgcgccgccgcacacctcccgtccccacgccccgcctcctggtggtgcgcgagggcgacggcgcccgctgcccgcagtgtatttccggccgccggccactggatgccaccggcctctcccccacgcccgtcgcgcccctgccgcacctagcgccggccaccaactcgccgccggacgccgcccgcctctccaccacgcccgcggcgcccccgccgcgcctagcgctggccaccaactcgccgctggacgtcgcccgcctctccaccatgcccgccgcgcctagcgtcggccacatctgagacatagagattgagaggaagaggggaagagagagagatattgagaggaaagtggggaagagagagaggtgggagagtatgacaggcgggtcccaccattttttaaaattaagaaacgctgactaggatgccacgtgtacgccacgtagaccaaaaccaccgcggattgggccgaggggggtaattcgtccagtttgcatagttggggtgaagaatgtccaattttgtggttcatgggggttaattcggacgcccgcgatagttcgggggggggggggggtaattcgtacgttttcctttgcttaaatctatcagacaattatcaaccttatgctgcatcggttgggttcgacctatgggtttatggttgtaaattagatttatttaagtaagtaggcatcaattattcttgcattgaggtttcagctgttgtgttgtctggatattgtttaagtgttgcattagcttataaggattatatataagttggttttagcttatgtagcaaatattttattgattaccagtcatttagatttaatgacatcagattttcagccgatatatactttaaccattagatcaatatttattctatcatactgttaatggtcgattggtttatattgttatgttattataatttttttatagggtcaaagtcctttgaaattcctcttgtttttcttttgttcgaaaaacccttaaacaggccgaattattcatcagctttgctgctaaaacagtaagtttaagggtttaagcttactgctaaaacctggacgctgttcttaagattaggccttctccatctgaccttgccgcgccgcgcccgagttggccgtcgattcagattaacctgggcttggcccagtttgcaaggcgatctgatgtgatacgtcttctcccctctccgcggctctccgctctctccttgctccgttgctctcgccaccacaaccaccatgggtccatggctacagccaaagctagaatttttttgagaattaatattatttttatggaaaatcgcaaaagtagtggtcaaccggggaaaatcgtgaaaataggtccctgtcgaacgggtgcagttcgatagggcgcctatcgaacggccagagcgcgactggcgacgacatcggaaggctgccgttcgacaggacctgtcgaacagcccccgttcgacaggcagggctgtcgaacagcccccgttcgacaggctgggccgcagttcgacaggatgtccgtcgaactgccgcagttcgacagggtcgcgttctccatttatttgtaataagttatttttttaataatatgtaatttattttagtgtgtaagaaaggaaaatatttttgtaatgttatatgtatgtgatttagggttttgataatgtttggtcagaaattgtagtatttatttgttggttaaaatatttgaattatttagtttcattatttgtatatttgaatgataatttgtcatgattcattcgaagggtatgctactgagtaattatccgaagaagtttatgaaatagtactgatagtactaagttaatcgtaaagtgtttctcaaatagtacggacagaacataaatgattaaaagtttaatacaaatagataagtcaaggacgatcagtgcccttcgcacgcttgctaggtcctcccttcttcctacgcctaatctgctcagtgggatatgtcaaattatcaggggggtgcctatctctagctgcctgctgtggtgtcacgtctggcccctgaccggcctccgtctcctgcgtcggctgtgtgacctgaggtgctgcgtgccagtaatccatccctacttccccctggggaggatcagtggaaaagaagtcctcaatgaatgctgtgcgaggggagtaagcaggcactccgtgatgcgtcgacgccgaaccgtactcatcgtctgtttgtacaagggggagaaaccaaaaaatatggcgtagttagtaacgatacatataattagaaactaaagcgtgttattgtttaaaatgacttacatgtgtgctgtgtgtggccctgctctggcgcacgcggagtgatatgaagtccccatgctggtgtgttcaacacgttgtccccgttggcatgtaagggaagtgtgccgacccagatgctccctgcgaggggtgaacataaggcggagtttggaatacctgcggacgtggtggtgccgtactcgacgtgggtacccctgatccggctgaccccctggtgtactccggtgctggggtgtgctgaaaggaaggacgaccgtgagatgtgtgggccgcttcgtacccgcgacgtgaagaggatggaccactccgatccacgctggaacgtcggggtagtggtggtgatggccgtcggcccgacgtctgcaccacatctgccgcgctccgacaggagacacgacgtagtagtgcggcagcacgtgcacggaagttgcgaaggacactcgccacgtcgtcagacctgacgactggaggtctcgcctctagtctttgcagcagggtgtcggactccacgtgaacgtgctcaacaaattccgcctgttccacaaataatcaaggcaattaaaattatttaaccagttgcacatttattaagagtatttaacaagatgcacatttgttagaaataatgaaccagttgcacatcatttataaatactgaactagttccacatttatgtaagaaaaggaactaggtgaaccaattgcacatttattagacatactgaactacttgctaactttttaaaaatattgaactagttgctcaaattccacaaataaacacgtaccattgagttgtaagctgatctaggctgaggggcaaacgtgtcagtaatcgctgcctggtgggggacggtgctatctccttgtggaggaaaacacctccatcgtgtaacactgcggtaccaacgaaggtaagctccataataactcccatcgtctggaggtgtctgaagttccaagttatcagctgcgtgctcccactcttgtaccgtcggctgaaccgtggtcacaataactagctcgtaggaaagcccgagcccctttctggagtacctgcacaacaacaaattcacacatcagaaaaaatgttgtgcagtgatttattttaaaaaatgtaggattaaacaactgtgatgtgaactaacctatgaagactatcagccaaaggacgaccatctctcggagggaagtcctgatacatgcccaactgtttgagaaccctgtggacattgtgtggctcgacgtgcacgtccaccacgaggtgacaagtcgtcctccagagttgcatatctcgcgtgcaaagatccgcgagaccgtgcggtgcacgatcattgacatcgtgctgagtgtagggagtccaccgaacacggtcaggcgtaagctgatcaaagtcagctacaaactgagtgtagacacgacgtgtcgtcccgctaacccactgcgactgtaacaagtagtagttttcattagtcatataaggaaagtttgtgaactagtattcataatgataacataaacgaatttaacaaaaattacctcacggtgtgtccacaaggatcccatagtgggacgatcgtcgatgtcatcaacaccagacctgtacatctctcgcaaaccgtagtttgcgtacgagtcaagctgaggcctcccaatgtcgaagcgctcgtgcgcccacaacataagtagcaacgggcatccagggagtgaactttgcttgctgttcctcacgcaagcatcacacagtccggcatatgtcgccgcaagtaccgccgacccccaactgtactgtggaatctccgcgataggtaactctgcaatctgctccgcaaagtggataagtgcttgtccacggagtcagcgtgagttcccgtgaacatcacccatccaaacaaccacaacaggtaagcgactaagtgccgctgcacgatccactcctcctggtcatcagggaagacatcctgtcgaaactgattcaaccaacttttcgtaggcccgtgcccatctgtgagatcctccagtgcaacaggcagcac

SEQ ID NO: 8016 - DNA, 60136 bp, Oryza sativa
tcacattaggaaaagtaatatattgatttgtggcattccatggaataaattcttgattaatcgatcagtagatatttctcacacatattcatccaaaaaacaaactgtgaccacatctgtttgatgccagaagcatgtggaacttggttttctacactgaagccaactcctttgaggtctgaaatggaatggtattattttggcagcatgacaagcctttgaacttgctactgatttttgctttcccgccatacaaaccatatggccttggttctaaaaatattttggacgaaagagtacaagcttggcatgctgatctaatctggcttcaacagaaaatcatgacgatgtgatctaaattagtgaatcctttgcattataacagcatggataactatttcttatggaacttgagaataataataaaaaaactttactaatctttgcctcctgtttaggctgttagagtttcctcagtgtgtttcatgttcattgtacttgcttattgaattcgaagttcactttctgcactgttcctaaagagacttagataaacttgtgccctacagaaattgcttggttatgtaatggtagaacagaacggacacaaatacctctatgttgtgcttataccattttatttctctggaaactatggacattttgtgaaacaaggtgctcttctatggggcacagcactctttatccgacctaactttgaattgttggcagatctactacatgttttatcatatataccaaaggatctcaacttcatccagcataccagttatatcggttggagggagtaaggacatacgatcattctgaatttctttagttttaattcaaacttgggaattcaagttcttgactttgtatgtttgttcaggtcaagacagataagaccgattgttgttgatcctggtctatatctctcatccaggactgatatattttatgccactcaaaaacgtgaactgccaaatgcttataaactatttacaggtaaggggttaatgcgcttcagtatttattagaagatcatcccataaatcattatataatgataggggacatagaataatttgtcttatagtgctaatgatgatgcaatacccagttgatggaaaattgtgaaacgtctttatcatatgtcggtttaatggactagtttcccttttagttattgacagatggtttgaaattattagataacatatggctatccatataaatagtgtacttatactattcaattctcttactttggttgacattttattgggctcattatacttggcatcccatttgttatctgatgatttgtaaaacataggcacttctttcggtacaactccgatgacatttaactctgcctgccctgcctgaacaagagctttgcagaattctaatgtcttgctcatgaaataggctggaaaaaatatgtattgttttgaaatgaatccatttttatatagaatggcattgaattcactatacatcttgattacaccttatgttaatgtcttttttacctaactatttaattgattggaagacactgaagaagtatttaattgtacctattgttccaatgcaggttcttcatctgttatcctttctcggaaatttatcgaatactgtatcatcggtacggataatctaccaagaaccatgctaatgtactatactaacatgcccttgccacacaggaagtatttccagacagttctttgcaactcccctgagtttaacaggactgttgttaaccatgacctacactattcaaaatgggactcatcttcgaaaaaagagccccttctactgaccctggatgatgtagagaatatgactcaaagcggcgtagcatttggaacaagattttccatggacgatcctgttcttaaccacattgatgaggagattttacaccggcaacctgaagaaccagccccagggggatggtgcataggtgttggggatgctagtccatgttctgtttcaggtaacccggatgttcttagacctgggcctgcagctatgaaacttgccaagcttcttgcacaaagattgacttaccgtaacttctattcgcagcaatgtatatgggattaatggaacatgattgtatctctggaaactaccaatttgatcatctatatttaactcgtactgtggtgcttctttgtctatcctgtgtggcttagcagtcctgtcagtttgttcttggtacctatagcaagcacagattcacaataatccattttgcccaaatttcccaagtataatcacgttttccactacctcttacctatctgagctagtggctttcagttaaaaaaaattaggattaggagtccatgtataatcaacaaggtagtaatattatttgtaccttacactatttataattcacttagtttcaggcaactaagaatgaactcatacacaaattttggagataaatgaaggaatcacaaattaacaacgaacatagacacgggatataggatagatcaggcacgtgcacataattaagtagtttcagttgaccttcaggcctgcctcatcaactccagagccgcctcgacgtccgcgcagacgctgaccccgcggcggctgaggccgacgctgccggagaagacgttgaagcactcgagctccgacgtggtgcccgcgacgcgccgcagctggtcttccattcccagctcaacgaacagcgccacgtatcgcttgtccgaccgcatcatggcgacggcgagctcgatggtgtaccggcggatccgcggcaccaccatggacggccggctgtactccctcaggacctgcaccatcgtcttcgccagcgccgcgtccgtcaccctcgccgcggcgaggctcgcgcggagctcctccggctccatgaaccggagcatctgcgccgcgaggcccaggaagatgttgagcaccttgcccttctcggccatgattgtcctcagcaccttggtggcgccggcggcgactcctctcagcggaagccgccactcgtcgccggcgtaggtgcacaggttgcggaggatcctcgcggcgccgacgatgacgacggggtcgctcatcgcctcgacgagccgttcaactccgccgccgcaagccgtcatgatggcgccgcagttcctccggctgtcgagggccagcatcgccagcgcctcgccggcctccacacggaccgcgtcggccggccggtctccgaccgcctccgtcgccggcaagaacatcgccaccagctcgctcaccacgccacccgtcctgccgatcatctccctcgcctcctcgtccatggtgaggctcgtcagggtctcgatcgccagctggtgcagctcgctccaggccttcccgtcgcgctgctgcagcacatccctgacgttgctcaccgtgaacacgatgccggagagctccctccggaggagcttgccggtggtgcccgtcgtgctagccagcctcttcaccacgcggagcgactgcttcaccgccatgaggttcgtgtcggtgggcgcggccgtcgcaggtgcactggcgatgctcgagtaggagatgatcttgtcgaggagtcccttcgtcttgccgatcttgtcgcagatgtcgtggtcgtgcgccagcttgttgaggatggagaggccgaggaggttgagctcgtcgaggtcggcgtagagcagcgacgcgacggactcgatggcgccggggatgccggtgacgcggagagcattgagcttcccctcggtgagcatggagacgaccaccgcggccgaccggcggacgcccttctccgacgagttcttccagctgagcatctcgatgagccgctcggtgaccggcgccgacgtgccgatcctgcgcagcgtggcgtcggcgaagcggtcggactcggcgagcgcgacgaggacggaggcgccgagccgctgctcgtcgtaggagccggcggtgagcaggtcgtcggcgtaggacacgaggtccatgtgcaggccgtcgaagatgctgccgttgaggcagcgggagtaggaatcgtagaagaagcggcggacggccaccgcgccgcacgcgccggcgaggtggcactccttggcgacgcgctcgatcaggcggcggtgccccacccgccactgccacagcgccttctcgacgaggaacagcagcgcctcggcgagcgcgaggccgtagaagatgtcgagcgccgagctccggttggtccgcgcgtcggcgctgccgccgtagcgctggtggacgaggcggacgagcgagagcgcgacgcacgcggacgcggacagcagctgcatccagtagaacacgaggccggccgccgacgacaccggcgaccgccacgtcgcctcgtgctgccactccagctcgtggctgcggcacaggatgcgggcgccctccaccaccagcagcacggtgatgcaccagaagtcggtgcgcccgagcgtgatggcgaagccgccgagcagcaccaccgtcgcccagatgaaccccagcgtgccgagcctgctcgccgccttctcgaggacggcgagctgcagggccagcaccgtgagacgccgctccggcggcgccgcgtcgccgtcgtcgtcgtcgtcgacgcccgcgcggatgttcggcgtcattatggccttctgcggctcgaacagcgtcggcagctggtccgggatttggacgagcacgctccggctagacatgctagcgcggcgatccatctctgcgaattcgtgtgcgttttagcaagaggtcactcactgatcactgacttttgcttgctgcgtgtgctctggattggcgatcgcgcgcacggtatttataggcttggaatgcagatgcagccaagcaaagtactacggattttgtacgatgtacgggtgtgtgtgtgtgtgcacactactggatattaatcccagcaaatgggaatctgcaacgaaacgcacgttgcgaatttgtttgtttcttgtgtgcatggaagactctgtttttggggcttcagagatgggagtctgcgtgtcttctttttttcttgttaggagaagatgttgctgtgcaaggcaaattaggcaatgtaggggaagagtagctgccgccctgaggtttggacgtgaacagctagcgtcaatatagcatgtagctcaatcatggtctaatgatcaccaggctgtcctctctggtgatgcgtgatatcttgcagctcataaacttcatactcgagtcacgccgcggttgtgatcagataagagtactcatccttggtgatcaccaagcttgctgatctctgctccaacgaggtgcaattttgtcacgtgatcacgcctctgttgcgtgcttgtgttgtgaggtgtggttggttaatgtctgttgcatagccttataagttatactgctttgcaaattgagacgatgttattcaccatgcgtccttgccttgtcattcagtcaaggttattacttcttccgtttcctccgttttacattgtttcacaatgtaagattccgaatcttacattatgaaatggagggagtaataacttatgatggttcatggtttgaaatatttacaaatacccttcgaaaaagctacgaaagatgaatacattataatcaactaataactgtgatgacgttcttgtgcacccgaagtcccgaactagggacctaacccgaactccgggtatatgcgcactgcaatgaataagctatcttatttacaggattcttttcactatatacgctgatttgtataacgaagagaatactaggaaccaaaaatatatataactgtaatgcagcattgaaacatttcttttccatcccatgtataccttcccaaacccaaaggacaggtgcatcccatttaaaagactgggttgcatcacacatttttcatgtccagactatccgattcatccgtcttttaagctccagcattgaacggaaacttctggggcttgcgcagtctaaccctcaattctcggtccggactgccttttcttcccattgcccgatcgttctaatgacagggaaattttcgccacaaaccggggaagttgattactttgatctctgactagagcaaaccgttttatgttagttcattctcaaatgtggaaagtcgagaatctgatagaacagagaacatctgcgtctccacaaaaagctgcaaacacaagtttcgtttcattagagtcgagaatttgcatgaataacagaaaagaagggaagatgattagatgaaaaacacagacaatacagctctggcatccttacaaaattcgtttcattgagaaatttctatactgagacctgttcatatactaatactcttgttatgtccctccacccttctggtttcttttattttttttaaaaaaggtcagtgacctaggttttcttttagcagtgatctaggacaaggaacagaaaagagttaaaagtgcagacaatattaacatcttttgaaagctctatctcatcaacaggacctacgatgtggagaaagactggcatgcctctagaagtatactacaggtttgccatccaagggttcatgaacaacttataaatttctattaatttcgtaaaaacgtaactcaactacaaatacctttacaaatggtcggtcctttgaggggaatgaatcgataaaactgtcttttagaagcaacgaaacctgataagatagaagaaatatcattgactggatttatgctgttttcaataattaaagtgcaaaccagtgttcatattgctaaccctgtcattatttgactgtacattggtgatggtatgagatggcaggtcagaacaaagcgactccagataggatctcatgacgttcaagaactgccaagctgcctcagcctgtaatgaaatccaaactagttgtaatacatgggaaatatttcgagccatctttatccttcaataaaatctaacatgaaggatcaacaagttttacatgatcaagatctgcaaagggaaaaatccaagggaacaggcaccaaacaggattgatccctattccaaattttataaataatattactacctgaacttcattgcatttgtaaattggatgtctcttagccagggcattctcacatgaaagtctagcatgaattggactgagatcagaaacaagttctttgaatcgtggaagttgaggtaatgagcatgccttcacctgcgcattttcagtatagttgctaacagttagtggctatgaatcttttcctgcaaaaagtcataacagcagcacgtatgctttgcttgcaccagtaaaatatcacaaaatcaacatgatcagcccaggagttccatcatgcaacagtagacgtactatgtaccctggaagtataaaccttgaagccctggtctcatagactcgcacaaaacatttttgttctttgaaaatcagaatgtatacggaactagcaattcccgtttggcagagcatgcatatggaacttgtgattcctgattgggtgtagtgaaatgtcaccaagacaccaatgggtaaaatcaattccaacttactcctattgatattgttcacttaaattactccaactgacatgctgacatgttagctaggcatagagcaagaataaattattcacttttgacaaaaaaaaagcatttattcccaagatattttaaattacaggaaaaatatgatgcacttacctgatctttatctacattgattctgacaatacttgatgctttcatcttaatatcagggggtttatgttggacaccagcctgtaggagagaacacgtccatcagctaatatgcacaaacaatcagaacatggtgaagatcggtaacatgcacaaattggcaattgcggtcagtgatgactccttgaaagagcatgaccaataagtgtgcttaaaagaacattcagaacttacaatgaaagggacgggagcatcaagaaaatccaccaattttcttggtagaacctgaaaagcagttgtttgacttcagagcagaataggaacatgagatatatgaatgagctacaaatctatcactcttttagggtattagtccaatgttcaaagcatgtatagaatctagacatcaatacatctgtttcagagaaagcaaatgcctacggtcggatgacaaatgcaaatagagaaaagacagtccaacagttaaaataccgctcttatgtacagactatttatacactacattaaaagttgcatctttcacaatttatttagttattactaagttgcacacagcatttaggagcacaatgagtccatgcgagtgcatttaaactgggtttgaaaagcccaagttttattaaaacacaaactctacaaaggccataccctcttgatactagttgtctacttcaactaccaattcatattctccaaaatcaaaagttgaaatctaaaacagaaggacaatagccacgtatattttagcatcaaaggcaatatgatattttcactaatttatagaaagttattcagttacaaagaagacggatcctgcatgattacatcataatgataaggtatgataaacatgagaaaaaaaaggagcaaaactgagccaccaaaaaaaggtagaatcagtcagatcaaagcccaggcccccatggggccactcaaacaaaactgaaattaccgatatgatattaaaaagtacataattgaacagaaacctgaaacttacaggaaagagtatgatagaacttacaggaagcaataaactctgccactggaatggtcttatcatcggcataactgacaaaacaatagctgacagtacaccctgcagttaagcatttaagggaggtgctggaatcagcaggaagcataagaggaaaccagggcacatagttacaaagctcaagctaacaagcataccagatttgagcatattaccacaatctgcttctccaacagagcagcagcaaataactctagcacctgcagtgaaaaacaattagttatttttatgcaaactgagcatagaagcttacgtagggacagacaaacagactgctatattgagtttaataatagcaacggaggactattttgccgatgtaatttaatgtgctttgcccttatagagtgaattgtgctatttctacttaggcttcgccctttctttaagaagaaaataatagcccataggaatgcttgttagcttgtggatgatgtcaaggaagaaaccctagtgtggaagacagcgggggttattcaaccatgtaataacgagaatcactgattagagttcgcctccgggcctgtaacttttttcgttcagctcacaggatgagggcctagccaacatccaattcgacagtttactgtcattgtaagctatctgtattgtttcattacctttctttcttaatgaaattggtcgaccgaatctttcggccgacccggcaaaaaatagcccataggaattaccatgcattggaataacgatctaactatgcgtcctagatagacagactttctatatatatatactcaaatacactctatatttgctacaccaccaaaccaaaatctacataagatacgtactactcaaattaaacaaacaacctaaaaacaagaggaaagacagtatggagctctcattccccgctcaccagtctacgattggctcgacttcttttgagctatgagaaatgcttaggggagcaccttctttttttctgggatctctttgtagccaaggagatctatgaagcctagcggaaagcttgataaggcctatttagtgtattttcccacccaaccactcgcaggttaatgaaggcagcagaaaaggggaaaaaataacagagatacaacttcattattatacttactactacaagcttaccctgttacaagatggctagtttaaaaatgggggaatacagcacaaaaaaatggagccacataggtaaaaacttagagcagaaagtacaacatacactttcgagagacaaagcacgacaaattgtagctgtagtccatatcgataatgcgatagcttcttctgcagccgccaaacgggcattgacctaataataaaatttcatggttagggaagctgggggcattgtgcttcaaaacaaatctctaaagaccacacattcacctcagttttttctactgaagtcaaaccattgtctgaaattgtgtctcctaaccccaataaagacaatccaggccgggagtatttaacaggttgcagatgttcaagggggtggaaaacaagttcacctccacgaggtggcagagcaagagcatggtagccacaaacaatctgcagaggttcattgttgtgtacctattttatttttttttttaaaaaaagaagtctattattagaacaagggccaacagatgccttttgtcaagcttgaacgtgtcagacaaaccttagcccatcccataactttttcatcatcaacaactatttcttgcttcatatttagttcttcttcttcatctgacccaacacctttcacagaactgtcagaaaccacggcataattaatgagtaaggtaaatagcatgaaaaaactagacataatatagtagttttacaggaaagaccacatgatttcagacatccagcagatctggtgagtgatgaccataatttgcactcgacaactgcagaatctatgttttttcttctaattatcagggttacctgtgtaaagactccatgctctgtgcacgcatgattcttctggagataggcgaatgtgtggagagaagatctggggaagtatgtccattctcataagtataacttgttcttccaaagctatcacaacgggatcccaagttctctgatatacaatcctcatattgttggaaactatgcctgccttccttctcgagttctcttatgtaactagaatctgaagtctcactagccgacatactttcaggagaattaggctcccaactcctgaacaaatatgaaggaatctctccctctgatggaagtcctgatgaagagatgagacctgatatactgttgacaggtacagcatattctgtccaatcattgtaagaaagctcatttgcggattcaaaatcctccccatttacttgactttgctctttcatagagcgggggattggttctgccagagcaatttcactagcaaactgtgttatcctgtcaagcctctcctgagcaattatgctgttcatacaaacaacaccatacactattggttagcagagaattgagggagcacagactagccattttatacataacattgttcttaggccagataaatcaaagcaatcttgaaacttagtaaagatagccaacctgtttagcatctcataatgcagctcaaaaaagggcacttttgtgagtaaacagtaacatcgtggtgcagaaaccaagaaacgacttggcttgtaggaagtagggtttagtggtgaaaccatgcctagtatacccggtgctctctgaactatttcctggacatgcagacaaacaccatatagtggtgcattatctgatacctggtgtcgtgaacaacaatcaacaataagaagggtaaatagatgattatctgaatgctaacatccaggaatattagaaaagaataaacaaactaaccttcatggagaaaataaaagacaggtcatctcgacacagatgttcctgtataaaatttgttatagttagatagtactttgaaagaaagcacattagagtcaagttagatagtaatgcaatctccacaagagtattcatatttatagtggagacatgacaactgccccctgattatccattgaccaccaaaatttagactgaattttaaaacgaattttgaacaaccatttactatatctttctacagactagcaaaacagtcgactgcaaataccaggagatttcccatatcctgctacaactagtctcacctgcccaaataccacttcattcagatcactcattgatggagtcctctctattaagcgggcctggaaatttgaaattaaaaaatcaatatatatatttacagcagaaaatacatatcccaataagaatagaaggaaaaatgaaaagaccattttttttgttggttaacactaacaatacctaacactacttagtattccaatactccacagaaaattatcgaaacaatttaactaatttttttagtccgagtcaaatgaaaagaatcaagtcctaggactataaaaagtatcagcaagtaaacaatttcagataatcatttgcttatcacaattgttagaaaatagaacagcattattatgccaaaaagaagtgtgtaccactaacactaacaagtatcattatgcattcctcaggttccggcaaagaagtacaacaaacaaaattcattttacccttaactgaatcttcctctcagacctccttttaatgaaacaaagctagataatcaacatgcaaccatagtactactaaataatttttgcagacacaagatatcaaaaccaattgatatgtttcaggaaaaaaaatcaaccgatggacaaaaatccaaaaatatagaagagatgaatcatgactccatgttcaaacacccagatgaatgatagatatcttcactcaaatttgaattacttagaaaacaacatatgccagaagtaaaatttctgtcacattagagacagttctactcaactaagaaaaccaaagggcaattcattataaatccaatatgtacagtacaaattcagcgagaaaaaaaaaactaagttagctgacctttacaccctcgggaaaacagaatgacggcaaatcaatttccctaatttccgctttctttccaggtggatacttgaaaagaatctgcaagtaaattgctctttgatcatcttttaggtctagagaccaagtccaacagtctaaatcaggatagaatcttgggatgtgccatataaacaagatagacgttttcagagttcatgaaactagagttatgtgcacaagcagaagaattccatgttttttttttcaaagaagcacacctgtggttccatggttggtataggtccatgatattgaatttttctaagatctacaatctccgagtgttctacattagattcccaagctttcttctttgcaaatgcatcctcaatgactccaacatttgcataagaatgaagtccgactacgaaaaaatgttcaaagagtgttgttggttccttatactgcttattgtcctgcagaaaaaagaagagtaaataaccagcgtagtaacaaggggaagttcacattgaatacaaaccaaaataatgcaacagaaactaacatgggcactagcgcactgcaatacaaaaggcagatctctgtggttctaagggaagtacttttgtacttgagacatgtttgatacttgtagatcaaaatattagaggtactatggtgtgtgaatttgctctggggatcacactctcaaataataccaggttcaccgggttatgattcatgagaacatcagaatgcatcaactacttcgctacaagtatgaaaattcatattgcaccattgcggtattagcaatttgatcgttttctttaacaatatagctgttgagcaatgattccgttgttgaaatgcatacaacacatagtaagataggtggaagcattagagctcattgtctgctgctgttttctactatctgattgcgtggacctgcccatttctacttgacctcgaagactaaagctatttgattgatttagcacttttgttctcagttatcaattcaaataggttttcagtcactcctaagcaaaagttgcaaataaaatgcaagaatatcataagcaggattgagtgaaacaggagagttttatacccgtgacttggattggatttgataccactgccgcttctgatgcgccatagcttcaaagttcactgtcgtacgcagcagctgctccctggggctcctctcgccgccgcctccacttccaattggcccccatttccacgcccgctgcatctgctgccggaaacgctggaagctgccggtgcgcacgtgccgcgcctgatgcttgatctgtgacagcggcgacgacgacgaggtcgacgtgcccgatagaaccggcgacgacggcgccgaagagatcctcgacttcgtctcctccctcgctggcgatccttcccccaactgcgcggccatggaattctcctgctcctccgcccccctcgcacgctgctccgatcgcaaaaccgacggcgacgcggcgcttcccgtatccacacttcccgactcctctcgcggttcagaaaccgacggcgactcatccccgccgtaggcctccacttcccctgcgcccgcggccgccggctcgtcgccggccagcgtcctcgacgctgatggcgaagaggactcggtggtggcctcgccgtctggccgcgccactgccaccggcgactccgtggcagtcgacgacccctccactgcatcctcaaacatccccgccccccgcggcgacacctccggctgccccggcggctccggctccggcgccggcgaggcggtctcgccggagagttccatgcacgcacgagaccggagcaagtgggaattggaattcgtaggcttcgccttgtgttgtggatgaaatattaatgccaaattgccaagaatcaaacccaacggaaggggaagagaagaggacgagatcgtagagagaataataataataaatgataaatacagaacaaaaattaaataataaaaaataaaagtcgatatctcgatagagaaaaaactgaaaataaaaaattggagcccgacggaaaggctactgccaaacggcggcacgtcagcacgtggtcagcggggcaggcacatgggacccacctggcagtaatgttctcgtaggtaggagtatatcccactgacatgcgggcccggcgcttttcagttccgcgtgtgcgtttgcttggccttttcccggggatgggaagtgtgaattcgtcggtcataagtaaataatcgctttctatgggctttttcgcaaaaacatggactaacattccagtcctttccatttcctgtttattacaaatacgtgcttgacttgatgcatgcgcaggcgcgcagcaagggcgaaaggctcagtatattggaaattaattgagggcgaaagtgcaaatacagggcgcatcacgtggagtataacgtctacaccaaaccaaagcgaccaatacgatacgcgtattttcagttggcccccggttggttggtgtgtaggcgcgatcgccggtcaacgtcacggcctcacgggtgggagacggaagaaggttcgagccgccgccggccagtggcaggcaaacttctcttctcttcttttcttcgcgtcggccgcccaatcgccatatggtccacggcctcgaagcagttcatggtccagcccccgcacgcgtggcagatttgcaggcagcagcaacacgtacttccttcatctcgtaaaaaataaatctattactgaatatgatatattttattataataaatttaaataaagatatatccagatttataatcctcacatctaatattatattggtttcttatgggacggagggagtatgcccatgaggccggcgtttcaacgctctctcggagtacagcaaacggcaagaggaagtaaagggccacgcctgatttgtctcatcaaggctttcagaaacttgaagagtttcagttaaaaagtaaaactgtattgacaaagcaacaggtttcagcgcaggtaaaaactagaaagattagcaaagcaagcggccggtggcatatgcctgaagaatctgttagtttgtttgttgtggactatctcggcatctcgccatgagcaactggacaatagctatgtttgtgtgatgatgtaactgaacctgaaaccagtgtgccgctcgcatcttgcttgtgtaatttttcagtggtcccaaatggatgaattgacggtaacaaagcgtaagatgagcagccacatgcatttcttttgttctaaactcagtagtaggtactaactaccacatgataattacagtatacgattctgaaaacatcatccatatgttggtacttggtactccctccgtttcacaatgtaagtcattctatcatttcccacattcatattgatgttaataaatctagacatatatatctatctagattcattaacatcaatatgaatatgaaaaatgttagaatgatttacattgtgaacggaggaagtgggaactaataaggtgaaaccaaaaaatatatatcagtcagttgcacagcaaaagttgttagtcgattgccacgacaaacgttaaccaatgcatctagtgcaacttgtgatcccctacgtgattgaaacaatcacaagtcacattgtttctgcaaggtaaatcgatccgggaaacaccgcaacacaatggttctatcttgtttctttactttctaataggtttctatttcactccacttatctatttaactgtgtcactccaattctgcatcaacccggtgatatttaacaacatatttggttcactatcactgcataaaaaattacttgttttttaactaaatttcacattggaccccattttattaccctagttgcacaatgtactatgggcctatcaaactttttacttagcaccatctaaccttgccaaaacatagtagtttggaccaaggggtagtggggtaatgcttgagttgctaccatggctatttcacccagggaggagaatgaggtaagcactgagcgcaaggggattagagccaatgggtcctagactcctagtgccttgcattgagaggtccgtggcaactgtatagccgattcgcatggctaggcaaaatcgattcagaaagcaacaagtttgatgcttacgttatggatggaggcaacaaaaattgatgattcagatagtcgtagttataagtctgtgtcagtttcgaatgtttcagtgtagccatgttctgtcgcccaccggagttgaggacgaccaccaccgccctgtgcttgctcccttctagatcaggttcccatggtaaccgcctcctcttgtgatctcaaccactcgtggcccgggccgcacaactgatggaaatgcttggaagggacatggcgggagataacagagacagaaagagggagagcaatggcgtcgtcgtgtctctgatggcctatcggacttggagaggatgagggggtggtgttgagtaaaacaaatagtaattttaagtggtccaaagtgaaaatcttggctaagacatgatccaagctataacaagggtaaaaatatatggccccaactgcaattttactcttttaattttaaaacatcgtacttatgcagtatcttagcaaaactattttcggttaatggaaaccgatatggcacttcgtcatagtaagatcattgttgctcatctctatcagtattcacaagcttcgcatctttatcaatattcacaaaccaacgagcaattcctgtcttgcactgttatattattatccatgcattggattagaaacaaggagcaaaactccctgatggttctcttaaatcaaaacattaataattacaaacaggcagatctgaactaaaaattcattcagatttaaccttgagcctcacaccgttacaaaacggagggagtagtattcacaagccgcgtagcggttccactgtttacaacgttgtgtacactacatacatcggagtactgaatcacaagaccacaaagcaaaaattggctgatggttctcttaaatcaaaactaattcaggccatagctaaataagactctgctgcatcactcagtgatgtccacttcaccactctgacctcgccggacgcatctccggtgaagacgacgccgcgcgacctgacggatatcgtcctgacctcgtcgtcgcagataatatcccctctcttcttcagcgacgggagatcgtagacacggacaacgccatcgccgcgggagacaagcagcacgggcttctcgtcggcgtcgtacgttccgtccatggaaacgacccgttcgtcttccttgtgggtgtagtgcacctcgaggtcgaggtcgtcgtgatcaggcttccactgccagaccttcacggtgccatcgtcggacgaggagagcaagaaccgctcccagcagagcaatgcggtgaccgtcgacgagtggccggcgaagctgtagatgcagcggtgggtgtcgaggtcccagaccctgatgctgccgtctgttgagccggagtagagcgcgcccttgccctgcgcgagcgacacgacggccttgtagtggccggtgagcgcggcgacctcgtcgaacgattgctgttcttggttcatcctccacatgaacacggcaccgtcctccgcgccggcgaagaggtggtcctcgtcctcggctagcatggcggtgatctgcgacgcgggccctcgcagccggagctccttgccggtccccgtgtggatcgccttgacggcgccgcgcacgccggcgaggacccacgggcccatggcgatcagcttgtgcacctccccttcttgcatctcctcgacgcggacgcactgcccggtgctgcagtcccaggcgcgcaccgtgctgtccaggctgccggagaacagcttgtccgacccttccggcagcgcgaagccggtgaccgccttggcgtgacccttgagccgcgcgacgccgcagaagccgtcgccgacgcaccacgcgccgccgccgcatcggcgcttggcaggcgtttccggcggcgcctcaacctgccgcttcgccggctgaaccggaggagccctacccttgccatccgaattcgcggcgacgcaggacgggttgacccacgtgttgctgcgcgtgttgacggcggcgatcggcggcgccggatcaggcgcgtcggtgtggaggaatcggcaggggttccggctgcacctgccggacttccagtagtggcaaaccttcggcggcgctggcggcgtgttccagcaaccaggtttgccgcggcgcggctgaggaggggcggcgggaggaaggggaaggagctgcaccgccgccatcgtcgtggttgggacttgggagagtggcggatcggcgattgatctcacaagagatggccagatgggccgtccgcttatatcggttgaacgggccagtccgactcggactcgtttagtgggctgcaccgccatagactacccaagccactcaaatagtacgattttctgactgaattgatcgggattgaatttcaaaatatccataatttgccttaattaaactaaataaacgcgtctatctaactcggcagtgaataggttacactggagatatggttagttggacacaaattttggaccgtattcatgagggcccatgcacccttgcttgttttaaatgggccggtatcagatagagctctaatctgttgtaattgtaatctaatcatattaaatccttagtttttgtaaccaagctctcgatcaaccacagcgcagctttgccctgctacagggtaacagtagctggctgcatgtgcgtcgtccgattcggtgctctcatcctatcagagccattcgttcccccatcacctcccccgttgctactctggcaccctaatccctctcatcttcccacgagccgccgccaccttggctactcgccgttttcccctcccaaaaatcctccgccgcctgctcatggtctcatggagcctgtggtcagccgccgccttcccctcgagcttgagaagccggagccgctgccttcctctcaagctcgctgaaccagccgtcgctgacgtcgtgtggagccagtggttaccgtcgctgtcttcccagcgagccagcggcagctgccgccaccttcttgcgagttcgatgtccactgtcgccgtcatttcgtctccttctccatcccacgcgagcttggttctgcaagatctgtgccgcatcgagcgcctacaagcacgcggtaaccaacaggtgaaactccacatgggtggcagcagccaaatctcctcctgctgatatgactcctcaaattgatttctcagttctctttacagtcctacatctcatgctctcttcttatcaaccttacataactggtggaaacctctacttgatttttctgtggtgcatggtcaatcaggtctgaacatatgaggttacaaatgccttacctgcattatgcttctgaaatttcactgttagaaggccatattccgttgattcagaactttttttttgatgtgcaggcctgcttggaagcacaaacgaaaggatcacatatgtatgtgagtatgtctatttgctaattactaccttttcctgcaaatacgcatacaccacttggatgtagatacccattctgcattgcttttcatgttaattaacttgattgggtaaatgtttactacattgatcggccggtatctcagagtacaatcaataagtgactgaagataattcattagccttttatgtctatatatgatcataaaaatggctgcagggtgcatcagacaagcaaaaggtatatggtaagtgatggcacatttcttagggaagggatttacgagttcaatgtcaaaatcctctctatcagtcgcctcacattttcaacttacctaggttgcttccctatttttagctacataagaactatatgtatgtcaccccatcagagttatttatattcacatgttatattctaaatccatatttgttgagatgtgttctataattgatctctatgcagagtatcctatcaaaacattaacaatgttagaccgtacttttagtgggtgttgcatgcagttattattatcaaagctatcaaaggtattttacattgttacatctccttcaccctttataggtttctatattacaaatgctcatgttattgttttaattctttttcgaccagtacaacctgattagctattcttactaattctatattacagatgctctgtgatattaattgtgatcctctttcattatacaggtatgattccttctatttacattttaaatttttttatccgatggatttgttttgcctcccttttactctacaattgataatttacatggctattgttccatacgcaggaaatgcacggacagcttgtaaagtaaacttgatgaagagtggtttcctatctccatcaaagtttgtcaaattcacttgtctgctgctgtattgtattgcttacaagctatttttcttataccatcatcccatacgcttagatgcatattgtacacccttgcctcatgtaatcatgtttgcagatatattttggtacatatatagtccagtgactctacgagcaactcaatttactactagaaaaaagatacccagtgttcttctcctttttatttaaatattttagtagctttcattttctttacaaccttacaagcaaaatgtttgatcttgatcatggtttagaaattggccgcctcttcgaaatacaaggtaaattaaccaaacattgacctactatatatgcttgcgtatgtcatatgtagatatactcattacttgaagaaatgcttgacggacatagtctacaggtattatatgcattattggttaggtactaaaaaaatgcacactgattttacttgattttagttttcccatacggccagtaatataaggtctcataggagttgttaaatattcaatcgttttgcccaaatggttcaattgagaagaacttaaagttagctattgcaggtagcctaggccaacagaaagtctgaagttgttatctccttattgtttgcagagatcacatcgcaaccaacttgagttgtatgttacctttagcttgatttggtcctgaaattgttctcacaatttaggaagcatttttactcagtgtatgcaccttaattttcttctagactactatgaagtgatgtgttcatagttgttttcttattaatcttaatatgtaaatttgctgagatgtccttcaaatatgatgacttcaaatacattgtgcatcttttattctctcagatttatattattatcccccacaatgatggcttcaaattaactgtgcaccttttactgatgttgatatatagttgtgattggcagatactctagccaacaatgagtctatcatgtgcttatgttgtatcacctctacaatttccaaaaggaaaccctccttagacacccaaagattttgagcaaatggatattttcatcagcaagccttatgtccacattcacctctttcatttggatagtagcccaagctaaaggagttaaaccaatcaactaaatgaactgcttgtgtattttaggatcatagccatcaaccttgatttctattttattttgttaatggataatttagtacatactgtaaaacatatgcaatatgagttacgtgctccgctgttgtaaaacatgtccacctgttcatgttctatttaattcttctgattaaaggttatatctaatgcccgcgcaacgcgtggggggggggggcacggctagtctggtattaaactcgttcccctcgtcccctctgccctccccactccgcgccgcggcaggcggccgcgcgcctggatccccctctccgccgcgcgaatcccttcctcttgtccgtcgcgtcgagcccaattcggcgcgccacctctcctccctccgccgccggctcagtcactctcgccataagaatcccggaaccaccgccgccgcataacctcttagccgccccaaggccgggtgttcgccggcacgccggtccaaggaaagccgtaggaatctaaccatgtcctcaacacagtccttcaagagtggcgccactcgcagcttcacaactactatgcggagaggggccaatggcgcccccctctgcttctccgggagcagggaaggaaagcggcgcgccctcagtttacccaatggcagccaaggaagaagcttgcgcttgcgcttgtgttgtgctcctcccgagtccaagtggtggacgacgccactgactcctgacgatctaatcgagccgacgggacatggccaggaggaactggaggctatatggaacgccctggtcgaagaacctctccggcccatcctgactgcctttcaggaaattaaggccactaatggcaacgtcttccgctgtcgctgcttccacgcgggcataacgtcaggtatgcatcttgcgtccctcagaaaagaaaaaaaaaactactgtgcatgtatatagcagttactgaacatgtcatgtatctgtgcaggtttattagttctcgtgattcgtatttgtcagttccacaaactggcgcctggcctttgcgtggattttgttctcggatatgtatgctacaggatgagtgttttagcagcggagctgaaaagaaatgggaaagcaaacaacatttgtgctaggatacagtttggtgagtccgaaattgtttctacacattagtgttcatagcaccaaacaatctgaaacgcgatactaactgtgaccataaattatgaactagcatccatctgtttattgggttatgggtacatggcaatgcacgtttgtattagtcaaagcgaatttactagtttagctttaactgatgaggcaaaggcaaacctttcagtgctgtcctactttgttttgagttttccatatactgagtttattttttgctggctacatgttttagtatcgcaaacagctattcgaacacactcatcttacatagttttctttgaaatgcagttattatgcttttgttgttctgggctaacaatcctattaaggtacttttttttttgctgaaaaagaagtacgcctaggctccattctttcgcatgagctcttttgatggattctttcaataattttactaaatgatccttccccccttctaataggactcttgcttctacttcacacagttgatctggtaagttcttccaatgtttcatgcatggttaacttttccttatcattatttgcgacagaaatccttttacgcatgatttatctgcattctgtaagtggaaaccattacatagtttttgcgcattgtggaaggaacttcattatctagtttgatatgttaaaaatatctagttttatacgatatttcttatttaggattgaagctctcagatacctgacacatttgtcaagttgctttagtagttgaaagttccaacaacaatgttaatgtcattttatatatattcctcatatggatctgaggattttgggagggattttacagtaaatgaactaattctggtcaaaatcctgtgttccaacggagcccttaggttatgcatcaatttatagcactctcatgttgattcgtcccttaatctaagaaaagaaaaaaaatcatcaaaggatggtagtatgcactgaaaatcactagggcatgttcggttaatccccagggagggattagaggagatatattccacacctattgtggtatgaaattattccccctcaatcccctccaaaacaaacaaggcctaattgtgtaggttggaagaacctaagattcattaaacctttggatataaaaatgggcgtaaattgtcattaaaatatttgtagcatagattatgttgacatctattatcttacaaaatcttgactggaaacgtcatttgtataggaaacaaaaggaaaataagtgaaatagtttaggggagtactgtttacccttctacttagaaaaataacataggaattaggaagtccatagttctctaatgacgcgtccgagagaaaaatagctctctattgactcacattgctttagaaattggaacatgagtaaaaacattatgtggcaagtagattgcataaaacaattgaaggcagtctgcctgcccactgcctcttatgtaagtgttcagtggctagttttcacagaattgcatgaagacctcttcgttaagcttcaaaatctgaaatgatatgtatgaatttcacttgtgtagctttggaagccagaacatgattaattcagtctaatataatgttcttattatttttttatgctgaaaagacccttgcacacattcttttacacttttattcttctcttcgatagcctttgctaatatatttgtgtatagctcgtgtggtgtgcacacgtcttctcatcttattttggcaataccgtgctatagcctataggctcaaactgtcccattttgtgaatcaaatccctatactattagattgttgatttgttgctttaacttttgagcctaaaactaactcttgtcatgtgagattaccaccaggtcaccaacatgtaaaggcgttgttaaaattgatggtctaattaaatagatgggaagtcattttctttaaaatttgtacagttttcaaggtttgctgtacaggaactcttggaaatacataaccaacataaaatcacagaactctgtatcaaaagtagccatttgtgtggaccaagctggctacaacttacagtatccagctagaaggcaaaacttgaatacaagaaggaacctttaccagatattaacatagttgttaacaaacacttcaaacccaaagtactccctccgtcccacaatataagggattttgagtttttgtttgcaccgtttggccgctcgtcttattcaattttttttttgcaaatataaaaaataaaaagttgtgcttaaagtactgtagataataaagtaagtcacaaataaaataaataataatttcaaatttttttgaataagacgagtgattaaacgttacaagcaaaaactcaaaatcccttatattatgggacggagggagtatatgacaatagtgaaacagggttaccacatatgtctccaaagttttcgatgctctccaaaattactgtggcatctgtgttccaatggatcagctatagcacaaggaaatgggtaagagctgaatatggtggcaaatcttgcgcaaaataatttcaacacgccgtttgttactagcaatggcacaaagatgaacatttttagggttccaataaaaggatcagtagtgcacgtgcttaattgaataaatttgatttttgctttctgttgtatactaatttttgctttggaacatttggtaccatgatttgtttatacgtttaaaacaattatctgttgatacaggtactttgcactccatgtgtattcctgcgctgtgttctacgaatacattggtgtaaagcatcccgcacgctacctggaagcaatgttttatacaatactaacaaccaacggtggcctgatgaaagtacttaagttcatgtttttgggacaagaatgagaaacattttccttgtctggtgatatagaattagggggatattataagttcgatgtataaatcaaattcaccatggggattgccagatgtgatctacttaatgaaaatgggattttataacgttacatgttccttcaataattcattttagcatgaccaatttgattatatgatcgtgatttcgtgagttcgtgaccagggataaaaataccaggccgccctggagccgctggctggcattctgatactggccagaataatttaaatttcaaatttgaaactgtataagtacatataaaatatttgaaaattgcgattgctatcaggtaatagactattgcagtactattttcttgattaatagtttaggtacgaacttttattcgctaaggaccggtagctgtttgcataggaacatgtacttgtttgaaacgggctcgtgaaaactcaagcagctgatccatcctatgactgcggtatttgatagtaggatgtttatgatctatctgatagtacctagtactagtaaacaatctactgtcctcgccttgccttttgtactgtaagttagatacaatgaaattccattttcggtaagcatgtacaaactggatgttactaatgttagttaaacttgcaataagcagaaaaaaaggtataaggcaagcaataaaatattctcttaaaaaaagaaggcagcgatagagaatgatggatttaagacggtatttctcccggagctgtttttaggtagaaaagttattaaatcaggttttgtcgactcaattaaggttcagtttgtctttaccctttatcaatgtcgttcattctttgtcactctttcaaatgccatgctttatactttaaacatcagcactatatacgtttccacaaagatgtgaggaaatggaaagattttaataagcaaaggcagaacacaaataaagtactaaaaaaattgtatatgaaccgtcacaaaaccgaagcaggatacatgcttcaatgtcgtcaaaactagttagaacacttatatgtatgataccgatatatatcttgcatggtggcaagcatctcttctaaactatgcaggaagatcagtcctggtgaactcagtccttgactcgctcccgacttacgccatggctgctttcccccttccaaaaggcacaatcgaagcgattgacaggcgtcgaagaagtttcctgtggactggagaagagtcctaccatggttctaaatgcctcatagcctgggatcaagtctgtcgatctaagaagcaaggaggcctaggcataaagcacttgcagacacaaaacaccgccctcctcgtaaaaatgctacacaggcttttcacccagccctccccctgggcatcctggatctcgaaagaacatcaaaactacccacttggatcaattgacctcggcccgcactggcgatccctgatcgccttactgcctcttctacgcaaacatacaaagatgttaccaggtgatggccggcatataaacttctggcatgatgtttggctggatggacagttatccgctaaattccaagctctttatacccacactgtcaaactaaactgtttgctcagctcagtccttcatgaagatttcagatgcttctttgtccccagaatcactcctactgcccaacagcaaatgatgcaacttcagtacttgctgcaaaatgtcaccctctccactgagcctgatgaaatagtgtgcaatctcaagacaaagaatggtctcatctcctcctcggagctctaccggtctgaaatggcaacatttgaaacctggccgccttggtctgcaatttggagaagtgcagcccccccaagagtaaaattttttgcttggctgatgtccaagaatagattgccaaccagagttaacctacataagaagacaatcctccctactcctacatgtgaactatgcaatgccaacctagaagacacatatcatattttcttaagatgccccatggcagcagccttctggaatatgattcaaatcatccctgagataagctcgctatcagatctccacaacctggaactctcagggcccctaccgacatttctgagttctaccttttttctcctatgttgctggcggctttggaaccatcgcaatgaagtcgtctttcagaaccttccaccttccatcagtcggctgataaattcatgcctacaagatgcaaaactatgggctcaccggttcaatccttcgcagaagtccgtcctgccgctttggacctccattctctcatcccctcttacactgttgtaattgtgttcttaatctgttaccttcctagtctgttgcttctctcctactttcttctgttgtcgtttgttgtacagttatctttttaaatttaattcaggtggggactccccccccctgttgattcagttcaaaaaaaatttgtcgtattaaaccaaattcacttctcaagtgacaagtgtcaacaataggcgaacaatgaatgtggattcgtgggatggttagagttgtcagtatcatggtcagtgtctgatatcagggacgttaggtctatcgagtcttgagccatttgtcgatctactaatcgagtgctcaatacaaacctgtaaaacataaaactgtattagacaaatacgaaaaacagtattagacaaacaaagggcaaaatagcatgtttggtccctaaaaattatgagtttagtccttgaggttccaatatacccatccaagtccctcaatgtttcgttttcgttcaaaagtgtcataagagcaaccaaatacacggtatggccaatcatacttacctcttgacaagatgctacgttaggtcatcgaaatttgagccatatatcagtctactaatcgaatcctcaatgcaagcctgtaaaatataaaactgtattagacaaataaagggcaaaatagcctgtttggtccctgaaaattatgagtttagtccttgaggttccaatgtgcccatccaagtccctcaatatttcgttttcgttcaaaagtgtcatcaaagcaaccaaatatggtatggccaatcatacttaccacttgataacatgttgtgttgtattcagtcctgggtgacatcagacttctcagtttcactctcaggtatcttgtcttgagcttcatcatttttagcactgtaaaatagacaatgcacgggtatcattgtatgactgtcttatcccgtttcctaaaaccaaaataagttctgcaactatcaatccatatccatacctctggttactttcattcttcaatttattttccttgtcaatttccacagcagctgtttttaccacttgatagaagaaactcagcaattctccgacctacttggtggtcttcagagagtcatagagttttttgccaaccatgcaaacgatggtaataaagaaagctttaaacccagatggtttttcatccgaattactagcttcacgccatactttccagaaacagttaaggctcaggataatcccaatagcgatatagctgtacacagtatagattgcctctttctttccacttgtatcaatcataaactcaaagatagagaccttcattttctcccagcaatcagacaaagacagccatactcgcgggattttcatcgacccattgactttcttcttgtcgtcttcagtatcatcatcctgtttctcagtaagcttaatctcagaagtatcagcattgagctttgcaaacataactccagtactaggtaccttgcagtatgaaccatatttttataaggaaagatcatcatcacaactatattcacaggatatatctttgattgcaattacaattaagaggactaacaattacattcacgggctgagaggattaccaatatatcacccgacaattttttttcattaaaatcacacggatgtaactacaatactaatgtactgtaattacaatgtaactagcatgtaagtcacatcccatataataaacacctaccactgagtgagaaaggtatgtgtgcgcgatcgtgatggtcgtaggatccccgcagcgacacaattaatgtttgtagtttcttcaatctcttaacctagccgcatcgacgcgtaatgcgtgtactcatcaattctatgccaagctagatgttgctggcctcatgcgtgcgtgggaaggaaacgtgcaatccttttccagcgttcgaaaaaaaagagagaaggaaacgcatcacaaccgctaattaaatcatacaaagactaatccaagggaagcaaatccgagtgatttcgggtcaaaaatgtgtcgccagatgttcaaaatcgatatggaatcataccatcgggttgttgcgggaagagtattgggtcgtagtagcagtcttggggaactaccgcgatcggagttgggggtggagaaaaccctaccaaaaccacacaagtgcacacaagcagtaacgagatgagagcaaaaaacaacaaagcagtaacgagataagagcaagtaagacgagatgtgagccgagaaaccatggaaaaaatagtagcggagccgtcccagttgggcggccgctggccgccggctcatcacggccggcgccgccgccatcgcgatgctgacggcatccatggagaagttggggggaggggattcgagcgatttggagaggcgaggagagagaaacggcgatgctgcgtcgccgcctgctcctccgctctgcccccctccccgccttcttcttcctcccgagtcccgacaccgctatctcgcaccccgcccttctcgcgccggtgcgcttgcgggctatacgtgggacgggacgggatggtgttcattccgacccaataaaacggcccatttaggcctgcacctttccccacgatatggaaaacaaaaaattccaccggtttacaccgatctttaaacgaaattttgttgaaggaatggaaaccaaaaaattcatccggtttacttcgattttttttcaacgactttctgttgaaccaaatacttcgttggggatacctttgtttgttcaaactgaaattttgagaagattggagcctcacaccgttacaaaacggaggtagtagtatcacaattcacaagccgcgtatcggttcctctgtttaccacgttacagcacatgacacatccgaatattggatcacgagaccacaaagcaaaacttgcaggtcagagctaaactaattcaagcttgtgcctcagctgatcacccggtcatgtccacttcgccactctgacctcgccggacgcatctccggtgaagacgacgccgcgcgacctgatggatatcgtcttgacctcgtcgtagcagagaatatcccctctcttcttcagcgacgggagatcgtggacacggacaacgccgtcgccgcgagagaaaagaagcacgggcttctcgtcggcgtcgtacgttccgtccatggaaacgacccgttcgtctcgttcgtcttccatcgtccgcggcacggctgaggaggggcggcgggaggaaggggaaggcgctgcaccgccgccatcgtcgtggttgggagagtggcggatcggcaattgatctcacaagagatggccagatgggccgtccgcttatatcggtcgaacgggccagtccgactcggactcgtttagcgggctgcaccgccatagactacccaagccactcaaatacgattttctgactgaattgatcgggattgaatttcaaaatatccataatatgacacattgcacatctaaatacccagatggataaggttcatggcatgcttcatacagcacagatactgtagcatcgtgtatcatcaaccctgataattaacgaactatgacatttttccaatgtacaagttctatcgcaggaaaaaaaaagaagaaaatatcgacagatacggcatggatgaggatttgaggatggtacagtgactaccttcctgacatggcaggatacacataccaatcaatgctcccaggtcgtcatggatctatcaactattgatgaaatgattcttcacaaatcttgctagacatcaagcaagcccaaacatacgaaatagaaagatagaggcagatggcaacaagccaatacaaaacaaaagggtggtgatggatggtttgccgatgtttcccgcataccactacacagttccaatgactacagatattcagcctgacagtaactcattttaccaatttcaactaaggattgccatacgtcaattaattgctagtatgtgtgctggcctcaacttgctcttgaattaacagtttccggacttcagtgccttcatcagccatctcagcagggacctggccataagtattctccttcttggcacatgccccagctttaagcaagagatccacaatacccagatgttcccctctggcagcatgatggagtggctgcacggagtaattgcagaaattatacatcatgctgatagcatttagctgaaaaaatggttcatgtaatacttaaagctcaagaaactttacagtgtcgccttcagaatcaacagtgttgagcattcttgttacgcagccatcaatgttcgcagcaaaattcaaaatgtactggactatatcactaaagcctacatgaaaagtgtttattagattacacatacaaactgccaacaaaagggataaaaatagccagagcgcaatgcataataaacatccatacctccagcacaagcatcatgaagaggaattgctccttcttcatctttgcattccaagctagcttgacgttccaacagtagctgataagataaccacagttaggatacaactaatagcagagcaaaaataattcaagataacaacattaacctgaacacaaggtagatggccatataagcatgctatgtgaagcagagtatcaccatcttctattggatcatcaatgttgccagaataattatctgcatacacatatcaataggattttaacgaaagatctgcatctacaacaatcatctgtgtacaaatgcttttgctgatagcagcttccacttgcaagtaattgtccaatgagccaacagaaaaaaaaaagtgaggtaccttaagaatggaatcatttttgctatgaaatttagaaaaacgaaatagatttgccacaacacactgagatggttagcatggtgaaagcatcacacatatgtaatcattacaggattgcagcaatgtgttaagaatgccataaggacatgacttattaaagccctcactagaaaagaatggaaaatacaaagcattggcaacagtttttgaactcaattctacccaatcaatagcaaagtgcttcgtttcagtgcagcttctgtgaaaattaatgggggaaaactactactcttcaacttgataagtttcaaacacaaacagatgaatcaaccaggacagcctatgtatgcacggaagttcactgttccgaatatacaactgaagaatagagaatacatcatcagaaaaaatcaaggtaaccacaaattggtgttgaaagtgaaacaaagatttaaaaccatccaatgaaggttaataggaacatagcatgcaggtaaaaaaggaacaagataacagattcacaaactagtgttgtcccttcaaattacatgaattgcccaggacaaaatttcatgggttgggcaaagaagaaattggcattgttgtggattttcaaaagggattatgttctgctattttcaaacctgtttttttactataataagaaaagatttatgtgactaacgttatcccatcacttcctcggcacaacacgccaagctaactttacatcaaatgcagataactagacacacaacagttacaaatatcacaaaaagtgcatggtcaggtgctacttttagattcaatcaccagtttaccacgttttccaacaaaggggtactatagatttcaactaaaaaaagatataattagccttgttttttatatttcaaaagcatgtctccatctagtctagtccatatgcagactcgtattaaaataccaagtgcctgcacacagagttgtactaaaattcaagctgcttctatgtaatagtggcaatcaatttttcaagccgatactgtttttgcatcacatagggcctctgcagaaacgactcaaacccataggccagaaacatccagtacaaacttcagactaccacagttcaggttgaactactacaggagctgatccacaaacacggaagggcaaatctagaattgcgctgcataggtaaggaccaacaccaacctacccaacatgcgtacccccaatccaatcgaacgatcctacataataaccctagaaaaactcgaggattgggagagagtgcacaggatttaagcctcggtaccgagcgcggcgcggagggcagcgacgttgccggactgggcggcgtcggcgaggcggaagagttcgtcaggcagttgcgcctcctcgtcgtcggagggggccatgtactcctcgccgatcccgtcgtcgtcgacgaggtcgtcgccgacgaggtcgtcgcggcggccggggactgccatctgcggcgaggaggctctccggggttaggggtttgggctcgcggcgtcgggacggcggatgaagatagtgacggcggggttgagcaagtgggggaaaacctagctggcggctgaactacttgtagtatctcgaaacgttggatggaaaatggacgttcagatcgtatggtttttctcggtgacagctaggctcaattattagcaacatttttcacaatagtaatcatttaaacacaacttttttagttgctttttatttgaacacaataaacacaaaccttaaaaataaagaaaacggttatcaaaactgtagaaaaatatggagaaatttttataagatatgtttgaatgcaacatctaaagtcaataactcccctaaccgtacaaattttctccttttttggaattttttttcagctcctcggggaaggataagcgtggttgactatttttgcaaaaagctcatcgtttttgtacaaaatattacacagatccttgaatcgactgacagcccatcatattttatccggaaacccccttgtcttctaatgaaatacaatgtgaagaagagaaaattccgattctaggggtagcgctctaaacatgaaaagtatagggtttttctgcaaaacatccatcccctacccccaatctccaaaccctcccggcctcccctccctcgtaaatataatagccatataaattttacataaaatcatatgacatattaaaaaaagtactccctctgtgccgtaaaaaacgaatctacgtacagatttgtaggactagaatatgtcacatcttatactaggttgtttttttatggtacgaagggagtgcctcaaaaccaaaggaggaacttggtatagaaaatataaaaatataaatgctaaaaaataacaattttacgatcgtgtcactatatcttgcttcgtcaagattaaagcaaagattaaaaatgagccactgcttcgtttgataatatcatgatacagaaacagtgagacaacacaacaaggattaaaaaaaaaccagtgcagaccgtgtggtggtgagagtaacaacattactatatacagttcaatggaaaacgacacatccattccatggtctttttagttgcaaattgcaggtcggccttacaagattaaagaaaaccatggcacatgacgcacttccaatacatcgcaaagaacacaagaaaattgctccacatcccatgaactgcaccatcgagctagctagctgatggttacctgcaactgcaagacaccctaccctgcaactcgcagcacttgtttaccaagcatcggcaccaactcgaacctgaatacacgcctcttcatctcttcttctcattttatttgatccggtcggtcatactgagatgcgtcaggtagacgatcaaacgcgatgagaaggtgaaattcgaggcaggcagaggattgctttcaggctgcccaatctgtatagaactgcattaacaaatggtacgatcattctagttgctcagatactcggatagcatgcctcaattctcaggctgaagattctgccagacggtacattctgctgattcttgattagtttagtttgcaggtcaaatggctttgggacatgttaagttgaagctgctttcactagtgtttttttttttggggagcaaggttggagctgcttttacgaaagacgcgcacttccggttcagagaagcaacagttgcttctctcgacaggaaaccatgcagtagaaataccaggttctgttttggccaagaaaacccgagaaggtatctcgtgtacggtgtaatgccagagagctcgacgggaacagaggatggcctcatggccgacatcatgtaccaaggtgtacgagatcattcaggtcggaacaacgcgttgcataaggataatccggtcgtcagcaaacaatgcattcaagcaggcacaggaacttgacatacagtaacgatccagcgattaatgaccagctttacttttccgcattttgaaaggcatcgacgagcagatttatgaccaaccccaagtaggggtactccgtatctgccaacaacttcggacaacaatactttcaaccatgattacactgataaaattacagcacgacactcacttcattcagttttcgcgctgcaaggaggaggcgagcgcaacatcaagcatcatcgaccacaggacggccaaagtcggcagacgagatgacggcccgaacatgtcaaaggtttgggggaggatgggatgggcagccgcacgcgggtgggtgacgcgcggcccgcccgactactttatttactgcgtcacataaagaccaagcgccaccgaatgctacgcgaccccctctccccctcgtttttctcctcttctttaaaccgcgccgcgccgcgcctacccaaatatataaccgtgggtgcagccgtgcgccgagccgtgcgtgcagcaggcgcaggccgtgctcgtgctcgctcgctcgggcagtcggtctccctccgcgaggagagaggagacccttggcaagcgtggaggacgactcggtgccggccgagtgcggctgctgctgctgcggctgtctcctgccgtggccgcgaaatcatcgggttggccggtggtcggcgcacgcaggtactacgtgggacggtgccgtgtggctcgtccgtgcggctctgtttttttttctctctctcgggtttggcgttaagtacggtgagaggcagctgcttcgcgtcttggtttcttgttctaccttgcgttttgtttggtgtctcgtcgtcggtctggtctgtggtggccggcggcgagatggccgagctgattcagaggaggtgaaaaacctgagaagagatgcagagcagagcaagaagttttgagttgatttgcttcttcatttttggtctctcttcaggtgctaagagctacaatacctgagaattcagttagtggatcatcagttcgaggaaagctgcgagaaatggagatggacttggcagtcgagcagtacgggtaagcaccattcatcatgtctccgttcctgtggatgcagtggatcttttttactagcaagtcgttactgatcactcgtttgtttctcctcctttttttcctcttccatatgcaagatgcgtgcattacaggaggaaatgcaagataagggcgccctgctgcggcgagatcttcgattgcaggcactgccacaacgaagcgaaggtatcaccgttttttccttgtctcagtattacatgctttgaattgtctctggctaggagaaaaaaaccttattgttctgcttactttgttacaggactcgttggaggtcagcatcagcgaccggcacgagatccctcgccatgaaatcaagctggtcggtgtccctgtccagttattttggctgccctttccagcgtatcactatcgctgttactttatcggatattttgctgcatttgatgctaactgtcgtgtcggacatgatattagtaatttgcgctgcccaatattcttggaaatgattgattactgctgcttcagttccatcctgaatttcttttccttttctactgtacgcttatccactactactgtatactccctccgtctcaaaatataagcatttttttagatttcgacacatttttcgagatattattatgatcaacaatatgtataaagataaaatattttaaataaaaatagttgtatattatgatagtttgattaatgataaactattagcatcaattttacatgattgattttttttgtcattaatagtcaaaattagaaatgtttgactttgcaattttctaaaattgtttatattttaggacaaggagagagtagatacttagccagattctgttgatttttttggctacttaatgtgtccgtgcagcagtataggtgcgtcctccatattaagtactctctccgtcccagaatatagcaacctagcatgggatgagacctatcctaagaccatgtaagagaatagtcaagtgggagaaactattgtaggcatggttcaccgttagtcaagaactcaggatgatttgaagcacagcatagttgcaaaagaatagattgtaccatcaactacacactcctattattgatggctgactataactggtgtttcagaagttactcaaagactgaatgaactataactaacagtgcaagttcatatcctaaagattgaattggttgcatgtccgatctagatcattatctgaaaatgttcatactagatcattatctaaaaaaaaaaaatatttcactacgtgcccatagaatctagttttaaactcagcgtaaaaaaagtcaccaggtcacaaataactgcacagattaagtagagaagacagctggagtaaaaccaatagccgttatcaaatttcagaatctgcgactgcttgtatggttgaaacgggcaaagtctgttcttttgtggatatggatacaagtcactatctcccctttcgccacttttggttgtttaatcataatgagcctcctccaccaatataatgaccttttttttgagataccaccaaaccatatagtgatcttattgagactgttctaccttcctcatcacaggttatctgctctctctgcaacaaagaacaggatgtaagttgccaataactagtaagaatagtcattatctaaaaaaaaaactagtaagaatagtgtttatcaggtgtcatcagatttggctgttcccatcacataaaattcgtccgccttttgatttgtaggtacaacaggattgctccaattgtggggcatgcttgggtaaatatttctgcgcaaaatgcaacttttatgatgacgatgtaagcacataaagaacatttgaaccttgtgctgttaatgaaactaaatagcattttgattatattttttgggtggtatttctgttcttttctctgacttgcgtggctctcgctcttgttccaggtatcaaagaaccaatttcactgcgatggatgtggcatatgcaggcaagttgtgctaaatatgcattcctgtgacggagtaatgaaatatgagccctttttgataaatctcaccatcacattttacagaactggtggtgcagagaacttctttcactgtgacaaatgcggtatgtttagggtcgagtgatttcatcaatttcagattttggtattagtaaatatttgcattgacaaatattgtggttatcaggatgctgctacagctatgtgctgaaggattcccatcattgtgtggaaagagcaatgcaccataactgccctgtatgcttcgaggtaaatatttgttgtcagagaaaccatggactctgaaattttctgtattctactaaaataaattcccttatttgtttctgtgctagtatctatttgactcaacaaaagacatcagtgcactgcactgcggacacacgatccatctggaatgcctatacgagatgagatcccatcaacagtaagtaatcacagataagacttacaccatggcctctcccaactgattgctgactatggtgtcaatctgtgacatttcgccagattctcttgcccggtctgcctgaggtctgcttgtgacatgtcccatgcatggcaaaagcttgatcaagaggtgcattttccttctcccattgcacagcttatccattgacactgaccatgtacatatacatacatacatacatgcatagaacaccatccaaataactcttcactcaggttgcagcatcgccgatgccagtgatctatcagaagaaaatggtatgtaaattcagttacttgtgttcttcagtccaaccaggtaactatacgctgaacaaaagtttttgtggtttttttggctctgtcagatatggatcctatgcaacgactgtgggacgacatcgaacgtgcaattccacatattgggacacaagtgccccggatgcagctcttacaacacccggcagacaagagccgcccctgctgccgcgtgctccagagtctgaattctgaagaacagtgagatgagagctagtctgaactccgaagaacagcgagagatttgcactgctctctgcagtctgaaatgcccaataaaaagatttgcagcctgtgattagtctcaaagcccatcaaaacgcaaacaaccgtttgttctgaaatttgggctcgtccatggtttgttccccctagtaggccggtctggtgctaatctggcccagcgttgtgctttaggcggatttcgactttgcttgcctgctgggccttggccgcaagcgccagtcaggactctgcatcgagatgatttttatcattaccgtgatttttatcgcgttgtgctttcgccggtgaggtatttctcgcaaagaaaaaggaactaacgaaatgtgctcgtcgttcattggcatgccggtgcttacgagattgaaataaagaagtagcggtatgatcatcaagcctcgtgtgcgttgtccactttacaaagcatccttcctgtgacactgatcaccatcatcaccagttcaccaccctgtgaccctaaagaagacgtcgacgttgtttgttgcaaataaccaatcgaaggcaatcgtggcatgtttgttaagtttttttatgaacattttaatttttttttacaagtcatcataaacttgactatattcatcatcggtcatcacttaggatgcatcctaattatacccttgaattttaggaaaacatacagcacgaaggcagaagggagtggctcgatcttgttttgccaatgaggttgacatgcaactgaaagatataattctagccacactcttggagccagactaggaccaatcgatcgtgcccaaatcagttcctgaggcgagcatcgcgacgtgatagcaaacggctaaaaaagcgttacatccaagcgctccagttctcgagcacacgcctccgtcctcgctcgcctgcgcgaacgcgacaccgcccccggtcgccaccacgtccaacacaacacgacgcggcccccgcgagaagtggctgagcgagcgggagcgcgccgcacggcacatgtctgacgtctcccccctcccacgcgcgccgatcccccgcaccgcgcctggaaaaacgttacacgtgcgcggctcgcaacgctcgatttctccgaacatcccagtgcccccaccacgcagccgcgtatgctgcgcttccgtctcggcgtctcgcactctcgctgctcgctgacggccgcggctgcaccgcgcacgcacgcacccgtgggccgtggcctcgcgccgattccacaatccacaccactactcccctcgcgcgcggtggcgtgcgccccaacgccacgacgacgcgtgccgcgcgggaagcgagacagcgcggtgcggcgcggagacacctggccaaagcggcgtccgcgcgggcgcatccgggcctcggacccacacgcagcccccgtggccgtcgcgtcgcgtcgcgtcgagtcgagtcgtcaaaccgtaactgatgaaagtagaccacccgacgcatcatctatcgtcgttccgtttcgctttctgacttccgcctttcctcctcgcatcgaagagcctcgctgcctgctttattcccactcctcccacctctctctctctcctccacaccacgcagacgcgcaccaacccgccggcattcgcgtccggatgctttgctttgcccgccgcgattcgatccacgcctgagcgagcgagcggggcgagcaacgcgcccttccttcccttgccatggcctcttcaccggcgagcagctacgactgctccttcaagatcctgctcatcggggactcggccgtcggcaagagcagtctgctcgtcagcttcgtctccgcctcccacatcgacgacgaaatcgctcccaccataggtgcgtacggatgccttccccccgtcctctctggatctcgttgattcctgcctcctcctcctgtgctcaatatgtccgcttccttgccttgtcccgatcagggaacaagccgacgccggcaattaatttttgtctctattatatactgtattagtttcctgttaatagagacgtaaaatatgtgcgtactcctacctttgttgaaagatgcgatgacgatggtacaattctcggttcggtgtagagggatcaccaaacactggagtaaccaagctgtggacatctctgtggtactgttgtttcacgcaccttgtagcccgtagtacactactactactgcttactgattgttttgcgatctgtctatgtattgatgatctaattgagagtgaccttgcttgcgacaagcctaattccaagggacacgtttggatttgttacgtcgtctaggtgtgaaaccgtcaactaagcagtagcacatatcatgcatgtctgctcctttgtgtgaagttagagaatcagtaaaaaagaagttatcagcggaattagagaatcagtaaaaaagaagtgatcagcggtttacggcaactgaatggatagcactacctcttaattttaacactactacaaaactaactgtgcggaaagcttgatcctgaactctcctcaagatttttatgaattgtaatcgtactaactactatgcatgaattgtcagtagtgaatttgttcaagagtcatgcttgaaaattattcagatctaaattgttaatggggcaaaaccttctatatgtgctcattctggaataataaggtaaaggtttatcacttcagtggcaggaatccagctcatgttcatgtactgtataagtgtgccctctttgttgaactacctataacttcattctatttacttctacgaatttaccttgtttccacattgatttatcaggggttgactttaaaatcaaatttctcactgtcaatgggaagaaactgaagctaacaatatgggacactggtaagttgttttttactccgtacatgtttatttgtgaaaatggtgttctcctgttgatttgtcaatattttttaatgttggaaagcagctgcctttgccttttaccccaaaggcagcttcattgtacccagaaaggggcctatgaaaaaagctgtttccactttccattgcatacgtagaaataagtaatactcctagtacaaagaaaaggctttggtttttctcctgtaaagttcaactgttcttgctgcatgatatttgttggctcaatcctgttcttctgtagcttatgttatttaatgatttcaaaagatttcaattgttcatggacttctttttattgcttgcagctggccaggaaaggtttaggggaatcacaagttcttactacagaggtgcccatggcatcattctaggtaattctattcccaacttatgttcaggaccatcaatatttctaagcatttatcatgcctacagtacatttttataccaatctcactgtcacttagggcatatcaactctgaaagttgctcgtattgcatccatgtatcacattttaggtcacttttatctctgatattgtgtgcatgctccaacgtggtgttgcattgtcagtttgccatcattatttttctgatacaggatctttttaatatagtttaatagtgtgattcctgaacgatctagtgactagaatatcctgccacaaattagttgtatttgctattagacagttgcttcctttccatcaccatggcgcttcattgttttactcagtatttgtgtgctgatatcatgggttttcttttccactgaggtgaaaatttactatgaccatgtatgaacaagtctcaaacaaccctcttttttttatgttgcatctgggaaattgaaaaacttctgttgcaacctaatttgtaggaagaataatatgtttacttgctcttttattctggaaaaaagtgttcctggttaattcatggaagtttaactttctgctgtcttcttctgttagtgtatgatgtcacaaagagagaaagtttcacaaatttggctgatgtatgggccaaggaaatagaattgcattcgacaaataaagagtgcatcaaaatgcttgtcgggaacaaagtggacaaagtaatcattgtttgcctatttaaatcaaattattatttggtggaaccttgttccatttcagctgctgttgatgcttcccatttctaaaatataagtatttattggttcatcgataacatgttatagcactttctgtaacactgtacagtttatagtatcacttcagcaccttatcatagatagcatttggtgtaattacataagtgaggttgacaatttcagagtacagctattatagttggcatgcgggaagaaaataaattttcaatacacatggcattagattgttaccaaacaaaggaagaggttaatgatcgaggccatttttcttataggagttagcacctaagatgaaatggcagtgcatggttctgatatttgataattctacattgtagaatgaggaaaggatggtgacaagggaagaaggtcttgcctttgcccaggaatctggatgtctttttcttgagagcagtgccaaaacaagagaaaatgtggagaaatgctttgaagagcttgcgttaaaggtatacttgcagaaataatatactaagagcaagtttaatagtatagcccactattagctccaattcatctatagtcaatctaatagccaattcatacaatagttgcttactatactattaatatatggtcccacccgtcatacgcacattgcgtcttggagtccatgctgtagctggctacagtctacagatctgtagcccgctgctcttctctctcatcgtttatctcattaaaatatgtttgtagctggctaatagcctgctattgtacctgctctaagcactgtagtcttaacctctgctttgattatttgaactaatggatacatacaggttgacctgtgaacttatgaaaccaactccatgcagtagcattattgaagttaaagctgaacatatctttagtttgtagcgtatttttgttatgacagtgcgcttcagagttcaggccttgcagtcttctggcacataacattatttttctctgtgcaacctgtcatgcatttttttcttcttaatataagactcttgctgtggtgatatagcttcataggtttctttggtcacatgatcatatttttctaaatgctgtgagtcctgcatatgatgtcttgtgccatttgttctgttggttagtgcagcaatcactgcgtattgaagtcattagctatccatttgtgcggtgtcttttgtgcagcctagcagtgggaagcagtttctggaggattaatgtttttttaagtgattatattttctttctcatcctggcatagaacaagttcaacaagccttcaagcgggggctgtcaacaacccacctgaaatcatcagatcatttggcacatatttttagagggctgtgctgttaggttgccttttctttgagctttagattagtgctgcacttattcatgtcttaggaagtcttttttttttttgttttcatcacagtaccatatgtccatctccacaccattgagtgttgtgcagcaagtgtgtcagtatcttgttatgccattttttgtggcaatgcttcttgccttagttcctggtctcctgcagttttctttgcttttatttctccttgagaacctattgttctctttcttatcctgttgtcactcttttgatggcttatgcctaggagtcttgtgtgtttaaatgttccattattaggttgtatggacatattcatttttttccttcatttctcggaaggttcatttatgaaagaattaatcatggagtatgatttcttctgcttattgaatcatactcatcacctgagcatatggaatatgttcctgtcttattggaagcatgttacctgtggtaccaacaaagagcatgcttgcgccagtttagtgactcttgtgttctgtaatttatttctttttaatgtgatgtttgcacatggtggtgcatgtgcaatgtttaatgtgccacatttttaatgtagctctggcacatgagtgcatgaactatatatatccttgaagcgtacaactagcattccttttctaaaaacagatttgtttaaaataagccaaagtttgaattattcatgaatatttttgcatctttcaccaagcgtaggaggaagagtgttgatgtacaactattttcagctcctgctgaagattctgcttttcactaaaaagttatttatatattctaagtagttttaaacaagattaaaggtcatcttagtaccttttgatgtgacaatgttatcttgataaaattgtgtattgtttacttaattgtaatacaatattgtattgtccttattacgacaatgttgtaaatatcttgtggtgtgtcctatttcagattcttgaggtaccaagtctcttggaggaaggttcttcagttgtcaagaggaactctctgaaacagaagcacgagaacaaagcaaaaaatggaggatgctgtcagtagttccggttgctgtatgcgagctcatgatgcttagacctagcatgttcttgtgtactgatgtaaatgatttgtacctaaatgcttgttggtgtagctgatgcgagttaagaaggaaataaccacacgaagtttttggtgcgaacactgggaattgatttgtacaaaagaaaaagttctcccttctaacttccttcaggtagcagtttggtgtgctgaatgtgccaggatcatgtcgactagtcttgttttctggaaatgtacatgtaatgggatcctgacaatttgtcttgcatatggtggaagtatatatctggtgcataattctgaatgatctgtgtacaaaagaaaaggcgtatatcaggagcatatggtggaagtgtcattaacttatcatgcaggtaacaattattatcaacgaagctctgtgacactctgttaaactgaatcagttgaattattccagatctcacagtagttttcagcttggacctacaatgcctgtgtcattgacacatactaatattttgccagattatgtttctgtagcaagaaagctgaaccagatgctcacaaggggtttgcatgtgcatgcgcctgataatttgcttaaactcttttgctctcactctattgtgcgcgcggtgactgcttcctgcgaacactgaggagacagtcatgatgagcatgggctcccagatgaatgcatgtgaatgtgtgatgcatgcagccatggaaaagatgatcccgcatatatccgtgagcggatcagatcttctcatagggataccataaaaaagggcacggttgtacgtacctttcatttgtgcaactaagcagctttcagcggaagaaaaagacagtacaatcatttcacaggaaggggaacaaaactgtactcttagtatttaccagcgtcacaaggaggcatgtgtcattacagtttagtccaaacataggcaaccatgcatacttgcataggcaaaaacattcaggagagagttcagtgttggcaaatgacaagcaaaacgttgtcctcagtcgctaacacggtggccttgtagtggcgccacaattctgctatttttgggctagccattcacgcaagaccgcaagatgacgacgcagctagctaggcagagcaaccaaaccgaagggacaagaaagatccaatctaggtgctaccctcatggcaagccacaagcggtcaagcgcaggagaaaggccatcacgtgtatgtaccggcaaaacgaacagtgacatggtggatgacagtataaaccaccaccacggcaccacatcctccgttacgttctactcctacgtcaggttcagatttcaccgggagaaccaaagccagtgcaggacaccaacccccgggtgtccggagtaggcagcaaacattatggcgacattcttgctttctcggcgcgcagcctcgcacactgatcacctctccccttctccgcgaatggattgagccaaacacgagcgccatgggccacgaccacgctggtttttctcataatttcgtcaggtgcatggcacggccgctcgcacgggctccacctccacccatccatccatccagcggtgcatagccgagtttgggggtacatgtcatgtgacgaagacggtatccgatgaacagtgtgccataacaagcagtagaaagtttgtctggcttgctactactctactaatctatggagtatttcacaggcatttgatgcgagtgagcatcaggcgagccgacaagatcatcgtgcaatcaggtcgagagggatggggcgtacggctccatttctagatatttcagaaacatgacaaaaaacccattaattgtattatcgatagtaactttcagtctttcatgagggaattaatggctgcgagtaccttcactagttgcgtgtagttatctggcaataagttcattagctagcgacatccttctctccactgagaagagacaaggcatgccaataaaattcctatttggaattaccgctgcgattaaacatgtctgaattctacggttctagcacatatgcttacttcatccgtccaaaataaaaaaaattaatctagaagaagatatgatgaccagattgttgtcttaagagaagtggttgagttttttttttttttttggagagagggaagtacgagctaatgcagacaacatgtgaggtccgtgtcacctatctatcgcgaagcatcaaccacgaattaacgtggagacaacggggcttggcactgctggttgcacgtatcgtcaacgaaaagctgaaaaagaggcgatccagtaggttccggaggccaaagcggcggatcgtccaagcaattcttgttcttgccataaacacatgctcttggtttcgttgcgccaactttgtgtagactaatcattcctttgtctcggggtaaggataatttatgttgttgattcttagctatattagctcacaccaaacacattactggggtcctaatcaagactcaagagacaagctaggcgaggacgacggcttgaaaacaagataatgctaagctacagaccatatgattgatgtggtccatgtacactttaatggcttaaaaatatccagagatgaatggtatcagagcatcgttcttctgaagattcgaacgaagtagtagcagtttgcaactttgcactgttagttcagagcattgactgaattacagcagaacagagccaagtgaatgtgaaaaataacacttgcagtaaaacggattcatgcggcaatcacgttaataactggacagtcaacatcaccatactagcttgattgcatcatcaacagaaacgaagatgctacttataaaaaagaaagaaaaaaaaggagaggagaagatagaggaagacaagagaaggagacggtgatgtgtaggcgtcgtctgtctcaagagttagtggtgggccggacgtcagggcgtcaggctggcagggagaggcacggggcctctggacgcattgccagcgacacgcatagggccgttttggatcagtgtcaaaacggtgccctaccaatattttggtagtttaaatagtgtatatggtggttttggtttgaagccaaagcttattctagtttgatattttctatactctactcaaagcttattctaaattggtctccaaccaaatataactctaccctataaaaaaaaaaattagtagtgccaaaacttacctagattttggcactaccaatattttggtagggtattaaaccaaacaaacccatagtcgcccggactttcatcagcccctgcgcctttgttggtagtagtaggtacagtacattccacggtggacaaaaactaaaaactcaacatgatgggatgggagtgatagctacgtacactattgaatagtttctcatggtcttggacttggagtgatttgctctcaacagtagagagttgttggttcaccaattaccaactgtaataactaggactgaccacaagtagaatgacaccgtacgagtagctgcgaaattacgcatcgacatggcaagtatctgtgccaactttgcatcgatgagatcggatcagaaacagtatgccaaaccaaccccacccaacccacgcgagaaccgtggaccacgaccccatttacacgcgccgtcgaccgcatctcatctcatctcaccgttggatcgcgcgcgcgagagagagagacgccttggaacggagccgcgcgccgcgcatgcacatggtgcgcgcgcgcgcgtctcgactccgtcccaatcgatcgatcgatcgcgcgagccgccgtccaggccccgacagccacagcgcggccttatctccactgctcccccactccgacgtggcgcgcgtaccataccattcgtcgttacgcgcggccgcattattgggatgatgcaactctgcaagctacgggccctcgggtcttgaaattaaccgcacggattggattcgagaagattttaaaacttttcaaacaagcaaacgagtcgtacgtagtgcggtactggttgcgaatagcgatcgaatttgactaggaaaaaacgaaggaactcaggcaaatgcatgcacagttttacagaagcaaagcaacgggttcccaaaggtccacacttacagtacgttcaacgtacaactgatccaagcaaatgaaacaggtttgatgatgcactgatgcgagaaactaaacggttggatcggagtcggagacgaggcgatcatggacaagcggcggcggcggcgatgagcttagtagtcggtggtggggagctgctcgtgggtgtgggagatgaagaggacctcgtagatgacgccggcgaggccaccgccgatgagtgggccaacccagtacacccactgggactcccaggaccagctgacgagggccgggccgaaggagacggccgggttcatggaggcgccgtcgaacgcgccgccgacgaggatgttcgcgccgacgatgaagccgatggcgatgggggcgatggtgccgaggctgcccttcttggggtcaacggcggtggcgtacacggtgtagacgaggccgaaggtcatgacgatctccagcaccagggcctcccacacggagacgccggtcaggccgaaggtgccggtggcgagcccgccggtggagaagcggaggaggaagcacgccacggtggagcccaggagctgggcgatccagtagaggaggccgcggaacagggtgatgttgccgccgacgaaggcgccgaaggtcacggccgggttcacgtggccgccggagatgttggcgccgacggacaccgccacgaacagggcgaaggcgtgggccaccgccgccgcgatcagcccggcgggggtcgtcgctccgccgccggtcagcttgcctgcgtacgcgcatgacagttaggtacacgtaagaagaattcagagatcgaaatggtaatttaattttgtggatttgcttatgatttctcgtttgtgttcttcttttggtcatgttactgattgtattactcttttgcttaactaagctagtggattttgctactctgaaaaaaatatatattattttaaccttcagtatttcgttgtaaaataatatgtttgagcaattgctaagctatggagtttggaaacaatttatgctcctaattctaattaaccatattattttgtctgaaaagttttttttttgcttctagttcttggcacaagcacatggtctgtgactgccacatcattgactgaaacagaactactgagatcccttcgtccacgtaatcagtaagggcaaaccggtcatttgggcccaatcatgcaacctaaaagccataccactttttatttcacgaacttttgactttttctcaaaagaaaattttctttcaacttaattatcatagcacggcgtctagtttctctcactcctgcaaggacggagagaaaaaagttttgtatatcttcccaaacttttttctcccccacatgtcttgtgttattttgagggattaattcatgcgttgctaaactagtccacaattaagtcctggactttgtagtatcatcatagtatatggagtggatttgcagtggcagtgacaacacacaaggtggttaaaattaaggtcggcgacttactgaaggccatgccggagccctggccggcgaagacgaagatgagggtggagatgaactcggccaacgccgccttgagtgcacccgggtggtacacctcctggtggctccccacggcgatgttgcggatcggcatcttgcactactcccttctgctgctctctcactcaaactagaagagctcagaaatggagtggtgtgtgtgtggctgcctgtgtggtgcggagacgggacgggagagaggccggtatatatacacccagcgcagcgcatgcacgagagacaccgggtgtggccggtggcgagttggcaacacatggggatattttttttttcttttcttgtttctctcgctttctctttcgagtgagtcacgaatgtgatcgtgtgaggctgtgctcacccctccggatttgccatattacggttatcggtgaagtttctagagatcagtagggtgtggtttgtgattttggaaaattagccgggtacttgtgcgtatagcaagctggtaggtgctggttttggggattaatgaacgacatgatggataaggatatgatagaattgaatacaagctctcagatgaaaatatggaaaaaaaaaattaaaacttgacctgttctgtgtcacagctaatggagctacgtaataaaacactggggatgaaccgtgagtagcactaccgaatgtttattcaggcaggctgctaagctcgaaattaagctagcaccagtgatcaaagtcgacgatttgttgtccagtcctcggcatcatctgtgcttgttttccttgcaacatgctaaggacgtgtatggtctgttgcagtgttgttgaagctttttttttcacgaacgcgcaaaaagattacacgtcaatatattagaagaaaagaatttaatttacacgacgcaatcagctagaccggcttatgctaggggagagagaaaaaacaaaaatagaaaactgaaaaaagaaagtgttgttgaagcaaacactactgaatttttacaatcaagatatggatatctgtaacaaattttgtcgtcagtctcacgcagagctccgttaaacaacacgataacacgatcatcgcttggtattactctccctccggttccatattaattgagatcaaacttttataattttgaccatcaataactttaaaaatatttagtttaaaggaattagaacatcatatatagatttgtctttcaatgcaatgtaataaaagtaaacatgcttttatttatctattatgtaattaaaggaatagaaaaaagagactctatgttcgctctcatggcctagaaattctcacattaatcggagaaaaagaaaaagcagagtctatataaaaatacaatttagaaatagctgaaattcagaattaaaaaataagaaatattagaagagtagactagagtagttattacacattagtagttttgaaaagttattgcaaaatttaaaattatgttgtcattgtaatatattttaataatataatgagaaaacatatatgctattatatgagagaaaatataatgatgctagccgcacaatctgcgtgggccaccatgctagttatatatattataatagaaaaataagatcaaagacatattttatagaccgtgttattatctaaaacgtcaattaaaataaaactggagggagtaagccgttaaacaacacgatcacacgagcgtcacttggtaatcaagctcggattgtgaggggggaggcgacagcaaccggggggcgggcggcttgccagctcagccacgccggccgaggagctgtcagcgagccacgtgtgcgggggaggcaggcctcgtggcccgtgtggattcggaggctgggcgacgtgacgtctcaccacaaatccctcgggattggctgatgggttcttttgtcccggcagcgggaagtgatctgggattggctgcgttgctccggggcggcgaggtagactgattgctgattacggccgtcgcttctacggctagcgtttagggattaacgtgttctccactattctttttttgtctctgccgtgattgataagtgcagggtgatgcttctagcgacttcgtcagaattattttctcaatatttaaccacaaaagtttgatggttatcctcaagaaaaaatcaggggtaacacattcatctagaaatccaaggggtagtatatgtcgtgagaacttttaaggtataatatactactgtaagtatacataatttaacggtgtatactgatttgaattttttagttaattagattgcaatataaaatttgaaagggtaataaattgtgctatcatcacgtgtttcgtcatcaaatgcgctcaggatactcctaccataatgcacgataagatctaggactaagtactctcaattacagtcaatttgaacccaaaattactaaagtgtattttaaattttctatcaaatttctaataagtccttctaaatactgccagtatatattggtagtatatcgtaccgtaaaatttctatatgtcacacgctctcatagtcttgttattttacctgaagtggcaacatcgagatggtattaacgtcattcttggacggtcgaaagaggacacggttaacccatttctccttttgttcttcttgaaatgcaaacccttggcagtagtagcaacattcatccatccatgaccatttggattccactccggagttaacaattcctgaaggagcggctacgcaaattttaattcgaacagtgtcatcaccctcgacaaaaacaatcatccggcccatatatttttaggagtagctatatttatagcgccataattttcacaaaaaatagtcaccatatatttacattgtaagtccctaaattacatatgtaattttagtgtatttacaatgtaagtttcaaaattacatatgtaagtctctaaattatatatgtaagttgaatgtaattacaatgtaagtgcaagacaacgtctatattttgcattgtagattacatatatttatatactatatacatatacatatgagtagaaccatcaaaagcttaaactaatgaagcatgttaagttttaattaatcgtgtaatgacagcagagaaatactaaggacctgagtggactgaacaacatctgacgggtcagaaatttgagtaatcagccataaaatatggcgacatcattttagcaaatccgtatattttttctctccatacgtcggttcgtacgatggtgacacgtcagccactcagagctgctcgtttctcggcgcgccacgtcagatgctgtgctgcacgagagcaccccccccagccaataattgggtgacagctacggctgaaattaccgtcctgcccctcgggttctcgaagaatccactcacactcactacgacgtgatacatgcgccggagaaccaattagtccacactaacctccaggattaggagaaccactaattacacaactattatccgcgtgattatattaagaggagggctcaccctatccacatgatttgtttttcatacagcagctggctccaccatttgcaaaaccttttgttctttaatttcttactatctgcctccgtgttcttgccgtttgcaacccagtcacatgcatgcatcaacatgttactacgagaagagatcgatcgattgatcacgagatatttatccacaataggagagggatgcacggatgacttgatgtaattttagcacatgtagtttggaattttggaactaatacgtgctcgagatctgatccaattcttcctaattactacctccgttgaccattcgttttatttaaaaaattagtacaaatattaaaaaagataaatcatactacttttgataataaaacaagtcatagttaaactaaataataattctaaaatattttaaataaaacgaataatcaaatattaaaaaaagtcaaaacgatcggtaatataggacgaaggtagtagagtttactcctactcagtacatattaagataagatcatgttgtcattaccggtaaactctggcttcgccttgcatgtgatggggcctagcttgacttgcccctggagagaactgtatgatctctgcaatacgatcgaactgtttgcattgcaatgcacatgtgtatgcgagaaaagtacttcttagttatcacctgatccaatcacaaattggtgataaaatgaagtggatggatctaatctaagtcgttgccttgctggatgaggatttcattaattgcgtggatcaatttgttcgcgcgagctttgatctgatagggaaagatatttttgtatatcattaagtgtatttaaaataccttggagaaacttgaatgtgcgacaatttccgcgaattatgagctggctagtgctcttggtcaaatatttggatgtgcttctgagctggagaacttagcttgtttagttaagacataacaattcaaggcaatttggttaggtggcactatcctatacttaagccagactaaattaagcattgtttccataaatatgtcgccatcaattaaagaaaatggagtaggcattgcccttttccctataagaatttataaataagcaatgcatatttttgtacctgttcttaaatgaaaacaaaagtatccataaggcataaaccacaaaatgccatctctttgccacctgcttcttcagaccgggtttcttgccgatcttcttcgccatttttctgatgacaagtagtacttgactaccttttccatctaatacattttttttctggaagggtggccgttttcatttttttttaaaaaaaaaattccgggctacaaataccaagctttgattctttttcccatttttagagaaaacattgagcactgatgattttgccgtttagactttgacgtctcctctctttgatacggcccattcagatcgaagatgagtactccagcacggcccacatatgacacttcctgggcttgctatctccgtgtccatccacgcacttacggggacgcttaatgcgtgactgacggcaggcgcgcgacgcccccagtactactgctactagtagtacactaggaaccagttattccctccatctaattttaatagttatatttctaaatttaaaaaatttaatttagatagtcatatttcaatctaacaacctatactcttaatgactttttcggatttaatacatgactctctattcttccacacaagattggctacatgggcatcgaaaaatgtaaattttaatgaatcgcttgtttacgagatataactattagcatgtttaaatggatgataaatagaattacttatccttggtctgtgtgccaagataaaatatgactataaaaagtaaatggatggagtatttactaccagtattactactagtagtactactacactattactactaatactactatactactactataaacaaatatatatttttgttgtataaaaaatatacacatatacaaactttgtatatgatgtgtataaactttgtatacgatgtgtacaaactatgatgtatacaaactttgtgtactatttgtgcaaactttatatacgtaaatgttaaaaaatcgaaaaaaccaaaaaacacatcacgtgtatacgtatacaagtatacaaacttcatatacatacgcatacaaagtttgtatatatgtatgcaaactttatatacagcgtatacaaagtttttatatatacatatacaaactttgtatacacgtatataaactttgtataacgtataaaaaatatgtatacgtatatgtttaaaaaaataaaaaaatgaaaagaaaaaaccaaaaaaagaaacctaaaatgaaaaccgcaaaaacggaaagaaaaaatgaaacaggaaaaaaaaagagtaaattgaatcgtcagtacacgaacttgtcaggtggatgcaatctagtgcacaaacttgtaaaatgcttgttttggtgcatgaacttgtgtggtgcgtgcggggaagtcaaaaaggacactatatgactaatcctattgatttagggggtgattaggatgctatgtaaacatacatacatacatacatacatacatacatacatacatacatacatatatatatacacacacacatacatacatatatatatatgtatgtatatatgtatatatatgagaaggttgacactagacttacacctattcaataaaatatagaataggatttagtgatagtagaaaaagattaaaaatatcgagcactgatataagggttagaaacatataaaattcatcatttcaatgatgaaggataaagtagagactaaatttataaatattgcatgtcttatacatactcgctacaggtatacacgtcgcatcctaaccaacattaacttcataaaattgacattaccaagttattttggtcatcgttcgtacgaactagacaagttcgtgtactgaaatgagcattttacaagtttatatactaaattgcacccacctaacaagtttgtgtaccaccaatgtaatttactcaaaaaaaaaagaaaaggaaaaaaaaccgcgcgggccccaccctgtgcacgcgctgccgccgcggccctctccgcgcgcgccacgttcctcgccgcgcgggaggacgtgcgtgcggctagtcgcgcattagcagtttcgcttacgcatcggcctcggtggtttgccacatttgttaaggctttcgaagtgggttgggccataatgcttcgtcctctgacctcgtctgcaccggtcggacaagcccaataaatttcagaccgtcagcccatcaccctcgccgtaagcctgtgtaggctcgctctttccctcctccctgccacaatagaatcccagaaattgcccgtttaaaaagcaaaatgtattggtccgttgtaaaggaaaactggagtactagtatctagtttgaattcaa

SEQ ID NO: 8017 - DNA, 16897 bp, Oryza sativa
ccaaccgggactaaagatattagaggggtttgacatcacctaccgttttttaaccgggactaaagatcaaaaagtagctctaaccttttcaaccgggactaaagataatctttagtcccggtttttattgcaaccgggactattgtggaagttggtcgaccgaccaaagatggtttctccaccagtgatatgtgcgtcagagaaaaatgaacacattttttcccattgaatcatctccgatctgctggcttccaccttgtgataaacatatgtgcgtgatagattacctcggcttccaccatctacgatctgccgtcactcccttcctcatcgtcactctcttctttcttccttacccctcttacgacgaggtatgtcggcatgtatgatgaagatgaggtggggggaggaagaggaggaaggggtgtgtggcactgtaggcgacggggatggataagagcaacgccgacatgggcaaggaggaggagaacccgttatgtggtgcatcgaggcctgaggaccctctcgatctggcagcaacattactctatggcgcttgatctggcgcaacagtgctcgatccggaaggatgaaagatggtggaggatggggaggaggggaggaggaggaggcgacggggactaggaggggagcgaaggggatggtggagaaggagacgaggtagcgaggggcgacaggaaaataaggcggcggcggtagcgcacgagaggataggggtaaaatgaaaatttttaactttttctccatgtacgtggaaggactagaaacaaatagaaaattcttaaagggacaaaacgatatttttccaactataggatctaatggcttagaactcgcagagaagaaatcagacggtatatatttatttgatgatgtggagcattatccttctagaaagcttgttgctttcatctataataaggatttgcaaaacatgtaactattttgatgacgtgatgcaagtagtatttctacaaaatggatttggcattgaacgtactgttttaacctaactgttatggagtttcaagttaaaaccttgccacaaaagttggcccgccagttacaaagttagttagtacttcaactgagtaatttgcgttggatttatggagaacatggttcgtcctccaatggatcaactccaacatcttgtccttttacctcttcagctcgatcggccagctaagtggcaagtttgtttcctgttgtattccatattgctactgtatgatcatagtcgaataggaaagaaaaaagtacttttttcatcaacatcacgaataggtacgaagcaatgtctcttgccgacggcctaagaagtagcggacagctgcaagacaagccagctttgcctagaaactatattttttgccaccccagtatttgtttggctgctgcaatctcccacatatctatcatttatatatacccttcatgtgcatgaagtatgttgttaataaaacccggaactcttgatgttgctttccattttgtcgttcaaagtcagttaatttgctatatagttgtgcacggacatgtcgatcgtctgtgcacctctgcttgtgcgcgcgcctatttgctgttaggttttacatggagtgatttcacacgtgtgacgaactgacaatgtgggactatgtgacgatggttattatgttttcgttgaaaagttagcaactatcttcagttgcattaggttgagtgtgcattatgagtagaggacaatatatatgcgatgcgtgtgtagaatctatggtaataatccggtgaagtagttgaaaagaactggaacttctctactaaaaagagataggagattgcaatcatctacaacataacgaagcattgccgtcaacctcagctcccttgtttttattcttcctaattaactcagttgtacgaaaatagaatagtccagaaatatcatgccttgtccagttacatttgtaggatctgctggctaccctagcgcgtagtgaggaaggcttgaggttgagcagaaggtctctaacaagatgatggtgaactagaacatatcccctcaatgctaggcgctaacttcattcccttactgcctcctattttcattatgttctccatcactgaaataactgcccagatgtggctgttgcaagtacacacaaggaaatatactttactcatggcattggttggtaggatgctcggtctccaaaaattaatccacacaccacgaccacatatagagatctatattatgcaccgagagcatgtactagcactggtgcctgttggctatgcacaaaatcgcgcacccaattgctcgcactgtatgatgtattcctacaaggtgaactgagaaaaatagaggacataaaacaaagtgcagaagaacacaagaatttgggggcaattttgtggggatttcttttattggaataaaaagctacaactcgctacgtgccactcttataattgttaactactattacctggacggattgttgttgctactgttagtggtggctaaatatggtgattagttttgaaacgcataatgccatagactaagcattaactcattaattatgaattttctatttcgagaagtaatttttttaaaaaatgctatattggtagtccaagatggataactccatatatattttgattctaaattacggcatgttatagattgaagcaatgatctatgtccggtacaattagctaattagtaatgctagatgtatgaaccaaattatagggctgagtacgcacacgttatgagtaagtatgtttatactttatttaaaaaataaagtgctaaattaagagcccacgacacgaaataactccatattgatgaatttaatattttagaaaaaaaaatctaaactgtcgacgataccccctcggcacattgtattgaacacaaactctttataggacatacgataataaaattataatccaactaatgaagggccaactatttttggagttttctacatctctccgttgcacatgctaatattaatggtgacattataaatataggaattttgatattgttttaaaatttaaattatcttagagtgtcaattttagtatttttattaacgtacatgctagttgggcactgtaccaaacagctcattacgtagaaaaacaatcaacaaattataaaacaccgaaaaatacagaacaacacacaccagacttgcggggccacagcaggcttcccttcgtcattgtctggccagtggaggaaaacaaatcaaaactctaggaaagatcgaaataagaagctacctcaaaagacgtaccagtgttgtatctgtaaaaaatcaatctttttgattgaggaaaaaatagcaaggaggagaggtctcgatgtggtcgccacagctcgtgttggtgcagtcccacatctagatcgaaggcaggcttcatgggctttcaaaggtagattagttggccaatgacgttaaatcactatagatttatggtgcagattttgtaatccatctaaacgataggtcagatttttcttgttaacatgagggctcgtagaaagtaatcaataataaaggtatagacttgtatatagagtacatggaagttttacgatcgtgcaatcccacgacctccaacaactcatttagccgattattactttcagtgtatttacttggtgcgcatgaaatggttgtattgttaggctattgcaaacattgattggattaggaccaatgagatgaataacattaattagtgaccctactgcacaaaggtggacaatgtgccaagatggagaggggccagccaaagatggcacctgtcgtttaactgtccgaccttgttgacggacagttaaatatattatttattaattattgtggcctatattaaaagaagagtttggcatcaccaacacttctcttataatagtgtagtggtatatgatagatcatagataccactacactaggaaggtaaaatgcctgatgtattaaaacaactccctatggaatggaagaacaaagaaaaaagccttttagttggcttggccataaaagaatttgcctcgcttcgattggacctaaagcagttataaacctcaaccgagccaagaggaaacacaaatcaagccaaatgtgtcatccagatggtaacacaattatgaatgtacatgtgcaaatagtatctatacctgcacgctgtctactgtgcaaaaggaataaacctccaccagatgatcaacaacaaaagaaccacttgctgaaacacatgttccaatccacactcgttcacaatacaatattacggctacaggattcaatccaatccacacatgttccaatgaagttgtgttgttcttgctgaatccctcccatctcaaaagtaaacttctccaatctgcggattgctgcagtaaccacctactggatcgcgttacattcgaccatggtgtcatatcactcaatgcttgagtaggaattacctactggatgattatgttataaaaattgtctttcatatagacttgactagctgaattcggaagaacaccataagagaagaattctttgtactcgggattggctgacatcctcagtgtatttgggaatgtccatgattaaagattaatttggttttcaatttgctgtccaaatcatcctcattatctcgagtgcaccatattcagcctcgatgctggcttgatctgacccaaacaacttatgcggaggcttgaaaaacccaagcatgtccccagctgccatctgccacgtccacatatgaggtgaaagaatgaagttacggtctaattgtcctactaaggctccacataaaggcagtataattcaagtgaatttctactgcattacattgagatatcctaattatgggttttccttcctatatgcctcccattcttattacggtcatttctactaaaatactagtgggtacagttcacagttttattgacgatcgagcatggattgagaatttgaggtcgcgaatacttgtggccaagatatactacatggcagagtatatatatatatatatgcagaaattgctagctgcagtataattccaactgacatcaagctgtcaatgcttaccccattttgctgttgtacggtcgtgcagccgccgatcacgtgtcatgtattatagcccattatgtttggaatcactcccccactctactaacaaaatgtaaagtacaatacaacatattctctacgtacatacgaataaagtaaacctgcaaggttcgcattgctctagcccagtgcgactctgacagcccctaaagctgtctgaggtcgcccttcttcctgaggcagctaccggcaaagctggatgcctagaaggacagcggcggcgtggctccttcttctcccgacagtgaagccatggttgggttccaaggcagtctggagaatggacgtcacgccacccagatccagacctccatgacggacttcccaagtgccattagacataactgaggtcacctcacttagatactgcttccttccaatagtcagcatcaatagatgaatatgtctcttgtatggtttgtagtatcgtccacaaggtatacaatgtagtcatcatcgagtagcaacagtgtgatcctccttaggattttctatggacgtttgaacatcgtgttctatcagcacaaaagacacggggaataaaatagattcttgactagaagtgttaggtgtattcattttcaaaaaatatagtaccatatctttactaaaaaattttttacaaacatgcatgtcaggttctcttgaattcgaaattaagaatctatatactatgatgtgaatagcataaccaagaaacacacaatccacgggttttggtccaaatttatgctttttgactataggcacattgaccatagccaaacaaccccatataatctttgttcttattaggaattttattcagcacatgatacacaatcaatatagtctcaccccaccattccttaaaaagtcccgtagtgtcaaacatgacattcactaattcagttagactatgattctttcttttagcaaccccattagattggcgtgaatagggaggcatatcctatcatgaataattccagacttttcacggaatgaagtaagctcattttaaaaatacactccacctcaatcatacctcaaccgtttaattttactttcaagttggttttctaccccagctttatagattttaaagtaattcaatgtttcatcttttgtaaaatctagtgcaataatctcttaatctgacgagaggatgactacaaactcataatgctgaagtaaaaggctatgatgcatagtgtaggatttattcaattaactagctagcagccaaaaataagatttttggcacatgtttccagtgcccactcgtaggcattttgaacccaaacgactaataatacacaggttggacaaaattgatgcagtcaggaaggccctatttctccacgaaaagctaggacttggataggaattaatctgcgtatgcacaaggtactcttctttcggatggccaagacgacatgatcttgggagattacacattgaagctactgtgtctagatgaaccaatgtccctttatttgttcttccttacatttgatcggattggtaactcttggatttctttcctatgtacgtacacacacgtcccagtcttatgagagccattaatttctaaaatacaagcgggaactgattattgttgtaccgatggtatttgaggatgaattgagataatgaggtgttgaatatttgagaatctcgaagaagtgctttggcagagtatagacttcaaatttttgtactcaaacatagaagcatattgaagctgatctccttgtggtttaagtgggcttatctagtagccagtcgcacgatgactatattggaatccttgcatctatatgtcagatcctatctgtgtagattgtccatattgttactgaccttgccggagctcgtctgtgatataggcaacaacttgcaggttctgaagatgtcgctcgttgccgaacgatgaacaacagcttcagcttaatcaaggcacgccggtgacgttgtcttcaaggagattcacgccctcgccgaggtgcacgagacagacggcggctttcctccaagatacaatgatctcgtatcctcacccgtgcaatcggccaagaacgaaccaatggaatttcgtgggatgtaactctctctatgcaaaataagcagaaggatgtagagcaaaagcttcgtgtggtaatatcagcagcagtacgtgccttatatagccttgaatagcaacaagaaaatcctatctctaagccggataacaaacaatcaacagattgattttcgtcggcctgaatatctggaatgataaagactttatcttccacgtacagctcaaaacaacaatatcaaaacttgaaaccaaaatctgaacataaggcaaaagttcacatatgtccatttgaactaaactgaagaattgttggtacaaaatgaacagaaccaaagagacaaaatctgaacaaacatcaaacatcgtttgtgactttcattcagttataatcagaaggaaaatcacctgaattccaacagaccttaggcatgcgccgtgcaacaccactgttaaatcactaactgttacgtaccgtaaaatgacatagttaggcatatgctaattaatctgcctaactgtaatttaaatggctggatagaaagcagagctaaagctacaacaactataaggaagcccaaaaccttgcaccaaatctgtactccagacagtacaccgactgaagtatgcatgtcaatcctatcatgatatccaagctatcaaaacagaagcaataaacttcctatgatcgtcatgaatgaaagaatcagaatgaaatttaagaatatggtggctagctcatacacagcatgtttaaattgaagatcgtaaccgatatcctttgtgcatttggttggtccgatacataagaaggatcttacatattgtcatttgattattttggaggaacaacggattccttcttgtagactcataggtaagctgtaaaaagcgccatgatgttcaatcagatgacatcataacgtaaagaaaacaatatgataggttaaaaattatgattggatcatccacaacaacctcacaacacaaaccttatgtgctgcaaatccccctggtgttgcttgcgatagcatgttgtggcccaaggatttaagtcaacctagtcgtggtgagcacgtggtattgttttccttcaagagtcctcctattcctattgcagttcctaccttcattttagaagtgtgaattcattgtttcttgtcatgagtgcattgaaaaattgggatggtgagggctcgaacaatgtagaagttgtgtcggggtatatataaagaatggcaatgaattgaacaagatagaattcaataccatataacaataatgatactggattggcacaccggaaattcacaacggccagactcgaagtctcttttaaggcatgatgggaaatatttgtttgtattactatgatttaataacaatgtttgctagccactgaagcatgggtcatgatacagcagttaatataacagccattttatgtcaaagttttgtctttgtctatctctgataagcactcagcagacgggagggggataccgaggttggaagtagggccttggcctgaggaattggactagatggttctcttaggccttgttcggttgggctgttccaggccgggatcggggcccaatccctgtggatcaccccggcgaggaaaaaatcccggcccatgcgaaattgtgcgttcggttaagccctgccgtgaattttagcccggcccaccacggggtttccctcttctctaggcccgggaaaaaatcatctactcctggggtgtggaaaatttcctcgagaggaggcagcggcgtaacgaagacgcgacggagggggcggcgcgcggcgcgacccggaggcgacggcgacggcgacggcgacgacatggctctctcctccggccgccaccttctctccggtgagcacgctgcctttccccttcttccctcctcttgcaaagctagggttagggttttcttctcttctccctttcctgtcgtccccgccatctctcttctcgccgtgcagctttctggtgagtgagcgcttagcgattcatcgtcctcctcctcgtatcctgctcgatctggtgagttcttgatttgggcgtggagctttttttcttggttgggtggggatgcgttcttgatttgccgccgccaccgcaccgcccaactctggttcttgatttgagttcttgattcacggtggctttgaggcagcagatggtgagagcgagagctgtacggtggctatggaaacatgcttgccttgattagttttgcttagtgtaactgatgctgtgatgcttgcctgagcatgtcttgtaaaattgactatacaagtttttacagtgaagtactcagttcttggtgcttccggagtctcaacttgtggttgttggttatatttctgtttggaaattacaagggttggggtgtcctgattttgaggattgtagagctatggaggtactctgtaattagtttaacatttctgaattgtaaactaattctatcgtcattgtttcacaaacaaactagcaacaaattgcagtagtatatacagtaatgtatacttaaactgatttattttaaactaacaacagtagcttttagtctcattagactaacagatttgttttcctcaacatgatacttgtataaaacatgtttatcatagctattcaagcactaatatgtctagtgttaaatgaactgattgggtgattaattctgtacccatgttataatgtatttgatgatgagatccttctatttgattgaaaaacagcagctcctactttgatgctagctagctctagttctgggttttatgtaactctagttctagttctgaatttgagttgtcagtgatgtgtataagttgtgcttgttttgtagattgcacttgcacccatgagagttggagaagaccaacctcctccttcctgggaccttgtaccctctccttcctgggaccttgtaccctctccaagaggtactagatctatttattccctttgctttaagttgtttatctatattttgtgatgtaaatataaaaaataaaagaagtggtgtaatgtagaccaaaatttcttttcctttcaacatacggttaaatttgtataaaaaagcatagagaatatacaagttctcagatttttcagatttctgaattctgaacatgctcggtgctaactaataaaagatcatctgtaactaaatttgacaactaaatttggtaagtgctactgccatgtaatctgctttttcatacatcctgtaagtgctactgccatcaattattgttgcactgtgcactctttaagaaaaaaagatccttattgttcttttcatttttcccatcaatttttaaatatgcttcataacttggatcttcttaagattaattcccatagtttagtgattcttgtgtgattatctttctagatcttttgttgctgtgctaagtgcaaaattgtaaataatttgtgtgctatctatagtactactatggatatgagagcaagagaccacgctagaaagaggagggaagaggaggacgatgatatgatgttgtttattttccctgcactacatttgttgagttctagtggagcaagggaaaagaagcgacgccatacatcaaagataacaggcgaggagcgtgttcgggagttgcttgaagggcatgtaaaaaattgccgggtagcattcaggatggagccggaaatatttatatctttggccaattaccttagaactgaaaagttggtcgatgatactaggattaaagttaaagagaagttggcgttcttcttatacatgcttagtcacaatgcttcatttgaggatttgcaagagaaatttgggcacagtggggatagctttcatcatcacgtaaagcatttcttcaactcagttgtcccttcgctctcgaagcggtttctgaagcctccaaatcctaatgaagttcattggaaaatagaaaaagatcctagattttatccctatttcaatatccttattaatatgttgttttacatttttagaaaatcatatgtggtttttttttttgctgcagaattgccttggtgcaattgacggcacccatatacccatatctatatcatctgacaaagcagctccatttagaaataggaaaaatactcttagccaaaatgtgatgatagcttgtgattttgatctgaagatcactttcatgtctactgggtgggaggggtcggctacagtaccccctggaaagttctatttggttgatggtggatatgccaacaccaattctttccttgcaccatatcgtaaagtcaggtatcatctaaaggagtatggggcaggtcggcgtagacctcaaaactacaaagagttatttaaccatcgccatgcggtattgaggaatcatgttgaatggactttgggggttgtaaagaagcgcttccctatcctcaaagttgcaactttccacaaaatcaagaaccaagtgaagataccagtggctgctgcagtgttccataatattatttgatcactgaatggggatgagcaatggttaaataaccaaccacataatatccatccaagcaattatgttgacctgccagatggtgatgaaggcaatgatcaaagcactaatcaagggaatcttttgagggacacgatagcacatcaaatttggaatgactatcgacagcataggaattagtgggttgtaataagtagtatatttgattttcttttgatgttttgtgagctgtaataactacgacatattacaaatattatgttataaatgaactatggtggttgcatgtgacatacatttgctacaatgcttttgttatgaatattgtgttatgcatcctttctcagttaatatgcttctaagaggttctccaaggttgaccatgcttttagcgaaagctgcacaaaagaagaactctccgaaaggtcatcctacaaaaaagcatggaggttctccgataggtatgcaattatagaacatgtgaaattcatgtttgaaattattaaatgtagattatacatcaattcttatcttgcgtagaaaaaagaagagcctcttggaacacagccctagagaagattcttgttgagttattgcatgagcacaacactcctgagtataggggtcagaatggatggacttcagaagcttggaacaaaatcgtgaaggaattccatgagaaggacagatatgtctgcttaacaaagtcccaaatccaagaaaaggagaaagagctaaaaagagaatataggatgctgaaagaggctagaaaacaaagtggagcttcatggaataaccagagatgcatcattgaggctgagcctgctatatagaacaatataatcatcgtaagattatttctgaccattacttaattttgtagttaattacattatgcatctttttagtgttttccttttattgtgttgtcatttcctaaagccaagaagtttcgcaccaaatctttccctctatttgaggccttgggagaactttacgatggttagttctatcacaagctataatccttgttttcaatatcacaagttataatcatgctttcttgcttaccctttctagtactcaattttcttgtgtaggacatactgcagaaggaacctgtcacgcccggaatttctatccaaaattccaaacgcttacatgtgtgtgaaccctcgtccaggaatcagccgagggacacaataacaaattgataatagagtacaattattactctaattaataagcgaataaaatgtcattacagaggtagatagttcgtctcaatcaataaagatctaagcagcggaaaaataagataaacggcacagacgactccactccacaggcagcttgaccagggctacacctaatcctccacaccatcagcatcactgtagaactcttcctctgatgaatgattgcaaggtgagtatataacatactcagcaagccacgcaacaaatatggaagtgcacaaggataccaaagaatggcataatatagggctcatttgcaaaagcagcatttagcaaatatttgagaattataaaacagtagagtaattaatcatcaattttaatcaacactaaacagcacacccatgctgctcaggcccaaccatcctgaacaaccatacccggctgtacagatctatctccaaaccaggaatataccattccaaaccaggagctaaacaaattattaccagttatagcatcttttattatggtgagaagtgtgagactaatcacgaaagacattgttagacccgcccataaccgcgggcacggctattcgaatagttttactctggccagaggtgtaccactgtacccacaagacacagcaccacaacatgtcaccatgtgcctcaataccaccacggtacctcggaaaggagctgtgacagtaaccctcgtacaacacaatccaccacagcgcacctttcctggatcataatcacccccttataaacaaggcatggactccccagcgacccccgtgggcttatctccaccacttctcagtctggtgctccgcaatgaaccatgctatacaaaaggtaaagtcgttgcccacgctggcttgtggttggcacggttaatgtttcacaaccgaaactcgtgaaccggtccttaattgtcatgagcacggctctcaaaaccatgtgctcacaacccaccattatcaagttttagttggcaagtaattaattaaccaatcacgattgaccatcgtgaactatcattaagccatcattaaataatagtgagtcataagttatcccaatagtgtgctaatgtttctaagcatggctaagcaatcatatctaatatctagctgaactaatatatatagcccaactagtcaagttataataacccaaggtatcaaggaataaagtaatcaagaacaaaagggctataacaaacaataggttaattccacccaatgacattcgaaaataaatgcaatagttgaatagaaacaatagctttaaacgggatcaacatgctcaaaggattgtttgggatctgtgtgacttgccttgctggccttggaactcttcaaaatcttctcctgcaaactcagactctccgaaaacgtcggaacctaaacagaaaagagcaaaatcaccaaaacagcacacaaaccagcatgaacagtacatgtagatatttttaacatgtagatctctattttagaaaaatttagagacttgaaccaactaaatccgagctaagatgaattagttatgtgttttcaaagattaaatcggattaaatcattcatttagattttaattgaattatgacgcaataatgaattatttttgaaaaagaaaagggaattattgcgtcagcggctagggttcgcggtggaccgggtgcacggcggcggctcacggaaatgaacggccgagatcgatcctatccaaaacggacggccaagatccatcggtccacgaccgggccacggggaacgacgacgatgacgtcggcggtgacgtcaccaccggcggcggctcgggcgtgcatgcttgccggcgaatgacggcatgacagcgcgaacggagggcacctatgggtagcggacgacacggcgaactcaccggtgaccaaagtagcggcggaggggcaacggacggcgccggcgatgaggaaaagggggcagagacgatcgggtcgacggcggcgacggtgctccggcggttgacaacgacggcgaagggacggacgacgacggcgatgagacggcgaccacgacgatgacctccccgagtgacggcgatgactggagcgacgatggcgcacggctagagcggcggcgacgacggcgacgcgaggctacacggtgctagggttctaccggcggcgagagacgaaggcgagggtggcgacgggtagcggaggacctgggggtgcttatatagggactagggcgcggcggcgaaggcccacggcgaccggcgacgcgatggaaagattagggttcgggagagagagacgaatccgattcgagatcgaatccgcgaatttccaaagcgatttaaacgatgtttccaaaagggaaaaggtagagtggatcacggggatcctttcccctcaattgatttcaccggaaacggaaagggacggccggatttggaaggagatggcggcggcgcgccgctagggctcgggcgatggtgcaaggaggacgacgacgacctgacaggcgggccccacctgtcagcgtccgagggcgctcgcacgcggctgctgcgggcggactgggccggcttgggccgaggagagggagagagaaggttttgggccgactttcgacccaaaggcaaaagagaacttttaaaaccttttccaatttaaattattcatgaaatgaaattccatttattaaaaatacttccttagctcaaataaatcccagaaaaatctaggaattatagaattaagcaaagtatttaatgaaattttatctggccccattttatattggaatttattaattaaaactagatcttctcttctaggcttttaaaataaattctaataattccaattaaacaacaatttatatatttaggatttttagggtgtgacagaacctacaatttcacctcaattgagccattgcaacattcaatcattactcaagttgagagtgatcaagatgatcttggtaacactgagattatatttccagattatgaggacaccttggcttatcaagtacaagatgatgcagatgcaactgaagatgataatgcaaatgcggaaaggcttaaagagatgccgcatagaagggttgttgttgtaccaagaaacaaagaagaaaaagaacccaagaggcaaaataagagtgttggcgtagaaggacttatggaaaggtaccttgatatgaggaccaaacaaactgaagatgaggctgcacaattagcaagagaaaaggaggctcagttagcaagagaaaaggaggctcatttagcaagagaaaaggaaagtaatgatttttcaatcaagaggtgcatatctgttctgaattcgatggatgtgacaaaggcagaaaaggtcaaagcatataccgtcttcaagaatgcagagaacagagagatttttgtgagtgcttgtgatgaggatccagaatctgccttgagttggttaagaagtgagatggcttgaaaggtaccgcttttcttctatataaatcttttttggtctgctaggcaagtaagatgggcttcactctgtcctgtgtgactctctgttgttagttacatgcatgttgtttagggctgtaaaccaagatttacattatgggctactcacctttcttttattttcttgagctgataagctcactcaagtctgaactgatactactcttagcatctgaaaaagctaaacttaagcagtatagcggtgcaattttacttactttgaagcatctgctttgctcctgataaaagaatgttttttaaggtaccgtgtggctctagttatgtacttcattattctggatttttcacattttggtccttttaaaaaacttatttcgcaaatagacccctagaaaaacttatcccagaaatggtcctttttgggacgccagagtggctggcgccattatccaactggac

SEQ ID NO: 8018 - DNA, 2332 bp, Oryza sativa
agaggctggcgccgtccagttggacaatggcgctagccactctggcgccccaaaaaggaccatttctgggataagtttttttaggggtctatttgcgaaataagtttttcaaaaggaccaaaatgtgaaaaatccagcttcattattactatgttgtcaaggctgaattgttagctttttttgttagcttcctagttcctgaacttttaggtctcttttcatctttggttctatcagactgatagcattccatgtagtgcatcagccttagtttggatattagtgtggctctttgctttacttgtttgctcttatgtaatctgtactctgcatttgttcaatttgatatttggttgacaggaaagaacatatatggtgtatttctttttggaattgatccaatgttgctccattttttttcagagatgggaacactgcagctgggtgactgaagctcatggtggcattagtgctaagcttaaacacttgcattcaatttgtagtttagctcttagatggctacttctatttattctaaaaaaaacaactgaactgtaaccatttttattactttgtgacactttcatgtatgcatttgtgaacgtacagcatgcatgtgtgttttccctatgctaaaacaatgttttttttactgcatcctatggatttgatctgggagaatgcatattgtttcattgcttgcttgggaacatacagctgctgctttatatttccctgtgctaaacgaaggcagtgtttatatgccagggattagaaacgggcagggattcgaaccccacagggtttgagtgagataggagggattcactcaatccctccctggataggatcccttggggattaattcccaagcagccgaacaaggcctgagtggtgttagcggctccaacaaccaatgaaaaaaatatggagccgcacttagagccaccggttcttcatgcttaacataagatttaaccggtcttgttatatgtcaacaatagctagcaaaagtaagtagacaataaaaattaaacatcattccttattttgtaaaatattaattgataattagtgcaagtcaaggatgaggacttacgtttccctgtcaaaaaaaatgtttgctgaagctagctagttcaaatggttaaacaaaaaaattcaaaaggtttagcaaaaaaaaaaagaggtcgatatattaacataaaaaactaatggcatcataaagcaccaagcattcatccatggtgctggaaccagatcctctcatgttgggatattgtgtggctgagtcatccgatccgcatcgcagcaaccgagtgaactcagcgactgaacgggctgggctgtagcttggcccacggcaacgaaattaaaatggcccatttgcacacaaataggtgtcgccactataggtgtcggtagtactaaaaccggcacctataggccttttcccacctccgcgggttcaaatcgcaaaaaaccggaacctttaagcaataataggtgtcggttccaaataaaaaccgacacttatttcattttgtgccggtttttttttaaaaaaacattataggtgccagtagtactaaaaccgacacctataagatattataggtgccggtttttaaaaaaaccgacacccaaatcaagccgaaccggcgggccccacaagacgagataaggataaggacgagctagtggcttctcgatctctctctcgtcctcagtttctctctctctctcgcctctctcttctctttctcagtttcccctcctcctctccccatacggcgtcgtcggcggtggcttctcccgcggcggatgcggcggtgggcgaggtggcctcggcggcggccggggtggcgactgctggcggagcagcatccggcgtcggcgtcggcaggcaaagcggtggcggcggtgagtcccgcaatggatccggctcccgcaatggtgattgtttctatgaaattgttgagggatatgtgatttttgattctttcatcagtgatttatgtggaacttctgtgatttgctttgacggatatgtgttggatgaattgatttgtgattctttcatctgtgatttgtgtgaaacttctatgatttgctttgagggatttgtgtgaaatgcaggttgaagggagataactccgctgcccatttgctgagccggccagtaatttccttgccccggagcacttcgcccaaaggatactgcgatggcatagtgactttgtgggcctgaaagtagtgtttaagtttgcacgaagccatcactagggcataagcaagcttttccatttcaatgtatcttatcttcgcccct

SEQ ID NO: 8019 - DNA, 866 bp, Oryza sativa
cacactgtcacactatgtgtataaatgatagaaatgataattacctagcagcattttattattcagtctattcaaaagtcatgtgaccttaatccatcctctattcaaatttcgatgaatgatttttttagatacgtgtgaccttgagttgcccttaatttataaaacatatcttatgaacaaaatataatcttttatttaaataatatggatgcccacacatacgcgtgggccaccttcctagttattaagaacaaccgaatcagtagcgagttatataccgtgttattggaggaagtcttaatttagttaattatttgaaaaccctggttaaatgtgaaatagagaagctcgacgacaagttttgagatatactttattatttgatgacaaattatattgccgagctataggatgaactagaaaatccgcgcgccagttggcgcgctaactaatttgcaccttggtttttccatgtataatattttatttacgtaaaaatcatacacttatcccttaactggatgttattattattattattattattattattatttcatatataatgctttctcagaagttcagaagatccaattatgatagctgtgtttatctcaaagttgttgatggttcagctatatatttgcttctttatattgatgatatgttgatagctgcaaaagacaaatcagaaatagcaaagttgaaggcacaattgagtagtgaatttgagatgaaggatttgggtgcagcgaagaaaattctcggtatggaaattactagagaaagacattctggcaagttatatcttagtcagaaaggttatattgaaaaagttcttcatcgtttcaatatgcatgatg

SEQ ID NO: 8020 - DNA, 6891 bp, Oryza sativa
ctaaaacgggggagtactaaattggaactccaagatgagtatctatatttattaagtggattagattgaaaaaagtacattgtttttgcaattacccaaaagttgtacacacaccacacgcccgtgggtttgctttaacacacgatcaaagaaacagaggtcaatgacaaatcgctaactcagtaaattcttttgaaaacatgttcgcaataatttgctaattattaatttcaaacttcataattatattaacaaagtgctaaattgggagtccatgacagataaacaataattacttttcaattcaaatgaagaaatttttaagtttgttaaaccctaagaaataaattaaaacctattttacggtagccaaaataaataaacccttggtgcactgtacaaaatttggtatagctaactcgattgatatgctttgatttggatttgcatagatcgatctattgctttctgacctcattatttaatatttaatttggttggatcaagtcttcgtcaggttgatgcggtacctatgtatgcactgtttctgtagatttcgtcagggcaattagcatggctgatggatacgaattattgaaagaagtgacatgaaactaactgttggatcaagtattagtcaggttgatattgcacatatgtataccttgtttctgtagattcatcaaggcaattaatatggctgatagatagaaactgtagaaaagaactgacaggaaacttactatatatggttagaccaccaaatcgaagttattacagaggcttctattggatctgattgagattcatcctcttaattgacgcagtagcaacatcgtcatgcacaacgaaaatttttatcatggatcttgccggccggccgtgacgttgttgatgatttcagatcgatgtgagagcgcttgattctatcttctgttgcgatggccggatggcgttaggaagtagatcgatctaaatagtatttcctcctcgtccctctcagtattagtttctgagatgtggtttaactaagggtggcccacgaagttaactaattaaacataaatcagatttttattatttacggtcaggataaaataatctaactaatcaacggttagatctttctggttaacgtgggagctaaaaaaaagtgcccaattagtataggtatagatagatagatagatagatttctaaatacaagcagtggatgattgagaataaattgaaaatatgaggtgctaaatatctgagctcctggttccgaagaagttccttggcagagtatatatttatattcaaattgtctgttgtactcgattattagattacccaaactttagaagcttattgaagctgtcgattcctaccattttcccatcaagtttacacaatattgtcagtactctgatctcctcgtggtttaagtgggctggtcctgtacccatttgcatgactatattggagttgttgggtctacagaggaacctatatgtgtagattttttctatttttctgtccttaagcacatgccttgcaacaccatggttactgatcacggttattatattatattagcgcgctaccctcaaacgcatgacatataattgtaagagttagccaaccaagatatggagggcatatggtactgtttttcatccagagttctcccatttctactgcaattcctaccttaaatttacaagtgtgaattcattgtttgtcgtcatgggtgccttcagaaattgagacagtgagtgcttgaggggtgtagaagtggtgctaggatatactccctcggtcccactcactagggcacggtcaaacttggcaacacaagactcactgatcacggttattacatcgtattagcgcctaccctcaaacgcgttgcctatacatgtaagcgttagccagccaaggcatggagggcatacggtgctgtttttcttccagagtcctcccattcctgctgcaattcctaccttaatttacaagtgtgaattcatcgtgttttgtcatgtactcatgtgtgccttcagaatttgagatggtgagcgcttgaggggtgtagaagtggtgctaggatatatatataatgttataagtattgttaccagatgatgatgtgacatatttacatgtgatttaaaatactctagataataattgctagtgggtaatgatgtggcacatttgcatgttgagtttagtagtttgtggccatcaacttttatagtaagataagataaaattggtcatttaaaaaaaaagattggatttgttgttagaggaggaaacacacttacggtagtggtaagatgggctttaaaacaggcccatgaggttaattaaactttatagtgtatgaccacggtaatacgatctaattaatcaatggtcatatctttctaattaacatgagagcttatacaaaatacccaattaatattgttagatagatagacaaatcgatcaatcacactagccacttagtcgtgtgttgcacgattttgggtgcatatataaaagcctagtatatacaatagtgagattgtgcattaattttttttttacaaaatcaaagaacttgataaaaaatagttagaaaaataaaacatagaaaattatgtttcaactaaaggttcaaatatcatgtccgagatatactgtatgcgatcaagagatgagaacatgtttactcagcaatctgattcataagtctcagaatggtcaaatagaatgcaataaacatcatgtccttatcatttgaaaccaacacgaggtcatttgacctctgagtatcacaagatgataacataataaacattccgaaatgattcttccccctgaaatgcaaaaatatgcaagtgcacttgaagttactgttttggaacagaaaaaatgaatgattaattcttatgagatatgaaagattccatttaatgttcttattatctgaaaatgtatgtagttcaaataaattgtagtctcacatcaagtatgctcattgagttatcatgacaatagaatcacagttgcaagcctacaatcctttatgacatatcccttctttctataaagttaagtcccaaagctgaaaccacagcattccacgtcatcactaattctcagccattcgatcggtggatcagatcgcatatgaaccgttggatgagaaggtcccaggtgagatgttgagtcattggacagctcgcctcctcaacgtgcgcaccagcgcaacatcaggaaactgctggcggcatctcaaacgctcggcatgaatggcatgaatagctttaaacatcttcctccatcatggatactatttatctttttcactacacaatgttaacagtgttaacaatgttagaacaaattgtttacacccaaatttggcacctcggattaaaataggaaagattgccaaaatttggaagtctaccgatttcctccgagtgggccggtctgaccgccgtgtgttggcggtcagaccgccggttgagggccggtcagaccggcggtgtgtggccggtctgactagcaggtccgagtccgactgtgtttcgttgggttttgaggtttccttgctcgagaaggcatgttttgggtttcctttagtttctaccccgagttggatgtggaggagggcctgtagagggcaagaccaacccctatataagggacatggccggttcattgtaaaaaaccaatctacaatcaatcaatcgaatcgtttttcatattgcttttagttttctcttagtttgtccatctttgtcggtttgcgccgtaaaccgtccgccgccgctgcgagagtgcgacacctctttgtaggtttgtcttgaaaaccttccgttttgcccacgagacgggtagttatctagaaatctgctccgctagccggtttagttatcaaaacccatctaggtttagctcattgctaaatcgaggtggttggtgactctaggatcactacaaggcttaagatgctgcgatcgtgcttgtcaacttgtcaaataaattgccaacacgactccgccggtcagaccggatattaccccggcggtaagaccgggtctcaagccgatccaaccgcacatcttgatgccggtcagaccaggccctgggctggtcagaccggcgcaattgttccaatacaggaaatagatctgatgactaatgctagttatttgtatcactttaaaacatttgatcctcctgtatctactgctacaagtagtccctaagttcccccacatgttcctaatgcttataatgatgtttctagggggtatcctcccgatactagacaaggccaatataatcatattgcgccacaaacacaacctattaggccaccgaatccaccgccaaatcaataagggcctaataacatggaggatataattagtgatattattaggaatagattcgggattgaaactaggaatcgtgctagaacttacaaaaagccatatcctgattattatgataatgtgccgtttcctcgaaattatagagttcccgaatttgccaagtttagtggtgaggatggtaagaccacatgggagcatgtaggtcaatttttggcacaatgtggtgaggctaatagtgatacttttaaattgcgcttgttttctctatctttatccggtaatgctttcacatggtttacttctttaccggcaaattctattcatacttgggctcaattagaagaacaatttcatgattatttctatactggagaaactgagcttaggttatgtgatttgacatcggttaagcaaaagtataatgaatctgtcattgattatattgagagatttagagatgttagaaaccgatgttatactttgaatataactgatagagatttgactggtcttgcttttaatggttagttgctcctcttagagaaagactagatggccaacaattttttgatgttagtcaactcatgcaaagggctttggctcaagaaagtcgggttaaggataatagaaaacttgctagaccatttgacaaaaagcctaatgttaatgtggttgattaccctgaggctagtgatagtgaggaagagggtgatcatgatatttatgttgctgaatggtcatggactaacaaaaataagccttttgtttgctctaacctaatgccgattcctcgcaaagatcggcaaattgaggttaagtatagttttatgtggccaagtgtgatatgatttttgattatcttttgcaagagaaacaaattagattacctaaaggccatgtcaaaccttctcaagaagagttgaaacgacgagcatattgtaaatggcatgattctcattctcactatactaatgattgcaatgtgtttcgatgacaggttcaatcggccatagatgaaggacaattgaagttcaccgatggctccaagatgaagcttgatcatgatccttttccggtgaatacaattaatttcaatgataagaaggtgttgattcggtcggagcaagccagatctactaagggaaaggaagtggtcattggtgaaccaaggtccaagatgatagtaccaaagaagccagaagttgccgtttggaaggagaataggagtggagcttcaacatcaaaagcccctaggaagaccaaggtgacttttgatatgcttttggagaaatatgagaagcaaggtggtgagaaaattcgcaacaaagggaaaagaccaagatcacctcctagggagcgatttggtcattcaccaagtcggtcgcattcaccttcatatcattatccacaagacatgtcatggggttcctatccaatgccgccgccggattatccttatccttgcttcatgccatggggggcgacgacgccaatgttcaatcgtatgcctccaatgcaattcaaccaagggtggggaggaccacggaggccaattcatgagcgtttgtctttactaaacaatagccgattttatggtaagaatagggctaatgaagaaaagagggaaggaaagcgcgtcaaagtggaggagaggacttcggaagtgataactattaaagtggggtctcatgatgtgccaatacctactggagatggagttgaagtgtccccgaacagaaaatctgaagctggtaccagctcctcgtagtcggccggtctgaccgtggtcatgcggccggtctgaccgggccatcaggcctgtctgaccgccgacccgatagcggtccgaccaacacctcaggccggtctgaccgtgcgccaaatgttggtctgaccggcgcatctggccggtttgaccggtggtctacgaccggtctgaccggactctagcgccggtttgacaggagggttgcgaaaggagatgagagggcttcatcgtctttaaacaaggttaatagaggacattatctacctcccggaacagagccgaatcctaggtggatgcctaaggatttgatggctactcaaaagaggaggttgcaacgtcttcgggcccaagagttaagagagaaaaaggccgaagagcaaagggataaaaggttcaatgagttgcgacccccaccggtatggaggcctaaatccatagagaaggcaaaactgattggtgtagaggaaaaggaagaacaatcagttgataaaagtgaatcatctccaaaagaagacatgaatattaacatggtatgtatgttgcctatggagttttgtgctatggatgaagccgaggttgctcagttcttattaagtcctaaagacgcagtttttgagaaacccgatgagtcaaaccgtcacattaagcctctctatctcaaaggctatgttgatgggaagtcggtctctaggatgctagtggatgcaggaaccgccgttaacttgatgccgtattcgttat

SEQ ID NO: 8021 - DNA, 5547 bp, Oryza sativa
gggtagttttattttcacctaatggcatgtgttatgaggcattggttcatttggagtattattgtacaaataatcaagccgaatacaatgctttattgttcggcttacaagttatggagatggttggagctaagtacgtggaaacttttggtgattcggaattggtggtgcaacaagtcgccggagtctacaaatgcttggacggatcactaaataggtacctcgactcatgtttggatattattgccaatttcgataattttgctattagacatattgctaggcatgataattctagagcaaatgacttggcacaacaagcatctggttataatgtgaagaagggattatttctgatattagaagagccggtgtttgattttaaatcttcgtgcgaaattggcaaaactggacaccagtggcggtctgaccggcattgcacggcaggtctaaccggtgaccagaggcggtccgaccggccgcatgccgccggtctgaccggcgacccagagcggtctgaccggcctggtgtggccggtctgaccggttctgggcagagcgctagggggcacgtttcgatcaatttggaggccgaattaattgtgaattcggacatttgtgcccaggaagcagaaaaggattggacaattcctttgattcgatatttgaaagatcccacagttaaggttgatcgaaaaattcggcggcaagcattcaaatacacattgcttgatgaggatttatatcgccgaaatatagatggtgtcttgttgaagtgcttagatgaagatcaatctaaagtggctatgggagaggtacatgaaggaatttgtggaactcatcaatcagcccacaagatgaattggttgcttataagagcggggttctattggccgaagatgattgatgattgcttcaaatattatagaggatgcgagtcttgtcaacggttcggcaatgttcaattggcgcccgccgccgtgttacggttcggcaatgttcaattggtgcccgccgccgtgttgaaccccataattaaaccatggccgttccgatggtgggctttggatttcattggtcaaatttatccttcgtcatcaaaggggcataggttcgtgctagttgctacggattacttcaccaagtgggccgaagccgtgcctttgaagaatatgactcatacggaggtaattgactttattttgaagcatattatccatagattcggtattccacaaacattaactacggatcaaggtgcttcttttatgtctaaagaagtgaagaattttgccgaatcttatggtattaaattgttgagttcttctccttactacgctcaggctaatggcaagctgagtcgagtaataaaacattgttgaagttggtaaagaagaagattgaggaatacccaaagagatggcatgaggtgctttctgaagcattgtgggcgcataggatatctaaacatggtgccactaaagtcactccttttgagttggtttatggtcaagaagccgttttaccggtggaggtaaatcttggttctcttcgttatatcaagcaagatgatttgtcaagtgaagattacaagacgttgatgggagacaaccttgatgaagtcatcgacaagcgcttgaaggcattggaagagatagagaaagagaagaagagggtggccaaggcgtacaacaagagggtgaaagcaaagttgtttcaagttggagacttggtttggaagacaattttgcctttgggtactcgatccaaggagttcggtaagtggtctcctagttgggagggtccttatcgagtgtgcggcattgttcgagggaacgcatactttttggagacacttcaaggggagcattttcagcgagcaatcaacgggaaatacttgaagaaatacttcccgagcgtttggcaagacgcttaggaggtactatggccggtaattggattatcgtcctaagaccaaaaacatgttctatgcttttagattcacgttgttcatcaaaaaggcaggggggcatgtgtttataccaaaatttggcacctaggattaaaataggaaagattgccaaaatttggaagtctaccgatttcctccgagtgggccggtctgaccgccgtgtgttgggcggtcagaccgccggttgagggccggtcagaccggcggtgtgtggccagtctgaccggcaggtccaagtccgactgtgtttcatcgggtttcgaggtttccttgctcgggaaggcatgtttcgggtttcctttagtttctaccccgagttggatgtggaggagggcctgtagagggcaagaccaacccctatataagggacatggccggttgatggtaaaaaccaatctacaatcaatcaatcgaatcgttttttatattgcttttagttttctcttagtttttccatcttggtcggtttgcaccgtaaaccgtccgccgccgctacgagagtgcgacacctctttgtaggtttgtgctgaaaaccttcagttttgcccacgagacggatagttatctagaaatcggctccgctagccggtttagttatcaaaacccatctaggtttagctctttgctaaatcgaggtggttggcgactctaggatcaccgcaaggcttaaggtgctgcgatcgtgcttgtcaacttgtcaaaaaagttgccaacacaaattaggccattttctccatttcttctatctgcacaatgctagctctcagttgattctatcgcgtccatggccggtgcttccccttggcctaactacatggatgatcttctcggtgaactcccttagcaactttgcagaaacatacatactacgtatgtcttactggctcttatgttgatttctgattttattttcaggccaatcttacatttttttttcccgatctgttgtcttgctgaccttttctgattggacattccgcgggatcactatcatttccttgctactgtatttgtctgttttccttgctactgcctactggaactctctgcaggtaaatatggtcaaattgtgaggagatatcgtacattcgactaattctgaactttcaacatgtgattctttcttttgcagctctaagcggctacacacattaattaaaggcctaagttaactgaaactgaaacaagatgtgtagtacatctatgtctttatgcaagttcaagtggttcataggcaagaaattaaccaatcaatatcacaggtaccttctaatcatagagttcagttttacagtttatgaagacattaggtttacatgtgattcctttgttcaggatcgcaagttcgacccatttctgtagtttttacacagcaaaagttacattatgtgctatttctgtacctcactaataaaagtataatactttacaccattatattggaagaatatgatcaaattacaattaatgataaattattctgcatccagttgtcaatggttcttttcgcatttggttatccatatttacagcttgtgcttcctcatcataaattcataatttagaaaataatagcacataattgcaatttctgcagcgaaaaaccagatctgaacatatccttagctttatattgtgatatttaacaaaatttatagctgcttttgttccatttaagttgtattaatcagcagtacagtagtggtgtgttgcgcctaataagaaatggtagcggtatgttagtagactacagtagtaatttttttaagaacattctcattcaaaattttggccaactgctgacatttcccatgccatcacatattctcagcaaattcattgctttttatcaagttactcacactaatatttcacattttgtgaagtagagtacttaatttgctatgcccgcagcaacgcgcggggttttacctagtatctacagtgaagatggcatagaacataggatgcacataaaacttgtgcacaaaattgactcaaactgccacaaatttgtggatgcctaaggaaagaatgctacactgcaaaaaaaaaaatgatggataggctccatgtatagaatgttatatacatctaatagatagtaaggaatatacagttatttgactgtcatgtatagacatacagttgacttaatagaatacttattcttatggtttttgtgctttagaaataaaggcaaatcaggttaatcattcagattaaatgacaaaaaagtaaataaaactgatgaatagttatccaaacagatatatgtatttgtatctctaaaaggaaaatgttttcaattcaacatgccttgatactaagttgctacttaccctagaaaagttaattagtgtgtaatgacaataagttgacctcacgaaactgtgaataagggctttataacctgcataatagcattggatttccactaagatgcatgtctccattgacagcctgagttataaacaaattgacagttttactcactgtgatacataaccttgtttttttttaaaaaaaaatattttcttataagaatatatatcatcctgcccagtgcccatatccactaaactgcaggaacactcaacgtctcaacatggctttgttaatacatgcagtccgagatatctaagaagtgtaatcagctaggagtactaccttggcacttgacttcccaagtgcaaacaattgctagcagtgtgctaacgctgtagattgccctcaaaagatcgatacactggtggagaagtagtttttactcccggttcgtaactccactttagccccagtttttcaaccgggactacgaatccgggactaaagatcgctatctttagtcccgggtgaaataaccgggagtaaaaatctatcttaccaaccgagactaaagatagagcatctttagtccttaccaaccgggactaaagatagagccaggctgatccctggctgctcctttattatattcttttcttcattgtttttaatatattgatttcactccatccccatccccaaaatcccaaatcaattatcacctccaaatcctcaaatcgatcatctccaaatacatcacaaaatcttaaaaaaaattacatcacaacatctacaaaattcatcacaaataaatcacatattcaatatcacaaatacatctcggatccggaccacaaattctaaaaaaaaaaggaaaacaagccgccatcttccgcttgccgcctagccaccgccttccgccttccgccagccagcgccgcgcgccggccgccgcgcgaggccggtgccgcgcctgcagatcggggatgagtaggggggggaggaggagcctcgcgcggcgccgctgcctgcagatcggggaggagggggggagggggaggtgaaggagaggagggggaggaggagaggatgctccgcgtgtaagatagcgaggagaagagggtatcggaggagaggaggaggagaagaagagatagaaccgggagggaggaggggaggaggagatatgtatctcgatcccgcacgcctcgatctctccgcacatgccgatcttttttcccggttgg

SEQ ID NO: 8022 - DNA, 8360 bp, Oryza sativa
gcgtgcgagcgacatatgcacccacacgtgaaaatcggattttcgcgtgtggttgcgccacccacatgcaaaaatagcgattttcgcagacgaagtgctgcagacgggccaaatctccgcacgagaaaatccaaatcgaccgcatggaaaaacgatgtgtgtagtagtgggccttgggccttgtaataggctagacccatctcggaagtgtctccctccatctccacgaattaccaccaaaccctagatctattttcctttatagatatctatgtacaccctctagaatgtttgggttttgtttagttgaattttttcaagtgtcattcaccttgtctctagttctcgcttgattagtcagcgactatagatttagagcccccaacagttggtgtgttgatttgccgggtcaattaaatctaccactttaatcgcaactattcttttgtgcttaatcacctggacttgttttggttggtagccacatcgcaaacgtcgcactcgattaaagcgagaattatcccctcaccagaatatcgggccatgagagagagcgtcatcagttaaagctgctactttaccactacgacaaaaagggctattggtgccggatttcccgaccggacacactggaggggcactgatctggagaatcaatgatgtttttggactgaaaaaaatggtcggcttgaatgcatcgagccgatgcttcaagccgacaactgattccataagtgatgagacatgaacatgaggaacacacgtgaacataagaacatgacttgatcattggtgcctcttccagcgtcgtcccgaccgatgtcgcccgtaaaacctccgctgcctccacaccatctgggccaccatctccacaccgtcctcgctgccagatctggtggaggggaggtccagcctgccgcctccacaccgtccaccactaccgcagctcccatcctactggatctggctgatgggagggcgccgacacccctcccgccagctggaccgccgccacacatagtgagagagagagagaggagaagtaggatggagaaagagatggatccagatctagagaagtggagagagatgatgcctcgcccagtcacaaatatctcctccggctcggctcgatgtaatagataccggtttttaaaaaaagccgacacttatattattggtgtcggtttttctgtaaaacgacacccatcttcgtttaaaggtgtcagttttttctatcctttgaaggtgggaaaagaactattagtaccgacttgtatgtgcattttttatagtgtacacaacacaagccggaaaatatgttgactgccaaagacatggtatatcttgtctggcgacggcagcttcacggtcaccatatattcccgctgtatttgtataaactagtgaggggtgttgttagaatggtttgcgtaaaccatcatcaagcaccgctattaaaattaatgacatcgatgcatttcgttcaagtttatgcatcacacattaatgcttaatgcggtgcgaggggctaaagcctagcaagtgtcggatgtgaacacatggtggcatttgcatacttgaccacatctttgaataggcgtataaatatatgtgttcactttcttattagtgacactgcattttctaatcatatcagctttgatgttggatttatatttcatcattttcatgaacaccttttcttttcatgcttagctagagacttcctaggtcctttttgtttaggcttaattataggacaacttataaaccgaaaagtcaaagcctaaacgaacaagcggcattttcgttttgcttttttgaaaccatatataagccactctaacactattatataagccaaaaactaggttagagaatcttttttggcttatatgaggtagatgtatgactccacccattaaacttaggatattaaattcagcggcttataaatcatataagccaataagctaagtctaagacaataaatctaagcatagataaagaaggtatccataatcattgtgccccacggcaacgtgttggtaccacactagtttgttctccactgctcttatggcccaggatctgcttccacgaggaagaggtctattccacgattaaatattatgtttcttgtggtatggacatgatttcatcatttgaaactccagtttaacttccaatactgtatatctgtcgaaaagaatagaacttgttttatgaagactaaataagacattgcagccgagaaagctgaggtagcggatgccattgcagcacgccagcacccacacagggacattacgagatctacatatccccaaagatcaagcaaatggaagagcatctcgcactaaagaaatcaattctttgcgttgaagtcagtcggttgaggttctggtgtggcaagctttgacaatcggaaagttcgccgttttgtcaatcggacgcggcatgtaagaatgttcatggtctcgttttgccggtggtgaagacgttgactttggagagccaatcacccaatccatgcatccaatcaggtcgatcatatcagtggttgggaactgaacttgcttccaaagcaaacttaacacgtggatatggtatttatatactctgatcctccttgctcttcatcactacaacccacttcatcggaaagctagctaattaagcacctagcctaggaggaagatcgaccatgaggggcggcaggatgaggctggtcggggcggcgatgctggcgctgctctacatggtcgcgtcctttcaaggtgcctctggggccgccgccggcggctctccctccagcggtggggggaggagctccggcggaagtagttccagtggctcgagctctggcggtagcagcacaagaagccctgtaggatctgcgagcccaagtagtggaaggaacccagcaacaactgggagccccgggggtgtaaggagccctgcaaccgcaagagctgggagccccgggggtggaaccggaaccacccttgcaggagcagggagccccggcggcggaaggagccctgtaggaggtggaacgatccctgcaggggcagggaatcaaggcagcgggtcatggagcggtgactatggaagtagaagctcggatggcgggggaaggatgttatgtagaccatataatattgagcacattgccattttcttcatgcttgtcttagctgcattttagctaattcttttccttattttcaacatgcctatgtatatatccaatgaggggaaacagtgaggagtcacaaggggtctgtcacctcccccagtcccagtaaaactacactacatttatgttacggtagcttttatgaaattttaaaagatttgtattatttgattccctccatcaaataaaagatcactgactaaagtttatgacagggcaagttccctggtaattaaattaaaatcgcattctgcagttttgtcggtcacttgttatatgcagttttaggggcttaataaatggagaagaaagatgacaaaactgctgcagcagttcgcagagcaaagcctcgtcgctccctctctgtttgtttcttcctgattttctgtttacgatgtatagctttcagttttgtctgaaaatccataatgttcattgtgtcctactgcatccgagtgagcgctacagacaagtcctgacgaaagggcggtggcacggagtggcgatgacatcagagatgagagcgaaggtgatggcagacgcaaaatcttgtattgcattgctaatcgaagtacgtacctcgaaagagcgtatgtgcccgagatcaatgagtaatcaaggtttaaataggaagatttggggatgctatgtcaggtaattgaaataccatgcagtatgttgacctttttttagtcaacacaatatcacctaacggtttacggtgtaaataatagagtcgccgaaatcgattgatcaaaaccggctagcggaaccgatttcgagattgattcactttcgcggaatcaagcgactaatttacaagcaaattagcaaagaagataaatgcgtacttacgtgacgatgaacgactagtttccgagcaaactagcaaaggataacctccttgctttcgtggagaagcacgaccgtttttcagcgcaaaatggcaaagattaactaaattctagggttgctaaaactcagccataaaaataaaatagaaaagaactgaaaagtgaaaagtaaaaagagatgatagtagattgaaattgttcgggggctcctcgccgacgtcagggctgtagatttatagacgctgcacactgcatccaaagtctcctttatatttcgtgggcccatccttcctttctttccatcctaagtcggtactgcattcaagcaatcagcttgattatatttccataatctttgccaggtatcggtccgtctgattcatcgttgtagtttcatccgtatcatgtgcacgcatgccatcgttgctatcctccatctgcatcctctagtgccagtcctgagtcctgacaagcctaaacagctgcacgtacatgatcaatatacatatcaccaaaccggcatgatcaattgctgcaaccacccatcaatttcacacactaatttaaccggttctttagcaaaccattctatgaatcatgaaagctaaactaaataatctggcccaccaaatgaattatctactagccaaattatggcataaacacatgccccctgtacatgtaacttttattttaccgagaacactattaaattaaccaactcaaaccacaatcatactctcagaacgatactccacacacgatatcggtcctgagcccatccacagttatcctctcaaaacgatactcaaataagtattcgttttaagaccatccacagtcgtccactcaaagcgatactaaaataagtattcgttgtaagataatcaagctttctaccatgcaaaatgataatacattttaaaatatttcccatttagtactaaactttagtattaattcggttgtccctaatgtccacctaaccgaattagctgtaattcttgggtccaaaataatttaaaaacaacccatctaaacttcgacacattttaaaagcaatcttataaaccgattgcagggccgattccaggcctcccattgggccacgtggcaccgcgcccctagctccatccgggttctcggctggagaagtgagccacgtattcgtacccttcccacagccatccgatgatatatcgacggtgacaaaggtccagcggatctcaatgtaaattggatgttttgagagggtttttttcttaacaaaatgtgtgatttcatcaagaatagaacagtgagtagaggaaaaaatctcagaagaaaaaaatccaagaaaaaaaaatccggcaagaacagtagattccccctcctaatcaccatgcagtgttgtggaagacggtatacggatatcagacggagagggtaccgctaaacgattaatcggaatgcggacgattaatcggaatttggcggaaatataatgttttgaaaatatatgtacatagttgataatagttttccctttttgataaacaaatgcatataacttaatatattccttctatatatccttaaatagaataaccatatatgatatttaaataagttcataatggatagctgttactgtatatctcaattctgacgtagtgatgggttttgttcataatgcatgaaatgaattatcaagagaatgtagtacatagcataaatgaccgtaatcaaggtcccaaataacatatgtatcggcttcatcaaatacaaactccaataacctgatcatcatcaaaatcaaggaactcatgttcaaactttagaggaagtcagttccttatcattttacatcttgctgccttgtgagaatttcggaagagcaaacttctagtcaatagtagtaaagggcacagctaatgagctggattgtggaatcgacctttgtcatcacgccgattatacggctgattagacggagatggacgatttaatcggtaatgatcggatttatgcgttcgttaccgactaatgatgaccgcatcggcgtgacgtgacggactgatctccgtatccgtattatcggacgtattaacggccgttaacaccgttttccacaacactgtcaccatgccgtcgccgagtgtggagaagccgagaaggagatgagaaagcacggtgggattcttggccgctggattgggcgaccaccacccccgccatcctcgcattccaccaacttgattggagaaaaaaaagggctgagccgttgaggagaaagaaaggaagggaggggatacaacgccggaccaccgagcaccgctgcttgatcctccaccaccgccatttctggtttcagctgttagcactggctaagcaagccacaggggagagggagcagcagccatgggccatggcgatttctgatggcgagcgaaggaaccgagagaaaaacaaaaggagagcaagcggagaaagagagagagagagagatcggcttgctgccttgcatcgagcgccacgctgagataaaaaaagcggtttggctcggtggaaaaagaagatcatggggacaaccgaaggagtagatttttgtatatttgttgccagaagcccctgtccaattttttgtatttaaatccttcagaatgatccaactgaaggagtaaccagatatccatcattaatttgtagactggttactggtttttcatttaagggggtatttagatctatatgtgtaaaatttggacgtgtcacatcggatatacgaacacacatttgaagtattaaacgtggactaatgacaaaacaaattacatattccacatgtaaactgcgagacgaatttattatgcctaattaatccatcattagtaaatatttactgtagcaccatattgtctaatcatatagcaattaggttttaaaaattcgtctcgcgatttacatgtaatctgtgtaattagttattttttagttatatttaatactttatatatgtgtccaaacatccgatatgacggggtaaaaaattttatcaggggatctaaataggcccttagggtctagagatgtactactgctatgttagaagtgtgtggtcaattagggtctagagatcgattaggtatatctgcagctcgaatggctaatctcaggtgcatactgtactagtataactaaagtatcatccactatttattttacttaatacttaaaataaaatgttgcttaatcgattactccatctgtcctataatatattagcctaatactaaataagacattttatagtatataatgaatctgtcgtttactcttcaacttattggtcacaaacaaaattttaatttcaaaacctaattttatagttgaatttattttttttctttgtaatttattttccaatgttggcttttaagtcacaaagaacaatcataaaaaaaattacccttttttccgaagagcacatacataaaagtattatctataaattatttttaagctaataagcgtcattgcttaaaatcagttatcggcaaaacaatgtgactattaattatgttgaatgaaataatataataatactccacatgtttcatgttatatactgttttgacttttttcttaatcaaactttcataagtttaatcaagttaataaaaagtattgcaactactatcgaaatatattcaatgttatatttaatgaaactaattagatgttgtaaatattgctaaattttattataaacttgatcaaacctaaaaaaaagttttattaggaaaaaagtaaaaacgaatatgaaatagagggagtatattactacgaagtactgtacatcgatccatccctaatcctttttgcaaaatgttatgaaaatagatgcacaacggagacacgaatttttacgtggaaaacccttgcgggaaaaaaaacatggacgccgaccggcaatggtcactatagaggagatgattacaaacgtagggaaataacaatgggaacatcaccccttcccgtatggcttacgagagtatatataggggataatagaaagacacctaataggaactcctactagaaaactatctgaatatattgtgggcccaaaattcggatcacatatttaacaatctccaccttgagacgaatttcctcttgtagcataaaaacatcaatcaccaaaaatacctcatataggtaaaatcaccatgcgccaaatagtttataggactatactatactgtaatacccaccaagcttgagcaaagctcaaacttagtagtgggaactggctttgt

SEQ ID NO: 8023 - DNA, 25103 bp, Oryza sativa
acatgtaaagagtgtaacgacaatcaatgctgacacctattaacaattgttatctacccaattagaatatgtcttaattatattcatctcatgactctgactatctttgatcaccttgagtagtagaaaaaattaattgtactacgggtttaggatgggcgaaactaatggattatttgatttttatgatatctatttgagggtataaatgaatgaattaacttctacaaatttgaaatgttgttctggaaaaagcgctttaagaaaaaaaaatagaattgttttcctgaaacacatcatttaggaacatgggaaacatgcaaatgaaaatacaaaatctagatcgaaaggaaaaacagggagtaagactcaacccttagttttagcttacatagagttgcatgttgcaaaaacttaacccactggacttcattattttccttctgcaatagtcgttcaatttgttttcactttattaacaaaacaatcattatccattgatgatttgatgtgtcctcaccttggcaaactggtacggtgtggtgatcatgatcaccttagttgcctcaatctggtgctccgcattgtcgtggcgcacgcatgcatgtgttgtgcagaggaacggagtgatgtttttagaggctttattgtgtttagaaaaatagttctgatggtttattatctatcagtttaaatgaaaatcgatagccaaatattttagcaacaatatagtctcaaatattgggtccagttgttggtttaggtataaattagtcgatatagattataaattgttaatttaataggtataaaatataatggtgtaaaattcaaacaattttttatttgaaaaaaattagtccaccagtttaagtaaaaaaatttatcttatattattaatttaatgggttaaaagtatattttttaaaactttacatttaaacattgtagagctaatttttagttatatttatttgtaaagagttaatttatgatgatatatatagtctatgtttgtaaaattataattatttcaaatttattatcactaatataactgttttctcacatgtacatggagaaaggtggaaaggagagagaagcagatgtatttttttaattgatgtatataatttttgtttttatgttttttgtctttaatcttcttttattgatagtgcgttacttacgtactttgtattttgggttttttttttacgatcagtactttcgtgaacaggagattataagatggtagttttttaaatagatctaatctaacggtaaataacggatcaccgatttaagtgaaaaatcgaggattaggtgttttgcctttctcttagaatttgtaggaatttctttaatttattaagtgccacatgacggtttaaaagcatttgtataaaatttaataaacttttagtatgtaatagacaatagatagataaatagataattgaaatatagaatgttaaagagtgttgattggatatcttatatacgatctagtttaaccgcatatatttatagagcgatatattttatttttaaatagtaggaaatcctactttaaagcccatcagattttttaatgacactacgtacgtattttttttctttattttatcgcttttatacttagttttttcttctcatccggtgaagagtagataattaagcttcatcgtttttatttccgatgtacgtacgtactgaatactttcctttttcttttccgtcccacatgcggaaactattactttttaaaataatacatctaatcgaatggtctataatattgggtccaccaattttaatgaaaattaacggtgagattaaatagtgccacgtggcgatataggagtgtttgtaggagcgccacatggcggcttaagagtgtttgtaggaaatctaatagacttttagtatataatagatagatagatagatagattgatagatctctgtaccgaatctcctaaacctattgacaactcctggaccacaaatacgccgccatcactatatattggatcggcctcatcagcaaagcaatcctctgcctcttttgtacctaccatggccgaaccatcacgttgctccaactttgtgcacagttttattcatgagacaacctatgagaccaccctctcgctatacgccattgctaccggagacatgcatatatactagtggtcagccctgtcacgtgtggatccaaacaatgatgtttacacagtactaccaaaacacacgcatgcaccatgtcaatacattactactaccatgcagttcggcacaaacacaaacgatagacggcgccgaattgatcccctacagactagaagtactccaaatcaccatttgacagcatcggcttctgtattatcataacctttcacctattaacctaataaccagatgtctgttgttccaaataattaacatgccttaaagtttctagcaatttaactaaacctaaacattggtccaaatgactgtttaacaatccatcaaaacactaaaacttcccattaatttattggactattaaaaataaatcaccaaaggctacatccctcacacccatatagaccaaactctacaaaccgaatataaaggcttatacttggcctaaaagtgcaaggatactttaaacagactgaaagggaccgatgtgtcataagcaatattaagcacctagcccaggaggaagatcgaccatgaggggcagcaggatgagcctggtcggggcagcgatgctggcgcagctctacgtggtcgcctcctttcaaggcgcctctggggctaccagcgatggccctccctccagcagtggggcgaggactcccacctccggtgggagccctggtggtagtggtacaaggagctcagcagcatctacaagctctgcaagagccggaagcacccctgcaggagtgcgggggagccccgcgggagctggtggtagccccggcggtggaagcggaagcacccctgtaggaggagggaggagctttgcgggaggtgggagtgccgacgacggcgacgatggaactgggatctcaagcagtgggggaaggatgttaagtagatcgtatgatgttgagcactttttcatttacttcatgcttgttgttttagctgcattttagcaaaaaaaaaattcttattctcaacatgcatatgtatccagtgcgcggaaacagtgaggggccatcaacggtcactcgcattcccaagttcctgtaaaaataaaccatcactacttaaaaaaccctcatagcgactggctcagaggtgtcagtttatttacaactggcacctattaaccttttcctatctattgtgggataaaaaatagagaaccgaatcctttgaacaacgataggtgtcggttctaaagaaaaaccgacatatagactattggtgcccttttactacacattgtctacatcaagatgaactctggtgtcccccgtgctctccttcgcacacttgcccattcttgttggcagtgtcaaatatcgaacccagatagtttacaccacagaagtgagaatttatcctcggctatacctctacatgggttagctgctgctccttccgatggacaataggacaataacattggagatcacaagttgtagatagtactttctgcttgaactgctcatccagcctccattagtggatttgtgttggatttgatacagagtacctagctaggtgtttcgtttacttcctatacgcctcccattcttatcacaatcacatctgatatacgagttggagctgatcatagttgtagcgagatcgatgatcgagaatgatttagaactttgaggtgccgaatgttgggtcctaatgaagtgccattcatagagtatataataaatgtagtattgttacactcacacgtacaagctagtgtgtctaagagctttgctgcacaggttcggtttccccttccctcctcatcttcccttctcatcttctttctctccctcactctctctctccccttcatcttccttctctccctcctcactctctccctcacagatcgggccgtggccccctcccgagcgccggccgctgatgcctccccgcctcccgaccgttggcagccgccgcctccccgcccaccaccggatctggcctacgacgcacagattcggccaccgcggcctctcccccgaccgtcagccgcttccttctccagcaccacatcaccaaccgccggatccggccaccgcagcctctcccccgaccgtcggccacttcctcctccgccaccccaccgccaaccacggatccggccaccgtgacttctccctcgaccgtcggccgcttcttcctgcgctacagcaccgccaaccgccggatccggccaccacgacctctcctcccaccgtcggccgcttcctcctctgccactgcactgccaaccgccagatcctgccttgacaagtttcctacaccaccgcaccgccgccagatggagttatcctttctgatttgtgcccagatgaatatgattgtgatgatttttctgattctgttttgtgcccaaatgattgtgaatgtggagtgattttgttctttggctagatcaatgtgattgcgatgatttttgtgattctgtcttgtatcgaaatgactgtgaatgtgattatttttgtgatttgtgatgcctaatggtctgcgactagctaggcttataatattatatttttttgccccattttcctaccagaggaggcgccgctccagcttcgccctcggaggccgaaggctctgctccctcttcgtctatcatctccccctcgctgctgcgttcctttcgcttggcaactctctccttgacaattttctttgatggcatcaatggtttcgctcactctcagtggtttcgctcggaggtccccacgatcagtgctagttgttgtcgaatgcacaactgcgttacgtcgaaaggcgtggttctctcgacagtagttggaagtaaagacaattgtattgcttagtaacaattttttggatccccctatttcatggccttagggggctatttatagccctattactggtccccctttagggtttaggttttacaggggaatttacatggctacccttatgatagggacattatcgggggcacacagtatcctttacttgtatgggcccttattgggctaaatggctcggctcatttacttggcgaagtccttcgaaagcgcaacggcccgctaggcctccttacggcggagatcggtacttggcgaagcccatgccttcgtgccaaggctttcacctcaccatcttcgcccgtgcggccttctgacgaggccttttgcctgcccaagtctgtgtgttccgagccactgctttctccatgtggctttcgcccatatggttccctttttgtccttcgccgcttgcttccggtctgagcgtgtcacctatgttcttggtttcggtaggtccaaccgaagacccttcgtagtgtacctccaacaataagactgcaattttatatttaaaaaaaagaaatatatatttacttataccaaaattacagtgcacttacatgtcatatcaactaaaattacaaatgtaatttttgttatataggactataattttatatttttaaagaaaataacaaatacatatttacttacacattatttttattgcatttacatatcatatcaactaaatttacaaatgtaatttttagttatataggattgtaatattatatttcatgacaacgagagggatggtgttgctagccgaacagcgttggccgtagtgccggcggccagctcgctggtcggaggccaccttcatcatggtgcacgcgtgggctagctgacacaggccgtcagctgctgctcacatcgcaagtggtgcatagcggccaaaaaaaaaagtcaaatgccacagaaaaaatcacacgggagatggatagcaaaatctgttgacaaaaatgtgtctacatttggtttattgccaaactttaataaatacattagaaatcctgccaaaattaataatgtcaaaatttaataaggcttattttggctacaatttgaaccgttcccgttctgctcgatcggcagccacagtccgactttgccgtcgacgaaccatccagccgcacattcacgcacaaccctcccgttgctgaccctgccgcgcaccatccggcgctgcttccttcctgctgtgcaaccctttctgccggtacggtaccaccgtctgccgtgatgccatctcgctgctgggctcgtctcccgcgcgggccgccggttgtgacagtttccagcttgagcacgtcagtctccggcaccatcgtcgcacgacacggccgggcagacgttccactagctcaagctaacataggttggtaaaatggcataggtgttttgctcatgttgacgatgcgaatttctgaagatccatgagttgatttctagtatgtcttctatcaaaagcgctcagtctggatctttgttgaaccctttttcactcgtgtaaaaaaaagtacagttaactttgcatagctcaagctagtcttttttttcctgctctgttaaaatcaatcaaagagcaattgatggcaattgacgctgtagcagatgcaccggatcctgatcacctggcgggcggagtcagtcgcaaatctggacatggtagccgtcgcttgccctgatctgccgctagctgtgaccccagcctgggccctgtcccgtccgtgactgcgctgccgcctccaccgcagcgcgccgtctccgatgactgccgagcccgcggctccaacctacttaaaaaaacgattttttttaagcaatgttggccttttattttttcaagacggtactcctgggtagagtggtgggttttttttgctgagatgattttcgtaggacccgcccacaaaaatcatccattttcgtaggagacagagtagcggcggtccttccctccgtctaaaaaactgatttgggccgcctgatcactacttgattcacaaaccacaccggacaccgccctatagcctcaacactccacgactcatgtccaaattacaacattacccctccactccattactttaatagacgattatacctttctatttttctattgctgtaattaaggtggtactgttaatatatctgacccctttagatttgaaaaaatcaacgattaagaagaattctactactaccagcagagagtaccgtagcgagactctttacattataagtaggaactgtaatgtgtataggaatgggatgattcagcaattagaatagcagtgcagtctgggacaaacatgtcagcaattaaaatagcattgaagagtacattgaacttaggttttttctcttattccctatggttttgtttagctttatttcggctttatatctactaggactgaggcagattgaatctatgcattgacgatcgttttattattgactagtggtagttttgtacatttctatcctgctggtgtgacaataagaaaatatggttgctcaaaattaactgccaataaaaaaattgaaaatggtaaacataaaaatataatagaaaaagtagtgtggcacattatgctttcatcttgattttctataatcaccaactaatttaattgaatggttgagggttttgtttgtcaaagaattgcaacactttttacgtatgacatcgttcaattttttttccgatatgtatactatgaatttctcaagtattatatagagattatagagattatatagagattatagacaaatagaagctggcctaaaaacccatgaattgcgggagctgaagatggtggttgcggcgcgggtgccgaagccaatgatgccacaccagcttcgacgacgggggccaaaggcactaccccctcttcggcggccatctcccctcctgcttcactctcctttcgcttagcaaccttctccttcgcgaccctcttcggtgacattcgctctccgtggtttcgctcagaggtccccacagtcggcgccagctgttgtcgaagcgacaactgcgcacgtcaaaggacgtggttactcaacagtgttggaaacagtgaatatactaattgattaaaatttttcttggaatccccctttacatggcctaggaggctatttattatcctattacaggttccctcattagggtttaggttttacagaggaatttacatggtggcccttatgaaagggacgtttatgtgggtacacagtgtaatttggatacatgggccttctatgggccggctggcgaacgttagcttattggcgggtaggcctaagaggccgggatggcccattgagcttccttggtgtcaaacttgtcaaggcgaagtctccttccttcggcccatatccttcgccatgcaccggatggcctattggacctcctcggtattgagcttgtcaaggcgaagtctacacccttcgcctcatatgactggtcctacgaggtacccacgcggctttctggccttcgtcgtctttgttccacagccttcgccatggaggcttcgctcaggtacactagacgtctttggcttgaatccttacaggtagcatggtttcagcaaatatggttaccggcagcgcgaccttgagtaaatgtccaacagaaatatggtaagcattgacagcttgaggtcaattattgagtacacgaattctacatatatatatgctctgccatgtaatttctattgccctcaaatttttttcaccacctcaaattcccaattcatccaccaccagcactacaacatgtgacaggtgcccacttgcattttagaaatgatcgtaataagcatgggatgctataggaaggaaaaatcaacgactaggttattttcaatctaaagactgataagtagatcgagcagatagatgtagtattagcttccacgtgtcacctcctctactcttgaactatatatgagatcgttggcggtaactagatagagcttgcttacgactttgcctgacttgttggactaaaagtcggcctgtttttgttcatcaaaaacatttcagccctgtacaagttgtatcggtccaattatccaaactgccaacacgaaaagggctggaaatttcgtctgtgcgaaaaatactgagttagataaaggtaaaggaatcaaatttgaaaatatactttgctttttcatattttacatttatatacgtgtctaagattaatttgcaaaaatatagctaatccgcggaacggttgtgtgggagagcgggcaaaccacagactggggatgcgggagcggaacccgagccggtcgcgcagaaccgggatgcgcgaccgagtcggtaccacattaccgatgcgcgggagcgatagcgccctcagccccgcggcggtaccgccgaacggcatcgcgggaccgcgccatccctgtggtcgctgtattattcccccaatttttccaactcatctcctctttccgcgcacgcttttcaaagtgctaaacagtgtattttttgcaaaaagtttctatatgaaagttgcttaaaaaatcatattgatctatttttgaaaaaaattatctaaaaattaattaatcacgtgctaatggactgctccgttttccgtgcggagatgtgttcgctgtttggggaatgatgcatgcgggagagccagtcccgcgcatccggcgtgcgggagagaggtcggtcccgcgcatccattatgcgggagcgcgccagctccaggcatcgcccaaaaaacccaaaaaaaaaccacgttgccgctaacccgtcctgcgggactggcgcggtagcacatcccggccagcgggaccggcttggtcccacatcccagtttcgcggggccggcttggatttcgttccttatccccattatgcgggtcgtcctcgctaccgcgcattcgttctgcggattgggtatatttttacaaattaatctcatgcatgtatataatcacaaaatataaaaaaggtaagtatattttcaaatttttttcttaaagttcaaatctaatgaatgtttatcaccctgctaaacgaattggatagctaaaaagatggaccagtcaaaaaaattctccttcttgacaaactggaggagtacagagacctatctattgaagagttgagtatttatattattgccacgaaaccaaaaggaaggtaatatataattttgaacaaaactaggcatgtaccccacgtaattacacgggcacctctatttttaaaatgttaaattcttttctgatgattaataattattagtaactacacattttataaacaaaacaaagttctcggaggatattcatatatctgtcctacatcacctagtcagttattaaaggcttagctagcaagggaagaaatagaggtcttatttgcatgtatcaagttcgagatataattctaatttctaaacctgagttgttttaaaaatacaaaacaaattactctttaaaagtttattttttctattcttcttaatgacttcaactttttgtcattgttaatagtggtaccggattggttgttcataacatttatagcaatttcgataattttaattaactaaatatgatggttaccagttaatatgaagtttagagttccatgacatatatcattggctggattttcctccgatctgtgacccctcaatccgtttcaatcaaacgtgacaaaaataataataaatagataagtgagttgagagaagattcagtcatcacaaatcatttggcaagggttccccttgttaccttgagctcttttagtggtgtggttagttagcaagcaacctagtgcgacttgacgttagtcatcatctctatgaatttattcacgttgtgacggctcaataaaacctcccacgacacatgtacactaaaacaagttaggacgatttttttctttctcataatggccttgatatgggtacacatacaagttgaggaattgaaatcatccaacgtttaaattgaattgaggattaagcgtttgttgttttaccttttatgaagaacttccaaagcagttgtattaaatttgttagaggttaggagggttctatagcaggtgtatggtgcttagaaattcatgtaggatcgaatcacaagaactaaaccaaccagaggggggtgaatggttggtatacccaaaaaccaaatcttttagaggaaataaaaattaccctcaaattcgacggatcgcggtctgaccgaagatgttgcgtcggtctgaccgcctgatgaacgtcggtctgaccgggatcgaactctggtcgaaccgccaaaatcacctgcctgcgcctgtcgccaccgccggtctgtccgccggtgcaccgccggtctaaccgccgaaacccggtgaaacacaaatcaaagaactcttaaagtggatgacgactttattgattctctttgtgtttacaaagtgcaccaacagcactccttgcaaaaatctcgactattcgaaaccctaactcaactgtcaacttaattgctctcaaaagcgataccgggaaatctcacgctccctctctacttatacctgaggtaggcagcctaaagccacgaaccaaacttatactagaagtcctaatcaccctaggaaaccctctagcacaggaaacaaactttacataaccaaacataccaaatttggactccttccaaattcgactctgcatctcatacgcacacaatacctccatcgtatgccatatggaatcttcacctaccacgtgcattgaactctagccttcgtatcccgcatgatctctgaccaccacggacgtcatcttatccctaagccgactcccggtccatcaccgcaaatactctcccggcatctcgagtcatcaacaaatagaacaaacaaagaaactatattctgagaccaagctattcccaacttgactcattagtagcaaacaacaatatttacatatgcattgtatccatctagaagccataataatgaaacaatcacggatatccaaataaacaacccgaaaccgaaatcgacaaagtgtcggctggtcagactgcgggctgtgccggtctaaccgtgtaatacacgccggtctgaccggtagcacatgcccagtctaaccggacccaaatcacagcagttcctgtagatcacctgtgaaatcccaatcatctccaaaaccacttcgcaaataaattctaaatatcaaaaccaataatctccaattccaattgttcatcacagaataataatcaaaaacacctttcattttacaattcatagcttataattatatattctagagattagccattgataaacttataatccataattaagaccatagatgatctcagatgaaacttttgtcaactacaaaattataggtctcatctatacctacaactttcatacagattttgtgtccatccgagattgtctatatcttataacacattttgggacatccagacaatttaaataaaaagtcatcacctatacaaagttgtagatctcgtcgagctttacaaatttgatataatgtttatcttcatccgactttatatgaaaaggttagataaaaagcacatatttatgagttgcatcatcatagagcaaatatttctgcatggtcaagtttggatggtagatgtaggccattgaagaaaatctatagctccctctatctgctaatgatttgttgcatctggaaaatactatgtcttattctgtcacaatgttgcaacaactgagaattctcaattagaatgtttgtgggctcaataacccggcacgcagagaggcagtccttgaaaccgcaaagctggtgaaagcagaggtattctgtgcatgcaataaacaaaactaagtgccattgaccagtggattggtaaggaaattgggggaagcagattgacaaaattcaatttccttcctgccaatggaacacgtggtggcattgccatcttctgggatgactctattgtgaacatgataaacttctcgcacagaacacactacctctcggcaacggcaacgaccataattgaaaacctcagctttgtcatcagtcgtctatggtccctcggaagacagcgataaggagagttttcttgttgagctaatagcagccaagccaccaacagacacgccctggctaatcgtgggagattttaacatgatatgtgaggccagagacaagaacaatcataatctgaatagacggctaatgggacggttcagagcagccttaaacactctggagctaaaagatatcagattgcaaaacatgcggttcacatggagcagtgagcaaggaaatctgattctaagcatattaggtagaatgctatgtaatagcgagggagacatcttcatctctggacactccttgttagcactgttcacatcctgcttagaccactacccactgttgttagacccgatcatagtagaaaaaaccggagcggccacagaaccacttgagcttttggttcaccgggtcaccggttggaccgccggacttaccgtttcgattgctgaaccggaaagagtatatatcataaataatttctcctaaataaggtgagcaagttgccttggtggtgaggttgatgtgctttcataccatcggccagggatcgatccctatgcactcttttaggcaataaaatgcaattgggctacaacaatccaagtgggccttacaagcgtcaaaatagcccgggtcaccggttttcgagaaaaactattcggttcatccggtttgtaccgttcaattgcatgtgcggtctttgaatcaatccaaaccggtgagggtgctggttcctgcccgaaaaactatccggttcatccggtttgtaccgttcagatttagatttgagaatttatgggttagagtggaaggcttcttttttccggttcaaccgctggtccggtccagttttttgtactatggccccaatgcaagatccaaagaggagcccgagattcagatttgagaatttatgggttagagtggaaggcttcctaggagtggtgactcaggcttggagcaagcctatccaggatggtcacccctgtcttacggctcagtcaaaagctaaggaacaccgaaacgactttgagacaatggagcaaatagaagtttgggcaactgaaactacaattcatcatggtccacgaactaatatattggctgtacatagccctggaaacaagaacacttttagttgaggagcatcaatttagtaaatatctcaagataagaattctggggctagcagctgtggagaaggcaaggaaaaagcaagcatcaagagttaaatggttcaaagagggcgatgctaacacaaggtttttccacatcaagatgaatgcccgaagaaggaaaaatttcatccattgcttacagcaggatggaaacactatacatacacatgaggaaaaggctgcccaccttcacgcgcatttcaactcaatcctggggacaaggagaccatgaggctgcactaaattgggaagccctagaattaaaaaaatacaagatgatagcatggatgagcctttcacggatgatgaaatctgggcagcaataaaaaactctctataggaaaaagcgccggatccggacagtttcactggtgcttttttacaaaagtttttgtcaaataatcaacaaggaaataatggaagtcctgcaaagtttttatagcctatttggggggaattttggaagtatcaatagacccatgatagcattgctaccatgactcgccatgttcggcaaatgatttcaagctgcccatgatagcattgctaccatgactcgccatgttcggtaaatgatttcaggcccatcagcctgattcactccatggcgaagctcatctccaaaaacttggcaatgagactggtagcacggctcggtgaattggtctcacatgcccaaagtgctttcattaagaaaagatgaattcaagataattttctatacgtgcgtaacatggttcggtgtcgcgcccagagatttgacaaaccgaatcactggctatttgtgcatttaacctctgtccaggcattaaccagagtacacagacgacaattcgatacagtaccacgtcttacaaaaatataaaataaactcagaaaagtagcggaaaaattaaagaccatttaaacttaatcttctcacgaaagcgaagcttcctccataatccacacgcgaaacctcgacgtctggcacaagcctaatcttcatagaactcaccatccgacaaactctctgccactgggggattgggaaaaataaggcaagactgagtacaaccaccgtactcaacaaatcataccaaggttaatatttgtagtaaaaagcagcattcataaatcataagttgaaagcagtaaaatagtagataattaagcaatattaacctcatcactgtccaacgctaaaaccacgttgcgacaagcccagcccaaaccacctgaactacactagttcattaagtcaaattattaaggtgagactaatcatgataagctagttgaccgcccaataaccgtgggcaaggctattcgaatagttttactttaattagaggtgtacaactttatcgacaagacacgattccacacatattaccatgtcccgaagtacctccacgatactacaaagggggaaatagtgacaaaaccatccatataaccacccctaaccaacacacccaccaccaatttcacccccatccatatacaggcaatgggcagtccccgctcgtgcctaggtaaatccagaagcagcatagacgaaaatctaggtccatccatactccatcaccccacccttgccaacggtgtgttcgctagaaaagattatacttaagattcaaccttgagcctatctggcctgtggttagtacgagtatatcttcgagggattcccaagaaccggtcgttaattggcatgggcacgaccaccaatcaaatcatgcatgtacccacaacccaccaatagagcatatttcagttaattaaccatataccaggatggtataacatcatcataaaaaattaaggactaaattataatgaatcccaatgtgaggtaattgatctaagcattcctaaaccaatcatagagtcaaattattatcacaggctatcaaataaatcagggtaatcaaaaggctaagtacgggtaaattccatcccacatgacattataaaataatgcatgttttaagagaaaagcagggattttgaagataggctcaatatgatcaatgatatccgtatgacttgccttgctcttgagctgatgggaccactacgatggatcaggtcatctctgacgggctcatacccttatctgtgatgggttaagcactggtcacagatcagtgatcactgatgactcggagtcacctgtgacgggtaaagacccgtcagaggtaagagttacctttgacggattgcaaattaaaatatgtcataggtaacgttcacctgtgacggaggggtccgaattgggaccgccatctcttcctcctatagcgcccgcgtcttcgacagatgcggaaaaggcgaaagcagcggcagcggcgaaggccctccaggtcagagatgcgatcctgtcatcccaagcaccgggggcaccttcgaccgccgccttcgcccaaccggccatgacatcgacagccttcaccgccccgcaagccaacaccagtctcaaagctcaagccgaatctgacatgggggccatgaatcagaatatggctaaacttcaagacacgcttcgccagatgcaagagcagcagcaagcgtacgaagcagcaaggcaagcaaaggcccacacccagcagttctacgctcagccccaagtcgttcctccatacgctgcacaagcaccggtgtacttcgccaagcctgcccaagttgtcgccgtgcgtctgactccacaagtgacctcggagccggttcgcccgacggcaccctaagcccagtacccgaagcctgttcacacgccacaagtaatgatggaagcagcttcgaccttacaagcacaatttcaagccttcttgcaataactcaatcaaccccaaaacaatttaccaagaacttcgcctttggccctggccgagggaagcccaagtcagggtgcaccagtgggacagctgttgggccagttcgccgaaccaagtcaagctcaaggggcttcgcctcaaggccaaccgccacagttcgacccaagcacaccggcccaagcacccatgactttcgcacaagccgtacccccacggtatggtgcagccccaccactaaatcaagcctagaatcaagccatgttcgacccaacagtggtaatgcaagctacttcgacagatcagcaaaaccaagcaatgaagttcggcacggggcatcaatcgacacccacagcccaacctcatgtacaagctgtggcttcaccgttcgcgcccccatacccatagttgaattggccctctcagcaaggggccatggtcaagccgggtggcgaaaagggtctgccccttagttgggggatcaagaatcaccccatccccccccagttcaagttccctcctgttccaaggtattcgggagaaacggacccaaaggtgttcctctccatctacgaatccgcaatcgaagctacccatggtgacgagaatagaaaggcgaaggtaattcacctcgtgcttgatgtcattgccaggtcttggtactttaatttgcctactagcagcatttactcatgggagcaattgcgcgatgtctttgtccttaacttttgaggcacctacgaggagccgaaaacacagcaagaccttctcggcattcgccaaaggccgggagaatcgacaagggaatacatacgtcgcttttcgcaagcacggtgccaagtgcaagacataactgaagcttctgtcatcaacgttgcttcggccggcttgctcgtgggagaactcacgggaaaacttgcacgcaaggagccaaggacgatcgaacacctctttcgcacaattgatggatacgctcgaggtgaagaagacaccaagcgaagacaagagatacaagctgaatatgacaaggcgacttcagccgcagccgccaccgcacaggacaacgctcaagctcaggtccaagcccaagttgtaagatcggcgcccgtcctggttcaccctaccactccggcgaaccaaggacaacatccaagtccgaaccaagcctcgatgacatggaagaaattcaggaccgatcgagctggcaaggcaatgatggcggtcgaagaagtgtaagccctctgcaaggagttcgccatccagcaagtgggcggacagcaacaaccttttcgcaagaaaataaaaaaggacttgtactgcgctttttatggacgctcttcgcacacaaccaagcaatgtcgaaacattcggtaggaaggtaacgctcaagcgccgaggcagcaataagggccaaagaggcaccgcgtgaagcggtcctcaaccaagcacctcaagcagaacaatgccaagacgcgcagcgaagagtgattcaagtcatcaccagatcttatccctcctcacaagtgtcgaaacggcagaagaaaatacaacttcagacagtgcatagcattgtttcggcaggtgatggggtcccaagatacttgtcgcagccaatatccatcgggctggaggatgccaaaggagttcttttcccacaccaagacccgttggttgtttcggcagagatggcaggtttcgaagtccggcgcatcttgattgatggggaaagttcggccgatgtcatgttcaccgggacttacgccaagatgggattgccgacattggcgttatcccaaggaccgacttcgctcagaggatccggaggcgaagcagtgcaagtcttgagacaggacctaaagtcgctttcggcacacaagagaacaaaagagaagaggagatactcttcgacattgttgacatcccatacaactacaacgccatctttggcaagggcactttgaccaagttcgaagcagtctctcatcacaactacctcgagctcaagatacctggcctagctggcgtgatagttgtcaaaggttcctagccttcggccgccacagtggccactttcgatagggaagtccgtaccctacaagtcgaaggacaagaaaaaacaaagccaataccgaaacccgcccctcacggcaaagttgtccaactacagatagatgattccgaccccacgaaagttatatcactcggtggagaccaaagcgaacaagaagtgaatagcatcctggtcgcgctcaagaagaacatggatatcttcgcttggggaccaaatgaagtggggggcatttcgccagatctcatcatgcaccatatcgcagtcaagcctgacggaaagccgaagaagcagaagttgaggaaaatatcggcagatcgccaagaggcgacgaaagcgaaggtgaacaaactgcgaaaggcaggggtgatacaagagatcgaccacccaaagtggttagcaaacccagtgttggtgaagaagtcgaacgacaagtggcgaatgtgcgtcggatctcaacaagatgtgcccgaaggacgatttccccctgccacggatcgactagcaagtcgattcgaccgccgagtgtgagctcatgagcttcttggatgcatactcaggatatcaccaaattcacatgaactcgacagatattccaaaaacaaccttcatcacacccttcggcaccttctgccatctcagaatgcctttcggtctgagaaatgcaggggctacgttcgccaggctggtatacaaggtctttggatcccaattggggcgaaacgtcgaggcctatgttgatgacattgttgtgaaaagtcacaaggtcttcgaccatgcatcagacttgcaagaaacttttgacaacctccgtgcagctggcatgaagctgaatccagagaagtgcgtgttcggcgttcgcgctggttagttgttaggattccttgtatccgagtgggggatcaaagcgaacaccaaaaagatcgatgccattcagcaaatgaagccaccatcgagtatacgacaattacaaaagctcgcggggcgaattgcggcactcagtcgattcttgtcaaagatggctgaaaggggcttgccattcttcaagacccttcgaggggcaggaaagttcagttggacacctgagtgccaagtagccttcgatgaacttaagcagtatctccaaagtcctccagctttggtcagcccagcggcaggaaacgaactgtggctctatctagcagcttcgctcgtcgctgtcagcgcagctttagtgcaagaaaccgaagcaggccaaaaaccagtatacttcatctccgaagccctccagggggcaaaaatcagatacattgaaatggaaaaacttgcttatgccctagtgatggcttcaagaaagctcaaacactacttacaagcccacagaatcgtgtaaccttcgcagtatctgaaaataaataaatttacattttaaaatataaaattacagtcctatgtaactaaaattatatttgtaaattaagttgatatggcatgtaagtgcactgtaattttgataaaaataatgtgtaagtaaatatgtattttttattttcttttgtagtacgttagatttaaatctaaaggtagaaaaaatatgggtgatttttttttgttagaaatcacacgacaaatagatagacagttccaggagatcgattcagttgtgtggcgcgtgagactctctttggcaaaagacaaaaatgcctaaagaacaatgatagaaaagaactatcataccctaatgaattaacggtcgagatcatttctactggtagtatatactcgtagtagacagcaccggagtttcactctaatggaaaagtgcgaatacgttgtgcgttttgaatttgagagtgtaacgagcgcctgaatgtacatgtagtggtgtggaaatggtgcttgcagtgtgtagatagaacattgctgacgaattagatgaagaaaataggaaacctattttgagatgacgacattcgatcgctctcttgctggaaggctaaattttcaatggatcataattaacaatacaacaatgcagtgtgctacttggaagcgtgcaccgtggtccgtggtggctcatctaagtcataacatgtggcctttatgatacggtgctatttttattgctgaatcatccaaaacccctatacacgttgagttcgttccagctaaaaaaaaagacattatctaaaatataaaacattgagttcgatccaggtatttacaattcgaaacattgagttgttcaaccactgccacacaacaagcaatatgtgcccaagcaatatgtgccggttgggaacctcacaaaggtgccgaattttccaaccggcaccacgaaggcagcacagattagaaacactcaaaaccagcacctttgagatatacgaattgaaaaaaataataataaaaataagaataataaaattcagctcggctcaaattgaaccgagccgatgcatcaaagcaaccaaaaaaaaatccaaaaatctcaaaaaacaaatccgctgctggcaccactgccgctgcacactgttgcatgccgccgccactcatgctccgcccgctgccaggactctgcgccaccgtcgtcgctgccgagaccaccgcgccaccgccatcgccactggatctgtggagaggaggaaaggaatcatcagtttctgaagattacgaaaggaatcatcagctgagaaggacccagagagagagcctccgccgggccgccgtctctcctcccgccacctacccctccccccgtcggatttggtggagaaatttggaagagaggagagaggggatgagtaggaagaccttgacgacgtgaagagaggccagcgataacgcccaacgatgatgaagggtggtgcattgacaacgccatgatcaatgaggcactgacatggccgacgcagtccgtcgacacccttcattgaccttccatgcccgacgacgtggaaaagggcggcgtggcgcggcgagatctggatgggaggtgggaggctaggagaggaggtctgggagggaggaaaggcttcacaagagagagagagagaaacgcgcgagagaaaggtgggagaccgggcgaaatggataaggatgtgtgggcgagtggaggagacaatgatttgcaggcgaagtggataaggatgtgcgggcgagtgggctcgccggctcggctcaattcgtatgtgtcggtttttttaaaaaattagcacctataatatgttgtaggtgtaaccgacaccaataatatattaaaggttccggtttctttttagaaaaccggcacctataattacttaaaggtatcgttttttttacgttttcaacctgtgaaagtgggaaaagatctataggtgccggttttagcaatttcggaacctatagtaccgacaccgttttgtagtagtgtccggtgggtgcattgggaatatgagatgctgaccaacgcttgaatgtatgctaatgaacggttgcagagtatgtatagaaaagttctggagagtacttcgaagaaactagaaaattcacattaggataaggacaattgatcggcaaaatagccattcacaatagtgaaagaactatgatcatatcgaaacaagttctgatggaaaatttcgtgttggatgagttattaatgctttcttgccattgaaccattggtgttaatttatcctgctgttgattacgttcattttttaaatgctgggttttctttcttcatcttagactcaaccagtagctgcgtgccagctgacacgagaccaaggtcacaagtaggccagacaatttctggtgacatccaactttatttccttgggcggggatcagaagaaatgctcttccaaggtgtatacttgtactggttgtacgtgtacaaagcaacctatgaaaaattgaaagcaatgctcaatgcattgctctccattaaagagtaaaatataagtggtatcttcaacaaaaaacttctgtgatgcgttcattataatattgaagacaaatattttttggttctcgcaaagaaatagagcgtggcttcaaaattcaatgtcatcttccaaaaagccaattgtacaatttatatgtggaaaatttagtcactgcagcaagttcaaatgtgctgaaattcttttttattttttaaaatttttaatttttaaattttaaaataaaccatttcaaaacatatttttaaaataaaaaatggttcagatactagcaataacttttggaatggtttatttttaaaatttaaaattaaaaagttcaataaaatttaaaaaatccccgtgctggtaggaatatgtacgcattgaagtattgaagtatgtactaacaagaaattttctactctcaaactcatgatgccaaagtaaatatagatatcttggatactgaaagatttgttcagctagcggcagaaaattagaagatttttggcacatgttaccggtgccctctcttatgcagtttgaacacaaacaacttttacatgggtgaaaaaagaattgatgcacccaagaatgtcctatttctccgcaaaaaactctgacaaagataggaaactaattaattaactagttatcatcagcgatctcagatgcacaagctacgcctcttccggatggtcaagaggccattaacacacttaacagacgagatgacacattgaagctactgtgtcttctcttaatctctttaccatacagacatctcattcttattatgaccactagccgcccacccgtgcgttgcacgggctatcattttgatattataagtattaaattaaccacatttgcctctgattagtggcttgacaaccaccggatgttcaatgttggttattttccaaattaaaattgtttagattgaagagtctaaaagagctcatcctccagtcagaaaattaaatttccatattattttccatctgtatgttttatttaacacgaactccagtaaaatctattgtcaagataaactgacctatttgacaaacattcaaatacttccagtaaatatgtgagctttcttacagtgcccaattgtttggatttaatatgttttgttattttcatgaaaagaattatagcggtttagattaaaataagagtccatgcaacttcctaattatgtattttaaatttaggactaaactaataaaataatatattgatagtctaagatggatacaacttcatattcactaattatgaattttggaattatcagtctttatgcaactaaaacaaatgaatccatatatacatatagtttatttcaaatgtagaacttattgttaactgccatttcagcatatagagaagaacaattagatgatattgatgtggtcttcatctcgtaggggtaactgaaaatcttatatgtggtggttattgttcttaacgctaattatgtcaagggatcgaattaattcctcatcgaattaacaaagatttaacacatttcaatgatataaaattccgttggagtgacttactatatgaagatttcagaggaaattttacatgagatccacctcttcgaattttccttcgagtgtttcgctctaattcaattattgtatttctctcatagcttatgcgaacatttattcatgcattttattgtgtttgtaattccctcctttacatatgcattcttgtcaaaacttatgtctctcacgttcttagttttgctaatcctatgttgcaaatgatggtgttgactaaagagaagtccatattagttacaactcactaactattatttttcaattttacaactgaattaataaaatactctctctgtttcaggttataagatgttttgactttggtcaaagtcaatcggctttaagtttgacaaagtttatagaaaaatataataacattt

SEQ ID NO: 8024 - DNA, 20918 bp, Oryza sativa
  unsure (1)..(20918): unsure at all n locations
tcggcctttgtgcgcagcgggctttcagcccatttaaattataggccgaaatacaggcctgtccatgtgtgtaggccgggattttagttcaaaattcggcccatatgctaaggaggcctactttacagcggataatatgcagtgtaactgcaaacctagaaactatcgatgaatgaaaataggggggcgcgatcgcctaggatccggcccccctccccctatactcctccctaccctctcctattcctcctccccttctcctctttctactatagtagaccacacaatttttttttgaaaaacaaaagttagaaaaatttatgtatagaaatattatatataaaaatttgaatttaaattcaaatttgaatcgggtatgtaaacttttgacttataaactttgggtctataaactttaggtgtataaactttagatgtatagaaactatatatagaaaatatttgaattcaaatttaaatttgaatcagatataattcaaattcaaatttgaatcgggtatataaactttaggtctataaattttaggtctataaactttttaggtgtataaactttagatgtatagaaataatatatatgaaaaaaattcaaatttaaatttgaatcggatatttgaattcaaattcaaatttgaaacgggtatataaacttttgacctataaactttaggtctataaactttgggtgtataaattttagatgtatagaaatactatatatatataaatatttaaattcaaattcaaatttgaatcggatatataaacttttgacttataaatttttggtctttagatgtgtaaactttaggtgtataaatttactaaaataagaaagtaatgcggtgtcaaaaaaggaaacaaggtggagaggtggagggagggaagggagggggcgcaaaactgatctccctaggcgatcgctcgcccagtagcattcctgatgaaaatagacgtatgagatttatccacatcacaattagtaaaatattcattcctaaaattaactattatgatgtagtagaacagaagtttcactactgatgatgacgtgaataaatttcacacatctattttgtatatcttatgatagtattaggtttcgactatatttttgtagtttacaagctaaacttttctctaaggtcgtttgataatcattatagctcccgaatgtcgtgacaaacataattttgacgcgtcgggcagggttagttgagcattgagtgcttgtcatggagaaaatgactcagggttcaggtggcccccattcttctcacggattgagcttcatttagttgcatgcatgtagaccactagactactccatctgtcccacgatataagagattttgagtttttacttgtaacgtttgaccactcatcttatttatttttttttaaatataaaaaatgaaaagttgtgcttcaagtattgtggataataaagtaagtcacaaataaaataaataataattttaaaaaaaattaaataagacgaggggtcaaatgttgtaagcaaaaacccttatattatgagacggagggagtagttgtacagccaagtagccgacagccacccactcggcatgagcgtctaggcgcgctgacaacttaatccacattaagaggagattaagagaaaatgaggtatagtgcaaaccgttctacgagtatggcctcgatcacaactaatgaagatgaaaatcaagttttaattattataaacttaacaaatactctctccgttttttaatagatgacgccgttaactttttctcatatgtttgatcattcgtcttattcaaaaattttatgcaaatgtataagatataaatcacacttaaagtagtattagtgataaaacaactcataacaaaataaattataattacgtaaattttttgaataagacgaacggtcaaacatgtgagaaaaagtcaacggtgtcatctattaaaaaatggaggtagtatatttttaaatatggcatcaggttttgaactgatagcaggctcatctattgactattacagtgggtgaaagctgttggttatgatgtgggactgcccagcatttgctcctcaagctttaaacaaggaagacttggttgcattctgaaagaaaaagaggtcaactgcagcaggtcacgcggcaggcagagattctacgacaaagcatcgctttactactggagtatacaggttttcaggagcacttgagttttttcttttgagaacggagcaaagttgtatgtgctgccatttctcggttacaggcaaggaaatgcatagaagttgcattgctctgtccttgtctctgctctgccccgcgcaattaactctgcaccctttttttttcctcgcttaattctcgactgtttgtgtaattacataagacaaaattgctagtagatccaagcttaatggcagcacgtgagatactattgtaccccaatcaaacctaacacatcttaacaaatcccatttgaaggaaggcacataataacagcgtgtttggagggttttgatcaagtggccaatgcagaagtagttggcagatggtgcctactggctagaattcggcgatctaacctgaaaacgaactgaaatgcgcatgtgaagggagtagtttgagcgagtgtgattgttcttgcaacaaagaaagcaaaggtaattaaggtcgatggaatttctcagattaaatggcgctttaaaatggagatgggtatggtaggcaatcaatttcccgggggaaaaagaagaagaaaagaaactgacatgtcgctaaaaaaactgctccgcctccgcgtcccccggccgcacgcgtcgcgctctgtgctgctataaacgacgagagcctcgccgcgcactcgacgcgcatcttccgaaatagagaaattgccacggatcgagggcgaccgataatggaaggcgagcagcagcagcagcagcagcagagcgtcgcggcggtgaggccgtcgctggggaaggcgccgtcgccgtcgttccggctccggaacggcagcctcaacgcggtgcgcctccgcagggtgttcgacctgttcgaccgcaacggcgacggcgagatcaccgtggacgagctggcgcaggcgctggacgcgctcggcctcgaggccgaccgcgccggcctggccgccaccgtcggcgcccacgtccccgacggcgcggcggggctccggttcgaggacttcgagtccctccaccgcgccctcggcgacgcgctcttcggctcgctggacgtccccgaggacggcggcggcggcggcggcggcgacgaggagatgaaggaggcgttcaaggtgttcgacgtggatggcgacgggttcatctccgcctccgagctgcaggaggtgctgaagaagctcgggatgccggaggccggcagcctggccaacgtgcgggagatgatctgcaacgtcgaccgcgacagcgacggccgcgtcgacttcggcgagttcaagtgcatgatgcaggggatcaccgtctttggcgcctgaccacttcttccatccagggtagccatggcatccgctcaccctcacctagtaagtttcctcactgaagaagtccctccaaacattttttcaagtagaaattatgaacgtgttagggattgaatacggaacatcggggttgaaaccacacgccctttacgactacactaataagtttcctcactagtttttgatgaagataaaagcttccattgaattttcaagtcaagttcaattcacaccgatttgctagtatgaaattcaacatttttcactgtgtactgcaggcttctgaagttctgaaaacaaagacgtaagagaaggcactagccaatactagatcgcagccaagatcagtaggttcggtgtaatctttttaagcttaaggcaaggcaattccacttttgttgcagctacgaccttatccctgttagtgcctgttttgtgcatcggaatgcagtgcagggcctgagtttcgttttctgtggccttcattcgcacaacttgttgtgtggtgaggtggtgttgatattatacatctacatggacgtacgcttgctaatctagcgaatagtgatgtggatgttcttgaccctagctatctctaactttcacgtcaaccttaaaaattcggtgtttggtttttatcttccctttcaatagcaatccttatgtttcatttagattattgggtggattatattgctgtggtttatcaacttgatagataggtaaactaaataattcaagaaataaaattatcaaatagctgaatacaagctgtccaagtaatagagtagaagaaaattttgttgagacaacatatattttgaagcgtaaagcaaattatctgtttcaatatttgggcgaaaaaagttgaaaataacatggtcactttcacgcttgcattgcatggaaatggaggcacccaaattgctcggtaacttgttttcctggaggatattactactccatgttaggaccctgattgaaagtgaaacacaaaaattttacagttgttattttgtagaatataaggagccatgcaggtccccaaaatgcttggcaacttgtttatctgtcttttttttattaaaaaaaggtcgttacttcatttacattcctgattgaaacacaaaaaaaattgctgcagtaaatttgtaggaatacaaaaggtaccacagcatagcatattagcacatcacactagtactagctagtagcgccagtgtgcccacaggccgtatatacggcccagttcggcgtgagacttgctgggctgtggcgaaaggctgagtgacaccaatattgggcctcagtagatatcaaaaggaataagtctgtttgtctccctcttgtctttctgtttattgaatcgtctcactcaaccgtaaaattgggtataacacttctctcgtctttcaaaactggtgcacaacataataaacttatttggttttactgttgagagaggtgatttaatcgggagcaagagatgagggagggccattaaattattccataacaaaaggccttccagtcgcgcactagcccaacacaattgtgaaaaatggatgagacagatgggctgttagccacaggccggtatcagaaaatccaatggcccatggacgagctaccagtttgttacggcctactaccgtaagagcatgtataatagcagcctataagctagctataaatatatattttaaatagataaatgaatagagataagagcagtacggactccaatacgtaatgtgtgtatgacaggtatgatcagatattaatactatagtaaacaactattgtatgaattgtatattatattagctatagataatttgcagctattaattggctatactattaaacttgtcgtaagtgtcaatgtgtcatactgtcatgtcagtactgaatcactgctagtagtacactttataatagtgtgtcattgacgaagtttgtttgttttttttttacaaaaggtcaacgttcttatcggcggggttacaaggaaggacaacgtgttaatcatccattagcagctggtctttgcatcgtgtgatgaccatcatttctcattgaacgagtgaccaactcgatgattctgtcagtcccagtgagcgtgattgttttggttgcatatcgatcgccccgaccctaccgaaacacatggaaaatatcaagcggctcgacattttttcgttgaaatcaaaaaagagaacttgtgcaactgtttaactttaattgcactaaaacacttttgaagtcccaaaatattgatatctatgtgacatatcctaacactctaaatttaaatacaatgtgttcatctatcactagatgataatattttaatagagatatagtattagacaacatagaagaaacaagtgtcattttaacgtggcattcgaaaccaacttacatcggctatgaaattttattaggaaaattggaaccatgccattataattttgtaaaatttgagatatgtcatcctgacccacatgtcattgactcatgtgggttctagatgtcattgagataccgatgacatatctcaaactttgcaaatttataatggcatggttccaatttacccaatttttatttctacgtcaacaaagagacaaagcacaaaacaattgtaaagggaagcttaaagcgggcgcaagatctgaaaaatgactatagcaaaggtttactatgttcgttggtctcacaaatgacaaacacgaaaaaaacgttgcgtcagctcatacgtctgccgtggccacagctctccagatccgttgaaccttagcatgtgctactttattacgcagagaaactaatccacatcaacacaccatcactcgcacaaaacacactaataaatgaattcacacaatcctaagcatcatattttatcaatccgtttaaaaaccattgaaaacgtaacagcgatacacatagattctcaacaagatgaacacacaggtgccactctttttccccattgtgagccaacagctataacggtttactacatgggacaccatttctttcccaatcattcgtgcttggtcacagtcacccgatgattttgtccggtctccgcgtccgggcccacctgacaggcgtgcccgaccctcggatcagatcggacggcccagatcgatctgccccgccattttcataaacgccaccgcccgcacgaatcggaagactcgagaggggcggtccatccacgtgaggaggacacagttgcaaatttccaaatccaaaccctcgtcggcgtcgtcaccgtggcggcgacggcggcggcggcggcgatggtgcccgccgggggcgggggaggggagctggagaggagggtgatggcggcgctgaaggcgtcggaggcgcgtggggaccagccgctggtgtgggcggtggaggtggcccgcgtcgtcgccggggagggggcggggctccccagcgcggacctcgccgggatcctcgtctccaaccttgcttcgcgcacaactccccctcgctgtggaagctcgtcggccacgccgtggcctcccgcctcctctgcccgctccacgtcctcgcgctcctcaccccgaggtcggcgggggtccccttttcccagttcgttcgtggcgcggattcggtgatcttcccaagcattttgtgagtgactccttggcgatggtgggtttttgcagggtgctgccgcagcggcgggcgcagcctgaggcgtaccggctctacctggagttgctgagaagtaacgtcacatcctcctttctctccatggaggccgggcctaatcgagacaagtaagagttctgctttggaatgtgacatcggaaagtgtgcggtcatgaactttctcaagggcacagcacaatcagtagctatgattgaattttgaactggctcgaaatcacgaaatctcatgatttttgatcggttttcaacaaaattgtaaaccctgcaccgccaaattcaaagtaggggtatactgcaattgcctgtacttctgtagtatgaacaacagagcagaacgtactagtcgcttgtatcctgctggatgttgctaaaatggaattgctgtttttttttcctcaggataacaaagtccatcgatgatgctttgcaactgtcaaagatttatggattttctggaatcgacaatggacatgtcatcattttctttatgatgtttgtaatcaccaaactgatcgattgcacacttgaagactgtggctttccatccgggctgacagaggagcaggggagcatttacgctattgaagggccacaggatatggacttagatgtcaaaggggtttcaactgagaagcaaaacgagcaccgtgcacaactacgccggaagaacactgttatggctttagatgtgttgattatgatggttgctgataggaagatccaatcatttctgcgcttgatattcctgaacatgtaagtcatgctcagttagaggaaattgctatccaaatatccaattctaagttttttttttattgattcatatcatcgcaaatttcctaagaacctttaaagaatacaccttttctcctgacatactttgtgcgtgacgcacattacaaatgcctgctaatgagacagtttttctaggttaggcctgaaaagttcagtgtgttaagccagaggttgagcttggttgaagctcacaaaatggaattggagacactattgactgctaatcataaaattgatgatctgttgatgaatatgtggagggttagcaatacagcctatcaaccaaacaacaaaaggcttttgggtgttcttggtaacatgaaatatggtggctccatgctgggccagtttactggagctgggagagctgcatgctgggttatatttgacatatatgttgagaatgcaattgatggaaaacatctaagcgccatatctgctatcgaggttctgaaaggtgtgcatacacaatccgattaattgacataaattttgcctttgtttttctgtattcattctttaaaatggctgcaatacattgaactatctgtgtgccgtgagttcatcttaaatgttggctagcaatgtcgatgaacatggtttttgtaaccaacaccgccttactgtcaattctttatgagataacatgtttttattgactaatatcatgttgctcttaatcagaaatgaccaagacactccaagcaattaatgaggcgagttggcaggaaacctttaaagctctttggatttctgcccttcgccttgtacagcgggtaaatagaccttttctgtattggctattattgttgaatacacacacacacacacacacacacacacacacacacacttctattgtgtctcacatgtaaatgttctaaataggctagagaacctctcgaaggaccaattcctcatctagattcaagactatgcatgctattagctcttattccattatcaattggtgcaattcttaaagaagaaactgatgtccatggagctcaaggaagcaaaagtcttccaaaaacatcaggacttgtatcatcactccaggatttgatccagtattcaggacttctagtacctccttcatcagtggtaaatgcagccaatgctgcagcctcaaaagcagcagcatttaaggccaactataagtctggaggtggcaaccctggcatgatgggccaaaatgactcttcgacaaaaactggtacacttctgatactcaattgagatttgatcttatccataatattctccgtgtctatatatacttcacatttttcttcgttgacacgagtatccatgcctttgtgttagtggtgatagtagagattttttttttaaaataacaatctttctttgttcacaaatactcgcatctttctttctttcacatcttttatagattggcactaccacttttcctttttgttctatatgcaaatatatttatttttgtatgtaaagttgtttaggccttttgttcttaccatctatcccttttcagttgggaatatgctacatcttatagttgaagcctgtatttcaaggaatttgattgatacatcttcttacttatggcccggctatgttgtatcatctgggcatttgaaagatgcgacattaccccaagaatccccctggttaaactttatgcaaggagcaccactttcaggtccacttattgatgctctgattgctactcctgcttcaaggtatgcagttatactagcagcgagtaacttagtatagaaaattataaattttatgggctggtttgctgcactgcaatttttaagaaagaatactacctattgcacaacgagttatacccctggctaagcaaactctctgaattcttcaggtcaagtgtgttggatgcaaaaaaaaaaaagaaaagaaaagaaaatccaatgtgtgctgaactttccaggtttacatgtcaggaaattatatatttttatgacaaaaatggaaatttaattcaatcgaagccattcaccattaggagtttggccttgaatggttacacttacatcattgatgctactaagttcctcatctgaaccgaagaactacattagttccttacatctctctgtatgatatggtggatatccatattattagagcattttccagtgcatgcattgccctgtaatgtccgattggaaactatcctggagatggagtagttcaatcgtagccatcaatacttctctctgggagacgacactctgagagttggggggaacagatccccaaacctttcctaagatccatctacattgatctttactatctccttgctctatgacctcaatatccttacggtcacttatttggcaaccttttggttttcacatgttagagcctgcttgaaaaccagcaaatgaatagtagccaagtgaaccacttatcctgcagctaggaactttttcctattaccactttgctgcgtgtagacaaccaatgccacaagcaagatgataacttaaatgtgtaacgcttctgccattttccaaacaacgtaaacattaagatatactctgaaacaattggagcttgaattttagaaaagacactaggactagcacttcacgtttaggaactccatttttaagctgattcttctcgattcaatgattctttttatttcccaattcatgctcatttttttggtctattgactggcattgtcatgttcctgccttaatttgaaattctgtttcagcaccacagaattggataggttatatcacatagcattaaatggttcagaggaggaaaaatcagctgctgcaaaaattctttgtggtgcatcatttgtttgtggttggaatatccaggtacctttattttagattaattatattgtgtaaagaagtttggaaattgtttatattgccatttcaacttttatgttcatatggttaaaaaaatctcaccttattgatacaatttaactgaaatacaattcaatcgcatttgatgtgtctactactgccatggccatgtccacatgcaaattcgtctttcctattctttcctatatgatgtatgccttatcttactgcacgcttacaagtggtcatgcccctgatttgaccttgtgcttatgagcaagccaaaaaggttcatttgcacttgcatactttttaacctaaaatgatgattatttaaattttacttgtcgtctcaggaatatgtggtccgcatggtggtcaagctattatcacctccattgccctcaaattcctcaacacagggcagcatgagccactaccttgctcagatgtctacattaaatgcactcttgcttggtatttcttatggtgatgctatccacattatttctttgtatggaatggtgagcaatacatcatgtactatcacctgcacaatttattctcaaaatatcaaactggtgaatgttttgcatagtttttttattcattatagttcctttattttaatcttctgaaaggggaaaaaaatatcctcctgatttgttcttcacttctcctcaaagtaaaaattatggaactgcctacaaatcaatgcagctgctgtaaggccacaggcaaattattaaacatgggagctgatcttgtgtagtcttatatatcctcaatttcaaatcttctacagtttgcctctcattgctaacattttatcttcttattcttttgtagttgttgttgcagtaagctgtaatgtctatcatttgttgttgctaacagttaatgactgccatagcttaccgtgtcgtttggtccccatatcttttttttttgtgagagccattgtacatgatatactgaaaccatatattaatattttacttatgactagcataatggtatacacacattcattacatgatacatgattattttcatgtctatatcatattagctattatgctaactccatgtctgcacctatatgtatttataccatttattatttgtaaaatacaggttccagatgttgctgcagctttaatgccaatctgtgaagtttttgggtccataccacctccatctaaccacaagcctgccattgttggtgaaatatcagtttattcggtcttctcttgtgcatttctttgtcttcttcgactgtggaaattttataaacccccacaagaatactgtctagctggacgtggaggctcagttagattggagcttactctggactacctgctgttaatgcgcaataaccatattgactttgcaaattcatctgccagtagtagaaactctagcaacaacataggtccattaaatgaggttcctgctcaaccactttatattgattctttccccaagttaagggcttggtattttcagaatcaagcttgcatagcttcaaccctttctggtctttgcaacaaaaatcctgttcatcaagttgcaaacaagattttgagtatgatttgcagaaaaatgaacaaacctgttgtatcatctggcaatctttcatccacttctagcagtagtgtcagtggttcctctgtaagtacaccagatgattaccaaaggccaacagttcctgcatgggaatttttagaagctgttccttttgttcttgaagctgttcttacagcatgtgctcatggacggttttccagccgagacttgactacaagtgaggaaactccatttctttcatgtcaccgtattgatttgatccccaagtcttaatcttatttatgtgctgcaggtttgagagatcttgtggacttcttgccagcttctattgcagcaattgttagctacttcttagcagaaattacacgaggaatctggaaaatggtcccgatgaatggaactgaatggcctagtcctggtgcttctcttcattccatcgaagcagaaataaaggaaattctcgcatctgctggcattcagattcccagctgctatccacgtattacctgcatcctattcttgtgcatcaatttagttgcattgcttcacacctaattactgataaatttcagctccatcattatatgatcttttaagttcattccatttaatatcacttcatgaatatagtttctttatttcattttgcaggtggtgtaccaccaatgcttcctttaccaatggctgcgctggtcagcttaacaattacatttaagcttgataagagttcagagtatatccatgcgatcagtggccaggcactagagaactgcgcagggggcagttcctggccaagtatgcccatcatagcagccttatggacacagaaagtcagaagatggcatgactttatcatcctctcttgtctgcgttctccattcggcagagataaagatgcagttgcacagctcatccaaagttgcttctcatcctttctacggtcctcgtgcagtgggtctgactttactgcaaaccgtggagttggtgccttaatgggagatgcaatcaccggccaaggtcttcagcttcccatggctcctggtttcatttacctgagaacttgtcgaacattccatgacacctactttgtgagtgaggtaatcctgaagcaagtcattgagtgggctgacaaacttgcaaatggattctcttccagtggccctccacagttaaaatcaggacgcacgccactatccagcgctgcatgtatggcgcatcaagttgcgatgcttggtgggggactcctgtgtgttgcaggtggacctcttctggtccaggtattgtatgaggagaccttgcctacgctgctgctatcagctcgagaagagagtatgaaagaccctggaccagtttcaagcacactccaaggttacgccatggccaacatgctcttcttctgtggtagtctgctctggggagcggaaagaacttctcctgtcatgaaattgtctttcctgtcaagaaggccacgagtggtgggaaaccatatggatttcatggcgggtgtattggatgggcacattcttctgggttgtgaccatggcacctggaaggcatatgtatcgcgctttgtgttcctggtggtgaagtttgtcccgtcatggttgcgggacattaaactggacacgctaaagaagatagcgtctgggcttcggagttggaatgagcacgatcttgcattggctttacttgagcgaggaggacctcaggcaatctccactgtagtcgacaccttgttgtgatctttgcctcttgacatttcccacccattatctgacataggagtttttgtaatcacatttgaggccaggacttgtgtagagatgtcttctggttcaggatttctcagtcgagctatctaaaatttctgaattctgtcagcggagagatgctagctaatcttgtttgctgggtgcattgctaacgttgctattttcagggtagcattgtgaacccaaaatcatacagaggccttgctcgacaacgtatccagttagaactttctgatctgtctatgtacatttctgtaggtagtatatttgtgtggtctgtaaaactgcagtggtagctgtatctcaacatatgcttattttcgacaaaatttaaaccaaggtagcatcagtccaaatcaaacaactaagattttaacaataattgccaaaacataaattgatacggccggctttgccgaagcctaatgtgccaacggtgggcctgttagtaatgttgaatccgaagttcaaagttatatgatatccttgaaccgtaatatcagtaatgttgaatcctactttctcaaaatcaggttaaataaaagacatgtggggcccaatcatcgtatattgttttatttaacctggttttgaaagatgggggtttcacttcaactattgcggttcaaggatttaattcgaactcaatgataactagggaccacaagtaaacttaatccgaccacacgaaaaagaatacaaggcctaatgggctaaaactgggcctcacaggctttttattattaaggaataatcgcgaccatgcggaaaaaaaaaaggaaacggaagaaatggcgggaagtccaataaaaagacccgccgcaacgctccccgttccgttctacccggccaaaaacaccaaaacaccacccatttcgccaccacctcccgatcgctccgttccgtcctcccattccccttccactccaccccagccgcctcgcctcgccttcttcttcccgaagccgctcaatcgaactcccctcgccgaagccgacgcgggggcgcgaccgcgcgcgcgagccccataccacgtacgatggaggcagctctgaaggcaagtgctcgttgccctaatggcgttcccattccctaataaaccctagccccgcgatcccgcgggctaaaaccctatctggatgcttgaactggggcgtttctgctttttttttttcagacgtatttcggcttctcggggttccgttcgtaccagcgggagatcatacagaaggtcctggaaggccgggattgcttggtcgtcatggccaccggcagcggcaagtcgatctggtgagttagttccctgtggggaaaattttgctgtggctgttcccttccttcgtgcggtgccactgtttgctagctatcgtggatatttctatggatgtgcaagttagatcgttccagtgatgaaatctaaattggaatgctgcatttggttgatatatgggttgttgtatcgccgtgtaatgttcatattggcgtttgtgtaatttgttgattgggcaggtaaaacattctttcagaattgggtttgtcttatttctagtgtgcatttatgctatcttagaaaaataaaacataatgattttgatagtaatatagagcctatgagctatattaagtagttaagttcatcttcattgggtatacacatacataaatcatctaattcttcttccaggaaatcattggattagttattgattgctaattgatttctttttattgcagttatcaaatcccaccacttgttacaaagaagacagctgttgttgtcagccctcttctgtcattgatgcaagaccaggtatggttcaaatactcattgcagatcattattgctttgatctttgttgattgtttttacaagaaaacataatcgtgggtcttatctacttcaaataggtcatgagcttaaagcagcatggcgtgaagtctgaataccttggcagcacccaaacagacatctctgttagcggtcaggctgaaaaaggcgcattcgatgttctgtacatgacaccagagaaagctgtctcacttccttcaaggtaaaaggcagactctagtagtcttttgataaactctagtcacatccactttgtgattatgcgtggttagtctaaaaggaatagttgattatgtatttgcttgtctggaaatgggaggcatgctcattcaatttcatggacacaacaaatcactcatgggtttgataacatagcattcggtctattgatttgacattctaaatcttcttcccaggttttggagtaacttgcaggctgccggaatctgcttgttggctgtcnnnnnnnnnnnnnnnnnnnnnnnnnnnnnnnnnnnnnnnaggttattcatactgcctaccaatttgtgctcccacccttaaaactcacaccatccagtttaataaatagctgaccttttcttgattgcaattctctttcttgtttgcagaacggagtacaaacagttgcatatgttgcgtgaccttctagtgggtgttccctttgtcgctttaactgcaacagccacacaaaggtatagatgttgcactattagttgtttccctgcttggtaaaattttcgcccattaataatatcatattattatgtttcttctctatttaaagtaagaatagtgagagtgtatagctgtatgttttttagaggggtataattatatctctattggcacaatactccacatatcatagaagctggaaatggcttggaaaacttgtaacttacctccattattgtgttcatatgtaaactgacagcatgtctgaaactgtgaatcaagtgatagagtgggggctgcgcggtagctggtgactttgggagaaatgtcattttccatttcacattggcactaaattttggtcttgatgcgtgtaaaatatattgtagacagaaatgcagggatttgattatactcccttctgttcatgaaaccatgctgttttggacactgacaagttccccaaaacgtaactttgaccactaatttctattgtaataaaatatattgatgctcattcttttcaaaatagacatgttcacttgttatagcctcgtaggttgcgttacctttgtttacagtggctaattctttttttcccttccaatcaccaaatatatagtgccatataatttttttttgaccagtgccatataattttgtagggtacgtggagacattgccacttccttgaccctgcgcattcctcacattgtggtaggatcatttgatcgtcctaaccttttctatggcgtgaaatcatgcaaccggtctatggcctttatcaatgaacttgtgaaggatgtctcaaagaactgtactgtgggtggctcaacaataatatactgtactaccatccgagagactgaacaggtttacagcttatggtatcatgcatttacgtatttttgaactttcgtaataggtgcacatgtgatgacttgtaagccgttttctttcaggtgcatgaggcattggttgctgctggaatcaagtccagcatttaccatggtagaatgggaaataaagctagagaggaatcacataggtatatcatctactttaatttctttgtgcacatttcattatgctttccactttactccctttttgtttgcataaagaatgatttgcataattgttttgttggctacggtttgcataactgtattaaattttattgatcgtgccacaattttcatgaggaaaaacgaacatctatgaatattgcagtgctataatttgatctttaatgtttgtagaaatattggcattctgttacgtatgcactagatcatgaagttattagactagaaagatatttagacagatgaaatgagtagttaatacctttcaatttataatatgcatgctgcctttgcaatattggtctggtacaataggggctcatcataatttatgcttctcctttacagatcgtttgttagagatgaagtacttgtgatggtggctaccattgcttttggaatgggaatcgacaagccagatgttagatgtgtaatacattatggatgtccaaagagcctggaatcctactaccaggaaagtgggcgttgtggaagagatggactgccttcagtctgctggctatattaccaaagaagtgattttatgaaatctgatttctattgtgctgaagctaaaagtgtatgtgaatattatgtgcatcgtatctctgttcatgccaaagtgatatatcttacatatttgcagcctagttctttcagttgcttactattttagtgtctcatatttttttggtcactgatagcaaactcatcgaaaagccatcatggagtccttcatggcagcacaaaaatattgcctgcttgctacatgtcacagaaaattcttgctgcagtactttggcgaagaccgcaccactgactgtggtaagtatatatgttacatttaagagtcagtttgaactcatctagtaatgttttccatttaaaaagagtaagatatattcgagtcttatttcaactgctagtggctcattggtttttgacatatctcttgatttgcaggtaattgtgaaaattgcacaaggacaaaaaacgagagggatttgtcaaaagaatccttcttgttgctgtcctgcattaagtcctgtggtggacggtggggccttaatttgcctattgatgttctccgtggatcacgtgtatggtttctatcctgatgtttgtgatttttgccagcttgtgacataaattggccattagcacttgattggataagatcacctgtgtgctgataatgtttttgggaacaaagatcaatgtgaatagaatatttcaaggaatgtatatttaggtcttatattttctgcactatcctggtgatcgttcaagcttttcataatcacaaattagttcattataagataataagatataagtgatacaactaataatttttgaaaaaaataccttagccttgagcagtagtaacaattttgtaaaggattatgtttcatggtaagtattttctcattttgtaggtcaagaaaatagttgaaaacaattttgataaacttccattgcatgggcggggaaaagactatccaccaaactggtggaaagctcttggcggcctgcttttagcacatggtaccatcgtatgcctctctctacatatttttagtcattttcttgtgcaagctaagatacatgttctgtatgctgacttgaagttttgtacatatgtacagtgtcgttttcttggagaaaataaatggttgcatttttttaaaataatagtatcaataaacattgtgatgctgcagttcattcttttagtaaaagtagtgtttttcatgaccttaggtcctcgatcatatggcacggatgcaaacagcatattttgtacagagtaggcaccataatagctcatttcatctgaccctttttttgggatacccttcttctcgtataccttcattcctagagaccttttttttagagctcaagatctgtatttttctaccatgtttatttcttaaattgtctcttagcactgaaattcagatttcggagtatcgttttgtcaatgctgtactgttaattaatggctacagtgagtgaatttattcatcaggtgtcacaacaatttgtcctgtctttcattgtcactttgatttgttatttctttttattctgtgtgcagattatttgaaggagactgtccatgatacatttagatccatcaggtgctgtgctgactattttctttttcactgcataagataatattctacttgttctattttgctagctcatttcgaatttattgactccagttaacccaagcatgaatgctcaaacagccacaactcactgattccttgtgtctatgttcagtgttagtcctaatgggtacaagtttctatccactgctgataaaggggatggagcatcgctgtttttacagctgactgcagagatgattgagctagaggggcatggtggttcacagtgtaaagaagagggcttaaatcctttgggcccatcagaatctgaaaaaatttctgaggtaagtttctcagaggaattatttgtaaaattcattattttagagttctttagtctcattttggatctctttcaggatgaattgaaaatctaccaagtactcttgaatgtcaggatgcaacttgcacaagatattggaacggcgccgtgagttaaatacttaaatgttgacaacaataggtttaggtttctaggctctttacttattggagcaacactgaattgaatctctttaatccattatttcaggtacgctatatgtggtgatcagacactaagaaactttgcgaagttcaggcctagcaccatagctaggttggctaatattgatggtgttaaccaggtatcacttcagaaaataatagtagctaacacacttttatgccataacacagagcactaaacttttttgcggtgcaccctactggaaaatacgacggatgtgatcatattttgtcttaatactcataatgtccgacctttggttttcagcacttcatctcgcattacggcagtattttcatccaaaatatcacacaattggcaaaagaattgaatcttcctgtggat

SEQ ID NO: 8025 - DNA, 2289 bp, Oryza sativa
ccgccgcaccaccggcgcgccagatctgaggtggccttccgcttcccggacgacctgggcctcgggggcggcgcggacggcgggggcttcgacgagatcggctccgaggacgacctcttctccaccttcatggacatggagaagatcgccggcgccgaccgcgaccgcgccgccgagacctcctcccctccccgccccaccaagcaccgccacagcgcctccttcgacggcttcgccttcggggccggtgcgggtggccccggccctggccttgggaagcagcaagacggagcaggaggcgtgttctccgaggttatggaggctaagaaggccatgtcctccgagcagctggccgagctcgccgccatcgaccccaagcgcgccaaaaggtgacgacacccttcggattctcatgctatcttagacttgatttgctggttggtaggattattggtacctcttgcttttgatgaccaaccaacgaaatatatatatatatatatatatatatatatatatatatatatatatatatatatatatatatatacatttattgtgtttactcttgaattagtgagactttattgtctagatatagcattagattttgcaagcaaagaaaggtggtagaaaaataaatgttaacagaaacaaatcatttcatagtctattgaggcccaatatatggtgctagtggtctggaatctctatggatagtgaaaggcagcttgtacgataggactgcagcaacctgaccaactgaattggatgtcctgaaggtctcgccttcctcgcttacgcgggcttctttttggaacgtaagcactcatagaggtggttgaaatgccaatttcttgtttggcaagttgctttcttggaccaaaaagccaatccatgttgttttgttccaaaataagaaggccttggagcgaacgacatatgttcgttatgtgcaataattttatatttactatgcaacacttattagctataaattctctacccaaaactgtttcttttatcaaactattgtgctgcaaccaagttatacaatatttttttttgcggggaagttatacagtatttaactgcgtatattcattatatagggtttaattcatgtcacttagtaaaacctttcctcatttggccccacattctcttctctcttcaacagtattttataacaaaatatgcttctgtatgtgatgaaactgcatataataattttacttattcaatgataacatggttgcaatgtcaacactgttctattttgtggtttgtcttagaacaaaaaactgcatcactttgtttagtctttaaataagctgtgagcgcaaggcgaacggggcagtagtgggaagcactttgcttttgtgtttcttaagcatgcactcttctgatactctttcccccttttctcaaggccttctttatttcatacctaagggccatatatgcagtgaacttagcatggtccactttcttaaatatgtttttctatttgaaaataacagagatatttttttccattagagaatcaccatgtagtggtcttttaatcaaaatgctgtactacaatcaagactgttaacgcacaggttcatggtgtacggtcatatatgcaactggtactataagagcaaacttttgtgcatagctctacaacttatgtagtaataatcattatattcaaagacagctctcctcgatttaattaaccatttgaactttataatgttaactaaatcatttttagcaagtgcattgtatcagctttctgcagctcatgagtaaatgtaaaatttctgagcttgctttggtgcagaattctagcaaacagacagtctgcagcccgatcaaaggaaaggaaggctcgatatataacagagttagagcggaaagttcaaactcttcaaactgaggctaccacactgtcagcacaactgacactatttcaggtaccttttatccatttgtttgtctcatgggttgcagtactactactatgtttagttcatcagtgcaaaaacaataatgtgcatagtaaatgtgccttttgaactgtattgaacaggcagttgtgccacttactagtacatgtgctaaccaaactgcaacttctttacaattaagtggatcatccattagtagaacaatttatttgaactgatgcatatgccatgataactacttcctccgtttcacaatgtaagtcattctagcatttcccacattcatattgatgttaatggatctagacatataaccatctagatgggg

SEQ ID NO: 8026 - DNA, 2969 bp, Oryza sativa
ttaccatcaatatgaatgtgggaaatgctagaatgacttacattgtgaaacggagggagtataacacatgataggattatgtgactagctttatgctcatattggctatagcacatgttgtggaaaggtcgaattctcatccaaatatattctatatggttggccaataatttgttgagctgaatggtggtacctaacaatgaaaatgtatgctctctattgaccaggactattaggttctagtaacactgtattttttttttactctgttcactgttgaccagtattcaaagtttgtgatcatgcccatatttttgtattaaaagctgtgaatatccttttaagacgttttgtttttctgggcagagagacacaaccggactttctgcagaaaatgctgagctcaagattagattgcaagccatggagcaacaggctcagctgcgtgatggtgagcactctgcccgtacatctcaactcttgattttcgttatttccaataaacttgtgttgaaaggtagctcgttgctgtaggctggctgcatacttttagaagatatcttatcaacatttgctatttcttgtatgtaagacattgtgttatcgtcgttttttaatgcaagttttatcatgcgatctcaatcctttccattgtttactttggtaaatctaatcatttgtgagagctccaacacttagttaccgtttagcttcaatagaaatctttctgcattacttcacaatggaactagctaaaattttgcactgctggtaagtgccatgctctattgctgaacataaacttatactgaaaactgattcatcattttagaggataaagctctgtcatgtaaggaatattgagatttctcaagctattagtattgacattttgaacaacttgtgaacatctgaaacacagcatagattaggatacgtgttgtttttcctgctaatagaaataccatattgtttcgcagctctcaacgatgcactgaagcaggaagtggagaggcttaagattgctacgggtgagatggcaaagtcaaatgatgcgtataatacaggaatgcagcaggtcccgtacagcccttccttcttccagctatctgaccaacacgcagttcagcaccatgcaggcgttcagcagctgccacatcaattccaacaacctcatccaagtgtccctagccaccagatgctatcccacccaaattccctctctgatatgatgcagcaagactcgcttgggcggctccaagggctggacattggcaaaggaccagtggctgtgaaaaatgaggcagaggtagtggtgaagtctgagggtagttcaatatctgcaggtgaaagcaacagcacattctaattatagacctacatgtcaacaaattgctccgtccgtttagttttctttgttcatagtctgacatgccttcctgaactgcttccctctctcccactagtttttttttttcaattcaattctttcaattttagttacattgtttgtttgttgatcatcgtgtggctgatcatgtagagacttagatatgctcgtttggaaacatcgggtttatttcttgtgtgttgtgtgttgtttgatttagggggtgaggggcactgagtgggtttccagtgacttttatgtattcttttagttatgttgtagacttgttgtctttgaaaatatgtacatttttgtgttactatgctaattcttaatgggcccgtactatgaaagtgtggaacagtatcagctgttgagaaaatggcgtgttgtttcaactatttttatctttaaaagtggcttatacactttctgaaaaccaaacatggtctaaattggaagtacattatggcttaaaagtggcttatacactttttaaaaaccaacatggtttaaacttaaatacattatagctgaatgtgattagaacgtactggcaatgcgagctatgcatgcaaagtactctctctctctctctctctctggttctttattgtagtatagttatttgctatagagaagctacaataagaaaccacatcattacttatcttttagtatcttcgaagttcagattatcctatagtcttttctaccctgtattagtcttttgctgtccagtttcatattttgcaaagagaaatatatgaccgatctttaaacttggcagtggtgtatgatctttttgaatgaaccatagtatgttcgaacctctttttgaccaggttgatcgctgacgcggtaacgatatatgtaaatttttactaagatgtcatgagacttctagtaaccaagtaattagatcggagctaggatttgttttttcatgggacgatactcgtgtccgtcccataaaaaacaaatctagcactggatataacatatcttagtacaatgaaatatatcttactacaacgaatttgaacagactcttgtttagattcttgtactaggatatgtcacctatacattcctatgttttttttaaccgatggagtagattttttttgtccattcaaaaaaaaaaaactaaagtagattttcttgtagtgagtgcagttttatgtttggatccgcaaataaaaaatatataaatatcagtactgctgcctctttcatagtctaaaaaaatatacactttacacacaatcaattaggggagaagataaggtactcgcaaaatctttgtggagttaacactcaccagatttggtcacattatctagtggaatatactgaatggatttctgacttctaaatttagagttgagatttccaaacgtttggtgtgcaacataaatgtcttgacctatacgtcttatacttttcttcaagcttctattaaagataaatagtctgaaaaaggcttcttttccccgaaaaaaaaacttactgaaattacacttaagttggcacaaatgtgttgaactcattttggcttgcaagatcacatattttt

SEQ ID NO: 8027 - DNA, 21682 bp, Oryza sativa
attgatccagtcaagacgatgtgaaacgacgcaagcttaaaaaaaactgcagttatttaggttggattaagcatacgcgcacggcgcatcatatcgctcactctgcatggcttcggcttcttctgtcagcttaatgctgctcgtggctgcagctatggcctcagccgcctcggcgcagctgtcggcgacgttctacgacacgtcgtgcccaaacgcattgtccaccatcaagagcgcagtgacggccgccgtgaacagcgagccccgaatgggagcctcgctggtcaggctgcacttccacgactgcttcgtccaagcaagttttgatcacctaatctaatcagctgtacaagtagttctccttagactgtactttgagacaaggaaattaataacagaggatgtatctatggacttcactgatgatgcagggctgtgacgcgtctgttctgctgtccggccaggagcagaatgcaggcccgaacgctgggtcacttcggggattcaacgtcgtcgacaacatcaagacgcaggtcgaggccatctgcagccagaccgtctcctgcgccgacatcctcgccgtcgccgcccgtgactccgtcgtcgcggtaagatcacggatgagattactacatgatgcatatatttcttgtagactgtagtagtacgtactcctaatcgctcttggtttggtttggaatccttatatttgcagctcggagggccgtcgtggacggttctattgggaagaagggactccaccactgcgaacgaaagccaagcaaataccgacctccctgccccttcctctagcctcgctgaacttatcggcaatttctccagaaagggactcgacgtaaccgacatggttgctctctcaggtacatatatatgtacacagattatatcagtgattgattctcttacaaattttctgataagaatcataatacgatgagaacttgcaggcgcacacacgatcgggcaggcgcagtgccagaacttcagggacaggctctacaacgagacaaacatcgactccagcttcgcgacggcgctcaaggccaactgcccacggccgacgggcagcggcgacagcaacctggcgccgctggacacgacgacgcccaacgccttcgacagcgcctactacaccaacctgctgtccaacaagggcctcctgcactccgaccaggtgctcttcaacggcggcagcacggacaacacggtcaggaacttctcctccaacacggcggcgttcaacagcgccttcacggcggccatggtgaagatggggaacatctcgcccttgactggaacccaggggcagatcaggctcaactgctccaaggttaactagccggtgatgacgagtacgtgatggtctcagggaataaagctaggccccgacattgctgccaatagcgtgcagctagctgtggccatctcatcactttcatggttcaatggtttcatcagcaagtgcacggaacagactagagagtgtaggtgtatgcatgtgtgatgtcatgtaacgagttgccatgcaaaggcatgaggattacggacctctctttcgtcgtaatcctagcagctacagatttcaactgtcgtgttaaccaagtgaagtgctagtttcgaatgtattggcccctctctgctcttctctgctctggcgatctggcctctgcgatggtttcttctggggaataagttcatctaagttcccttaacttgtcaacgaatccgatttttatccttcaaccacaaaaccagatacaattggtccctcaactatcaaaaccggtgcatattatgtccctcggcggtttcgatagtggttttggctgacgtggcgcctacgtggctaattttgactcggtcttgatctgacgtggcactgatgtggcgcttacgtggcaattcgatccggaaaataataaaccccgtgggacccacatgtcagtttcacacacaataataataataatggtgggacccacgcggaccccacatgtcagtctaattaacccctcctcttctgcttcctctctctcctcctcccctctcttcgtctctctcttgcgctgggtcattctgattctcctcttccccatcttctctgtcttcatctctctcccctctcctctctctcttctctccggttcacgggcggcggggagaggacggtgtccggctgggagaaggggcgcggcgcggcggctagtgggagggaaactagcggatagaagggaaccagcccggtggcggaggcagcgccgccgcggccgtggctgcggacgacgtcgacgtcgacctcggcatcctcggcggcgggatgaacgtgtcccgccgaccggccgacacacgcgcgcatcctcggaggtggctgtccacgtgggcgggtgagggggccacctcgccggcgggagaggggagaggcggccggctgcgaagacgaccctagtgatgatgacgaccgtgcggcgcgcggcggaggccgatcccgtgagcaggaagctcttcgtccacggcctcggctggggcaccagagccgacgacctccgctccgcgtttatatgcctaatcatacaaaggtagaagaaatagcgactagtactagctgactggagtatattttgcttcgtcatcatcatttgcttgtgttatgacggggttgatgaatgaataaatgatcattgttttgggcaagaaaacaccgttccggccggactgacgaggaacccatatcgatccgctcgccgcggcccatggaaacccaacaggagatggcaacgctaccttccgccgtcggcgactactaatggtgggtgatgctcgagcacattgatgaactcgaggtcgacgacgaggactccaactacaactcctgctccgccgctgccgacgacaccgccaatcccgtgagtccatgacgacctcgctcacctccaacggccacgtcgtaagagtctacttccgcctcaaagcgcccccggcgacgtcacacctatgcctctggcaatcactcttctccatttccgccgccgtcgtcgtcgccggccgcatcccctagtgcaagagagagatgaagagaggagagaatgagagagaggaagcagaagaggaggggtgagtagactgacatgtggggcagcgtgggttccaccattattattatttttttttgtgtgtgaaactgacatgtgggtcccatggggtttattattttcccgggtcagattgccacgtaagcgccacgtcataccacgtcagatcgagaccgagtcaaaattagccacgcaggcgccacgtcagccaaaaccgccatcgaaaccgccgagggacctaatatgcaccggttttgatagttaagggacccgttgtatctggttttgcggttgaaagacgaaaatcggattcgttgataagttaagggaccttagatgaacttaagaagtccgcctggagagctgaaatgggctgcaccttttagtgtccccgtgatgtggcccaactacgcctagttaatgggctactggtctggaaagtggattgtagtccgcttgtgtacgctggaataagttcactttgcgtcccgcatctttgatggcaagtttgaaaattcgttgctgaaccgcaatatcaagtatagcctgtccccgaactcgtaaaaccgtgttaactttcgttctaatatagtatggctcctgatttcgtccgatgtggcgctttgactctggtcagttgtgctgagttagcgtgggacccatgctagcccgtgtgttagtaactaactctttcctcctctctcccgctctctcctctcttcccaatccccaaccaggaagcaggtcgcaagcagcgtggataaggttggcagccgacgtccaacgggtgtgtggggagaagggcggccaagcccgatgcgatgcaaggagccatgtccaatttgagaatgtaattcgaactcaatgttaagaggacagatccccggctgtgttcggaagaaggggttgggaacccctcctctccggcaggtataacgaaacaatcattagtgtataactaattaagtattaatttaaaaattttaaaaaataaattaatatgatttttttaaaaaaaaccttcctgtagaaaacttttgaaaagaacgtatcgtttagtagtttgaaaagcgtgcatatgaaaaaaagaggaaaatgagttgaaaaaaaaagggaataagtggacttattcctgtgtacgccttaaatcgccatgtgcatgtgtatagcagggttgtatggcgtccaaaaaaacacgcacacggatagttttgttcggtttggcataacaatttatagcatgttgactgttgacctcatcctgtcagtcgctcggttcatcatttcaactgcttgtgcatcacccaaataattcgactggctaaggtttatcagaaaatgtgtgttcgtctattttttctggtagaagatttacttcggaaatagttgtggtccaaatactgtccaaactcttttccaaacgagtgagaagagaaatggtggccaaatggaagatgatcacgtacaccaaaaaatagtaatcttatagatatatcatcaactagtagtgcacaagctcccacgttaattaaaaattttgatcaatttattgtctacatgcccaattaattaatgtttgaatcctaatacatgcatggaagataaaattagaaccagataataaaagcaatgatgtactcactccttcccatgtttatccatcatataatggaatttaaaatttcttaaatcgatcatcatataaccgcatggacacagattttatcaaaatacaattaatacagcatgaaagaatgtgtacatgctaagatgtaattgacatggtgttttaatcgatacatacattatgggagaatgtgtgcatggtgttttgattaatgtgatttaaattatacttggtcctcgtgcataaacatatatgatgatcaatttaggaatgaggaagtatttagtttgtgtgtttatatgagcgtttgcacgactgtactatgtttttaaaaaatactgttacctttctactccctacattctcccatgatgtattaattgtattctgataaaattcgtgtccatgcagttatatgatgatcaacttgaaaaattttggattccattatatgatgattaaattgggaaagagagagtattagctttttcaaataaatataggggggggtggttcagcaattaaaatggggctaacctacctgtaaactctaaacagaaatctgtgcctaaagtgaaaaccacttatgtcggacaggtatagaaactaaaagataattaaaattgtcaacatcggtttatccagccaagaggaactagaatgcaaaattactttacagcaatgcagctctggcgaaacgttgacagatttggccctctcccacacgaatgctgcatatgttggcttgtagcagccatcgtttctagcaaatcaagtctggtgttatcagacttggacacatgcgtactagtaatattagggagtccctacagagaagtagagaacgaccaagattttgcacttttgctggcatatgtgaagacataactcccgaatatacttgttggctgtttatctccaatgtatctactatctagcaatatgcaggctcattttgctgggagaaaatcgcgagctataaatatgcatgcaatgcagcgttttctcttgcaagagctgcttagacaggagtagttgctacgagtacttgctaggaagaaactgcagtgtgctctgttccaaagagtagtgatggcttctgcctcttctcttggcctattactgatgctcgcggcgctggtctccacggccaccgcgcatttgtcgccgacgttctacgacacgtcgtgcccccgagccatgtccatcatcaagagcaccgtgacggccgccgtgaacaacgagccacgcatgggcgcgtctctgctcaggctgcacttccacgactgcttcgtccaagcacgtttccatctcacaaaccaccctgttttttttttttactttgatttaaggccgaaaagtagctaacaggtttgcctgtctgtcagactacgtgagttagcagcgttgcaagaaaataatcgtggcttaatttttgtctgaatcaacacagggctgtgacgcctcaattttgctggccggaaacgagaggaatgcagccccaaacttttctgtcagaggctacgacgtcatcgacagcatcaagacgcagatcgaggccgtgtgcaagcagaccgtctcctgcgccgacatcctcaccgtcgccgcccgcgactctgtcgtcgcggtaaccatgcatgcatatatcaacgacacaagatatcgagctcgcgattacgaattctgtgatgctgaattgctttatttggtttttaatttggcatgcagcttggaggtccgtcatggagtgttccgctagggagaagggactccaccggagccgctaccgcggcccaggtgattagcagccttgctccttctacagatagcctcgcacagctcatcagcgcgtacgcgagcaagggacttagcgccactgacttggttgctctctcaggtgcacacaatatatataactcctcgatcgatctcctaatcaaccatggaagtgtagtaaacaacagcttgtgttgaaatttgaaaacgatatgtttttgtttcaattatgcaggtgcgcacacgattggtatggcacggtgcaggggcttcaggacgaggctatacaacgagaccaacatcgacgccgcctttgcggcggcgctcaaggccaactgcccggcgacgccgggcagcggcgacggcaacctggcgccgctggacacgacgacgcccaccgcgttcgacaacgcctactaccgcaacctgctgtcgaacaaggggctcctgcactccgaccaggagctgttcagcaacggcagcacggacaacacggtcaggagcttcgcgtccagcgcggcggcgttcggcgccgccttcgcgacggccatggtgaagatggggaacatctcgccgctgaccgggacacagggacagatcaggctcatctgctccgccgtcaactcgtgatctgatcgaccggtttgtatatatccagacgctgggcactcgacaacatgattaattaccagtgcacgaatgcatcaaggaaagaattccagttgcaattaattacaggtgaaacatactactccgtcttagaaagaatccaatcctaacaatgaatcttgacacatgttcgttattaggattggatttttttttttttggaacggaggaggtacgctcgtattagcatacgcaattatagtcctttaaaatcgtagagcattcagtgaagatgtcaccgagaatgtcacggggaatgttactgaatctgcgtccgtttattagcaggtttgcatgcttcttgatctgtaccgacttctctctccaatacaaaatccactcctgttacaagttattttttccctctctctttttttttgagagagagaggactcccgctcttgcaatcttgctagacctgttcgtcctccatcttgcagtagcaagattttttgttttctggattgccgtcggccggtgaccacacgcgcgccgccggcgcgagttaagatatctccaccgcctcggcgatattttgctccacgttgcaaaggcccgtgaaggtgacgatttggcccatctatgccggtgagcgtgctacgtggtggatggggcgtgggccggcttattttcgcggcgcaaaggcctactctttacttggcaggctgccactacttcggcccattaaaattcaccagcggcagaaattgaaatgcttttttttggcgggtagaaaatgaaatgatttgtttttacaggaaaaaaaatgaattgaaaactaaaaaaagctgtcaacgtcgttttaaacattctgaaggtgaaaggaaagcaaaatgactgcacaacggtcagaaaaggagagaattatcttggacaaatgctgaccaatcgattcatctagggttgtgtttcgtctgttagtacggagttccacaccgagtgcacatccggtggattatgttggacctgcacttgtcatgaaatatattgggtgaatgtttctcgtatacgtccttttttcattttcttcgcgaaccctttatgttttttcttcttctaaatcatcattcatatgctgctggacacgatattgtaaatacatgtgtttgtatttccagtatttgatttcagtttaagaatcataatgagtgcttaaattttgactaattgtttctgccattcttctcgaggacagtccatatatttgaactaatctagattctgaacggtgaagttttacctgtatattgaaaattctccaaaaaaaattgacaacattcacaacatatatatgaactactctaaaaaaaatcaagtaaagactcaactcacacattgagaaatgaaattaaaaaacaaatccagcattaattggtactattcacatatgaatttgtctttttatttctcaatgcgcggatcaaatttgaatataatttttggtagaatggtatatgctgtttatactctacattagtaattttttaaataattttacaactatttatattaaatataaaagaaaaggttatacgcgttgatattctctcgggggattagaatccctcttccgtgaaagtaacttacaacttcagattcttctgaatctttgctgatcaactagtataatgtacgggtgtacagattctgattaatcacaaacagatactgagagcagaagaaatatcaatatattgtcattacaacttaattcagtactggccttgattggctgcgattgctgctacagacgctgtggctgaggtagttgaaccgttgcaagctacagccattttgaactgccgcaataacggctgttatggtagcaatcacatccgaacatgcccacgtatgtgatagatcgaaatggcaatggagttcggccccagcttaactgaaatgaactctgcttgattgcatggcagacaaactcattatcatggatgcgagagctgaacattcaactgttacatggtttaaggcgaggcgtggtgtcctaactgttaggacattctcttggatcagtgtcacaacagttactgttctggtgctacctacagtagtagtgcactgtactgttatttgtttcctacgagtatatactggtagcccaaagactgtttagtgaaatggatgaccagggatggtggctgttctgttctcctcactccgttttttaatagatgacaccgttgactttttctcacacgtttaatcattcgtcttattcaaaaattttatacaaatgtataagatataaatcacacttaaaatactatgagtgataaaacaactcataacaaaataaattataattacgtaaattttttgaataagacaaatggtcaaacatgtaagaaaagaaagtcaacggcgtcatctatttaaaaaacggatgtagtattccacacttttccactcacttgctcatagaaagttcacgaacacagctgtaactaaagtgacaaagccatgttacgccattgtttcacagacttttcctgcaagcgatgcctgacaattccaaggatatactataattttgcccggtgaaagagggaagcaggggttagtgttggcggttgcaatttaagttgggcgctgtcacccgatcatgtctctcttgggtgcatgcaagccaaattacttcaccacacaacgtgagcacgtcgaatgccaacacacgttggtcaatactgttcatacccacgatcaaaatggctgcacaacgacagtggattgtgaggactaaccctggactggtaaggcatcaaatctgaatgttttgtctctgctggagaagtacagagatatgcaggtaaccaagtgggctaattaaatctctagctataaatatgcatgggatgcagcactctcctcgcaagccacagccaagtgcagatagctcattgctaggcagagataaacgtatatatctttggttaattgttagcttagcgatggccaaagcaacttgcatttccttgcttgtggtcgtggctctggccaccgcggcgtcggcgcagctgtcggcgacgttctacgacacgtcgtgccccagagccatgtccatcatcaagagcgccgtgaccgccgccgtgaacagcgaaccccgcatgggcgcgtcgctgctcaggctgcacttccatgactgttttgtccaagcaagttccacacataaccagcgcctttgttccattttgacttaaacgttactgcagtatatctctagtcaagcaacttgagtgatatttgaattgaactagaaaagttaaatatatattgtacatgtgtgcatgcagttagatgacatgttcagacaaataaccatatattgtacatgtgtgcatgcagttagatgacaattgacaagcaagacaaataaccatacattcttcctgtttgactaactgtacagggttgtgacgcgtctgttctgttgtcgggaaacgagcaggatgctcctccaaacaaggattctcttagaggctacggcgtcatcgacagcatcaaggcgcagatagaggccgtgtgcaatcagaccgtctcatgcgccgacatccttaccgtcgccgcccgtgactccgtcgtcgctgtaagatcactttccctgcatgcatagcctgcacgcttggtctcgaactctcctctcgatcgattcctgtatggttgtacgtgggaaacggatcctctaacgtgaacttcttcctaacgtgatcactaacagtaacaggtgagcccgtcagtggtggaactcatatatcagttatcacgttcctctggttttacgtcagatgatcccgatccatatatatgacattattaggcttcggcttttgtacttaaccaatggagtaataatcatatgaacgcgcatgcagctgggagggccaacgtggactgtcccgctggggagaagggactctacaggtgcaagcgcggcgctcgcgatcagcgacctccctccttttaccgctagcctccaagaactcgtagacgcattcgccaagaagggccttagcgtaaccgacatggttgctctctcaggtaaagatccaccatatatgctcacaaaccatcaaaccaagcaagcttaattttctgcactcctatttcaggcgcgcacacgatcgggcaggcgcagtgctcaaccttcaggggcaggatctacaacgagaccaacatcgactcggccttcgcgacgcaacgccaggccaactgcccacggacatccggcgacatgaacctggcgccgctggacacgacgacggcgaacgcgttcgacaacgcctactacaccaacctgctgtcgaacaagggcctcctgcactcggaccaggtgctcttcaacaacggcagcacggacaacacggggaggaacttcgcgtccaacgcggcggagttcagcagcgccttcgcgacggccatggtgaacatggggaacatcgcgcccaagacgggaacaaacggccagatcaggctcagctgctccaaggtgaactcgtaagcgagtaccctgcagacactgcagtaagtagtaacaacgtttgtagcagtatatgcagttatgcacgtataagacgatggagtgcgtgaaaaaataaggacccccacaaccactacgactgaatgaatagcaatgtgtacgtggagatgtggtacatgcagatttgccttgctctgtttcttgttccatctgtatgtgcatggaatacagaggacagaggggcatatgcatggcgtatatgtaacgaaatttctggtgcaaaggcacggaggattatactatactcatcttctaaatattattcctacaagctactagtattccacacgagagaccgagagacccatcagaagggatcagaatgcgtgtggctgggctgctgggtcatctccacatgagacattttttattgggccgtgaactttctcgttcgtaacatgtcggtgcttctatgaaaaagcccagtataactgggtcacgtcccattaaggaagtagctcattcacactagtactcctgtgtccaccgtcggatccgagtttcaaaaataaaagggaaaggtctgaacagatattaaatttttggttgaaatggaacataattttcaaaacaattcaaatacaagagcaggccatcacaaaatcagaagtacatgcaagcacacccttcaagaaatcagcagctaccacaggtgccatgcaaattcgtggcgatgactcgtgtcgtgtgtcgcttgaccacaccaggatcgatcgatcactcactggttaacaacccggcagttctccctgatctcgccgtcgtcgccggtgagcgggctgatgttgcccatcttcaccatggcggcgccgaagtcctcccagaacttgtccgggttctcgccgtagtacttgaccagctcgtcgctgtcgccgccgccgccgccctggtacagctgctggtccgtgtgcagcagcgcgcggccctgcgtgaggccctggtagtagtcggtgtccacggtggtcggcgtgtcgtccagcgaggcgagcgcctcgtcgtcgccgacgatggggcactgctcctcgagcgccgcggcgtaggccgggtccagcgtgtcggtctcgttgtagaggcggctgcggaagaagaggcagcgggagtagcccagcgtgtggccgccggagagcacgacgaggtcctgcagcgacaagccgtgggactcgaagttgtcgacgaggtccgggaggtccatgaacgggttcgggatgtcgtcgttcgcgtcgtcgatgctcgccgtcgtcgcgtcgcgccgccccaggagcacctcgtacgagcttcccccgagctgcaaacaaaatgaatcgtacgtgtcacgttgcattgacatcagggtctgtttagttccctaaactcccaaacaaaatttttcgtgctgtcacattaaatgtttgacatatgtatgtagtattaaatgtaaaaaaaatcagttacatagttcgccagaaaattatgagacgaatcttttaagtctaatcgcgtcatgatttgacaatgttgtgctacaataaatatttgctgatgacggattaattaggattaataaattcgtctcgcagtttcctgacataatctacaatacgtaaaagtggttgtgccttatattttacgatggatggagtattagactacgtttaatacttcaaatatatatctatatatccgatgtgacatgcaggggcaaatttttttgccaactaaataaaccctcattttggcctcaccaagtcaacaggatcaggatgtgccgcagtttttcagataagtgaatcacgactcattctcttgtgaaaatgatgtcatgaaagccggttattgggtttaggttgaagaaagattttcaaaaggagcatggtttgtcttatggtcgatgacgttgccctgttcgatagatagctttctactactagtagtacctttcaatcgacagtatgtgtaacgtggataagttttacacttgtactgaacttaccgcgacgattgaatcacgagcagcaactgccaagatatcagcgcaggagacaacattccccaagcaggccgtgttcaccgccaccttgatggcgtcgatcacgtcgaaccctctcaatgacatgttgttcggcttcgccagcttctccccgatcatgtcgtcggtgtcgtccagcagaacggagccatcacaaccctgcatcacgttcgttcatcaccaaaacatctcatctgcttgtaaaatctgcagcaattaaccactaagttgaagcgtgcatgatttagtagctagctcacattgacgaagcagtcatggaagtgcatccggaccaaggacgcgcccatcctcggctccttcaagatggcggcgccgacgacgagcttgatggtcgtcagcgcctgcgggcacgtctcgctgtagaagtccggggtgagctcgccggagccggaggccgacgcaaaagccgcggccatgacggcgaacacaacaagaaatggcgccatttttggcaagctgctactactgcttccagtaccagcgattagctagtgagatggtcgaatgtgctggtttggagtgtgatgctgatgagactgtgtgcttatataatgggctaaatatgtgcgattgacccgtcactattagccaggttaacaaccggtgctttttttcggtgtatgatagagatctaatgcaaatccaggctttcagaatgcgtcaatgcgaggcttgtcaaagaagagatcagtttcttctccatcttatcaattaccaaattgtgacaggcatgtaaagtgctactggtttcttgcgagtaatgccgacctctttacaggatttttctttgtttattttctgaaacataatacaggctttttcttaacaaaatgttacttattacacggatatttacctgatgaacctttttggtaccgaattgaatatgagccatcgtccataagtaaaataatgaggaactacttttgttaagcaagtttgttagcatagttttcttgcagaaaccagcaaaatcgactgatcatatcctcctttataatgagccagtttaacacgataagaaaccatccgaacgctataatctatgctccagcactgcgtataaaatgctttatggaacagctgtttttgggttgttttgcaggttaataaactgccactgctttagaacagaggcatgtatcaaggcgatgcttgacctaatcaatggatcacaatcacacggtttggtcaatcacttgccgcaaatatttaaacgcgtgctttagacataggttgaaacttgaaatatttctctctgtttcctccttggaataagttcactttgggtccctcaatttgtcacccagtctgattttcatccattgatcgtaaaaccgggtacgactggtcccccaacttacgaaaccgtttaaataaggtccctgggcagtatttgacccctgttttggctaaggtggcgcctacgtggctaatttgacttggtcttcatctgacgtggcagtgacgtagcgcttacgtggcaattcgataaaaaaaataataaaacctacaggacccacatgtcagtttcacacacacacacacactaatggaccccacctgtcattctcactaccccttctctctatcccctccctcttctctctccatccggagcggtgggggtggcagcggcggagcggcagggaggagtggcggcggccggagtgggtggggaaggagcggcggccgccgaagtggggtgggcaaggagcggtggcggtcggagtgggacgggcaggagcgggcagggcacctggcggcgacagcccccgcacccgcgacctccctcgtggcgcgtcgatccatgggtcccccgccgccgcgtcgcgaagccagagcacggcggagacgtaggcggcggggaggcagtgctcaggcgcgaggcggtagtcgagggagatgacgatggctggcacggccgcggccatggcctcgcacgaggcgtggtagaagacgctgccggtggagaagaggacgaagccaccgccgtggaagtagacaatgacagggagctttgacgctggcggcggtggcgggacgaggttggggaggtgtcgagggaggcgtcgagcggcccgtcgcgggagaggacaaggccggtggcagacggcggcgcgtcggggacaaaggggcgcgtgatggtgccgcccgggtgaaagaaggggaagggaaagctcctcgctccggcgggcggccgctgacgagcttggtggcggtggaaaaaagaggggcgacggcgaggttttattctcctctctcccctccctctttctctagatccgcgcaccgctccgctgctgccggcggcgtcgaagagcgtgaggaggcgacagtggtggaggctagttgcggcggagggcgtgcgccgcttcctctcccgtcggcgccgccgcgtgccgctccctctccatcacgcgtgagagaggaggggagagagatgaagaaaggggaaagaggaggaagaagggggaggagtgaggatgacatgtggggcccacgtaggtcccactttttttattaatttatgtgtgaaactgatatgtgggtttcacaaggtttattatttttcttagatcaaattgccacgtaagcaccacgtctgtgccacgtcaaatgaagaccgagtcaaattagccatgtatgcgtcacgtcagccaaaaccactatcaaaaccgccgagggacctcgtttacccattttcgtaagttgggggacgggttgtatccagttttacggttcagggacgaaaatcagactggacgacaaatagagggacctaaagtgaacttatcccttctcctttatgttgatttcggaccatcaggcccctgtatcgatactctgtgggccttttatggcctgtcagcaggctcttttacggccgtatatcccgtcccgttgtagggccgaaagcggaacattccggcccatttactgcaaaatctcataatctaaagctggcacttttgctagcttttgattggtccacttggcgcctcttaccttggagaaaaattataaatttatactagagaacaaacacctaacaatcatatgtgagaaaaaatctagagaaaaatatcacatatagattcggcttccagatcttctctttccaaccacacgaacttctactcccttgtcttctataaatataccacgcctactcggtactactcctataactctacaatatataataaacctaaaattattaagaaaaaacaaatctaaaataacgaatttacattcattttccttctttaaatatcctacgtctactcggtactattcatataactctagaatatacggtaaacccaacattattatgcaaaaaaaatccaaaacaaagaaaaaaagaaaatcttgttttcttatatcacagaataggatcattaatacctactcagctaaaaaatgattgtgtttttttgttacacaggatatgttaaaaaaactctaaatataataaataattgatctttcaaaaatttaaatccacaagtaaatatatttgaaccaattaattctgatgaatcttaaaatttattttacttgtttgaattcatcagaatttatgcataaaatgacacattaaatttagtacaactttggcctataaactatgaatagcaggaatcatttgaaaaacacatttttcttacttccaagcaatagaaaaatcaaatagagccgcatatgatcttgctgaatataagtaacttcaattttaggactaaaggcagcactactttacaatttcagagatcaagtactttacaattttagagatcaagcagttcataattatgcagcaacccaaatttagactctcaatgccgtgctttcacatgcgtgtccctgtctcggtcattgcatagtcatgttgtatttgaagtcgcggtatgagtgcagccatgaaatttatgtctctggtgagacgagtattgcggcaatagtgcagcacaaaccaatcgtcaatcgtgctaaaaatacaaacatatttaccccaataaataagataaaaataatataaaaaagttgaactagatttgcatcttacctgcaacgatataccctcatgcacaggcataagttgagttgtagagagaactccataatcgcacattgggaatgttgttattgacctaatatcaaaatagcaatttgtataaaaaaaacttattttctattcaaaacttcattcagtggccattatttaaaaatgtttttctttttaggatagattacataaaaatcgataaattcatagtttgcaaggaattacctaggcgacgactagtacataatcccgtgggcgcatttcttttttagatagattacataaaaatcgataaattgatagtttgtaaggaatcgcctaggcgacgactagtacataatcccatagacgcatttcacgactaaagtattctgtgggccatatacggcccaattatgaggaagttaggccttacggtctaataaatcgacgcgtgcatgatgaactttcatgaaaacgcttcgtgtaagacattcgaccgtgttcggccccaccatcatttacccatctcttatgggatcatctgtacatttgtcgacaaattttctcctaaaaatttcgcatccaattatagtacaatcgtgatgtgattatattgtaacttgtatataactcttaacaatctcttcgtaacatgctattttggtgaaacggagatcgtgggaatgaatcctctcacatgtgtgcgtgtagtgacttttttccttcttcacttgcacatgaaacaaatctaatggttcaaaattgttggaacaaagtctaaaatgcatggcaagggccctctcctctataggagagagcccatgcttgagttctttaggagagaggttgagagaaagaggataaagtttggatggccgagaatggagtgggggtgtgggggggagatcctcttgtccttggagggcttattttattcatatgtaacgggaaattacatctttacccttaatttactatatatgtacaacatcctcttgggggtattttaatccttttatacattagtttatacgacactctaagtatgtggttattccccaacaagaaatatgtgaaagttacatgcaagttgcattatagttacatgtaagttacaatgtaattacatgtaagttacagtgtaattatactatgatagtacttaattacatctgtcaaatttttaagaggaaatttatagacaaatatatagcaaaattgtctctctttcacgcgatttccatctaacacatcaagcctctttgaccccttccctatctctctctatatttttcgtcggcctgacatagggggcccaaggtcgtttgttgccatccccacaatctccggtgagcgaccaaagattgaaagatcttacaataagggagacagatccatttgtcagagtggaggaaggatgcaggaggtaggccatatcttattttttctttttggagctttttgtgaggatgttgcaagctattattttcccatgcatgttacgccttggtgtaattgaatgttttactatattttaattgtatgttgcgcactttaattcttaggtgttgcgactagcttatttaaatattgcatttggttgaacatttttctctaaccgctgaaacatttttaccgaatattgaaacatcttaaatatttttattgtaacatttcggtgaaacatctaaaacatttttgtacggacgtctgggccttgctcctctccggactttcaaggttagtgctgtagaactctggaactaacatgcggctgattaaatgagttgatgggcagcttaattacggcccgcctgtttagccaattgatactcagctcacatacggcctaattaagttagattaactagataaaagaacatccaacacaggggcccagctcccagctagtagtactcagtactcgtctcgatgctacgaaaccccaccttacagaagcgtaaaactgcgtaagcccatcaggactgggcccacatggcagataagcatggcccgagttcgtagtaaatcccccaagtcctgcacggggtgatcacatcaacagtgtgttcctcaaggagcgttgtcacgctacaacgtgatggtggcgcgccacggcggagaaatggcactcactgtttcctcgtgacgtgcgccaaaacaggctcgccacggcacgccccttgccgccggggaaatgaatgatccagggcggcagcagagtaccagaccctaagcttcagacgcggccccatctacagccactgtttcgcaatgcttagaaagatggcagcctgaaataattgaactcgttcggccgggccaacccggcagagaaaaaaagggattattgaactccaaaagtgatcaaatgcggtggagcagagctctcgtgagtctaatcccgcaacgagaacgcatatgaataatggttttgcggcgggtgcgttctgcaatgacaggccaacggtcaaagcatcccaactcccgcctcctcctcgtctaaaaccactcgcttccaaacaatccaaaccttccatgccatttggcatttttggctttgcttctcttctcttcctttgctttggctcttccccaaaatcacaagacccaagaaagaaagagagagagacaaaacaacagatcatctttgcagcactgtattggcactgtaccgctcgacatgaacggcgaggaggctccggccgggagcggcggcggcggcggtggaagggcggagatcgacacgtcggcgcccttcgagtcggtgcgcgaagccgtcgaccacttcggcggcggcgccgccgccgtctggagctcctgcctcgtcaaccgcatgctcactcccccgaaggtgacgcctcctacagtaatcttcccaatattcgtgcttcgttctccatttctcccaagtccaaacaccgtgctgttgagtgtcgaacgaactgttaatgtttcagtacagttgggagtgttttgtactactagttttgtcctcgttgtattagcaaaatcagcttgcaaatctgcatcagtatttgtatgctcccttttgtcttatgctactaatccgattgcaggaacatgaccagatgaatgggcagacctttgcactagagaaggagctcatcatcaaggaaagccagacgcttgatgtgctcaaagaattagagtcctccaaaaggatcatttcggacttgaagctaaaagtgcagaatgattcagccatcactggacacccgggccaaactgaagcaccaggtgcagggcctgaggagaggcgctcttctgaaaatgttgaaactgatggggaattgggtggcctggattcacagaatctgcagcctccaagttcagtgctaatgcagcttgagcaggcaaaagcgtacttgaccagaaccacagctgatctagccgagataagagcctccgttgagtcgctgtgcaatgagatagcaaaagagaaaatcttggtggagagaagtcgagagaaggtttgctccaacacatccttgatctcttcgctggagggtgaattggatcgcactacacataagctgcaaacgctgaatgataggcaaagaaggcgcgaggattcgtcacacattctgatggagatcaagaaggtgacatcagagatagagcagctcaagagcgcatcaaatgcatcgaaatctgaagctacgatgttggctgccgaaattgagcagacaaaggcaagcattgcaaccgctgaggtgaggtgtcttgcagccaagaagatggaagatgcagcaagagcagcagaagctcttgcacttgctgagatcaaggccctacttagcggtgaagcttcagctggagatctccagggtactgatggagtgaacttgtc

SEQ ID NO: 8028 - DNA, 39421 bp, Oryza sativa
gatgggcttgcccaccacctctgcctctctcatatggaggccgggcgagcttgagcttggacaggctcgctggtcgccttcctcttcctcttcctgactctcccgccttcgcttcccttgcatagaggcgccgtgagctcgagcacggataggctcacccattgcctccctcaccgccacccctaaacagcttacgcggttgcagaaaaagataaaagaaagaagtgggacactgacatgtggccctatatgtttttctatttatttttgctggttaggatatcatgttagtgaaaaccagccattcgtaatgtcatgggacctatcttaaacagttttgccaagatgtgatgtgaagatttatagttttacgttttaaagagatgttaattaaactcaatgtaaagataagctacggcaagtggtgttattcctttcatctttctgaaactcctgggacataaatcgatggaccaaacaaaatgggacgcatgtacacacaaaatggccgtcacgtaatcaaaatcccgtttagactaactggtatgggcctcttgtacgtcgaaatcccatttcggcctaatattcataggtcccagtctcgttattgggccgcacgcacgacaaaagatggaataagttcaccggaggtccctcaacttaacaacgagattatttaaagtcccttaaccacaaaatcaaaaatgtgtacccctaagcttacataaaccgtgcactaaaggtcctatggcagtatatctgggtggtttcacgtggcatcctagtcagaaaaaaagaatttaaaaaagtatatggggtccacatgtcagctgcacatatctctctcttctcttttcttctccctcccttctcttttctctcttctctcttctcttctttggtcagggaggccgggggccggcgagcggagcgacgatgggcgggcagcgggcggagcggcgctgggccacgggcgggcggtgggctctgcggccacgaccacggcagttcctacagcggcggcaaccatggcctcgacgggaggagagaaatgtggagaggggaggcggccggcggaagatgggggaggggagaggcgtcgccttcctccagacgggccgacgctgtccgtcgtcgtgcacgacgccgcagccgcgtcgaaactccacctccacaattttactcggataccatgataagagcagaagtaaatttcacatggacattcggcacagctctggatacagacacctcaattaacaaaccaaaatgtacacatttagattccgataccaattaaccgatcaaagagcaaacatatgaactaaaaaacatcgattaaccaatcaaagactgaaaattcagattttctgacaccaattaaccaatcaacgagtttaccttgcggcatgggagctcatcgccgtcgcccctgcccagaccgcgctccatgcgcacaacttcctcgccacgccgccgctccgcggtccaggagcgcctcaccgaggagggaaagagcaaggtaaactcgtcgcttatttccctcaggcaaggcggcaaccaaaccactgttctacctccaagccgtcgtccgtcatcccctatactgctgctccatctcgtcggcgtgcggccagattgccagaagcagcagcttcccggcggtggttcgcgggggcgggcgcctagcctaaaggtcaccggagccgccgctaaccgttgccgacggccgctccgcgtcgagccgtcgactccctcttgagtttgctcgtcgtgccaatgacgacggcgacgttcgctgcgaggcgtgcaggtctagggagtcggcggagcagatgcagacgtccccagccgaggccgccgacgccgcctccttaccgcccctagttggcgtcgcctcctcgccggcccaagccgtcggccgtcgtcggctcgtcgttggcgtggtccccagccgacgcccccacgccacctcctcgccgccccggctgcaacgaccgccgccaccatcaccttgtcgagggaggagccgaggagagaccaagagcaggggagagaggggaggagggagagagagagagagcaggggaagagataccgtgaagaatgaggatgacaggtggggcatgctttcgtttttaccacatcagcacgagtggaccgggtcaaattgccacgtcagcaaaaccacttatctatactgctataggagctagattgaacggttttatactccctccgttttaaaatgtttgacaccgttgactttttagcacatgtttgatcgttcgtcttattaaaaaaaatttatgaaatatgtaaaattatatgtgtacatgaaagtatatttaacaatgattcaaattatatgaaaagaataaataattacttaaattttttgaataagatgaatggtcaaacacatactaaaaagtcaacggtattaaatattttaaaacggagggagtatattttaggggtgaagatttctggtattgaggataagggatgtcacacaaactcggtgtaaagttgagggacggttattccacaaaagatccccgttcaagcccatgggtcagccgagtcgaacaggctgcatcaagtggacgttcatgggccggacattaaatgggccgatttctattcgcagcccacgttgcccgttccgagtgtttgaccggcgtctcgccgtcgccggtttcatcacggaccaaaaaagcagctgaaaaatcggagaaaattcgcccaattttcttccaatctgcttcttaattcttatacaagcagagagatttgattttgaattttttttacagggtattgatcgatgagatctcgtggtgacgtcataggacgtagaccatgccgacctcgagcagcgacgccggcggcacgcgcagcaccacgtccgggccgcggcagtttcgccggaggaagttgtacccgacgccgacggcgagcttcttcagcagcgacgagcccggcttggtctgcacgtgcgagtgccccaggatgaacgccgtgccggcctccctcgcctcgcacagctcctgcagctcctccaccacgcccttctccacctccgggctcgccgcctccaccacgaacctcaccttcttcgtcaccggcgccgccgccgccgccgccgggacctccactatcccgttcgggctgcgcgcggcgtccaccgaggacacgccgtcgtgggaggcctcgtagctgaggcatcgccggagagggttcgtcccgatcaccgtgagcgcgttctcgcgctcgtagcggccgtcgtcgagctgctcgctcccgctgccggcgtcgctgcagcggtggtacagcgcgtccagcttgatgaaggtggcgaggctctcgacgagctccgcctcgaacgagtccacgtcctggtgcacgtcgcggtagccgtaccgcacgatgcaccggtacgaccggtgccccgccgggccgacgcggccgacgaggtagcgctcggcgggaagcacgtgcggtaccgggacggacttgacgcagacgaacaccagcacgcggtggaacgccgggaggttggtgacgaagcgggagaagttggccggcacgccggaggtgaggtcggtgtagacgaggccgatgcccgggacgcgcaccatgcccagcttgtcgcccagggcgagcagccactccagggtcaccttgttgtgcaggtcgaactcgtacttcttgatggtggtgtggtgccagatgaacatgacggccatgaggatgagcgccagcatgatcggcagccacgccccctcccggaacttgatcagcgacgccgagaagtagagcacctcgatggagccgaagaagaggaagaagacgagtgccagcgccggactccggtgccaacacagcatgatcaccaaggatgtcaggcatgtcgtcaccagcatcaccgtgatcactgccaatcctgcacaacaactcacattctaagcaacgcaatgaaattctaatgcatatctgttgcagaagttcagagcatttgtttgatcggattatgaacattgttttaatcatgaaatatatacttgaagtgatcagaaagagctgaaattacagtgaagtatagctgacaggatggtaatggatactcaccggatgcatttcccatatgcttggtatcgcgaaaaccgacagtcacagcaatgcagaggaccatgagcagccagttgatctcagggatgtaaatctggccatggatattctcagatgtgtgcaccactttcactcttgggaagcaactgagtgactggctctggttgatgatggagaatgttccactgatgattgcttggcttccgacgaccgatgccaaaattgccagcacaagcacaggccaccttacactctctgcattttgcataagccaaaagaaatgctgtaacttcagtgtgtctagataggtgcagttcttcagaaccatcaactgctacacatgttcagttcagaagaatagtgatgatgtttcagtacctggaaccgatatatagtaaccaatttggtaggttgagttcagagtgtgatgtttcgataaatacgcagcttggcccatgtatcccaaaatcagtgcagggtatactaatgtagtgaaagcaagctgcaaaaatcaaggttcagagttgtgatttacagaaacaatgaaggaatgaaaccatggaacacatggactgaaaattcaggacaagcgaattacctggattgcactgtaggagaaatggccaagatcagcaaacattgcttcagatcctgcaatgccaaacatttcagagttgctaacttcatccaataatccatttccttacaattttagaacttacaaagggaaaggatgaactttatctcagcatacgcatacttcactttacctgtcatgcagagcaaaattccccccagggacatccacccagacttcttagtcttcctcaagaatttgagcatgtaatagggattaagagcgcgataaacttgagggttccagtggatgatattgtacaagccaagcatgctcatgcaaatcaaccaggctaggactattggtgcaaagagaaatccgacacgatgggtaccgtaatgctggagtgcaaacaggaacactaatatgacacatgttatcggaatgacggcatctgcacagaaaaacgcataaatgagcatggcaaggaagctaaaaaatgtgaaggttacaggtgatgtagaattaatgtattagtacttttgcatttaaagcttccaccttactctctctcagattcagtttatgaaaaaaattcctaatccaatcatgatcattatcagcagtttgtatagtttggggctgttcttacagtttttcattatatcaaccaacaaagatctacccaaagctgaacagtcttgctaggctgtttatatcattaggaagtactacatgaactagctacagctagagtactactcataaaggtgttctgaaacaattgcacttcagaattcagagttgagactttacattcatgctgatccctggacaaggagagttcaagccctgaaaccgctgagaatactgcaaacagacaaatcaaatagcagagagccaaatgtaagcaactcttttctccaaacaaggtacgcaattttcgaagaacagtaaccaaagggggaaaaaaaagctcagtctgaagattaccagatatcgcgggcgtgaggacgccatccccgatgaccatacaggttccaatcatcaccatgatcagcagagcagtctgcagagtcttgtgcttctcaagccactccttgattcgagacctgttagccacttcaggcgggtactccagcttgtacgtggagagctcctcgtcggcgacctgcctgtttgggaggaggctcacattggcgtgcctgcagatcagagagtagagcgcaaacgtccctcctgccaaatccaaatcgcaacaacaacacataagctcaccaagaatcttctgcagactgcagagaggcagagttcagaatcttgcaggcagaaacaaaacagcagcagcttgagagaggttaccttcgccgttgtcgtcggcgcggaggacgatggagacgtacttgatgagggggatgagggtgagggtccagaagacgaaggagaggacgccgaagatctcctcgttggactccgagtgggtgatgtcctccgcgaaggtgctcttgtacacgtacaggggcgagatgctcaggtcgccgtacaccaccccgaggctctggtacgccagcagcagcgtcgtccgccatggctctctctgcagcaacagcaaaggtcactctgcctcagtcacttctgcattggttcgagcttagctgccggattgatatcacctaccacggcttaagctggaaaaagctctctcacctttcgaggcgccatgcctctcccgaactcaggatccattgctcagcaagaaactgatcctcctgctccaagaaaagatgaattagatacaacacactgtcataacttgtatagattctgcaggccaagaacaagattgaacacagatagaggacgcacctgggaacaagcaagagctgacaatgtgaattgcagtagtactaggtaatcaatcgagagaatcagctctaagaaggggaaagggcgaggagagctgggaaaagcaaggatgcaaatatatccaaggtgaaaagttgcagatggagcccctcaagatcactaattggaatgaatgcgaggtgatggaatggaaggaagcgatatagacacgtgtggtggagcagtatcacacttacaatacaaatcctattaatcaactactagtgctcactcctctacctaagcttcaaagagataatcacactaaacttacaaagttgggataacaccaagttgcatcatataaaatcaaatcgatggatggcaaagtgcagcaggtaggggatttaacgagagctttttgggcatatgaccgaatggaacagccaaggcaggccatgtgggtccaaggacaaaagcatgtgaactcacattctcgcatcacagcacaggaagtgccgactcaatgagcttttgctttcagaatgtaatgcagaccagggaagcctcccctagatcatcactattgcgttaatggtggaattcgcactccaacctcttcttcttcttgcctcaaaccaatgcaaaaagatccaaacctttttggtcagttcagagtttggcagggaggagaggataggtccaaatcgaaaagaatagatgataacggatcaccaattctttttgaaagatggactcctaccacttcttatgtctcgagaaaaatgtgatcttactcatgccgaaccttatgtaaacttgtgaaagcgaaagaattgtttacattctaatgcagtgactggtccaaaagtggactcctatttatttttacagagaacagttcttgattaattatagctgcaaagatctcatatttgcttgctgaaagggcaagaacaaggagctagtaacagcacaaaacccaagagatcgtattcccatttttggcttctctactatacacattggtgtgcaagaaacttctgaagaaatcaaagaagcagcagaagacagaaaagcattcccctagttctgcacccaacccatgtctgcatctcaaatgccaaacgagctactactaatcttttaggacgacgaccagaagaggacttgaagaatcgacaaaatatgactctgatgcaacggagaacattaatacagccgtgccggccacacaagtttgagctgtttctttctttctacaatcaaataaagaaaagatggaaagaatcaagcaagtaccaagaacacatggccatctcctcgagcatcccgcgatgtgccatcgatgatccgttccacgccacatggatatgaataaaagcgaagcgaatcgtatccggcactcccaggcttggtaatattttttttagaggagattgtatgctaaattttttttatatattaaaaaaaccattgcagatatacgtaggttacaaaataccatcatactatatgaaaataaccgaatgacatctgagttctagacccacatgccaatgacacgtatcatggtatctttcaactctttgaattttgtacggatatataaacattaacatttgtaatatactgtgaatatacacaagagtaattttcataaaattataaatatttgatcaaattatcacaaaactacagattttatcagaaaactacatatttaagactaagtatcacaaaactacatatttaacaataaaattatcacataattacatatttcggggtttaaatccttagcactaatattatatttgaattataaacatccgagttttgtctaaattgatgctaaatttgtatttttatgataattttgttagtaaatttatagttttacaacactcaaccttaaatctgtagttctataataaagttagtattaaatctgtagttttatgatatattatcttaaaattgtagttatgtgataatttaacaaaagtatttgtagttttatgaaacttaatataaatataatggtatattaacacttttacatgataggatactataagactgagtttggactggccaattagaaacacctctataccatgaaaacgtacgactcattaatacatgattaattaattaattattagcttaaaaaaattttaaaaaaatgattaatatatagaattattttaaagtaatctttatatagaatttattttttataaaatcatattgtttagtagaaaacaaggtgtaaaatttgagaaaaagggtagcatcagtttcattcaaaggacaaggactatccgatccactggtccaatttagttagcagaattaagatgagggatgctgttgggtagtcctccagaaaccagagcgttaacatcagttgcatcgccgcgccgtatcggaccaatcctttccatttccattgtttctatcaacgtggagtgcctacctgctcgtctcaaagagatcgagaggcagcacatggctccgtctgcatgttgccgttgccgccggctgcatcgcaacgcgtgcctccaacgataacgacaatgtaaataacgtttctctcaagactgaaacgaatcctacagcttttggtccccgaaaactcgccaggttttcctgtgcctctcgtccctcgtcgacggtaaggaccggattggcaaaatcgcaatcccggacatgaatgaaagcagtactagcttcattgatgacaacaaccttgtcgtatattttcctctctgctcttcatctcacatggctgcacagaagaaggaacatgcatcgatgcgtgatcagaatgacactttcggcgctatatgcatgctcgatttgcagcatgctgctatccacagtcacacacagcatgggccagtctctaaggtccacagcgatcgtactacgcgtgttggggttggtagctcgggttgtggttttggtttggccgaccacgtgtggagatgcatgcgagtgtgtgtggttagggtgggcatttggtctaaccgaaaatttcggtctcggttttcggtctttttggtttttgaaaagtgaagaccgaatttcagcgtaaaaatgtcaggaccgacaaattcgatctcggtctcggtcctcctgaccaaaattcaacaacattttcatatatgcaaagaaataatgaaaattttaacacaaaaaccacacaaaagttcgtgtgcgcttatgagtaaagaattttattatgttgcatgactagaagaagtagggatatgaaaaaaagagtttaatcctattaaacatagtggattgtaggttgcatttagacattttttaggcaaaattggttatatagcatcgaaagttcacgtttttggttttttagcaccttaagttaccggttcactttaatagcacccaaagttcaccatgttcccatttttaacacttacgtcaattctcgatagttttccgtccgtcttgatctagccacacacgatatgacgtttgtacccctcacaagtacaagtataatgcatattaatgaggagtagaaatgtcatatcatgtgtgtggctggatcaataacgattaagacggacgaaaaaattgacggaagtgctaaaaatgggagcagggtgaactttggatgctattaaagtgaaccggtaactttcagtgctataaaaccaaaaacgtgaactttcgatgctatataaccaattttgccttttttcattattcggtctattcgattaaccaagaagactaaccgaattgactgaacaaaattcggtatttcactgcctaagatcgaattgatgaccgaatttctcggtctcgatcttttcggttcggtctttttctgtccacccctatgtgtcgtgtgtgtccatccatgtgcatgtgaagctttggaaacttgccctgatcctagaggacaagtgatgctcacgtgtcgttgctaacctgcgtactagtggaatatcatttttgtgtttcttctgtacagtgtacagttgggaatcgaccagattaggggtcaaatccgttcaccagcttggctatactttgctgtgtttctgcacgggtgaaattggtagcgtttgttcgtgttaccacctccatgttcagctaccgttgggtcgtctactgcacttaacgaagatgtaatctcgttcaagacatttgatggatcctttaatttccaacttgtcactcacacactcatcacgcatgattatgttcactcaatcattaggcagcctccatatatgacactagtttctacgtctctagtacgatccattgacgtgattgtactagaaatgctcgagtccaagatgaaaaaatgtcttctcgaagatgccaatctgaataaattgtaaggtacgtactaacctccatttgtctacgtctctacgatccatcgacgtccatcaacatattgcactagaaatgctcgagtccactatgaacgcatggctttctaaagatgccaatctgaacgactgtacagtactagctagtattccttccattttatattataagattttttatcattacccatatttatatatatgttaatagattcattaacatatatatatatatatatatgaatgtgggcaatgctagaaagtcttatgatatgaaatagaggaagtagcttttttttttcttttctgaagatgcacgcaacctgccaccggttgctctgcaccaaacctacaaatactactacctccttcccaaattagttgacgttctagattttttggtactacatgctaagatttggagtaaaatattataatgcctttatcaaatttttcatgaacgcacaaaaagttcacgcgtcaatatactagaagaaagcagagttttggttacacaacataaacggctagaaagccattgccaggggacgaggaagaaaaaaccggaaaagaattgtttaaggactagttaaagaggataaaaactcctagagcaagagagggcggagccccactaaactcccagcaagtccccaaaagcagcaatgccagcagatgatcacaaacggtcttccggaaagatggacttcagctccactgaaaccgaagagaacgagtgatcgaaaactataatacaaataatgcatggttgagcatataagcataattgagggtagaataagaataaatttaaataagatatgattgacttaaaaatgataactattatgagataaaatttaaatggtaaaaagacaactaatttagaacgaaaacgaaaggagtacttctgaagcctgcatgtgattctcaggctggcttatcatttgcgatagctgtggcatattaggctgcaacggtacaacggtacaacctagccgccgctctgctgctgctcaaaagccaccataggtcaaggaaaaaaagactgtcctaatttttttttaaatgttcattgtgattcttagaaagaattgacagatagtctaacttatgagaatatgaataaactagaaaattcagtttttgactaatagtttatttttctaaattctataactatattgtcttaaaatctagataaaaaagttagactatttcataaagtctttgattatgagaaaagttgtaatcggtagaaactctctcggacaggtccagtatagcggctgctgctgcaactctaagataaaagctttcttaatttggtcacatatggcttaatcagtgatagttacttcgttagattggttaggtcgatgtcagttgacaagtacaaatcaaacatgtggtcactggtcactacgtatgtgtacaattcgcggtgatttggttatgtaactgtagattgtataaggcccaaacaaaggcccagttaataattgggctctctagttcaagggccacgcgaaggcagacacctgctgaagtctgattccaaggtccaatcaaagcttaagaggatactaggcacagaaaaaaaagttctactcccgttttttaatagatgacaccgttgactttttatcacatgtttaaccattcgtcttattcaaaaaatttacgtaattataatttattttgttatgggttgttttatcactcatagtactttaagtgtgatttatatcttatacatttacataaattttttaaataagacgaatggtcaaacatgtgagaaaaaatcaatggcgtcatttattaaaaaacggaggtagtatcatttttatttctttacctgaaagacgcactgtacactcacatatcaattacgtatctaggatttttaatatgggtggttcaacttatataatatttttaaataccctaaatataacaaggttagagatataaattgatcaaatgtgcatcataacatattaataagggattttttttctttttccaaaagtttcttctcacatatttatatacgtgtattgggcagttgggctagggtttttttcccggaaccaccagtaccactcctgatccgcctatgatacacatacgtgagtgcgagtgcatttcttaacatatgcttaaaggaatagaggccttgacctcatttaaatcctatagaaaagcataatattcatgtgtattaggattttaacaatagtgataacagctgtacacccatgaatctactactcgcatgctttcgtaagaagtttttttcccccttaaatgtgctgagacagaattttgaattaaaaaggtcaaaggtaaaggtacaaaatcccctcgaactggaagttgaaaggtgccatatccttcaccgaaagtgtaatttgacaaggtgatgaaggattttatgatggtgatggacgattttgacgtaggataggcattccacggattgacaaaacacagaaacagcttaaacgaccacaaaaatatccacacccgggtccacctgtcagttggaaagaaaccccagttctgtccgtggatgtcagagagacaaatcctcggagtcggatgacacgtcggtgtcgcggccggagaagaggtccatgcagagctcgccgtagaagcggccgacgagctggacgaacaccggcgacctgagcttctcccagcagcacaggagctcctcgacgtccatgaggtccctcaccttcctctcctccaccagcatctccatcagatgcttctcgaagcttctgcacgcctcctccacgccgtcgtcgccaccgctgctcggcttcgtcgacgccgccgcggcctcgccgagctgggcctgcagcgccagcacccgagcggccgtcgtcgacgcgggcgtgtcgagcgacggcgacggcgcgcgcaggccgccgccgccgctgtcgtcgtcagtggacgacgatgccggcggccggtcagcggcggcgacgtcgttgcggtcggcgtcggagcgcatggacatgagtggccagaacaccgcgcggacggagctgaagctgcccgccgcgcggcggcgccggcgccggctgctgttcatcttgcccacggcgcggcggagcagcgcccgcgggcgcctcttgaagagcgcgagcatcccaccgcatggattgcactgcaagcaacacgacggcgacggcatcgatcgatcgatcaaccgcagcgcatgcgacgcaatgatacgacgccactaacgacacagctcgatcgtgagctttacgccatatctcttcttcttcttcttgttcttgggcgttgcatgcagtagattatcaaggactagtgggctagccaccaattgtgcattcgcaatgtgcgtttgttggttgctggttttgagatcgatttggttgttgatttgattgaatcggttgagttttatgatgaggcgaatgcatagtggatttgcgggtggaggtggagttcacgtagaggcagagcaggcgagcgacagagtgggaggacacgatgaaatgagttcatagctagcacagacggccaaagcaaagcaaattaaaatgcaaaattagacagatcgagtacgtgcatatgcagtatataccaatttaaaacatttaaccagcaggagccatgctgtatatgtgacaaatctaaatgcaaaattttgcgttgaatgttatttgtcgttaggggagtttaaaacgacctgatgatcgatcaataattgatcaacttacatatctatgttagctagcaagctgaacggattgaacggattgtaagaggcttccatgtagcgtgaaagctgtctcgtttatatttgcctattttttttctctagctagctaactacagcttgagaatttgtatatctgtactttgttcgaagcatcatagtttttgcagactatttaaaaaactattagctcgttattaccatcctaaacgtcctctcttctgtgtactctaaaagttaaaaaaaatgccaaagtgaaccccacatttaaatgtgtggcagacagttttcggcatttgaaatgttccgtcataggaaatgttcaccgtaggcccaatggcccataagtgcggctcgtcattcggaactgatgaattggactggtctgaataaagcagacctggtccagggctaagtaggccttggagatgtcttatgcaggaaaaagtctactgtggctccctcaaattaggtaggatttgactggtatacctccataaaaaaaaaccgagtgtatcgctcatctcaactattaaaatcaatataaaataattggggcctagctatccatcgcgccacagatttttgggtccaaatcacacagattttagatagttggattaggctcatttgatcacttgattagaagagtttatatatgtatcaacatatattaattatatatattgcatatattttatttattagatctttacttcgcaaaaaaaatatcaccaactcatctactaaaagttactgtgtaattacactatagttacagtgtaactacactatagttacactgtaactatagtatacttacagtgtaactatactgtaactatagtgtagttacagtgtaaatatagtgtaattacagtgcacttacatatcatatcaactgaacttacaaatgtaattttagttatataggactgtaattttatattttagtttcaaatgtgaatacagtataattatatgtaattacattgtaatttgcacgtaactgtacgcttctcgtgctcagtggaggtcacgggatttctctcatccgtatctaagtagagttaacatttaatcgcttttgttgtatagtaaaaacataaaaagatacgtgcaagacattactgggtcacatacatgcactgcttccccgtacgtatgtatgtatcacttacatgcatgtcacgaaccgctgccaccaacgaggatatcacgtacgaacggcgcgctgcaccgttagaaaaatcgacaaatattaagaaaaaaatttgacgacaaatttctagcaaaaccaaataattgttatctattttaacagtggtttttactaacgtgactcgttaacctactctaatagccttaaaaaaaatagggacaagctcacacggcccaggttccatggaacataagaaaaggtgggtcaatttgttgcggaggcggcgtgaaaagttgaccttgcgggcggcggatggacagcacacagcggcgcgtaataatactgtccttggcagcatcacttagcatgggtcgccaacgaacgacgtgattgtttcggccatagggtcgagcatgatcgcgtcgtactatacgaaccggtggtaaaacagccgtagtacgtacacatactagcgcatcatcggtggccggatgcaagtcggcactagctacttattgctctcgaactcccccaaatcctctctcgaccgccttcattcctccaatcctccgtgcttttgttctctagactcgaatgatcgagatccatatgtgatgtgtgccgttgcgcccactgcatgcagcagaagccccatcatggcacggccggccgatcgatcaagtcatcaaacgccgtagagccggcccgtagagtagaaatcactgtgcactaggtgacactgaatatatatacatgcccagtgcgcgcgttggccaacctcctttctatggcagtgaccagatcggtgcatgcgtcgacgtcgttgcctgcccactgcccaagtctcgcccaaggacaccggaaaaagcccacatctccggccactcgcgagtcgcgatcgagcatcacatgcccacgacaccggagaatatatattatttcctcgcgcgacgacgcagacggctcgtacgtgcggagtaaacgaggccgatcgagtcgatcgtctccgcgcgcggacgcctgaagcggcgggcggtttgcatggcgtgcgcgcggttgcaatgcacacacggcttcgatcgatcggcggatcggcgcatgcatgcatgcggaaagcggcagattttaaagccgagaacgcggtcgggcacccaactgtccgcctaaaactcgctccatcgatccatccatcgcccggtccccgtcgtctcggaatcatgcatgcatgcatgcttgaatgaataatttgatatacgcatgcgtacgcacgatatttcctgaccagccaattaaccagcacacgtatatcactcgacacgacacgtatagatacgttcctacacacatacactcgtatacgcgtgtactgtgtgtacacatgtacacagaagattgatatatgtatgtagtcacatgtgcatggctggacagacagtgttcttcttcggccgaccgtcgttggacagggaattcaatgtcgacattaactcatggccctgcacatgtactattgcatcgtctgtccacaaatttactcctaactccatcgatcagcacatcatcaccactgtacaagtaccatgtagtacgagaaatgcaccacacgccgccgcaaaggtagactctgttttcctttttaagtcgccttcaggaacccaggtcttgcattgttacacatccaatcgatcaatccagcagaaatcgattgaattactactgcttattaagattcaagtagtaacagtgctagctggatttctgctacgtattactaatcgatcaaaccagcagaaagctagcactacgtagtgctatagctggtggtgtgtgtcagcaagataatatatgcatgtaggagagtataagattatccgctgcatgattaccaccaatgatagataaaccccggccatgactgaaagtcttaaactttactttggcatataaacttgtcatccatccggccgctgggtacacacactatagttatatacactagaaaggataatgatgatggcgttcgagtaagatttgcaaagctacaatcatggcacgggtctttcaactatacctactccaacaattatttatctcttcctacctaacgggccgcgcccgaacactatcaatccatctcaattattcattatctacttgcatacctccaaactctgcatctgtactctgtcgctccgatagaggaatttagggtgctgtttttgtttctactagttccccatgctactactatgagttttgatctcatcgatcatagatagctaggtatcgaagctaactcgctagggcggtggttgcttgctcccggcaacttgtaatcgacaattttggcatggaatggtggcaccgcacgaattgaactaaactttggtacgagcagcactgatccgcgcttgtccagtctcttgaaataagctcgccgtgtccccgcaaccactggcagaatgatccccccgtgaggtgagcctcgtcgtcgtcgccccggcaaaacgcgcagcgaaatcatcagcgcgatcatatgccttcctgctcatcctgctcaggatgcgatcgagaaattaagaacggacgattcctctatctgctaatcttggctctcgcaaaactatcatctcttcaggcttcagcagaagaatttagaagacacatgtatacagattatatattcgagaatcgtgaattttatagtacgtgaactgttcgctgcataggagctcctatagtactgtagctgttttactgatccattgcagacaagcgtgggtgagcagtagttctagttcgtcactggagctagctagctgctagtctgcagtaaaaaaaatgtctaccggttgctgtgcgtgcacacatgtctgaacatctgatgagcagttcaatactggtgcattgtagacatcgagaacaacagcctctgtaggttttgtgtaaaaaaaatgcaggttcgaaataatctgttactgttgcagtacatgttctggaatcactacagtgatgaaaaaaaagatgcatttgtctcttccaccgcatgatcaacctcagtatagctgattgtttatgtggatttttcggggatcaccccgtgccaaggtataaaaaacagacggaaatcactcggttttcgtatagaaattgaggtttcgggccagctcaagatcacaaactgttcagtaaaccgatcaagttccaaaataaattagagttttttaagtcggtagtcgatgggtttcaaacgattttcgtaaaacccataaaaatcctcctagctagggcatttttttacgacagtttggttttgtgaacctttcccgtactaatttagagtaccaatttataattgtacagccgtacaggtgacatatccgttcaggggtgggggcaggcctagggcaaggcatacatccaaaaacttgcttaaattttattgattcactatgtaattttttttcagaaaactaatactccattagtcgagctttatcttagctctagtcttatgtaatttttggcttcgcccctgtacccgttggatagcgagacattcacgatgtcttcattaattttaagatatgacggtatattttttttggaggtgtttataaagatagagtgtatgtgtatacgtctatagagttaagcatacacgtgttgtgagcgctttgtgtttgtattatattttttttaaaagaaagggtggtatactgtttttgagagttcaaatacgttctgaaaaaccgaatgatagtacatttgtagttggatttttctcctgcgtacatgcatgttgtcttctgtaagatggaagcaagctacaaatcaaatgcaactgtagagtccatttgggctgcacctgcactacgtggtctctaatacaaccgtaagccaattgcattaattaagttgcccccacatgaggatcaaagcaaatcacttttgatttcaatacagtgattcgtggtagaccaaattttgaccttttgaaatgttcatgtccccttccaaaccctccatggaccatatcatagctctacctagcagctgcctctggaaatgacttggttcacactccataagcaccagcatgcagttgggctctcctgctgcagctcatgtgccaaatcgtcctggactcgaggtttagctgcagcgatggccattagagacaatgagaaacgcctgttacggcaggcttgtctcacaatgccactagcgaaaagctgaatcaccatcttggtctgcaactctgcatcctttcccttgccgtcagagagtcccccacagcttttacgcacacttcctccatttcaaacattttgactttgtgccatgcgtgttgcatgcaatctactaataaggatgaatctctgtcaaagtaaaattggtgtttcatcggtggacaaagcgtcgacaaacacttgaatttctacatttcttattttgctctggagagcagtctgaactctgaactctctgtatcatgcaccaacatatctttttcgttccaacaatttacaagcgtattgattatgattcagaagcacaaatataagagagaatttgtatagtatgtcagattcttgcaagatgccgctgccgcttttccaccgcaacatctctttgctgccactcgcggcaaacttttccgtaataaaaagtggggtgcaacctcgctgcacgcactgcagctcagctcacccccacagtccacgaccacactgcctcactgcagcagcagcagctacgatgccattgctgagctcgtggctgttccacaagctgcggcggaggagaagcgcggcgagaggagaacccgacgtcgtcgaagcggcgagcaagaagcagcaacctcccatggcggcggcggcggcagcggcgccgtgctcgccgtcgccgaacagggcgtcgtactacttcgcgagcagagaacgctgtctccctccggctcgcgccgccacggacaaccacaagctccgggacacccggttcccgcggagcccgcagccgaacgacgacatcgtgttcgacgtcgtcgccgtctcggcgtcgccggcgcgcggccagttcgacgggatgaaggcgatgccggagctcaagctgcggcccatcctcaccaagcgcgccaccgccaagaacgacggcgacgaaggtgacgcgctggacagcggcacgagcgcggccgcgtcgccgacgtcaagggtgcggcggttcgtccaccacgcgaagccgagcagcgggaggcggaaggggcgggtggcggcgctgccggccgacgctaccagccggaggcggcggcggcggcggcggtgccggtggctgtacgagagcctggtggtggtgaaggagtcggccgacccggaggaggacttcctggagagcatggcggagatgatcgccgcgaacgacgtgcgctcgccgcgggacctcgaggagcttctcgcttgctacctcgccctcaacgccgccgagcaccaccgcgccatcgtcggcgcgttccgccgcgcgtggctgcacgccgccgccgccacggcggcgccgccatcacctagcccgatcaagtgatcgagattattactacgtacgtaccagcaaaacgcaagattaattgctacgtgccctgtacagagtgaccatgcatgtgatgatcgaattcggtatgattaagatgatagtcgttgcacaaatcgatcgcaagatggtttgataaaaaatgtttgattcgtttgctcgatcgatcgtgctatgcttcgccgtgatttcgctgcggatgcaaaggtgaaggatggatgagcgcacgcgcgtgtgtcacgggggcatccatcgcgctttatttttcagaagggaatcgacgcatgctgtctttacagattggagtaggcctattcgcgtcagagtttttctctcctctcctctggaaaggctcatcatttatttttttttaagtatgagtattattttttgtttactcgtactaaatgactaccgtacgcataggatcatggcacaaatttctgtgtacttaccgatagtcacgtctactctcgctatctcacgggccattttctgcttaagtcaaaaattcttgcacgtaggagtaggagtagacttttttattattattattttggctgttaaacatctgagaggtgaaccaaacagtaatccaccaagaatccaacaggacaaacatcgttgtcaaccttagcgtcagtccttcagtaatcgtgcttcactacacacctcacctcacttcactgccactagaatgcagagcagcagcagaggccagaggcgcactgtgacataccactgttcaatttcagttttcaccattgctacactccattccacaagggtgcaacgattctgggcagggggccagggtatgcagaaataggctgaagaaacagacgcccagaaaaacctccctgccatgtaaaagattgatctgtcagttttccagggcacaggcctaactgcatggatgatggatgtacctacccgtgggctcctcggagctgaggtgagcccagttgcagaaaggagaaaagatggatcctcctgccaatgggaccctgcctttcttgtgcccagtggatgcaatcaccaagaatgtgttcttgttgtttctttgggacatccacttgtcaaaattcaatagatattgagagcttttctttctttttcgctgaaaggcaatcgaatgtactcaatggattcttgggagaaatttatgagccaaaagtgtctgtaacctaaagtttcaagaattaaattcttctgctagtgcggtgcatagtacaaacgtgctataataagttgttcagttgaaagttgcaatcaatcggcatctcagacgatcgacgccgaggcaatgctgcattgcttacgtgggtggagaaagagaaaggcaggcagggcaatgtgtgtttcagtaatcagtatggtcatggatgcgagaactgcagttgggaagagaccaacagcaacgaacaaaggtttcgccatctgatttttcagagccccgtcagattcctcgcagtcctgcgcagccactcgtgatgatcgtgaagacgtgaaaccaacataggcatgggcgaactggggatgaacaaaggtcaagtactctgcaactctttcgtcagaaattcagaatacacaagcgtttgagatgttccattgaggtgctgttcacctttaagaaatgtattattaaaatttccattgaatgagttagaccggtgaactatgcagaacaaaacactgatataattatatatgtcccttttaaatatttattttaaaaatctgagtagatttttgtatcaggagaggcaagtaggtaagtggtaacgaggtagagtgggctgtacagcgaatcgttcatgtcgtaaacaatatgggcctttgtttcgttctcatataataaggctgcgttcgtttgtatgatataggatgagaaaacacctcgttttccgcgcgcacacttcccaaactactaaacggtgtgttttttgcaaaaaaattctataggaaagttgctttaaaaagtcatattaatctatttttgaaatttaaaatagttaatactcaattaatcatgcgcaaatggctcacctcgttttgcgtatctttctaatctccccaatctactcctcaaacacaccctaagtccactttgagagcgtttggcagggccagctgcagctacggttgcacatagttagtgtcagagcgtggcattaaagcaactgccgaatatgccctttgactctcttaaaatatagatccaatttaattcgtatccttcaatcgtaatactagatatttaaatccccccactatcaaaattaaagagagttattttgcaccgatttaatagttagggagttaagatatttggtattacggttgagggatacgaatcatattataccaataatgagggagtcaagtggacttatttattttctcacaaagtctccatgagtttgcaaggcccataacttaacccaacggtggcccatactcattttaccccaaaaccatgtttgctctcacttcgcttagggggtgtttggatccaatggtaaatttttttggcgtgttacatcggatatacgtatacgtatttaaagtattaaacacaatctaataacaaaacaaattacaaaatccgcctacaaaccgcgagacaaatttattaagcctaattaatcagtcattaacaaatgtttactgtagcatcacattatcaaatcatggagcaattaggcttaaaagattaatctcgtaatttacacgcaatctgtgaaattagttattttttagactatattaatacttcatgcaagtgttcaaacgttcgatgtgatagggtgaaaaattttgaggtgggatctaaacagggtgttaagtgcaatgcaaacctcaaggtcttttatctactaagcaaaaaaatgaaaatccaaaccaaatgcagcccaactggggacttttatctaaactacaccctcgtaggtgcattaggcccattagcaaagttcagtcccaaccttagtacccgaaaacaaagaagagtttttaacgtacagggcataaacttaagaatattccccgaaatatggtcgatgcacaaaggtagactactgtgcacccacgagtgtagttggttggttcatggttgggctgcctggcacgtcacgccccaatgcgtccccggatgctgcgactgcgatgcccgtcgctttcagttcgcgtgcccgcttcacgtatccttccgtaatcgtaatccgcccacctgatcgctgatagcgcgattagcaatagattttacgattgcaactgcgactgatctctgacctgaaacgctacggtcgcgcaagtcacgcgacgtgtgtgttgcttacacatcgaccaaacaaataaaatcagtgcttagattgcattcgacagcggtagatttctcttttttttttctctcgtacgtaagtttctcgaaatgctatgcgctttctaaaagtttttgttacagaacaattacttaaaaagtaaatattaaactattttaaagtttaattaatcaatgcgctaattacttatcttgttatagctgacgacgacattctgatgtgtcgtgttggcaacatccatgtcgacaccaataggagggttctctggactctgctgccacgtgtacttataaaattgtcccctcgagaaactattatttttcgtcgtcaaaacacataatcttgtgactggataaagcagcattatggtacggtcaatggcaggtgggtcccagaagagtgcagagaacactgacatgtgggccccacaatttcgccgcatataaacggcagccgtaacgagctcggaaatcgcctgcacagctgtttcaacgacggctgctcggaattcggagggagggaggaaggaatcggagtgttcggtaagcttcgcgaagcgggatggaggcgccgcgcctccgcctcccgttcctcctactggtggccctcgtcgtctcgccgccggcggtcgccgcggcggcgagccgaatgcggatcgagcccctccccaccgccgcgctgcgccgcctctacgacacctccaactacggcaagctgcagctcaacaacggcctcgccctcaccccgcagatggggtaagttcaatcaatcggcccaatgcttcgcctcttcgcttcgttccccttccgctgctgctttgtccagcgcctgttgcgtgcgcgtgtaattcatcgtcgttcactgcgttgagtgcgtgatttattagtgcctgtggttctgtggcgcagatggaacagctggaatttcttcgcctgcaacatcaacgagacggtcatccgcgacacaggttcagccgcgggatccccttaattttcatggttaaatctgcaattctgcaccgcagttttttttttcctcccctgatatggtggaagtccttgtctgaactggaaattggaggatacatatttccttaattagtgttgtatcttccacacttccactgctcagagtgcaatgatagaatagaacactgttgaggttggatattggaatggaattgttactacccactgttcaagtgacatgttctcatgtcgtgtttggttataacaattgacaagttcctaatgcgttttcggttgttcagacttaagagtagagtttggttagccatgtacttctaatgaaagttttcttctatctgatgaaacagctgacgcactagtctcgacggggctggctgatttgggctacaactatgtaaatatcggtacattacttggctcaagagttatatattactggctgaagcaagtatgttgttatcctctaatttacttgctgttcattgccttttcagatgattgttggtccaatgtaaaaagaggaaaaaaggtaatgcatttcatttgctaatttaggctgtgatttctccaattactttgttcctaaatatgtcaatgctttggtcttttgataattttaacgagcttggacaggacgtcactcagaacagtcttctttggttgtactgatacaaatacaaatgcattactgaccatataaatacatgcattacaagtttacctctttagtttttaatacattgtttcctgtgcatgtaggatcaattgctacctgacccaaaaactttcccttctggcatcaaagatcttgcggactatgtgcatgggaaaggtctaaagcttggtatctactctgatgctgggtgagtaagcagccctctatagatggtttttgttgttaatacaccatgaagaataatattccaaataactaaaaattataacaagctaaagctttcaggatttttacatgtcaagttcgacctggatcgctccatcatgaaaaggacgatgctgcaatatttgcttcatgggtatgagctagaagcaataaattattgatttgaaatactacacagtatgaacatgttaagatttaagagcatattctatggaaattgatttctccagggtgttgattacctgaagtatgacaactgctacaatttgggaataaagcccaaggacaggtaaactaaatgtcttctcattgtgtaagcctctttcatgagtacagttatgtgaactgaatataacgcattaaaattcgtttcatggtgtcatattcttaggtatcctccaatgcgtgatgctttaaattcaactggacgccaaatattctactctctatgtgaatggtatgcacctttatcatacgagagaagctaggggttgtatatcatgttggtttagatgtatatgatgtgctattatactattttttctcttaggggccaggatgatccagccttatgggctggcaaagttggtaacagttggcgcacaacagatgacatacaggatacatggaaaaggtgattcatgtatttcgggttaagtgtttggggttgggtgaaacctatctatacattgatgtgaagctgacttgtgatcttctgtttgaaaacaagcatgactgatattgctgataagaataacaagtgggcatcatatgctggacccggtggatggaatggtaactgtgtagcaaagagcacaagttttccaccagttttcatactgcaagagaacactcgtactatcattcaactgacttttttttatcagacccggatatgctggaagtcgggaatggtggcatgacctttgcagagtatcgtgcacattttagcatctgggcacttatgaaggcaagtactcattgggtgcattctgtaatcactaggatggcacctatattccagtatgttgcatttggtcttcatgactccaacttatttgtgctgttactggatcaagtagtgaaaagggtttctgaaaagaaaaaaaggagttagtttcttttcaagtgtttttccttgtccttatattttatgctacttgacgttaggggaatttcagtaccgttctgtggatagaagtgtagcgcaaatgatgtgatttaaaattatttggctcctgcattattatatttcaggcccctctcttaattggttgcgatgtcagaaacatgactaaagaaacaatggaaatattgagcaacaaagaagtaattcaagtaaatcaaggtattacactgaatcttttttgtttgcgctctctattatgttgacatgtgtaaacttcaagatagttttctattaaaccattctattatttctacaatgtcattgttctcaaagatcatgaatggcattaaaactttgaaagcgaatttgatttcagcagcaaaactttcatcatgcactaagacaattagcatcatagttgctctttggaattcagttttctgcatatcatgtatattttttgaacaagatgcttgaaccaatggacctgagagctcgcaagtttcccttgctttgttccacctgaggacaggaaaaaactgtacagaactaattacgctacatattgtaaatatctgttttagagtagattattttattcgaacaaatttttttttctccttgtatatgctgttgtaataattaattaacacgttaaactgcactcattcgttttctgcagatcctcttggagttcaaggaagaagaattttaggtcaagggaaaaatggatgccaagaggtgatatacatgtccattagtaattatagtatgcaaatataattattactgtgtggtctgccctgatggtttacttccacagtcctttttttcttttccaaaattgcaagacactaactataacagttttgtgcatgagcaatttacacacacaatagtatagcaactgttttaatttgatattgaacagagcatgtttttgtaacatatttgatatttccccaacttgcctaactctagagtccatcgaaatttcatagggacggtagcagccaccccactagctggtgatgggttttcctatgacatccctttgagaatcctgttcagacagggccttgtatgctagttagaagctacttggggtagataatagacttgtagtgttcgggcattgttcagttggaactgcagttctgccatcttaatcatatactcatttgggccgtcggagcatgaataacgcatgcaaccacactaacagcttgagcttttagaatagattagctgctgtgtggaattaaactattacaaatgcatgtttgtgaagttcttcacatcagggcattccttttcactgatatatcatgtttgcaggtgtgggctggccccctctctggtaaccgtctggctgttgttttatggaaccgctgtgaggagtctgccaatattatagtaaaattgccatctgtaggccttgatggttcatctccctattctgttagagatctgtggaaggtaagttaaataatttccggtttaagtggttcaatttacctctgtttcccgttgaaacaagagaggagtggagaaaacaaaggggttaaaatggtgttgcttatcatattaaactatttgggggagagagaggagaaaaatggtcaccacatatatccttttcatccaaccaccaaaacgtgtagcaaattaacatcatagaataagcatgagcatagtgtagtatctactgacgcaacaaagacagatcaaagtttatcaagattccattgtcaaaaccttatcttgtcagcattttgtttattatatgttaactgcattctgaatctgcatttttgcagcatgaaactctatcagagaacgttgttggaacttttggggcgcaagttgacgtgcatgactgcaaaatgtatattttcactcccgccgtcaccgttgcatcaagttgatcatgaagagcatcatgcctgatgctttcctggaagcacccagtatctactcaaattagacctgatgaatcgtccaccattttggtcgaggcaacaggtctactgaaatttgctttgtggagaatgcagttttcccgtttctatggggaagttcgtgcaagcaaaccacgtaaggtttttcttgcaagcttgtggtgtaaatttattggtggcttgacgccgtttgctgtacaggatgcaaataaataatttattctgtccatccagcggctgtgaaaatgagatggtacataaactaaaaaaaaatgttttttaaacttagtttcaataaataaacaaataacatatcttgttcacctcactcgtagtggctatgaaaatagatagtgtagaaaatgtacggaagctaaggccctgtttagtttccatgcaaaaaaaaaaaaacttttcacattgtcatatcaaatgtttaaacacatgcatgaagtattaaatatagacaaaaaaaacactaattacacagattgtgtgtaaattgcgagacaaatattttaagcctaattacgtcatgattggataatgtagtgctacagtaaacatttgctaatgacgaattaattaggcttaataaattcgtctcgcagtttacaaacgaaatctataatttgtttttgtcattagactacaattaatactttaaatatgtgtccgtatatctgatgtgacatatcaaaacttttcatccctgaaaaagaggacctaaatgtgtccggctgattttgttttatcttaagggaattgtattctgctggcttttttttttaataatgcattaaaccggcctctgcagaacttcgccattctgtgcactgcttctttttctctgtttttcttctctgatttgggaaatgaagaagcaggcttttgttgtgttcaaagctggactgttaggtgacaaacttcagcatctgagagactccactggaaagaaatctcaagacgcattgaagaattcactgcaggatgtaatgcaagatggataatttacttccaccacattctgcctcttgtctagggatcagcctcatgcggatggagtagaagtgaggcacttataatcgctgtgccatattgacttgtatacaactatcggttcactagtcagtacactgtacaaagtaaaaggtatcagagaaaattatactccctcctcttttcttttttctttttatttttttttactttggtaagttcaaacatcaaacatttggtgaaggaggtagtacttcaacaaataccatgcaaagggtaaatatatcacgatgaagcacaaagaaacaataggtgcacctaaacactgtactccatcatttttcttctcttaatcttaaaaagttaaaacgacggatctacaaaggtggtagttctttttttgtgagcattttcgtattattttattttttaaacatttttttcgggttataaaagctaaaaagatgagctagttcttttacaattaaggctcctaccaggagttaacacttaaagacctaatgattgtatcactaaggattattggagtttcagacagctgaaagcatgctattacgattggaatagcatccaagctttgtacgatatcagacttctcctgaagcaagctagtaaagcatccttcatcttccaactctatgattaaatccattgcgagcaccagccttgagaggagggaagtcagcttcatctctcagttggtagagcccttctggcctacagatttattcacgacatgatgcaatttaattagaaaaaaaatgcaacagcacgactgtatcatgaaatgcaaaaagaacacgagatcgcaatgtaagaatcacgtacttgcttcctgtttcagcaggcgaagagctcacagtcacaggcgttgaaacagcggctactgcaggccactttctagcaggcagaggtgggaattcttcgcaaaacttttcgcagagaaaactagtacctaagataggttcgaaagatccaaactcaagaccttcgactagtgatgttttgattggagaagaagcctcagttgcaggtgaggatggctgagatgtattggattcttggagaccattgccaacacaatgaggaagctccacactagatgatgatgatgccgtcatttccctgttttgcacttctgatggatggagtgtccgtagttcccttgattcattgtttggtctgacaaggtcttcatcattaccaggtttttggctgtcaaccatgttcatgtttgtgcaaatattccattcctggcttgctggtgctctctcctgagcaaaacttccttcagctgtaactgtacttttgcttgagtgatcctgtttctttgatggtgtatgacttgtattttcaaatgtaataccgccattgcttgaacttgaacatcccatttcaggcgaactgcgccggcgaatgtagccaattgggttagttttaatcttgaacggccgatctggtaacatttctctctggcttcttccattataatagaatatgcgttccttgtaagtatgataattctgtaacaagtgaatagctaaattacatggatttattaagaatgcaccaatacatgatttataatttatactactatggaggttccgtgtgtagcctaaacaaaagctcatttccagctttccatgccaatattgaagcataaggaacaataaaataattagttgatctacacaacacaaaaacttttcaaagtttaaaaacatggagcatgcacaagaaataatacctccattccataatataagcatttctgcacgttttccaaaatgtatctagacatccttccatccagaactccagataaaatgcatagaaacgcttatatttggaacagagggagtagattatgtcccaagagtcctcaccattctgggaatgtatgtgccagttccacccttcccacggtttgttttttgacttgatgtcgcacgattatttgttgtggtataagaccaacaatatttatagtcaactgaattaactgcaggaaatgaaagctgtgcgaatgcattggataatacatctgttccagaaagcaatgatacattctgtgcatatggacaaacaagaatcgagtcaatttattgaaagcgaaactaattcgaaacagtggacaacaaaaagttaatgaacaaagctgcaaaggttcttacattgagagtatgcatgccagctccatgcgtcccaacaatatccactgtgttatggagcggagaaactggagatttctcagaatcagcgacaggagatggaggcaacgccaatctgttatttgttccagagggcaatgccacattctgctgacaaaccgcattcacttggacctcagtgcgtgatactgatttctgagaaatttctcttgtgctatgcgaacagtaaactcgagataggttccctctctgggtataagcagatgaaactaacaatggccttagagcccttccatcagtatttgagaagctgctctgggttggaatattgaaggagtcattgtttactgcgccagaaaaacttgcttcctgaatcaaccaatcaaacatggactccaggtggtactgaacttttcgaaggcattctaagtgcaaatccagatctcctgatagatccaacaaatttgatggtgaaaaatgagaaagtggcagtttttcttcatggagatcgctcctatttgtctcagctgggcaagaattggaaatatccaaagtatttatacgagtagagggagtcaatatttgtgactggttgttcgcataaatatgttgctccatagatgatctaccgaggggtaaatattcctctcttgcacagtcgtagtgtcgtttcatgttgttgcccttctcttgggaaaatggtgagtggctactgaaactgtctcctgagaccttgttgtaaaaacaactatctgaagtcctctgcagatcaggacttctattttcatcttcactcatatcagattcttttacgtctgatgaatcttcccaaagtgcatattcactttcaggatcaagtgacggttcgaatgaaccattattgccaacgtctgatctttttcctcttccatggctcttcaaggtgttcacaaaaaatccaaagatttcagtaggaataaggtcagtaggtaacatgagaatttgactcaggttttgtgcaccaaatgagaaagcacctcgtatgcggtaaaagcttcctgcagaaaataaacatagatgtacaaaacctatgagaaccatccttcaaagagatctcatgtatgtatgtagttagcaacatatgcctatttcacaagcacagtacctgttctacatgagtaagcacacatacaggaacgtggtggtggaatatagaaaggaaaacaacgcacagaataaagaaagataaaatgatgtagcctccaggttattctgacctttgctgacgcttctgccaagattattactggactttattgggtcaattatgtttagatacttcgggcgaaaattcatgttagatccatcagaatcctttttaagtacaataagtctatcacacgagccattagggccaaacagtaattcatcatgtatccctgaaggttcaactgtcacagggattataataattagaccagtaagtacatgcttggcgatcacttgacaaagcaaaagaatacctgagtatgactcaccagttaggttgggcaaggatgacaaaggaacaggaccatttaaacttatgcaatacttatcccagtcaaacttgctaaaatattccaaaaacttatacaagacctgtttgaacaaagaaggtaccatgcaaaaattttagtccctatgtaaattcccttactaaactgctgaaaagccattgggtgtttcatccaaaaaaaaaaagtttagtccacccatctcagaaagaggctgataaaaattgtgaaaaatgttatgctaccaagaagtacctctaagggactatgcagcgatttgtgaaatatattgaatatgtaaagaacaagaacttccaaggcataagtagatattagtccacgatgagctcccagtatgtggctttcatggtaacaccaagccttgattagcataatgctcctcttgaacagatggtcgttcccaacttcatggtcaacctgaagaaggaatatatactcaactttgttatcaattttgcacgctatatttgttgaaattactgggcagtattcaagatgaatacttccaaatggagcagatagttcagatttccatgtattaccagctcaagaagacagagtgtggtcaccccaccaatttggttgaacgagatgtcaacaacaatattgtcaataacacatttgatgagctttacctggatgcaaaagcaacagcagtattttaaaacggtgtataaaaatatatcagtagcgtatgtagaggtaagaactacatagttaaatctctgccttcttaagagatcatgcatgatactaatgtaaagacatggaaaaatgtaaaaaacattgttactgctccatatgaccatatcatactatacccaaactatctctggaataaataactcaacagaagtatgtcatacaaaaatgcacctcagcatcgatgaattgcaaacccgtgattgcaacatcagcaccatcttcctgctcctctaactcaagtataccacgaacctcactaatgaaagtgctgtccggagctgtgttcccaagtatagttatgtcaatatccccatcagggaggtaggtcttcaaaggaacagatccaaatgcaaagacctgaaatcatcaaacagaaacaccatcttagagaatgctgaatgcaacatagtgtaaagtgcaagatcactatgactgcaccggctcaagaatcaaaatcctgctgtatctacaagtacaacatgcagagaggatttcactacggcggcataaacaagtatccattgcttgcttagcccaagcatgtgatgactgatgagtcaccaagaaatgtaacgagctcacagttgaccaaaccacgccgcacccgattgcatgcatgcaagcacatttacgagcaagctagatagccaaccttttccccttcaatagagctagaaatgatacatttgctgtcattaaaataaataaataaaaagctacaaaccacagtgaaaaggaagggtttaaccgttcatgtttgctgaaaagaagcctgtatttacgctaaggtgaaaggtaaaaagttattagatcatctaagctagtaaaaaaagccaccaccaaaaaggccaaagcataatagcttctcttattttataaaacaaaaactgacatgacgacatgatgtcactcgctcagcacagcaatttggagccactcgagtaatagaataggactggttagtcaaacaaatgtcattagaaaaagacctctcgatgcatgagctgatgggtacgagaataagaaccgattaactaccagttagtcctaatcgcaatcaccgaaacggagcaaagacgaaagcgacatatgagctcatcagcaaaactggacgcgaagcgattaattaagcgcacacgcgctcatcaactcatctaacaccaaaccccaaagacgccgcccgcgattgggatcgagaagaagaaaaaacgatcccatccgaaacggaagcgcccatcaactcatcatcccacaagcgagtgcttattctacttttttttttgtttgcggcacggcacttgtttgcgaaaaggaaaaggaaaaaaaaaagtgaatcagcggcggatcatgcggcgcggcggcggcggtcggagtagatccgccgccgccgacaccggccggagaaaacgctcgcgatgagattgggggggaacgaacctcgcagccgagcgcggtgccgaagagcagcttgaggtagccgatgatgccctgccgcgtccgctccgcctcctccgtgggttgcacccgtaacaccacctcgtccgcggccgcctccgccgcccggatcgcctcccgccggataaacgccggccgcggcgccctcgtcgccatcaccgccgccagcgtcatcctccccgagccggccgacgccgaccaccacccgccaccgtagtcccgccggccgcggtacgccgccatcgatcgctagcttactactactactactggttcaagctgccatgtttggggaatcatcagatcatcaaacaagagcgaaatcaaagggggttttgcaagagcgagagatcaaaatcttattacctatttgcttcttacgatttcattttcgatcgatcccttccgtttctcggtggagttttgagttttctcttgtggttttgtgtctcaaaactcaaaagagatctggatttggggcccaatgctctctcctattgtctcgcctttatatagatcagtaggggctacagtgtactttgatatctgccttttctttttctttttttttgtctatgagttatatatatatatatatatatatatatatatatatatatattctttatggctactgcctttattgaagtggatatggatgccaaaactgggggtcattcgaggatgtatggttggtatggatagataggcattcagtttcaaatataagaaaatgaatcctttaattcctgaagagttttggtgtgatcacataaaaaatatttcaaaactgttgtttgcggtgtagatatgtttcttggaattatttattccaaaactccttttaataatatttgagaaaacaaacaccttatcatgttatttttaaaacactagctttgactactctgacaaagttggtattgccgaataataccgttaaatcacatgtgatagcggcaaaaaaaaagggacaattagagtcaaagcatgtctagccacatcatccctacttacactaccaaaatggattactattccatgtgcgacaacgctaaaaagtatgtgtaaggttacaatatgcatgcaacatcagctcaaattgcgcgccaacaacatggcaccaccatgtgtatgcaatggctccaataagtttggatgagtttgtcgcatgctcaatctgccacatcagccctactagtatgccaacaacatggaaacactatgtatgtggttgtatccaaaaagtttaagtaaggttatgacataccctgctacatcagctctactggtgtactacgtcaaaaggtttggataagattacgcatgcgcgccacattagccctattggcgcgtcggtgcgcaatcaatacaatttaggcttcctcctccttcccttctctatcttctctttccttcaccattccgcccaaagccgtgccttactagggttaagaatcacctaacaaagcatggtgtttgttaattaattcgtactagcattactaggggtttccgccttgcgagagtgacgatgacaaatggcaaactatcattgaaacaagttagtttttacgagttgaaactcgatgtatgttgcacatgctagtaataatgatgttaaagatattaaaattttaacactataaatgttggttatatctcggattatgtcattctaaactaaaagaagagtccatgtcaattataacgagctaattattaattttgaaatttagagttggattaatgaaatagcgtatactaaattgagagtccaagattagtatagatttatatttaattctaaatatattaattatttaatttttaaagcaactaaagctaactgagtccaaagtatttctaattatatgttttttatttaacatggattattcatatgatttcatgccatgataatatggaccatgctactaatgataggtgttgctacctatgtgattatgatggaaaaagagtgaagtcatgaaacaattttctaaatcatattggtgtaacaaaggttgtgaaagtagagtgggtgaaagcaatgccaaagaaagggtatactcctagttgttatctagattcaatgttagcaatagtggagaccataggcccctaggtcaatctcagagtctcacacattgtcgagaagctatagttgttaagcatgacactgggaaaaaaactcagtcctaggggaggacctcctaggaggtatttgcagtagaggaaacttctcgctgcagaatcgagaaaaaaactcgaaggcgcctgcaggtgtgtaacactgaaagcaacatggtggtaaggggtctttcttttaatctagccccgaaaatatctatcccacaagaagtagtcaaactcttaacattggaatgctagtaaggcattgtgatcactaggctaaacattgtataggactgctaataactctactagggttctaaaagtggaatgtaaacatttgcacaagaattatatattgtgtggatttttttaataaggcacaataaaataggtactctgtccgatcacaaaagcatgttgttttgggtatggctacagttctcaaaatacaacattgacaaaaaatatatatatggaagaacaaaaaacttgtggaagacaaatatatgagaaatgttaaaatgctgaaaaatatgtgatcttgcaagccaaaatgagttcaacacatttgtgccaacttaagtgtaatttca

SEQ ID NO: 8029 - DNA, 81838 bp, Oryza sativa
  unsure (1)..(81838): unsure at all n locations
aggttggggttggggctccgccccggggagggctgatcgccgggcttgggcggcatcgccattgcttccttctacctgtgagaagagaaccacacacaccacacaccagtggttgaagagaagaggaggagagtgagggggtggcgtggcgtgtgtgcgagtgtggggcttgcttgctcgcctcggtcgccttggttttgagacgccacgccagtgcgggatctggtattccttccttggttgcttgcttccggctatggtggtgaagcatgtgatgtggaatgtgactgccatgcaacatgcattgggctggctggttggcttctcggtgcaggcttgtttttgtgacggaataagttcatctgaggtcccttaacttgccaacgaatctgattttcgtccctcaaccgaaaaaccagacacaacgggtccctcaactaccaaaaccggtgcagatgagatccctcggcggttttgagagcggttttagctgacgtgacgcctacgtggctattttgactcggtcttcatctgacgtggcattgacgtggcgcctacgtggctattttgactcggtcttcatctgacatggcattgacgtggcgcttacgtggcaatttgatccggaaaaacaattaaaactatgggacccacatgtcagtttctcatacaaattaataaaaaattgtggggccaacgtgggccccacatgtcatcatcacccatcctcttcttcctcctctctgcgccatctcctgccgtcttcatctctctcccccatctctctctatcaccggcggagataaggcgcggcctcttccatgggcggcggcgggcgagctcccgtttccccacctgcttccccgccgccgccgaatacgacgacgccgatggcgacgggtttgaggatgccaccggtgcagcgattgggtgtcagctgcgcgggagcagggcggcggcggcgcgctgggccccagggcgcaagcggccgtgactggcggcggaggcacgcgggagcagggcgtcggcggcgcgcggggccacagggcgcaagcggcggcggcgtcgaggagggcgtcggcgcgcggggccatagggtggaagcggcgccgtggaggagggcatcgtcggcgttgggccttctccgtggcggcgaggatctcctccgtcttcgccgcgcgcctcgtcttgagcccaggggcaaatggctcggtatggcgaggtgtggccctctgcccctaccccctacccccttctcgtactcctccggacagagcatggcggcaggcagaagtagcaagtcggcaggttggagcagccaaggggcgccggtcgccggtcgccggggtcctgggagcagctgcggggtgcggtctgtagcacagtagcagccgccaagcggcaaccgtcaaggcggcaagggcaggtggaggcgcagaggggcgccgccgccgggatccagtcccgggtgcagagctgcggcatccgtgccacaacgtacaaggaggagcgcggcgcggtcaccgcattccagagcaggatgatgccgccgccgtggccgacgagggagaaggcggagttcggggatgtcgacgacgtgtgcggcgtatccgccggccagccgctcgtggatgacatgtggggcccacgtgggtcccaccattttttattattttgtgtggaactgacatgtgggtcccatagggttttattattttccggatcgaattgtcacgtaagcgccatgtcagatgaagaccgagtcaaaatagccacgtaagtgccatatcagccaaaaccaccgagggacctcatctgcactagtttcgattgatgaggaatccattgtgtctggtttttttggttgagggacaaaaatcggattcattgacaagttaagggacctaagatgaacttattccttttgtgaccgattttgggctgatgttgtgtgggctttttggtagcctctaagccgtttcatgacttcattcacctcatctccaagatcatcttcggcccggcattcacctttctcaacttatcatttctcgtttttagtaaactagtttcccaagttttcccaaattgctaaacggtggtatgttttttaaaaaaattatagaaaagttattttgaaatgtcatatttatgtatttttaagtttatttaagctaatgcttaattaatcgtgcacgaatagaccgttccgttttacatataggagacagagttctcaaccttcacctctgaacatagcttttttcaaaacctttagattttccaaaccatctaaattcttgtctatattttaggaatatgtagttatgcaattctagaaaaataaacgataagttagaagttgggacttgggaagcctagtttatctaaattcttatcagtcgtttgtcagagtgagcagctgattctacgaatatgtagttatacatttttttaaaaaaaatgaacggtaagtcagaaagcggaaaccagcttttctaaatttacatcagacgtttctcagagttaagcagaagctccaataaacaggacctaagtttcgagaactgtagagccatttgggttttagagcggcaaatcaggtgagttattactggatgtcttggctttggatacatacaacaactagctgcccaccgaggtatgagcaaataaggtgagcctcgtggttaaaaattacaaggtacagtcagtatcatacagccttctacacgtgtgtttacacaagaaagcaagtgaaggactacaagaacacaatgaaaccctatgagattctcaacatcaaaactcaccagctgctgttcctgtaaaaaaagggggaagccgataagatgcacacacaacaaattcaatacccatcctgccatccacacactcaacacggtcagcctcaagctcaagctaaagcagcagcagagtcaccggcagccttgtccggctggttatctccagcctcgtcgacggccatgctctccggctgctctgccgtcgccacacgcccgccgtcgttgttggacgtccgctcttcgctctccaccagagccggctgcggaaccgtggctgcacctgtacatgtgctggagctcccttgctccccagccaagctcgtcaggccgttctgcttcatgtagttctccagtggccggttggccacctccaggaggctgaccatgctcacccgaggctgcccgccatgccgctcctcgtctcggacggcagtagggtggaagttcaggtctatgtggcccttgttgatgtcaaccttgtcgaacatggtcacatctccgtctcgggtagtgtcaaccgtctgtggggatcttgacaggctgcttccctcaggctcatctctgttcatccaagcgatcttcttgctcgcctcggcctcctctcgctccgactgccgttgcttcttcctcatcatcagtgtcttgaagcgacgcctaacggtcatgcagacattgcaggtgcaagctgggttgtgcttcgggcccttcccgctaggtggctggatacacactatgcaggtgcagccagggcgatgccgggggtgctttgtggttgtcgcaacagaaggggaaccttggttcccgacatcaccatagactgcggcagtggcaaaggcatcaaggctgaccgcatccatttcggggatgttctgcttaaaaccaaagctgttccttcgcctcctcatatctgtggtaatattcaagttattgatttttcttttttttttttacaagtttgtcaccagaaatgatgcagtatgtgctacccagtccctatatacttgttatcaatttcaattgtgataagagatgcctattataccagactatccatgttttatttgcccactatcatgctatatgctatatgcaggttcttttttcctagaatgatgtaacatgtcctgaaatgcacgaaattccttttaaataaagtcagagcctccaaatgtccattatggcatgcccagagcatcttgctatcaaggcgtgcatatgaaaagcatggataccttcgtattgctgaagaacaatgtgcaattctttgggggttaattcttcaggtgcagagcaggaacagctgcaaatatgttggaaataattttagttagctaatcatgatgtacaatgaacagttctatcaaatgacgaaagtgtggctagaatgtttttccacaaacagcatacctttttgagtcgattgtgttgtcagcacatgtccacttggatgcaacaataacattaagtggtaaccggcgccattttgagcaatcatcacattgaatccattgatcttgttccctaaaaaatacacagtaaggtattggcaaaaattagtcactggcacagagaatatttgtatggtgtctatgcagagggcaaaccctttaaaatgatatcaataccatacagctccaaggcaatatctattgaaatctaaacaatcgcttaatatttttgttgttttatttccaccacttatggttttcctcatgatgaaaactagagtactaaacggtatcttctgaataaggttcttacccagtagaacggatggtaaaaattgatctctttgcaaacacagggggttcctgcatatgtataatatagttagattaaattcaatcattccaaggcctctcctgagggctgagaaaaaagaagtcagaatttcatgtttcccacaaacgtgaataatgaaatggccagcaaacttacatcatactcttcaatttcgtagtcctcaatcatcacgacagtaggttttgcagttggagcaggacgcaacagctcctgaacctcatcccagtaaagctttagttcccaggcttcttcagcatccattgaaagcctcctgcttttggaaccaatattgcggcctctctttaaaaactgcaaagacccctcatctggcctgctgccgaatttatctgtcttaagccaactaacatccccgtcagctgagttcacatgatgatcgtatatagagcttgtatggagatctgcagccccctttattgactgaagaaatcctgaataaccacttactattgctaaattctcatttgtactagaaaataatgtatccccaagaatggaaccgttggcaatagctgaaatctgtgagtcctgtacagaagtaacataaaaacattgataaaggaagggaaaaaggaaagtgaaacaagcatttgcaggaaaataaattagtaggaagaatgttaggaaaatctaacttactggcaaactgacagtgtttgtggccttccggaagcccataacaagtttccctccaggttctatccgactaaaagtcactgaaaagaaaacaagaatcaccattaagtatgaaaaccttcccagtgagatcacatttaatatggaacaattctacttagcatgtttaaatatattaccacacaaaattcctataacaagtaagatatgaccatgaaatattaatcaggcattgaattttgacctagacgtgacaattaaatgactatgggaggacccctatttgtccctgtcaattccatgtgtaggtcaatttgttctttcaaattctgtacactcaatttagacatttgtgaatacttaaggagattcccctatcaactggcaactttactgccatgagtgctttcccaaatagttttgaagtacttttgaactatgttagatcctttgaaggtatgcaataggaaaatcattgcttatatgtaatcaggcatcagtaataaaattgtaaaaaaagaacaggtgatatcatgtccaaggagatttaacctgtatcaccagcctgtaattgtaatgattgtatgcatggtgtaaccccctccaagacatacattctgctgttgttatttggccagaatctgaactgaaaatgccattctttgccttttgcgtcttgaattgtcaaaggacgaccttctggctgagaaattggagggaaatatgcctacaaaatgtatctcggcaactcaggatgacagcaaacatgaaaagaaatatgttaaaatagttatgctgagaaacaattgtccccactcccagtagttagcaaccattttgcaaagaatgtaaagtagcagtgctctattgcaaaatactgtaaccatgaaaatatttaaataaattatttatataagattattgagcatgttgggaaccaaagaatgtcaagtagcataacaatactaacaagtgtaacaatggcctaggtctctgttgatcaggtattctatgtcagtgtttacgtgaagtagtaaaattaggttccacatcggctgtatttctttctagtcctaactcttgtgcatatactactatataatatagtcacatagatcttgtcaaagcataataaaggttattgttttttgtaacatgtggatgggagggtgttcctgatcctcatttgtatcaaaggatctttaaataatagggaatatgatacaaaaacgataaatcagtaatgaggtaacaacactaaaattttattaacaggaggcagaaccacaaaaggttgtgaacaaaaaaatacctccgcacaggcttttggtagaacaaggcgccctatgcggcctgcatcactggcgcttagaaccttctcaaacagggggacaatggtggaatttgaacttgaagagaaatatagttaaggaaaaccaaaatagcatccagatcagaaataggtatgcacaatatgaaataattcgccctgattgatcagttacagagattgtattatacgcaaagtatgttagctacttatgcataatatcaccaagaagttgataaatataataaggatactctccagaaatttgctgtagctcttggtctgttattctaggccaatatcgaggaagtaattgattgcggcccctaccttctgcaggtggccttgcaacacgaagatgcggaagcatatctttcgttggatcaaaaacagcaccttcaccaacccttggcggtctggtcagaaaatgacgagccctttgtgcatgctgaaatggagataatgcagtggtaagctctcttccttcaggaaatcctgttgttggtgatagcataggtctttccacagttgaagtagcctccaacttgtttccattactagcaattcccaagctcatgttgaggcatgcctcagaaagtgattcacttgtcgtgctttctgtagttgggtctttattttcatctcttcgagactccaatgcactttgagatctagttaggaaaggtatccttcccatgtccccgatactaagggtaggtagttcccatttaatctgcctcgcaccattctctagttctttttgcctcaaaatattactgctttgcccagcttctacgtttttcaccatgaatggaaggttgttcttagcgataatagtaagatcatcgtttctggcatcgaccataagggaggatgtctccagtggtctaccagacaataaatcatcgcttttgccaaaaagtctctggttattttgggatgaaaaaagcttggggacgactggacttggaacctacaaaaaaaaggaacaatcagataatttggaaaagaaatacaaatatgcaacaaacaaacttacagattgaactgctgaatttttaatgcaagtgacacattgaactccaccgctatcaagtagatcaaaggagttcttcgaagcaatacatccacaatggagacgctggaatagtgaagttctttagagttactgttgcagaacaatctagcaccaaaaatgtgcatacatttcacagcataggtcaccatctcaccttcccacaaaatgagcagtccctccagccagattctttttggtgaaatatatcacaaaacacaagctgctcatatgccaacctacataaagcataaatggcataatcaaaatagatagatcaaggaaattggacttcaaattggtataggggattaaagtaacctccttttcagaagaaaacactctttaaccttatgttgttcaactaagcatatgtttttctccatcaccaaaaatcaattgtaagaaaaatcaggttgcataactacaccaatttcacaatacatctattttttaccaagcagcaattttgacaactcatagagctttggcaaacaaattcccccctttttacaccaaagcgcaggaaacgtcatccgggacagcaatccagttacaagtcaccacaaatataattttaattgtgagaagctcatgtgcagcaagtaactgaacgatcatcgaaatcccagttgagcatgatgtccactcaattaactgctagctaatcgcacaacgagccatcaagtcaaccttccaaagtttcaccggattttccactttccaaaaattctacacgcgcaacactgttgcttctaccccggcacagtttcctcataaatcaactaatttgggcgccaatacgagatcaccacaaatggtaatggtaaaaatcacatcaaacaagtaataaacacaagttgtagccgttggaaaaacaaataaatttagggagaaaaagaggggaaatcatcgagacgatatacaggaaacaaccaaaaaaaaaagagcacagcagctaattcatgcagccagccatttcagccgcggcgcgtggaccaccatgggcgcgcacagcaagctagcgcggaggaggaggaaccgagagaggaagaggcggaggcgtacccgcacttgtcgcagagcacggcgaagccaccggatcgcagcggccagcccttcctccactcccctcccgccggggacggggccggggccccgcacgcggcgttcatgcacctcttcgccgccaccaacgccgccgccgccgcagccatccccgccatggccactccgatcaatagaagaagaaaaagaaaagctcaccgcatcaccccacccacacagctcgagcctagtagagagcagtaaagatcgaggcaagaggatgatgcggtgggtaggggaagcgtagttttccggtggatgtggagatggcaccaaaccaaaacgatcgatcgctggcgactcgggtgcggatgcggggaagaaaaggaaaaccaaccagatggggggagcaagaagaggagactgaagaattactcctgctgctgatgctgcagcagccaaggcgcagtaaatacttcagtaaggtattcggttcaccctgtgctgtactactgtagtagtacaaactacggaggaggggacgatgtgactgaaattttcatgattttccacataaatattacactccatagcagcaagtttaatagtatagctaactaaaagttctaaatcatcttaatttaatagataatttatcactaaatatatactactatactattaatatttagtcacattgttatacacacattacgttttgaagtttatgtagcaccgctgttcgtctctctccttttatctactcgatatgtatatataactgctctattatacctgctataaggtaaagattgggagcaaagtgaggaagcttttctctctcttttttgtttcataaaaaaaaggagatatttaaggattgcacagttgcacgcacgcacgacatgctctgctggtttaattaatttttctctcttgggccgggtcctatgctgcggtggcaggggtgtggtgttgtgttcgcgttgcgcgtctccacgactttgcacgcaggtcaggtgtctgcagtgcaggtgcagtacttggctgtcgatctgccctctctggtctctggatgggggtgaactcagtctgtgtccgcaaatgccaatccaccatcccagttgttacagcgacacctgcgttactgtataaacaacgggatcctctctgtctctgcgtcctggttcaagtcaccgctatacagtttcaatgcagaaaatttgcgagaggatacacatgctgaacagagttgaatttttcactggaatttgtagtactgctagtatattctctgggatgaaaacagaggaaatgattcgctgccgctgcgtcgtctgcatgcatgtcgaacgggggcagcagcagcaaaaaaatcgatcgatcgctgcacgagcacgagccgaattgaatgcacaaggaatgccactaccacgacccgaccaatccccaatactagtactagaactactactaggagaggcactgttgcagtccagccttgaataccgtcgccaacccaggcggccaccgcgcgcgctgcatgtccggcggccaaatctcccatgaaacgtcgccgtcggttcaggtgggagcccgcgccgagccacacgttactctgctctgctccacccggcgcggcacacgcacgcacaaccacgcgcgcggcgcacctcacctcgtagcacgcacgcacgcacgcgagcccaagcgcacggtgtgtcgcggtcgaggcggggtggtggcggaggcgcccgcgacgtggacgccgcaaccgccctcgtttctttcctcctccactcccacgtcgcggctttcgctgacgtgcgcgcgaccacgaccgggagagagctcccgtgccggccccgcgagtcaccatgccatacgtgccgctgccgtcatcagcccgatcgatgacatgtgggtcccgcgggggcgtgggtgcggggtggggtccacgggtcaatgtcccgggaccggtaaagcccaggtagagtcctactcgaatcccccgtgagcgtgagagagggagagagagaaacgacgcgagcgcgaggttacgtgcacccggcaacggtggccgtcacgactatgacagctcgggttgttggggcccacgtggaagcgagtggacggtgttggtgggacgagtggaaacgaagggggagaaggaatgatgaggtagttgaatgaatggaatgaggggaataatatactcctactccgtattccgctcaatgggagtgaggaggcaggttgattgattggtcgcctcgcctcgcccgttgggtttgtgcttggttcgagcggtttagtatttttggttggggtaaaaatggtgggctggtagccgtcggccgcacagacggtcacggcaacggcacatggagattagaatgtgacgtaatataagtaccataaatttggacaaacttctgttcaaattcattatactatattacatctcattccaatcctaaattgggttttaccgttttacaggacggagagagtacttaattgtctcctactccctctgtcgaaacatgaattcggcaataataaaacggggtagcgcacgagacctaaaagtggatggatgcagagacaaaggatttagacaggttcagaccctctcaatgagaggtaataccctactcctgtttggggatttgaatccgccgggtgtagtatagatctgacgatcaagttgtctcctgccccctagagggcctcctgcccaccttatataggatggggggcaggattacaagatagaaaccttaaccaacacggtatcggtttcctaaatctactttacaatcttatcaaaccaggactttaggccgttccataatatacagggaaacgtaatacccaagtcataatctgttacatatttcatatatataagttatcccctataactagtcggataaccatgccgtgtgggtatggggtacccataatctccacagtagcccctgagaccttcacagtcgaaaagataatcttctctcgaactagattactccaaaaccgagtacttcaatcatctttgccatggtctcccgagtatttttaccaaatctgaagactgtggagggctgaaaaataaagtcaggtgcatcgactagatgcaccgagtggtttcgataattatagtcaaccaagcgacttaatattaatatgtagcatatgcggtgtgaatccctgaataatatgatccaagtgatataccgactgctttgtaaaatatgatgagtgtaacctaaagttggctacatcattgaaaattcacatagcaaaatagctataaagaagcttgtatgttgtgaataaagaaatttccaaagtattgggcatacgccatgcgcacactgctttaacagatgtgcttaagtccctagaagacacatggttccaccacacctggaaatatatggcatatgtggtataaaatccgagtaaataaactcataaaggatttaccaaccgcctgaaaaatgaccacaatatataatcagcctaagccataatattggtcaataaaaatgcacacttacgtggcaaaaagcaatgatattgtatccaatcaattgcttaaaaacccaaacagcaccatgactatataaaaaagccagcggggcagctatataaagctttactgtttgacaccttttaagatgcattgtaccaactcctaaaaagttgagtaactgcggtataaaaggattttaaggtattgggcacttgatcacgcgcactttggcctaagcaaaaagtgcctaagtccctaaaagaacgtgacaggccacacctgaaaatatgggctgcagacatattaggcctaggccaaaaaatatgccttcgataccctttaaaggatgacacatgtaacatgctcccgggtgatatagaccatgtgatctgagtgattatcccttatgggatactccaaaatagatataacaattgaatcccgactggcgcaagtattcagttgataacccttacggggaataataaatagtccagtctttgagcatataaaatagacccatgatcatgaattcatgttgcatatatccggagcaagtccaaattgaagatataatacttgtatttgagctagtaagcccctgagcacgtagtcacaattgttcattgatggtagctgacgcagttggcatagagacaagacgacctatatagagataatattgcccaacagaggtggcaaaaatattggtggtagtgaagatagtgataccaatcaaaagtgatgaagttgcacagccgtggaggcgaagaaaccagtcggcaacagtcaggtcagccatcaatgaagatgaaggcgcccagcgataaagttgtgtagccatggcagcgaaataatcagtcggtgacagacgaggcagatcaaaggcgatgacgaaatccaccaatcatgaagatgaggaaaatagtcggcgacgacaaacgtaaccgacagtaatgatgataagcatcaacagagatgatcaaacatgatgacgaagttgcctatcaatagcagtagagtaagctatgataaagaggtttgacaggatgttgatgaagatgacgatgtcggtgatccagtcaatagcggtgtaatagccgatgataatgacgaagacgctcatcagcgtttgcatagtaggtcaaccgtgaaggcggaatagcaagttagcaaagtcttagtcatccattagcaacggcggaatgtcagagctgatgaagcagatgtgctggtgatgatgtcagtgacaataatccatcaaactgttgtagatgcttcacttggaggaaagtatatgctgttgttcaactcattgaatctgatatgagttgattggttgatgactccaaactcccagacatgtaaatttaatcttgacctactgctctgaagcgaagacaaaattgatgactcccagagttgacttgttggctgattaattgattgcttcatcttgacataaagcttgtcaaattttgagccatgtatttgtgtagcccccgactctttgattagttgggaaacaactgaacatagagtcgagaattatagcttcttgttgtcgagtagtcatcacttgattgaagatatgtgttgaagatgtccaagtagaaatcctgaatattggagagccacttgttgtagtaaaataacatggcattgcatgccgagatgtcgaggttcacaaagacgtcgtgggtggtgaagtagtaaaacttgcgaagtagcaacaatagagtttgccggtgccgaagataataaagatgaagtcgctccaccatgatgacaaagttgtattgccgtaatgaagtgaacacaagtcggcggcaacagaagcaaaccggtagtgaagacgcgcagttgtgaagataaaagctccagtcggcggcggcataatcagtcggcgacggaagatgatgatgtccatcagtagtggtagctgtataaaccagacgtagaggcgagggcactagtcagcagcagacgagacgaccagcgatgaagatggtaaggccaatcaacactggcagaatcatgcagccatggaagtgaagaaaccagtcggcagccatgacaaacgtaggcagcttgtgttgaagatactgatgcctattagtagtgacagcgatgtagccagccgtgaagaagatagcatcagttggcgttataacaggccagccgtgcaggcggtgacaccagtcagcggcggatgcggcggccggtcggtgaagacgtagacgcccaacaacggcagcataataggccagccgtgcaggcggaaacaccagtcggcggcggtcgaggcggccggtcggtgaagacgtagacgcccaacaacggcggcataaaggccagccgtgcaggcggaaacaccagtcggcagcggacgaggcggccggtcggtgaagacgtagacgcccaacaacggcagcataataggccagccgtgcaggcggaaacaccagtcggcggcggtcgaggcggccggtcggtgaagacgtagacgcccaacaacggcggcataaaggccagccgtgcaggcggaaacaccagtcggtggcggacgaggcggccggtcggtgaagacgtagacgcccaacaacggcggcataaaggccagccgtgcaggcggaaacaccagtcggcagcggacgaggcggccggtcggtgaagacgtagacgcccaacaacggcagcataataggccggccgtgcaggcggaaacaccagtcggcggcggtcgaggcgagccggtggtgacgttctgactgatccattcctggagcgtaagagataagcttaaagccatgaatcccttttatgcatatctggatctggatcctgcagaacaaacatataggatgagtagtatctgatataaatataatactcgagaaaaaatcaagtattttaaaatatttataaatatgtatttctcctcttgtcaattttgatttccccgagcagatgactctgtacgtttaaacactctgtccgactagtcataaccatcaagcaccgggagtcggcctaggcacttcccaaacatgcatatgagtgacatgagttcgtcattaatggaacaaagttttacggatcagaattttctactcgggtacttttgcaattattaagagcagaaaataaatttatctcatctctatgcttttgatttattccgaataatacttagcaccttgcgttactcggtccatccaacgagcccccgggtgctaggaatcggcccaaaggcaaccatccattggcaaaccaaacggaaagcataggaagatagaactccataactcgataggtacttttgtactcagattatgtcgcaagcaatcaagataaatattatgaaaaatatgatataacatctgtagcccccgactcactactcaatggaagaccaattggtgtagtgaggcagaggaaaaggaaaaatatcatataaagaataaaataaatgatgacttagctttgtaatattccccttggtgatggcagaagtggccaatgtgggaacaaagtcgtccatcaataacaatgaagacaccagtcggcggcgacgaaggcggtcgacggtgaaagcgaagatgcccactaatggcggcataataggtcagccgtgtaagcggaaacaccagtcgacggcaacgaaggtgagccaacggtgaggatgtagacatccaacaacggcggcataataggccagccgtgtaggcgggggcaccactcggcggcgacggaggcaggccggcggtgaagtcgtagacgcccatgaacggtggtgtgaccaaccaaccgtataggcgaggacaccagtcggcggcgacggaggcaggccggcggtgaagtcgtagacgcccaacagcggtggcataataggccagccgtgtaggcggaggcaccactcggcggcgacggaggcaagccggcggtgaagtcgtagacgcccatgaacggtggtgtgaccaaccaaccgtataggcgaggacaccagtcggcggcaacggaggcaggccggcggtgaagtcgtagacgcccaacagcggcggcataataggccagccgtgtaggcagaaacactagtcggcggcgacggaggcaggccggcggtgaagtcgtagacgcccatgaacggtggtgtgaccaaccaaccgtataggcgaggacaccagtcggcggcgacggaggcaggccggcagtgaagtcgtagacgcccatgaacggtggtgtgaccaaccaaccgtataggcgaggacaccagtcggcggcgacggaggcaggccggcggtgaagtcgtagacgcccaacagcggtggcataataggccagccgtgtaggcagaaacaccagtcggcggcgacggaggcaggccggcggtgtagatgacgatgcccatcaacggtggtgtgaccaaccgaccgtataggcgaggacaccagtcggcggcgacggaggcaggccggcggnnnnnnnnnnnnnnnnnnnngcaacggcagcggcgcacaccaaccgtggaggcgatgaaaccaatcggcagcgacgaaggcggccggcggtacatgtataaaataatagatcaaataataattagtgatctgtgaattaattctaatttatataagaaaatttagaacgataaacctggtttgtgatccaactttgattcgaggcctgtcaatggatgaaccgtagcatgcagccatgtcatgcagccgtgtagacatgtaatcgtcggtagcacatgcacggattagtttggagaccactttgtgcatgtaatagctgatttgtgtatggattaatttccttgaccacagatttgaccaggtatatttaatttgtatcctggactttgtgtcttgccgtacgtatccgagtagtattgacttggtgatgtacaggctcaaccaacggtgatcttcgcatgattttgacggcggctgcttgctgattgcttcaaatcatgccctggtgacgaaaccgacggaccaacagatatggcagcattgtagcgacggatttgatctcactgacggaggtaaaattgacggtaacaagctggttgtagatcgattcgatcggtgattaatctcctggttgattgaccagatccagatagaatttttggcgacgaagaccctgcccttttgttgagaggatcacggccaaagacaagagtagcaccgatgatgccggcacaaagttccatcgcacttctcgacggaaaactcgacgcggcccctacctggcgcgccaactgtcgaaacatgaatttggcaataataaaacggggtagcgcacgagacctaaaagtggatggatgcagagacaaaggatttagacaggttcaggccctctcaatgagaggtaataccctactcctgtttggggatttgaatccgccgggtgtagtatagatctgacgatcaagttgtctcctgccccctagagggcctcctgcccaccttatataggatggggggcatgattacaagatagaaaccttaaccaacacggtatcggtttcctaaatctactttacaatcttatcaaaccaggactttaggccgttccataatatacagggaaacgtaatacccaagtcataatctgttacatatttcatatatataagttatcccctataactagtcggataaccatgccgtgtgggtatggggtacccataatctccacaccctccatcccaaatcaacatagtacatgatgtgacatcttagtactatgaatttagacatatatctgtctaaatttgttgtactaaaatatatcacgttcagttctagattttttttttcgcgcgacggatggagtaactctgtactattactattgatccattttagtctggatatactagttgttcgggaaagctagctagcgcgtgcgcgccgccggcgcatgtttcagtgagttaacctaactaactagttagttaaggataatggcataattaggagaagattatctttttgttgggatatttttactaatagattgaaaacttttaaattagatttgaaaacttttgacttaagatttaaactttgaagtcaaattttaaaatctttcaactcaaactttgaaatttttctcttaaaatttaaatttgcaagacaaattttgaaaattttcaactcaaggtttaaaaacttttaagtcaagatttaaaaatttttaagtcaagctttaaattcaaaacatttgaaaacacgtgtgttgaagattaaaaaaataatcagaaaaagtgtaaaaggtaaagaaaaaatttcatgaaaaaaaagaaaaaaatcgcgtgggggaggggctggcgcgccaattaaccaaaccccctagttgttagtgtatgtcatgtcgaaaagtctcaaaacttacgcttaagcacagaaaaatattgccaactcatcgtgtgacatggttagctgccctttgtgtaatttattttccttatgtatgcacgtctagattgttttttataaaacacgtcaaaatatttaatgctttaaagtttttgtttattataatgatgtagctatcggcctatctctgtttgacgtataagttatttgacgtgtaggaaaataagtttttgtaatttattttccttatgtatgctcgttcacctccagaaaaaaacatgttatcataagaaaatacaagcttataatacatcgtacattcatgcgacaacgcccttgctataactcacaagtcccttgtacacagttggaggtggtgtggtggatttatataaattccccatcaatcaccaacgcaagagagagaaaaaaaagaatccacatcaatcggtgctgcttaaaagtgatggttaaacaaatcttgacatactcgtatactacaggccacaaagtaaatgaatgaatggataaaaatggctcagaatacgattgcctgtcacgattgcaatcttagaatactatattgtgcactattgaccagtgaaacaaatgtattttttcggtatgaatatgagatctttcgatggttaaattaaaagcaaattcagcacaacttaaatgcctttctagaaaaatattgcgcaaaaatggtaaattagtgcaaaagcctgcaggcgttgattttatctcggacggatgcgctggtagttcagttttcatacgaagttattgctcctctcccttatcatctcgcatgcaaggcttcgccttattctccacagcaaaggcagggcagtgaataattttctagtagcatgtcattttactcctccttggtactgctgtcaagaacaaatacatcgatcaaatctgaatggggtagtatatttaattagtaaaacaaattgcattgtgttatttttgtgaggattttgcacggtatactgtaaccgcaatttaaggtattatcacttgctaatacatctactataaggtgacttgcttttttcttaaaagaaacaactaaaaattgcaagaaagcacggagacattggggagccgttaagcttcagcgataggatttcttttactgcttctcaaattgttccaccaacggcttggaggagtaggcagtttttttttttcgaacaaagagtggttggaaaatctacatcgggttgtgttctgggttttgcttttgccaagacaaaattccggaatccaccactgcctttgcgtgagttgtgaccgtgcgtaaaaagcgtagtaaaaaacatcaagagacaaaagcaaatggagtgtcatggtggtgtctagtccgaagaccacggggtaatctcttgtccctgcaaaagaagagggtaaaaggaaagctgcagcaaagctactccatgaccgttgcgctagtcgctgctcctgcgccgaaatggatcgctcaccacgctgcgcggcgtatggctgcaaattatagtagtagtaagcagccaaatagaaaaaacatagcagtaagattttgaaagaaatataaatataaatcagagggttacaaacacacaaaaaaaaacatatgatagtttaattagactacaggaaaaacatagaaatcagatgataaatatacacttaaaggaattttttcaagacattaggacctgttgctaaatttcctctaaaatttctataggaattttatattccatagaaactttaaaggataagataagatttaatcctttgttttaaagtcttcgtagaaattttttttataggattaaagtcctccaaaatttttatattttccctataaattaaaagggtcgtaaaccttcagccaatcttatgtaatgtaaccatcacatgtaacatgattctgaatgttcagattatgatttaaccaagccatttcatgttcatctcgatcgatcggccaaaactgctctttttgtttagctttggaactaatcattgtctcctacacctccttgtggcccacggccactagaggggagcaccattaggacaagtgtgggccactagaggggagcaccattaggacaagtgttatggtagatgtgactaccacatctaaatttatccacatcacactcataaattaagaggcaacttatacaatatgtcttctctagtatataaataccaatgtctcttatactctcacacccctcttgaaatttgtgtggaggttgtctcttcatttaggggtggttcaccatctctctcctcacttctctcctccacctcatcactcaatccaatgtggcatatttaggggtaacatatagagcattatagtacttgctcttataagggcctgtttggtacagctccaactcctaaatttagctctaggagttgggtctggagtggagttgtggagctgcctaaacccagctccacaattctagttcattttgtgagagagcttcacccaactctactcccagttttggtggagctgaaactatttagctgagctccagctccaggaggggtaaagctgaagttggagctgtgccaaacaggccctaagcctgcatctccatgatgctccaatccggtactctagatagtagcggtattattatctttctgtgcccataatactactagtacatgcacacatcatgatgatggatcacgccatcatgggacgaccatttattttcgatggcatccaactaaacaacgctcgttcgtgcagtacgaattagagcaggtacaatagctaagccacctgtaaatatattttaaggagattaataagaagagataaaaatagcggactacagatttttagctagctgtagcacggactctaagacgcagtgtgtgtatgacaggtgggactaaatattaatagtgtagtatgtaactattgtattgatgaactattagattgattatagatgaattagagctagtagttggctatactacgaagcttgctcttagtagttagtagtaagtggaggcaatgagagcagggttgggcaggcctgtctacgtgatgacctttttaattcattgatagaacatacagagactgtaattgcctctcccttttgcccatgatatctgcatccaacgcatcccatgaccgtgtagttgggtttaaccgttgcatcttgagataagaaaatcctcagtcacactctaaaataattttgcatgctcgcactcgactaatgcatgaaactctgattcattgccattgttacagacttacagataggacaattactttttttttcatatggcctatgtggagtttagaaaagaaaaacaaagatagattatgtgtctcaaaaacatgtgactttcaattcaacttatacaaagttgtaacaaaataaactatgaatgtgtatattagttttagtttaatttatatttgatattgcatatttatacactggtataatttgtattaatttatcttgttatttttataattattgagatgacatgagaagacgagaggacgttctctccacgaataaaaactctttacctgtttatgaagatgctgcatgtggattgtggaccatgcggggttgccctaattgagagcatctctgttcctaattgttgcggttattcggagctggtccttcgtcttgaacacagtcgccaactcgccatgattcaacgggaaaaaaaatggggccgagaggtctcagagctgcctgcgacgattcaccactttcagggagcatccagctctcctgtagcaccgaaaacacacacaggccattctttctactgacagtatgtactctaggcctaccgttcaattcgtatactactacgagtacgttgaagctactcccacagtctcccacattcacactctcgctaccctcatactgtactacagtatgagcttgtactccctccgtttcaaaacgtttgacaccgttgactttttaagtacatgtttgaccgttcgtcttattcaaaaaaatttatgaaatatgtaaaaatatatgtgcacatgaaagtatatttaacaatgaatcaaatgatatgaaaagaataaataattacttaatttttttttaataagacgaatggtcaaacacatactaaaaagtcaatggtgtcaaacattttaaaacggagggagtatataagagctgacaccggtgggaacggaggaagcttgacacttcactaccggttctctcgaaccataggattctcgctaaaccctccttaaaacatacttcttccgtttcaaaatgtttgacgccattgattttttagcatatgtttgaccgtttgtcttattcaaaaaatttaagtaattattaatccttttcctatcatttgattcattgttaaatatatttttatgtaggcatataattttacatattttacaaaagtttttgaataagacaaacgattaaacatgtgctaaaaagtcaacggtgtcaaatattttgaaatggagggagtatatactatatctatgaaaaaaaggttgaagctttggcctggtttagttggtaaaattctttgctcctgcgtgtcacatcagatatacggatacatatttgaaatattaaatgtagtctaataacaaaataaattacaaattccgttaggaaattttgagacgaatttattaagcctaattaatatgtcattagcaaatgtttattgtagcaccacattgttaaatcatgacacaattaggcttaaaagattcgtcttgatatttacacgcaaattgtgtaattgatttttttcatatttaatcctccatgtatgtgtccaaacatttgatatgataggtgaagtttttgttttggtaactaaacagctcctttatctctatgttcagccatatactactatttattgctagatttgcctctaacaggtgattatattcacaactaattaaacattttgtacgaggtaaatgcttaaacatttatatacatatagtacttcttccgtcctaaaataacgaattttgacagttcttcagattcgttattctaagatgagatttagtccatctttcttgctatcactatattttggaacgaagttatcatattgtggtccttgctgtatgtactggcaaggtttaccgcacgattatcgtggttatcacgtgtgataactttcttaaattttaacattacgatatatctcgcggtaaccgtacggtttttacaataaccacgtagttatcgcaataaccgttaaactatgggacgatggtaaccacccaaaaatagtttggggagccctgtgtgcaggtcacttggtcagagcaataataattactccaactctggatggaaacaagaggttacagtatagatcatcgtcgcacagttaaggctggacccatcaaccatatgcacgcaccatatatagctgcagcactcaacgcgattattccaaatggacccttgtttcggaccgttgccgatggtagcgaaccgccattttgcgctggctctgagggcctgacgacgtcagagttagggcttccctgggtgcgtttgggccttcaattaccgtacacgataccattaagcccaatattgtttggcccatcaactgctcagcccagagccccaaagaaagccaccaactagacgaagaaggaacaccagcactctttaccatttctaaaaataagcatttctagaattcaaaattgtactactacgatatatataagtatttctaaggtattgattccaatacatgaaaatttgtacattttcaaccaatgaaatgcttgggaaagtaatctaaacgattcaaagtttaaaatttgaccactgaaatgactttagaagatcttttttcaatgcattagtttttactaaaagaccaatctagaaattcctttattttggaaaaggagagcagtacacaaccaattaggtggcctgatcgatgaactcagaaagcctgtcgtggatactattcacttttaaactttgttcgctcgtcttttttacaaaatatttacaaagacaaaaggattccacattatttaaacatattatgtcctaatataaacatgaaactttaactcaatttagtctaacaattttgtagtgcaatgttaaaggcaaaatagtcggttatttgaaaatgtgaaacggatggagtacaatccccagcaagaaggaacatacatatgcttacaaagcctcatcaacagaagtgaacattgctatgctcgtggaatcctcaactcaaatcttgtttaggtgtagaatgctcttccggtctctttattaaggactattgtctgaacaacagtatttacaagcttttaacatataggagtatctcgctgaaaaacaaaaaaacatgtaggagtagagtaagaacaagaccagaagctcataattatgactagaggccaatgaggtgttaattctggggagatcctaatctgtcctgcaagtttcagcaaagagaaaaagaggatatgcaaaaatcttgtcgtttcagaaacataagctatactgaatttttttttatcttctgggcacaaagggtagctccaagcctaccactctgtcaagatggcgaccaccgatactgctgccagctcccagttaagcttgctgcaatttcagatatcagcatgctccacaggacgatgttgattcggtgtttcttgattctccaggggcatgtactgagccatgatcgcacgaatctctgaatccatgtaactctggtttggcatgatggtaacacaaagtatgagttagccgtagattattgcaaacataagaagaactagaaaattacgtgatcattcggagatggattagaatagaaggatgagttgtttacccgtagccgatatttgtatacggcatatgctccaattccagccaaagcgaggccaaagaaaataacccaaaggaagccccagcccactgacgaagaagcaactttgcctgcacagtgattgcgaaaggcgtcacataaaacgttctaaagcgaatgaaattatgtgtgcatcaaagttccactcctgttttgcatcaaatcaacataacataacatacaacattttgaatgaggcatgaaagaattgtgatatctttcaaaaggaatttggttgtgatagtccgttatcaaacatgacaatgatccagatcatggcgcagtcaagcagacttgcattgcatattttcaagccgccagcagatggactatcgcaaaagcaaaactaggaacatctgaaatttctacagaagtttcaaggctgagtaacaagggatgatacaagtgtatgttgggataacaatctcagaacatgatcacaaggtccagaatgccgataagtagaaaattgaacaatataagactacaagggaacaaaaaaaaaggttaggggactcactgatgcaagtgtcatgctctctcatgtataacatattacttccaccacagctgcactcatagcttccccatgtattctcacaagagcagtccttgcactggcagaaaagcttgtctttgcattcatcaatatctgaaaacgccaaccagagatatgttaagtaatcacctaacagtttcaaactattcagggtttgccagtactagtttgtatgggttttacaagatggttggctcaagcagaaatatcaatctttctatatttaaaaggaaagttttgccacatggagtaatattaccttcacaactttttataccatcacccttgaaacctggtgggcatttgcagcctttagattcttcattctgtagagttccatgattagttctgacctcatagaacagccgcaaactagaagacctctggaagagattcttactgagcaggcagaaaccgtcttcccatttttagtttccttccagcagcctccgttgttgatttggcacctaccgacaccagaagctgccaaagggccagccgtaaaccaaacaatgtaatactaatagttgaaataataaaacaattaggatgtgttatgcatagcacagtctatagcaaggaaacagtattgtttcaaacaaatgaaaaaatgattccaaagaaataaatgctgccaacccatcttgacgaaataaaatgcaaatgtgtaccttcacagtgagtgtacccgtcaccaacgaacttcacaccacgggcaatagggcattcacaaactcgcccacggaaggtgtcctacaatatgtaacacagcaaataagaatgtgcacctcaaactgaatagaggtgaatgtcgtaaccagtatcagattatcaataggtagtactacctccgtttcaggttataaaacgttttgactttggtcaatgtcaaactgctttaattttaaccaagtttataaaaaaaagtagtaacattttctattaggaatgtatagccatatatgtataggattcttttgtatccttagtttccttgtatactcctctaattgaggaccctgtatattggaaaggctataatatatggtcaccccccctctttggggagtgtggtgttccctcctattctctctacatggtatcagatttcaggttctactccttccttccgcacccctgatctcccctctgtgttgcgccttgcgccggcgacgtcccctgctggtcgccgccctcctcgtcgccatgtcgacgtcttctgccacctctgctgcgaccgacaactccacagcatcggcctccaccaactccgtcgcgaccgtcttcgtcaacccgtacgcgaccatctccgtcaagactcatgtcccgatctccctcgagcttcgcaaccccaacttcaacaagtggaagaccttcttccgctcgatgtgcggcaagttcggcctcctcgaccacctcgacgactccgcacctcctgcagcccccgacacctcatgggagcaagccgacttctgcatccgcagctggctattcggctcggtcaccgacgacgtcctcgacctcgccatggaaccggatcagacggctcgcgccctttggctcgccatcgccgacctctttcaagcgaacaaggaaccacgtgcaatctttcttcatcatgagttccgctccatgatccaaggcgatctctccatcactgcctactgccagcgcatgaagacggcagccgatgcccttcgcgacgtcgggcaccccgtcacggagtcgcagctggttctcaaccttctgcgcggcgtcaactccaacttcaccagtacggcggacaacatcgcaagtgctcctgtcctcccgtctttcgcttctgcgcggaacacccttgttctcaaggaactccgtctggccaacgacgccaaagttcagacagagaccgcccttgtcgcggcaagcagcgctgctgcctcttgcccctcgggctcctgctcctccactggaggtggcggcaagggtggaaacaagaagaagaatggcggccgcaactacaaccgcaatggcggcggtaacaacagcggcaacaacagcggcagcggtggtggaaatcgtcaaggcggcggcggcggcaccttctcctttgctgtcccgcgccccccaactggaccatgggtctgtgtctcccaatgggccggccagcagcagcagcagcagtggcgcgcccccggcatcctcgggccttttcctcaagcccacaccgcctttgccggcccgtactcgtcgccgaccacctctgcagcgcaaccggcctgggatcaggctagactggtggctgccctcaaccagatgacggtccacagccccaattcttgggtcctcgacaccggcgcgacctcgcacatgtcatccaccgatggtatactcgttacccgcttacccaactctcacacctatattactgtcggcaatggtcacactattccggttttatgtcgtggctcttcctttctacctataggcaccaccaaatttgatctcaaacatgtccttgttgctccttccttggttcgcaatcttctttccgttcgccaattcactcgtgacaaccattgttctattgaatttgatgagtttggtttttctgtcaaggacctccggacccggcgcgtgattcttcgctgcaatagtcatggcgatctctacaccctaccggcagccgcaccacccatcgccgcccactgcttccacgccacctccaccaccatttggcatcgccgccttggccatcccggatctgcagccatcctcgctctatagcgcctctctgccataccctcgtcaaagccagatagttccctttgtcatgcatgtcaattaggcaaacatacccgtcttccctttactagatcaagctccagtacttcctctccttttgaattagttcattgcgatgtatggacatctcctgttttgagtacctctggctacaaattttatttggttattctcgatgacttcagtcatttttgttggacattccctcttcatcataagtctgatgttcaccagcacattgtggattttgttgcatatacacacacacagtttggtcgccatttgaaatgcatacaggcagacaatggcgctgagttcgtcaaccgcagcaccacctccttccttgctagccgcggctgcctgctccgcctttcctgcccatacacatccccgcaaaatggcaaagccgagcgtgtacttcgcaccattaacaactcagtccgcacccttctcctgcaagcctccatgcctcctgcctattgggccgaaggtttagccacagccacatatctcctaaaccgacgtccttcctcatccatacagaactccatcccattccagctcctccacaataaaatcccggactactccctattgcgtgtgtttggatgtctttgctaccctaaccttagtgccaccgctagccacaaactcgcccctcgctctgccgcatgcgttttcttaggctatcccacctcacacaaaggttaccgctgcttcgacctctccactcgccgcatcatcatttctcgccatgttgtcttcgatgagacttgttttccgtttgctcgtcacccggtcgatgtctcttcgtttgattttctgctacaggaagtgactactcccaccgtggtcgctccacccgtcacgggtgtcgagcaaccgcggccctccctgccccgcgccacggatgacccggtgcggtcgtctttggtggctgctccctcggctgaggtcgagcagccgcttcttccctacacgatggtggtcccggctgctgggttggcttggccggctgctggggacccagtgcccacgacccggacggccaccgggcctcttcttccaactacggcacggctggtcgagcccttcccgcacgtctatcgacgacgacaggccacgccaccaccgcgcctcgacgctgcaccggcacctcccctagtcgtgccgcccccgccaagccgcatggtcacgcgctcccagaccggctccctcaggcctgtcgaccgcctcatcctggcggcttcccactccgctatctccccggttctgaccaactaccgcagcgcgctcgccgatcccaactggcgtgctgccatggcggatgagtacaaggccttgatcgacaacggcacttggcgcttggtgccccgccccccgggtgctaacatcgtcatgggcaagtggatcttcaagcacaagtttcactccgacggctctctcgctcggtacaaagcttgttgggtggttcgcggctactcccaacaacacggcatcgactacgacgagaccttcagccccatcgtcaagccgtccacgatccgagtcgtcctcagcattgcgacctcacgatcatggcccatccaccagctcgatgccaagaacgccttccttcatggcacgttggacgagacggtgtactgccagcagccctccggctttgtcgacccggccgcgcccgacgccgtttgtcttcttcagcgttctctctatggcttaaagcaagcccctcgcgcatggtaccagcggttcgccacctacatccgtcagctcggatttgttgcctcgacctccgacacgtccctctttgtctacaaggatcgagaccgcatcgcctacctcctgctctacgtcgacgacatcatcctcactgcctcctccacggatctacttcgcctcatcaccactcggctgcactccgagtttgccatgacggacctcggcgacttgcacttcttcctcggcatctccgtccggcgctcctcagacggcctcttcctgtcccagcgacagtacgccattgatcttcttcagcgagccggcatgtctgaatgccaccccaccgccaccccagttgacgctcgggccaagctctccgcctccgatggcgcccccgtcaaggatccgaccgagtacaggagccttgcaggagctttacagtacctcactctcactcggccggagctcgcctatgctgtccagcaagtctgcctcttcatgcatgatccacgggagccccaccttgccttggtcacgcgcattctgcgctacgtcaaaggctctctctccgccggactccacatcggcaccgggcctgtcaagtctctgacggcttactctgatgctgactgggccggctgtcctgactcacgacgctccacctccggctactgcgttttcctcggcgacaatctgatctcttggtcttccaagcgtcagacgactgtctctcggtctagtgcggaggctgagtaccgcgctgttgcccacgccgtcgccgaatgctgctggcttcgccagcttctccaggagcttcatgcccccatcgcctctgcgaccgttgtttactgtgacaacgtcagcgctgtctacatgacggccaatccagtgcatcaccgtcgcacgaagcacatcgagatcgacattcacttcgttcgggagaaggtggctctcggacaggtctgtgtgctccatgtaccgtcgtcccatcagttcgtcgatatcatgaccaaggggctgcctgtgcagttgttcactgatttcaggtccagtccttgcgttcgtgatcctcccgttgcgactgcaggcgggtattaggaatgtatagccatatatgtataggattcttttgtatccttagtttccttgtatactcctctaattgaggatcctgtatattggaaaggctataatatatggtcaccccccctctttggggagtgtggtgttccctcctattctctctacattttcaacccaaaacaaatttattatcaaaatatattaaattattgatttgatgacactaatttagtattataaatattactatatttgtctataaacttagtcaaacttgaaacagtttgactttgtccaaagttaaaacgtcttataacctgaaacggatggagtagcatttttccattaaaattttataccttgcacgcagtaaaattattagtcttgtcctgccagcaccctccattgctctccaaacattcatttgtttggatctctataaacgagagagcaaggtaataaaaggagagaaaaatcagtacagcatcgatcaaaatcagtaaacttcataaaatgaaacataaaaatttacaaaccttgactcaaacaaacatcaggttcagttgtctcctcaaatcctgagcatactgcttttaacacagcacttttctccagcttacctaaagagagactattatatgacataacaggctacagcatcgagctaaagaaaaattgcgcaatagatactactagtgcacctctgtactgcttgttgttaacgacaagggtcggcaatatagtgacatctcctcgagagccttgaccaatctgaaaggacaaaatccacaaagatcaacctaccacagaactattgaataatttatgaatgaacagactctacataacaaaaacattatgattagtaatcaatagtctttacttgagcatcttgttccgctttaagcacgggattttcttcatcagcttcagggtctcccacacacttgttgatcctctcaaggtccaatcctgtgaaatgacatatcaaatggttcaaatcaaccatttggttcaaacaataaagcaattatgctgaacaaagttaactacaccaaccaagtgacttgataacaccattagcgcattcacgcgtgtatttcttctccttcattgggcacctaattgaaaaatcgtgtacataatcccaccacacccatggtttgtgagtttcattgccaaccttgaacaagcaaatctgaatcaggttctgaagcacaacatcttttccatcatatccaatgttgaaatcctgctctggatctggagcgcagtatctcccatgattgatacactgagatctgcactgcttgctcaggacaaaagcttccggacaataccatgtaatgtagtgaggggtgaactgagtgtaaccccttttctcaagaacctgtgctgttcctctgaagttcctcacaaaattcatttgcatgtcacatttggcaccacattcatcgttgctgtttgtccagaattcatactctacacgctcatcaggatgagggagagattccctccaatccagaaggacattgaccatatcaccgttttccagtgctttcttaaggtcgtccccaaacttcttcgttacaagtgctgaaggaacagtaattttctctatgtaatctgtgccactagactctggagagtccattgttatcaaaggctccaatctatcatcggcaacaagaacagctgcagctccagcggtttgagcattccatccctttgttgtgaagtagcagtctgcacatcacaaagaattaaagatccccactttgaacaataaaatctgctttaacagttacattacgcctaagaaacaggagaaaagaagttacagccaaacatacaaatggcatgactacattatttttatggaacacaaagatactgatatttcttcttccataaaatgtaattaccaacaaataatgcagagttgagaactttcacctcctgtttaacctaatattcagaatgaaatccactaggctggttcacatatttatactgatggccatatatacagttctatgtatagtgtccatttctagctctaaatcgccttctatgtgcagcttttctaccaataaaactgtagccaaagcagtgacataagttgtagagcaagacctttgaaattgcaaagaaagaaaataaatcctttttgaaatagcagtagccgcaaaagctaaataatttggacagtcaaagcacatgattttattccctgactcactcaaaaagcacaacaactaaacgtaagcgtgcacaatctttctctaaacaagatttgaccatggaacccagctacttacccaaaattccaacaaaccatgtaccgaacttacaagcagatagagaactgcactatatgccaactaccaaatcaggtaccctactaattaggacaaaattgcatatgaaatgacaaatagcgtgtatcgaattatcctagttaaggaaaaatccatgataaaccattagacaataaaaaagaactaaagcagcttgtaatgacagtgcacccctctgccaaacttattcactgacagaatatggctacagagtacaaaatgaatcgttttccttaaatggactgcagagtacatagacttccaagttccaaatcattttgtttgggttaggagttaagagtagaacaattcaagaacatgttgttattaacattaggtgcaaactttcagtcaaaagaaaaaaaaacattaggtgcaaactgctagttaggacaaaatgagaaaaaaaatgcgagtaacattattaaatttctcatatcctagaactagaagtgactgttagctaggaccacattcaataaataaaataaattaaaagatgcgatatttaaaatcactcacgagagggaaaataaatctcccccaataataaataaaaactgaaacgggttcgaataaatcaagaaagggggaggacctccgcgatcgacgaggaggaagatggggaggccgccgggcttgggcttgaaggagaggtcgaagtcgtcgaaggacctgcaggccttcttgttggccttggggtagacgacgaccccgtgcatggtgcccccgtactgcggcatcccgaagttgccgatggcgcactcgtagacgccccggagccccgccggcgacgtcacccgcaggctgttcttctccaccacgaacctccccgccgcctcccccgccatggacgccaccaccacgagcagcacggcacaccccatcatcgtcatcttctcccaattaatcctcggcaaaagaggattggggatcaaagaaaagatgggttcttggatcgagctaacgatcgatcgatcagaaatcgcggtttgggtggcgtggtggcttggtagggagaaaaggcgaggcgaggctttcgcgggagcaggagtgcaataaaggaagcctgccctacgaaggatttgaccgggagctatcggtatcgctattgctaatttgctaggattgctaaagctagcggagtgagatgagatccggagatagagatgtactccctccatccaaaatatttgacgccattgactttttaaaaaatgtttgaccgttagtcttattcaaaaaatttaagtaattattaattctattccaatcatttgatttattgttaaatatacttttatgtatatatatagatttacatatttcaaaaaaaaatttaaataagataaacggttaaatttgtttaaaaaaatcaacggcattaaacatttagggaagtagggagtatgtacgtggcgagtgctcgtgggcattggggttggaagttggaacgcttccaatgcagatgtgtcactgtacatgttctattctcttcttgctcgtctcgtcttttctttgcttttgcgtctcgtgttcgtgagcgtgagtatcgatatcgtgagggctcggcgaccgggcgcctttatgctagaaaattgacgcgccttatggcgcgataagcatctaacccgtatacattttatagaacacatgtaaaaaaatatataaaaaaattaaaaatatatttttacaacatatatatttgtattgctaagatggctcgaaaaaggttatcattttcgctctagatggtagaaatttccacattagtcactaagaaataaaaaagatttggaccattagattcaaaacaaaaaactagcagttgtatatgagatccaatcatattttaaaaatcttttgattagaaaatacaattttattttaaaaatagaatttatattgaatatagttctacttttaaaatttagcatcatgcaatttacagaacaatccgctagtttttaataaaacatgaagtaaatcatattattatggaatccttcaaattccactatttttcatccaaactgtttaaggctcctttgtttgtgtaaaattataattgaattgtctactgaactaaattatataatacatgattttttgaacacttggaaaaaaatatatctcaaatgtgatacaaatcacgaatctatcgttagcgcccatatttctaaccacattatttatattttagaccgggccatatattttgttgtcttttcctttttatggccataccggtgaactctgtcaaccaaatctgcatccaaccagcctgcaagtagtaatacactcacttatgtttcttctagaaatcaccagggtcctctcaaaaataaaaatcatcgcatggattgatccactggacttttctggattttttttctcaccaaatagatacgtgtcaaataattagaggggaactaatcagctgacaataaagattatatagagagagataggaaggatcacctctctatgtttctcaaagagaggtaaatttctagaaattgtaccagattgacacgtggcaatttttggagatggttagctaattttttcaggctgccaggtggcccaataatatgccacgatcagcaccctgcaatcgatatgtaagatatcattaatctggaaaagctgtctgtccaaatatatactttattttaatttttatgtaggattgtggatttatgtccaacgcttacgtccatttaattaaaaaaattattaatatttttatacagttattagatgaataatattttatatatggcttatttttctaatttttttatgattttaataaataagacggataattaaactttagaaataagatctacggatagttacggatagatagattcggggatagcctagatgagtcaatggctcgccgtgtagtacgaggataaacctttttagatggtcaacggcaggtgacagcgacagcacgatcgccatccgacggtaagtgtcaggcaatccaggtgcccaattctcagcatccaaggtgccaattttttcagcctcttttcaacaactaaccggagactaatttgcgtcaataaatgaagacagtaacagataaaacgacgccaagacgataaaacagtaaatggttcgatactcaggagctagatatgatatatatccatcgatggatcaattcatatgaaggcagtcagcacgcatacggcagtctgaaagcatgcatctacgacaaacaatcatcaggaccacgaatttatatcactgctaaaccaagaaaaaggtttcgctgagatgagaaaaaaccaagaaaaaggtttcgctgagatgagaaataactcaatataatcatcattcccctcctggggtttacatgcaagagaaacctacattaaaatcaaacaagggaacatgactgtcttttatattatttgcagggtcatccaagttctcttcactcagaaatcatcccggaaacgtaaatgtatcaaaagttgcagccttccatatgcctggcagacttatgcctctggttcgggtttctcaaagaaagttttcttaatccagtcaaatggctgcacaagaaatcaaaagaatattcagaaccggaaagatcatcacatttaagaatttaattgttcacaacaaaaaggtagaagacaacacattaactgcaaaactataacttcaacacagatcaaagttaagagcggaaatcccagattatgtatcttgtaaccagttgtgtaactcaagttacatgttaacaggtagagtaaccccatacataacagatcacataggtataaacgaatattctattcgcatgtttcaacaatgcagcaaaggcctcccagattctaatcacaagaggctaaaggaaagtaaggaacaaagttttattcgctacaaggagcaaagtgcaggtttcagcccaacggaattccacgtcttaggcttaaaaaactaggaacatattccatgaaccataatgaacaagttatatcatgtgctgaagctctctcagataaagaaataaagcacccagacagaaaactgtgttggaacccaagacagtgctaacaggccatgtagggtacatttagctacacaagttagtcacacagcaaggaatcaaatctcagtaaaagtaatcaggaatagtgtagtacataagtcggtcaattaaaattcaataaccggtttgcacagaggtcttgaaagagcaattgctggggaaagctcacccaaaaacatagactcttgccttgcccaagggccatatcacaaagtacaggtaaaaataaattgactgatccaaaatggcgaatttgtttggctgtatctaggggctcctatggtgagtttatgggcatatattggttatgttgaactgtcaaagattttatcagatattcctcctaggagagaacaggaaattatacatcttcactacaaaaaagcccatcagggtaaagcaaatcaaggtagtgagcagaaaactagcaggatctcgtgaaagcaaaattatattacacaactacgataactaaaagtttattatgttatccatcaaatgttgcaaaattcaaataatgggatgtatacttgcattagttaccgaattgtacaatgtaccgagtttaactgtcaatcaaagtttgtgtttttgctaaactttcttctaatatatgcctattaatcatcaggcaaaatatttaatggtatgaatatcatcacaaagttatataaggcatggtagacacagccaaacagcaattcctgtagataaagttgtggccttagtctccacagaatcatttcttcttcccccatcaatttctctatcagatcaagcggcaaatttgactgcaacctacaaaccatatacgtaatccgtgtaacgcgcagaaatcataaggtagcaaatcgaacagaggagccctacgaccgatccaacacgccacgcagatctagggaccgacaacatgccaaacaaacatgacagatcctacctacaaaaaccaaaccctaacgtcgatggggcaaaacatatctacggatcaagacatccctacaagctggggggggggggtataaaaaggcgtcgtggatcgaaccccctgacctggacgaggtagatggcggcggtgccggcgaagacgccccaggtggcggcggcggcgatgtcggtggactgggggcggcgccgtggagagatgaagcggaagaggccggagctcgacgccgggagagccatcgccgccgcaaatctcgtcgcgtcgactcgacctagggcaaggtaaggaggaggaatgcgagaggaaggagacgacaagggttgcggaattttgttgcttgttctcatccttcttccgcgtgtatatgggcctaagtgggccgacgggctgaagagctcgtggtagatgggccggatacactatgggcctgaaacagtacgggcctaaaggccttaggtggtgggttcatctggccttattgggggacagaataactcttgtcatttattcaggcaaattttgttcagtttttctctgaaaaagtaactgtaggtaaattatttttttttgagaattatacggtacaacgcagacactcacaacgcacgcacactcacccctatgaacgcacgcactcaaattctacccttatgagcatcttcgaagactaggccggcaaatccatcttggagattgacgaagtcaccacagacgcctcgctgtcgacggatacgtcgcctaccactgaaagcacaaattaaagccgttaaatcctggaaagacctaaggttctactgaggctcttataagcactagactacaggctctttcgcaactgtaggtaaattattgtgtccaattggattataaaaagtaggaaaagttgctgcactctcagataaacataatcaaattaatacaggttctaattgagcaccaacttgctatatgaaaactgaacttcttcgcttgccgtcttaaaatgtgttgccttttggaattgagtatatatatcacgacaatacagtatgaattagctttacaacaattctccttacaagttgtagtgagtcttgacgatgaaggtgaatcgagacaaaaacacccaatagtgaaaggagttgaatgaaacgtacatgcacgcatgcattcagattcagttggcgaccaaagacaaattcagtagtaaactctcgtagtgtcgatacctatcaagcccagaattattgagccatactttgagctcgtgccacagaaatgtttaatctgatcgagctgatcttaacttttttgcattgtttttgtggacggatcagagtcggtgaagtgaaaaaagggaagaaaattcagcagcacacagtcactagctgagtgtacttgcgtggcaggtggtttttatcggcaagtaaaatccctcgacctaaaaagcatgctcttagttgagaataaacaagtagacagcacatcgttctaactcgcatatccatagttccaaaccggcagattcactgaaaggaacctatgatatacaactaactaacgattccattatatgtgttgcttaatttaattgtaaaggtcatgggagtgatcattagaacaggctttcgacgtaagaaatacacttgaatcgtattatttatatttacgaggaaaagcagaaggatccaaagttcagaacagtaatgcactatctagggaatgttcggaatgctttcagaatctctgttagccaaatcaaacagctttatgatctttagatcgactttcattagccttgagtgtgttgataaccatgcatgtccttttactgatcactagctagctagcacatgccaaagaaaaaaagcaccaaggctttaattttacacgtgtaaattcatggatagaaaactggaaatggatacaaaaaatattctaaactatttgtgaaagagatcgagatcgatcgatcgatcgacttcagaccacgacttggtcacgaagttttcactgctttcgctcgctagctacatggttatcgataacttggagagaattattggatttgttgacttaattgagacaaaaacatggacgagttttgtatatgatctatctaaccgaaagaatagttcgtcgttggggtccatacaagcacgtgctaccttgcttccgctgttgaaatgatcaaagtgtgtgtattatatgtgtagctagagccatgcgacctaatgatcgacaatgtcaacttcaacctattaatgtaggcactatacaacaaacaagagactcaacttgactctctagatatatttatatgagggtcgacttatgttcttacgcgctgcaagttgagaattaaatttcctctatgttttccaattaatcgttcgtgcaaataatccatatatatgcacggtctagaactgtagatcaagtcatcgcaagtgaaaaacaaaagaccaatcaatatctattccattatctaaatatcaactgcttcctgagttccaataactagttactgagctaatatatacctccgtatcagaatatctccctccgtccgtatcagaatctaaaaatcaccctagatgtgtcccatccaaccaaaacttattatattttgagatggaggagtaatttttagctatttatctgaattattttaggatgaatggagcaattaacttgatctaatacttttattaaaattaacttatgttgataattctaaaactacaattacacgtacgtacaggagaccatacactgtatgcatcttgaccatacattggatgcaggtagacacatgtaacaagaggctgaatgaatgccacgtacgtgatggatatatgcagtaattaattaacgcagtcttccgcaggatcttaatttgtttccgatgtgaagtgttttgtctccttgcatgtgtcgattgattgagccatttttcaagtacatgacagtacctataaacgcatgcactagctagctactccctccgtttgtatatcataagtcattttgattttttatagttaattttatttaaatttaattaagtttatagaaaaatatagtagcattttcaactcaaaacaaacatgctatcaaaatatgttaaatgttagatttaatgaaactaatttagctttttagatgctactaagtttttataaacttaatcaaactaaataaagtttgactgaaaaataagttaaaacgatttataacataaaacaaaaacaaactgaaggagtaattttaagtagaatgtaagtcaatagtctaagtcttcggggtgaaagactttgataggtggaaatggacttggatggatcggagggagtagtgggccgctaatacgaaagtttgttgtgacagcaacttctgaattctgaaaaaactaaaaagcttttccaaacttttgttgtcacgggggggcaacgtggatatccatgggtccaggcaagcatctattcagagaaaggccttttagagcttgcaagaggttagtggcatgagtgcacaatctaaacaaagccacatataaaaaatattatgtgtagttcaagaaaattataaattatgtgcagtagcttaaagggcataaattaaaggctaaccacgaactggattgataccagccggcaaaaccatgtacaataaataactacttcatcaaatagttgttaactaaactatgctttaaattaaactatgctttcaaattaatcttatcaaaatcttgccatttcctctaagatatagaaaggcgttgtcattggcatgatactaaatctgttaagattcgattcacacatgtgcaataatgctaatctaattctgcaaattcagcagcaagctatactatgcatacatgatcgtaactaattgacagagcagcaacattcttgttccatatgccatgcatatggtagatttttccctcgaatccaaggaggaatgacacatatagagttaattacactatggtccaccttttgttaccaaagttttattttgggctatcctctaactcatattttcactttggacctttggtgcacttttaaccacccaaagtcattttatgtagctgcatctactctataatattgtaaagaattgcccgtgtaagttgaaaaagattaccggtttacaggttgctgatgtgtttaaagttggaaaattcatttatgtattcctaaaaagtttatggggtggtccaaagtgaaagaaaggtaaagtaacctagcccaaagtgaaaaaatgtgttaaagggtggtccaaagtgaaactttggtaataaaaggtggccctaaacgcaatttactcacacacatatatataccatgaaacttttcaccatacatctatggtgtcacatatgcacattaatttatcactaagaaaattcaaacccacgaaataaaaaaaagataaatttagctgtaaattcttttccacaacttttataatctgtttgaataacattatattttggggggtgaggaacatatgcatgcaagggacatcttgctccctataaaatgaccactctgaacaaaaaaaaagtaacagcatgagtttattggagtttttatctagacataaatttgttgtcaaatactccctccatacttgtaaagaaagtcgttttggacagcgatatggtctctaaaacataactttgacttcttgtttctataaaagtatttattgaaaaggtgatatacgtatacttttatgaaagtatttttcaagacaaatctattcatataatttttacattttcaaactcaacaaattgagagttatttatgatttatattcccaaggtttgacttaaacattgttctaaacgacttcttttataagtacagagggagcgtacgttgagcacacacacttcaatttaaagttggtttatgcgtaaaatttccccgctagctagctagattctttcttgcattttatatattgattgttatgttccaaatccaattggacaaactaaattaaattagattagatctttcatctagttatttttggagcattaaatgacctatatataggtagcgcaaaaggtaacacggagtatatattactttcactactatatattaatttcaaattatgtttcaatacttacaaaatcacatacacacaactcactagtacagcgatcaactaatacacatatttactacgtaccgtatatatattggatttcctccaatagcagtacacacatgtactacaagtattgctaatttgctatagcctcacagcaatagtattatgcatgcatgcatacacttctgcatgcaaatagcggacttgtttttcttgaatattagtagtagcaataattagcatggcaagaatgtatgcatgcacagcccttgttaaggatcgaagccaaacatgtcgtcgtcatccccaggaagattcccaaaggagccagtcatgaacccgaggctgctgggagaggacgggaagctgccggccatgtcacctccggcgagccctgacggccagtcgtaatccgcaggcgctgaacccacgatcgacgtcgacggcgttgtcaccgccgatcccaccacggcggagagcggcaggctgctgctgagcgccgccgcctcgctggcgcactccgaggacagtaccggagagtggcagttggcgaagctgcaggacggcgtcggatcaacggcttctgccatcaaacgatggcggctctgacgaagagggtcgactctgcttgtgctcgcgccgccgctggatccgaagctgatgaggttcgcgtagtctgcagcgggagcttcggcctcgacgacgaacgggatggtggaagggtcgctgcaggtgtgctcaccgtagtagctgatgacgaactccgacgagttagactcggaggtctgtacttgctttgtggccatacaaccttggtctggcctatgcgtgcacctgtagtagctcctgcagagagatcaacaactagatctttaattaaggaatgcaagctgcaaaattgcatcgtatgatgctcctgaatagataacatgttacagcaacgatttggtgctaactatgctatgttgctatctaataataaatacacagttcaagttgagcagtattttcctactctttttagtaattgcaacaactaactaatacagttcaattgaattaagcacatgtgtattggagtagtatatatctaactatgtgaagctaaccatgatccggccggaaccggaagatcggaacactattctccaattaactggagtagctaagcgagttgtccagttgcattggcaagtgttcgatcggccggtacaagggcctttaatttcttgctgggttaatcatcattacgtactagctaactaccatgcacaagggcgaagaatctggtcatgttactgcagaattagttgaataatctatacgtacataccttggattatttggggagtcctgtatatgtttctgcccgtactttcgccattgcctgccgtcctccagctccttggtcgtgaccatcctgacaaaaggacttttcgatctgccacatgttacagcagataggagcaactatcatatccagagacacacacccaaatctccactagcatgctcggcagaccacggtatgtacgtatacaagagtgtcatatatatagctagttgctcatagcttttggtcttttcaatataagaaacaggaaatgatcttttgtgagagaagaaagctactggtagtaaaaattcccccctgatcattggcacgtaaagttaagattaaaccccactgctagacaaggcaatatactcccaacgtactctccaagttgcataaaggaggtagctagcatgatgtgtgaatcgctatcatatatatgggtaatagtattactaccgcatgtggtaagcatagctagctagttgcgcatccagttgcagatgattattgagaaaaaagggttttaactttcttcaccttcttctaccggagctgctccgcctgtgcggcccggccacggccttggcgcctttcttcttcctcccgcccgatcctcttcttcctcctcctcctccaggcgacatcaccgacagcgagctggactgcagcctgctcatcaccccgtctatcagctgattcagctgcctggtgctcgccgccgccgcacagctcgacggcgatgtcccatgtagcatgctgtggagcatcgccgcttgctcgcgcatctcgagcaggtcgtccataacttcatgtggctccgcgccgccgtctccaacgccaccatcaggagacgccatgggaggagccgctactatagctaattgctgctgctagcagtctagtattactaggaaagctagcaaagtaggaactagatattctcagctttgctactcttgtattgacacctgctcatcagccgtagctagactgctagagtagataggttattgggcagcagctgcagtttttattggtgtgctcggtgggaagttgagaggaaaagtagacgacgagggcgatcgggagggggggaagaggaagaacaactcaccaaaggaaatggcttggaacatggaaggaggggcccagctggatgtgtgtcgcctgtacgtcatcgccgtgacgaggccgtgagctcatggacggtcggttcatgctccatgcacggcccggctggtgctagtgaacccctgagaaaaaaaatggcagtactggaaatcgtatataattaagatgattgtttaatcactgggaaaatgtggaatggtcctagctagctcccaactgtggtggagaaattcatgcttggttcttttcatttatatatggtatatggaatgcatagttatattgcaagtgcagcagttgtttaatttcaagccattgcatgcgttagatgcctatcttcttgtagatctgatggcagacaatttttcactactacttgcctagtgatgatgctagcactacagctgttattagttgatgtatagttgtcactcatacattttctaagtggcatgttggcacttgaatattagaagttttcacttagcatgcagtgcaagctaactgaaggacaagtagaagatatacacgtgttacctttgctccttcactggtcatgcatacaagtcatcacacatccggtacaggacgttgagggataagcaatatatcgatcatagcaactataaactctctcccctgctccctgaaaataatgtttctccatccattttgtgcactgtacgtgcacacagcagcaaattgtccaagtggagagcatctgctatctgccaaaacaacaactgctcaaagcaattttcttacgaaaacatttccatctaggtaggatgactggaaacaaggataacggaaacacccatggagaccacccccacattagtttattctagggcaaaagcccctgcctgtagtttcatttcttattatatgtgtgggaaacactttctcccacgtactttttcgttccaaaaagaatcggtttttagatgcttgtaagactactgtaagtacatattcaaggagaagctctgaacttaaaaaaaaacgggggaaacaatgaagcaggagaagagaaaatattgcccagctgcctgtcaacttgcatagccgaatagcactcgacgcaagccgacatgggaaacacaggcttaccacaggcatagaagaataattaggaccccaaccacttcctaaataatgaaagtaaataccccccatcggtaacagaaacagtatatgtgtccataaatctatgtatgaagacaaacatatagtggaccacaaatgacaaaagaaatggcacttctcggcatgtgagtatgtgacaactgtcttccagtaagaacaatagcttgaccaaaaatgatctgaactgatctttcatttactaaagcaatgttcataaacatgtacacatgttaaggatatttattacctatcaaaaatcaaaaggaaaataagacggcgggttttatacaatgatacacatgcttctgtcaggctaactaactaaatttcacaacatctccttaagtacatacccgatgctcgggggtgtcctaaacattctatcactgatgccagattctaatataatgatccgagaagctccagaccatagtatatccctaccttctgtaattttaacataatttagaactaagaaggcaatcgataaatccaattaactaaaatatctacagcatcaattatttcaacctctttcattgcctctccgagttccagttgaaagaataagtcagctgataacttaatgctggttgtcatgttgctccaataacctcctttcagcagctaagccagctgcaacagatggaggtaaacttctcatatgcccaccggccccaccgtaattcttattctcctgttctgaaggctgatcaagtgttgccacaggaaataaagactcaatatccttcagtgtcaaaacaagctcatctttgaaattttttgatttacggtgtatcgtggagcaaacagctctgcccctgtttaatttgtagatgctctcttcaatagtattcttcacctaaaaacaatataatgctttaggaatttctccatggatggtttaaatgagatgaagtagctcaggatttggtgcttacaataaaacggtggataaacgtgcttttgtcttgcccaactctatggatcctgctgatagcttgcgcctcagctgcagggtttaacaacggctccactaatattacatgttgtgcttccaaaagattaagaccatttgcaccatgctggataagcattagcaatacttgagcaggttgcatcttggaaaatgacttctttgctttctctccacttatactacttgccagacctttgaactgggcaagcgctgtttgcgattttctgtgaaaagtaacacactttcagtaaccccattgtcattgtccacaagattcaagcatatagaagaggaccctccttggtgataatcatctagcaataggactagaagcagagtagggggaaaaaatcaagttttaacttaaagaaatactccctccgttcagaaatataaggcatattatgtttcatcaggataaggctttgactaacaattgctttactaatatactccctccatcccaaaatatattaacttctagcattcaaaatttgtcccaaaataaaacaactcctccacctacttcttctcaaccaatcaaaaccctccccattgaatttctccacttactccatcttcttaactaatcacggcattctcccatttaattccacctatttcttaatatatgtgcccaaccctaaaagttcttatgggacggaagggaacattatttatgcgacacaaaagcataatcataagtaagtctgaatacgaatctaacaacatcaattttgtcacaaaaattatatcctaatagagtaattgttgatcaaatccttgtcctaacaaaacaaaggaacaaaatacaatttatatttttgaatggagaggagtataatcttgtatgcactttgcgctaccttcaaaaaatgtgtataaacagatatacaatatcattactcagctcagcatagtgagaaaactcagccttggttacgagtatctcaccttcctcctttcatccgaacataagagatattgttagcggcaagggagtgctctagcacatcaagaacatcattccagcttgaaaaaacaagtattttggctgctccgtcagttgaagtgatcctcaaaatccttcttgtcacagcttcaatcttaattacaataaatcaccaaaataaattaatcagttattgcacccaacctgaagatagaactactaaggagcatgagtttggtagtttggtcagtgattgcacgtgcattcacattgcaccaacttttatgctctgtagaaaaattgtgacaatataggcaggtctgtgcctatcttatcagggataaaaaaacaattgtataattaggaacttactttgtgttatgagcatgggtcagaatttctctggcagcggttttgttcacgctgaacagtaccacacagtacgccattaatttaggtatcaggataaatggtttttatattgtatattcccattaaatttttatggatatactcgtttctatatttgataattgcaagtaccaagcaatttaagatgacatgaaatctatcgtatacatgttattatattaaaatagggtaaatatggattaatataatgatgttgattgatttgattctgctatgattgtatgagaaataaacctaagagttgtatattaaatacaattctactttcaatgcaattttatttagctctgcgcaaacgcatgggaaattcacctggttagttaattcaaaaggcaattacttgctttatgcaaaacagtaactattgccttctatgcaaaaccagtacaaacagacatgtgaagtctaaacaaagttgctatgcagtatctgccttctaaatgtaatatagcaggttgtaactcaataagcagtaatcagatatttgaaatgcgggacatataaacaattacaaggaaattaaataaaacctttgttccatatgaaccttggacagaaatagcgctttctgccaaatcctcaatttctctatcagcatttcctctctggttttcaactacaaaagcaacattttcaagatctgtacgttgacggcaagtagggcacataatccattttttgctcctcccaaagtgggctgcagcttgttctgtcatgtaaagacagcctgagagcagtgaatagataaattcagtaaagatcaagagtttagtatacatcagatgaataaaattgtcatggatagatcagcatggaacttggagttggaaaattgaaagatcaacagaaccaatctataatacaaaacataggcacatgtgttgcatgcttacaacagaacagaaacagtagaaacattaactacgtgacaagttgtctttcttccactgaaataaatttaagaaaaatagcataaaagtataagttgtaaataaaatagaagacaactcttgggatactcacacttgcagcaaacgaaatggccacattggaaaaccattttctggtcaaagatcttctcctgacaaattgggcatggttcattgataatatcagaagcagtttgccctgtggcagggatggaagttgctatagcaacactgttgcctgactcgggcagtgattcaccatgcttgcccagtggtttcttgttggatagcaccaatccctaaaagtaaataaaatacaatgagaatttctaaaataacagataagatgggttatggattcttatgggaaaattaagaaagataatgcctgataataaagtagattctgtattgaaaggaggcagttatatacttttatccaagtaaatgatgagagctgtccaggtggaaattatacagttgagcagtgtttagaaataaatggaatgtagaatatgtaaaatagaatatcaaattcacggcagagtgcaacccatgatagcaagtattgacctttaagtatctgagttggcctcttatacgagctaaagatgacaaagacaagaatttttcacttgtaaactgcacattgtatggtataagctcttctctagtaacaatattgactgcactgggttcatcatctttctccttgagctgcaggcgtgagagagacatcttgatctcatcatgggcacgcagtaactgggtctgtgctattgatagattccttgcttgagagaactccttgcgcatagcctacattagcacataatggtcagacaatatcctatctcgtggtatttttgaaccttcacattttagactaaaacatatggatcacttagtaaacaaagattataaggtttgacatgtggaaaggttcctaattagattcacctccatctttccatatgttctctagacattacaaatgcaagtgatctaacaagacaatagtaaattttacattgatgcaggttaatgataacaaaaagaagttctgctgcaggggggaaaataccaagacacagtaaaatagagataagatactcatgttttatcattccgactcaataataatgttttgtttgcttttaatttactacaaaaatcaagacacagcaaaatagagataagatgctcatgttttatcattccaactcaaataataatgttttatttgcttttaatttactacaaaaatcaagacacagcaaaatagagataagatactcatgttttatcattccaactcaaataataatgttttatctgcttttaatatactacggtgataaaatttatttcagcaactgcaattaccagctaaaacatgtcagaagagaaggcagtgacattaaaaatattttctgtacctcaaaaagcagcaaattctttttagcaattttagcagattgctctcccattattgtctttgagtgggttagaataacccttaaggaagtctcaattcgagaaggatgcctgtagacctgtaaacagcaaccatataaaaacataaaaatggtagataaaacataaatggatcactatatatgcacttttaattgccatagaaaatccaagaaatttataaaccatttcaaagtaatttccgacaaatgaaaagttgaacgaaatcatatctgacacttgataatatacaaaagcgagttgatctatacaggcagtagtgcagtacagtcttttttgacagaaataagtcattaaccatttcaatttgataaatagaaataacctagttacaggaacagagtggtgggggcgaaagtccaggaaccagaagcaaataagatgtggtctaactaccagatctctagtagtttagactaagaagggaagtttaagaaacaaaaatataagacccccaggcacaggtatggattaatcaaatgaaagcctgaaaggtgacatctgcttagctatatttcaatataaaagacatgacaagatgataccagaaaaccttctcgagcagatcttggattcttattgtcgtcaccaggttcagatccctcgttagttttagtattacgaaaaaactgattcaactcatattttcgcctttgcaagtcccttgcttcctctactgaggcaataacagaatcattatttgatttcttaacaagaaacagacgtgcttcatacccctacaagaattgatgaaataaatgcatgatcaacaagcagaagtagggaggtacctcaaaaaacattagcatataaaactacctgaaacagatcatccaattcacattggatgcataaagaaccattaccatcatagcaatttggacaatatcgctgacactcaatgtcttcatcctttgggctatccattgttttgtcaagttctaaaagtctgtccatcacttgttgccttgaactttgcagagaatcaataccagtttgaatggtatacttcaacccagcaatggtttgaaccctaagcagagaacaagacaaccaagttatccatcaattgccataaaaggttttaatttatacaacctctaaacaattaaatcactgcaaacaggaaggacaacaaattgaatggacaaactgaacataattttctgctgacctggaagacatccctgttgaacccaagccagtggtgcttttattggaagaaatatcaatcttcctaatgagctcatcagcagaatccttgttctgttcaatgcaatccaaagcatacagccaccaattcatattttgattctgtaactccatactgagagttgagacctagaagcagaacagcagaatttcattatataaatagtgatgacttctacattctacaacactgaaaatacttaggtggagagattattgttatagagcattacaaaggagacatagaacattccaaagggggaagcatggaataggagacgagaaaataaataagttaaaatcgctaggtgcaactaaaatatagcagtaaaaaaacaacctctgtgaatgatgcactgaaatctttctgtgctattagtagctttgaagtaaaaactgacagatacttttctctgattgaattgcaagtatttttcaaacaaccatcagctaagcatacagatgacgtgtggcatccagaatcattctctacatccatctcttcacttccacatacttgtgtattgatgtttttgtcttccttggatgtttctggattatcagtcatcaaacttgacctgctattctcacaaattttctttcgctttatgccacacagacctgagtcagcgggactagtttcctttctttttcgcgcaccatggacttcagaggtttgttcttttagtgggcattcttgcaaatactcagaactagctctgagcagctccgcaagattgtggttgatatgaagattcaacaaagggtcaacacggaaatcatcaaaattttcacaggccaaagctagtgcttctttatacagagagatggcctcttgattattttgttcaatgacagcaagtccagcaagaccattcagggcgacaacaattttcctgagctcttcctccccttcgacttttgctttcccaataagaacctgcataaaaaggataactaacaaccttgagcacattatcatgtaattacactgaaaattatatggtaaggtacataaaatcattagttgtttacctgtaaaatttcacccattgataaaggagtacgctgcagggagcagagaccgaaactccccacttgcgggtggcaacaagcttgtcgaagtttgagcagtgggactaggagtttggcaatgtcatcattggagaggtacaaatttgatacaacattcgagtctgagagagaaagggagtggcgttgtggtatttttttaaataaaggaaatacagggtggtattgtggtaactgttcagcaactaaaccacatgtttagctgtattttgattttgtatccaaataaaatctttaaggagtttaagagcattgtagacattattactttgttagaaagcaaagcgtaaataaagatgaaaatttcagacagcacatttttttcattggctggtcatatgagagaaaactaaaacaagaaagagaaaggcagacacaaaagtaatggatgaacatcctgtccccacggtatcaatctagcaagcagtaatgtgtgaagtacctgatattggctcgcttttgttggcatcatctctgatacgtcttataatttcatgtgcatggtccatgcaagtggcatgctgcttctgatagaaatattcttcaattgatgaaaagatgagccacgaaaagcactcttcttgtggaggcagctgtaactcccgtgaaacatgaattttagaggagcgccacatgatttccttgaagaacttgtgtgcataattcatagctaccatgtcccccttctgcaggtcaatttgatgaaaacacaagagagggattaatcaatccaaccatcaagaagagaatgttatcaaagcccacaatggcgtaacacagacaacacagaaaaaaaattggtgcactaagcaacgaatttgcagtgtctttgttttttcagggttttaagttcttagtatatgccctgtcacatcctcattttagccatccaaccattagtactcccttctcctcctcgttctctctgcattaatggaggcatgatagttgtttagcctcttgtttgatatgcctttgatttctaaaacaacagtctttttgggatggagagagtagtaattagccaaacagtaagatctatagtaatccagaattagattatgtaaatccatcattactactatgtatataatattcaagttctgttactatagataaagtgatcaatatttacacaagtggtgaacaatgcagcgtgacaatcttccattttcaataggtggcgcaacctctaaattaggtagcatgtaataaatacccatagttactggtagtagtcaacgtacctcatatgggtccctaataatatccacccaccatctatatgtgtcaaaaggatgagttttgagaaagcgaagaagcccaaaaagatcatcaagccggcgttgtattggagttcccgtgatacaccagcggtgttgagcatttagcctcattgccatctcagtcacagaagttttgctggactctaccatctgagcttcatccaaacatagccgccaccagtggacccttgttaggacagttggagtgacagggtacctagagagttgaagacagttcagcaggagttaagacagctattttcacactgatgcatcaatggtatatctaatgggctaacaatgggcatgatggggtacccggaacaaatatgttagtttgcctatctcagtttatacaaactagaataatcagtaaatgatacctcttttgatatctcaaaaaacggcgatcaccatcatgccgatcagaatcatgtgatagatcttctttcaggacatcataagttgtcaaaacaatgtcagctgtgcttatctcagccatatcacttttttgggtagatgttaagtccgtgttctttgcaccttcataaatgcaaactttcagagatcctggtcttgtgtgtctaagagcaaaaggagaaaccggtgagcattacaatcatcatttgcagagagtcatattaagtaagagtaaatgccgaacatttgaaaaaaaaatcaagttttgcaattagcattcaataaaaagctgggtgatcatgctgccgatatattgaggataatgacctagcattacctgcttaaacaagtctagtgaactagattacaagtttggtaacatgcaccacgatttgctcaaaattggacttattctagataaaaggcattttatcacgagtgtccttaattcttatagaagcatgagaagaacttgaattcaagtttgctaaactctccaatgctcagaatcaagcagaggtaaagaggacattatgtggcttacacagagaaatcaaaacaaggaaaatatgtggcttacacagaaatcaaaagttcaaaactatctttctacattctaatttgggagaaataggagcataaagaatggtaatgcaagaagtttctgatatagtaatgtgtatatttaaaacatagaaaatactatatcacaatactgttcaactactgtacaggtaaaagaaatcataccggattatctcagagtgccactgtgccaatattggtgatgggcatactatcagcgtagcattactagatatattagtttgggcggcttcaataagctccaagcacaatgtgcaaatatatttttcttctgtctctgcaatgcaatacctgtctttcttcttccttctattttttgactttagggttcctttttcattgtttgatgcttcatcaccatcatcatcatcaacatgcatttcctcctttggtgagtaaccaacacaactagcgtgttgccaagcgtcacatatgtcacactggatccatatcccctggtatgcagaggttacacttgcagctccacaaatgcactcaactctttctcttttatgcctctttatctgatctgctccttttatattcgaagagacagaacagtctgctgaatatggcctgcgatgtgcaaaaatgcaagccaaaagctcaacagttttccctaagcccatttcatctgtatttaattaagcacaccaaaagcatcctcattagtgacaaaaaaataaatgcatttgatttatcttaacaaacttaatatcaacataccagccaaaatgcccccagagacataaggtggagaaggttctggatgcatcgagacatttccactgtgaagaaacagatttgatgaaatttgaggatactcatacaaagaacgatttaaaattcagataaatgaaaagaaagtgtttaagacacattacattctggatgcaaaagacacttccactgtgaagtaacagatttgataaaaattgaggatgctcataagaagattacaaaatcccagtaatggaaacattgtatttagataaaaggatatacagagtaagaaaataaaatgcaaaacaaacaaaaaatgtgtctagggtaggtatataatgtgtttccaattgtctgaaaagaaccaaatagaaccttgacatcaactaagcataactgacaacaaacacaaagccaacaccatcatacatgaaaccaaattatcatttatttccttgcatccatgatggcaaaagctgatagatagttaacataatattgtcttcatatcagtcattataattaaatgaagcagtgaaaaggatggtcaatatagtgtttcacacatagtagggtctttactagcatttaaggaaaacgtagcaaaatcatgggaagtgtatgtgatatgtattaaactcttacttgaatggattgtagaacatcctagatttcttgtgcataaaatctatgggaacacaataaggtgcagaatgaacataatgttgatttggtgatgaaatcattgtgtttcccttttcacgttgaaccatccaattcgctgcacgaagttgataggttctgagatgaggaagcaaatcgggaagctcctcttccaacagtccagcctccctgtcaacaagtaaaagaaaagaaaatcataaggtaacagcaataaatagtagctacatgttttgtacaacttaagataatagaaaatcatatgcatttgcctgaagacagaatatgtttgtaataaaaataaagcatttatctcatgttggtataaatgcttcacacacaacgtcaaaaaaaatgcttcacacacaacgtcaaaaaaaatgcttcacacacttcttgaagtgcgcaattgtggttttagaccacccacaacaatttattcctaataacttgtgagataatgagatgtataaatgtaagggaacatacattgagggcttaacggcttcgtagaaagcagcaagatcaaactgagaatccttctttggggtaaaatcaccattagcacctccatttataggccgggcaagaccatccatcccatatattgcagccgaggtcatgacctcaggacgaacccaagccatcatattcatgaaactcttcctccacggatgccttgtcacctccaacaatgattcgcatgtagcaaaagcctgctccatcaaccccaatctaactctaaatgatgcaaccgacacggaatcagcagaccgagatacagcaaaggcatgaacacgcaatgtcacgaatctcaatctaaccaaatgggcgaggcctgatacaccttcatcgggaccatcaaaacatccagagaaaaccataccggcgatggcatactccaggatcacacaatctgaaggtaccacaggccactggccaagccggaaaccctcctccggcgcgtcgcgcacccgcaggcgcaacgagcacctcttctccctctctgcctcgtgcagagccgctacgtccaacgccccctctccctcgccggagatcctcacgtcgcgcatgaccaactccgcgaggtcccggcggtcgccgtcgctcaaacaccacgtgctatcatccacctcgaagcacacatcctctctcctcctagcctcgcccttcgccgcgcgcctcgatttggaggcgccgccgctgccgctagggctcggcgcgtcgggctccgcggcagcggcagcgccggggcctaggcctaccgcccgggccggccgcgatttcctcctccccatgcgcgatcccagcagattaatcgagcatccgatccgggttttagctctccggaagtagaattggggggagcctcacgccctcaccaaatcaaaacaaaaaaaaatctccaaaacctagcaatgattcgtggattggagctcgcgaggtcgagcaggaatggaattcgagggatgagatgatgggtggatgaggcgtcgctcgagagattggatggtggcggaggattggaggagctcgccgctgttatcttctcgcgaggggttttaggacgaactgaagaggaagggggaatggggacgaagggtagtcccggtaaatttttgaaagtgtcaaggttttttagtctcgatggtgttatgttgtgaaaatgcaaaattattagtgctaaaagtgttaaaggaaagaaggtggccttaaattggtgaataataatcctctaaataccaagaatgcccttcgctaattaaatcaagaagcaatcagcaaggtttcggagtgcgagcgggttctagggttctagcactgcaacggcagcgggagagagatgaaaaatcaaatggataaaagttgtgcactattagcaaggaaaataacattgccttgtctataatatacatttgattctaataaaatctatcacttcacaacacttgattttgtaaaccccggatgtgataccggtttaaaacagcagtatatgcataaatagacgtcatatactttctttacaaaataaaaaaaatgattttctcgcatatcatctacttcctacctccatctcccttctcccttaatgttatatctcatcttttcattgagaaggttttcaatccattttcaacaaaaaaaatcttagatgcacaacctaaaatcaacttaacaccctcttttctattacaaaacatggtcctcgtatattaccttgttttagcggtgatggtatactatgagtctatccccgaaaaaaactgagtctacaacaaataacaaaagaaagaagaaaatcaccttcttctcaaacagagtatttgagagtcatctgacttcagtgtttacccaataccttgaaaataggagaaagacatagagtaaagaaggagaagttatagaggagtcgtgatgacgtacaggttaagaaaaggataagcaataaggttgtgtttagatccaagggtgaaaagttttggcatgtcacataggtgttgacagaaaacacgtggcctgggagatctgcttaactccagtgcaggtccaaagctcgtctttggatgtattagcgtgccagttgatttgatcctgtaatcaacaagaaatagaagcaaagaaaccgtagttaaatctataaatgatagccgatcggctagatgccgatgacatatcatttatctttgggccgatgtcatccatgtatcgatcggcagtcatgaatacgtaaagaagaactaaatctactcgatcggctgtagatattaacaatatataatccttatatcgatatatacttaaatcaagtgattgggatagatcggtcgccataccgagacagtataaatcacttggatcgaaatatatattaataattagactatatacgttcatagcatagccgatcagatagatctagcatgtatcggctaatactccgataccactctatgttaagatgttaaagcaagtagaatatactaaacaaaagcctaatatacttaaatgcggcaagatcttaacgcaaagggcagatttaacatgtcaatcaagcatataggataaagagtagttaaatcagatacgatcggctgaaactccgatgctattctaatcggcaactagaaggcaggctagggattgatattctaagcacgacttaatagatcaaacttaactgatgcagcattaagtatgaaaagaaaaataatatctagacaatcaagccgctagaagtctcatggaacggtagatgtctcatataatctagaccaatatcaatatttaacctaatcggctaccctctattgacagatattaaccgacggtaggttagatgatgatattgctagagattatgtaaaacatatgataactcgacgaattacataaacaagattagaatgtcataaagatggaagcactaatcccgagaacgcaagccgccataacaagtttacctcttgttgaagatagaaaccgatgcagctcaacccgaaagcaagaactcgtcgaaataaaatgaaagtaaaaaagggtggcgatgcgccgaaattgtattaaacatgtgtgttttattacatagggctcagggtccatttatacccgaggattacaagatatgcccatatcggacacaaccattatctctaacaaactctaagacaccacaagtctttgcggcagacttttgcccacacttatctataaggaattcacataaaatatcctagttaatagatacaattgccttcccaggactctatccatgcgtggcaatcatcttgaagtacattaacttgaacccgatgtcgcgcacaagtcgtattgtcggaatcggcaatatcggcttatttagctcgactcagactcagccgatcttgtcgtagccgatctggacttcagccgattcctgccctgttttcaaactcgatctccgcttccgactttgcttcgatctaatcttctctccgatgctgatgttaccaaatttggttgtcaacaataggatatacggacacacgtttgaagtattaaacgtagactaataacaaaacaaattacagattccgcctgtaaactgcgagacgaacttattaagcctaattaatctgtcgttagcaaatgtctactgtagcacacattgttaaatcatggagcaattgggcttaaaagattcatctcgcaatttacacgtaatttgtgtaattagttttttttactatatttaatactccatgcatattttcaaacattcgatgtgacggggtgaaaaatttttgcgtgggaactaaacatggcctaacactagccttctcccctatcctttactgacattgaggaggtggagagtagtagagagaaaaaagaaggcggagagtgggctgtgtttgagggtgaggggattgagaagattgggaagatatgcaaaacgaggtgagccattagcgcatgattaattgagtattaactattttaaatttcaaaaatggactaatatgaatttttaaagcaactttcatatagaaatttttttgcaaaaaaatacaccgtttagtagtttgggaagcgtgcgcgcggaaaacgagtgacaatctccccaatctctccccaatctcctttgaggaggaggggattgaggagattgggaagatacgtaaaacgaggtgagccattagctcatgattaattgattattaactattttaaatttcaaaaatggattaatgtgattttttaaaagaactttcctatagaaaatttttacaaaaaacgcaccatttggttgtttgggaagcttgcacacggaaaacgatgtgctaagtacataggaggaagagggattggcaggagtttctattactacaggataaatttctactattacatgtgtcacatgactcacatgtagggtttaaaaaaaagtagatgtaactcatccatttttttaaaaaaaaagagttgaaggacattaaatgtctaggtttgaagttcatgataaattccatcatacatcattttttttccctctacgtgagcagcatttaaattataaaagctattaaactatatttatatccatgttttctaaaccttttaaagaaattctctttcgccataatgacaatgctgagtattcacacttgaaacacaaacaaacaaataaacaagagtggtgatggcggacaagattaagaaatggcatctataatggcactccttaacttacttatcatatccattgccatcaaggagttggagagaggtagagaggaaagtggagtgggagagaatatattctaggaagaatatggatgtgcttagttatttagaagccaacgctaaaaaacaaattgcgatgaaaaaaatatcataaaatcaaattttaaaatttaaattctggtatctgtttataagctatgaggcaaacgatgtaaccttagagttttaaagagaacgatgataatttgtccgattaaatattcctatctaggtttagagttcgtaataaatttgtccataaatcaaactttcccctttctgtagcatcactggagttcaaattgtaacgcagatatttaaccatatttatgttgtgtacttaaagttttaccaaaagaaagttccttttcaccgggatcgtaaagtgttgtatttacatttagatgcagcaccattacacccgaaaatgaacaaaacaaacaacctgttgatccaccaatatgaaacctacctaaatgaatccgaatgaaattcactctacctataagaattccaacgactgaaaattctgtcaaaattccagcacctgaatctatctctagttctctacactactatgacttgatcctgattgctcccattccagtcgtccccttgctgttgagtatccccggcaatggccaaccggaccctctcagcctcgacctcttcagcgcgccgctgcaatcctcgtctgagtcatcgtcgccgccgtcgtcgtcgaggtcgacgcagacgcctttccctttccggtcgtacagcgcggcggcctccggcgtcgtcctctcggagaagctctcgtacaggtcaggcgagtgctgccggaacagcaggtcgctcgccgagccgtaccccatcagccggtgcaggctggagccatgctgctgcgtcgccgccgccgccatctcgtcgacggtgttgaacgacgagttcctcgacacgtgcagcggctgctcgtcctccgtggagtagctcacgtcgacgtggccgaagtcgtccaggaacgcgaacttgtcgcctcgccgcccgtggccgcgcggcgccgccggtgagccgtcggcgctgtactgatcgccgtgcttcttcctgtcggggtcccggtaggagtagctgaggacggcggagcacgagccgcaacgcagcttgcgcaccgtcttggtcgagacggcgaagtcggcgggcacctggaccagcttgaagcagctggagcagatgatgaacgcgcgcccttgagcaccggccggcaatggttcctgggtggcgcccgccgcttgacgacctcctttgccgccgccgccgccggccgccgcggcgcaggagattcttgcgttcttggcctgcagcaatgttgtccccggcagctggtgcacgcttgcttgccatggtgaggggggcagcaaccgtgatggcatgacggcccatggcgcgcgtcgtggcagcacgggtgatcagccctgcaccggcggtagcgccgcgacggcaagccacgtggtggaggtggagcagcgagctgaccaggcttgcctgcacgagctatgtagccgggacggtggacagctgcgtgacgcgctctgatggcttggatgctcgccgccgccgccatggccgcgtcgcgaggagcgtagccttcttgcctgggaagacgaggagggcgcgcgtgcgtcctcggcttgttcagttcaggagatttactgaaaagttcagagaggtcgtctttcaggttgtccactgtcttcaggatcctcttctgaagcggcgccaagctttctggtgatcgacgcgcatggccatgaggaggactcgtcgccggatcatcctcccgtttcaacacagccggtgcaggttgtgagtctggggtttgaactgaacttggtggaagctcgacgacatcgcggcgtggagattgggatgtttcctctgaacttttcttgccttcagcatcagattcagtctggtcgcttcgttgaacatcttgcagttcggtgttactgtcttctctactctctgaaaattgcaccttgccttcagatgctctgtcactgcactgtgcatcagctgcagtagctgcatctcctcttgtgagatcttcagaattgccaacagcttgctgactggtactctgaacatgctcttcctccttctcagctggcaccactcgctctggctcaggagcattgttcctcgccgacacgagatcatcagtctcgcgtcggcttgtcatgtcagctccttgctgcccactgctgatttgagcttcaggagtggatccactggtgcttgcaacatcactggagcccaggtgcttgctgtgaggaggcaggccactccccaaagaggagggagcactgatcacctcctgtgagttgccggtgcggtttttcgctgcgtaaaaaaagcaacaaaatccgtcagagactgaccaaaaggcaaaaatccaagatcaaattctcgatcatgagcagtcatggagcttgaattcttacctcggagggtagtgccgcatccaccgcattggtacaccggcgcgccggtgggctcctgaagaacactgaagcatttgggacacctcacatggcgaaccactctggcgtctgagattgccatgagccgacaaggccacagaacatcactcgcatgcagcaaaaggtgtatccggcaggtgctaaccgatcaagctcgatgtctgtgttgggagacagttacaagaaaaatactcgtcagtgttctgcttcatcgaatctgcagtttctgacggaagaagagaggaaatccaggaaatttgtactacttgtgtggaattttgttgactgataatatatactaatacatagaacttagtttacatgcgaatacaatagtaaaggaaaatgcccggtaagccttaagcacgtaagcatcaagaagcgacatgtatgtttgaactttgaactgttcgtcgagggcattatgtaattttctaaatttaaaaactagtggtgtatcagaactctgatgatgtcattagtcctaattaacacaataactatagctactagtagtagtggagtactatacaagacgaagtacaggatttagacagaatcttcctcaacagaaagtcacggtttttgtgtgtgaccacgcacacaaggtgtaagccacagcaaatgaacgaacagaacagaaagagccggctattggacactacaagctggtagaagatgcttgcccatttccagttaatttccaaaacccttggtaatcctaggtacgttatctttcgcatgatgaaaaacaattaagaaaccaaaaaacatttctgaaaccttaagagagaaaaaaaaaagaacttgctgagctgatgcctaaaaacttgaagtagatgaagaaagcagaggaggaagaagacagtcgggtacaggagcacccactcacctatcttttgttttttttggtttctcgctttccccttcagttccagacgcttctcctagctcctgcttcgatctctcctgttcccaatcctcagaaactactcaatccgatcctcaagctccaaatttccaaaatcaatcctcagaagctccacgcttctcctgctccaactccaattcttccggctctctctcagatgcagagagaaagagagagagagagagagagagagagagagagagagagagagagagagggagaagagacagctccaattcttggcagttatgggtgcagtgacgccaggagaaacgatgctgatatatataaataaaaatgggagcgtcgtgtgaagaggaaggaggaagaagcagctgaggaagcaagaaatgatggggtttggggtgatgtaaaaatgaagcggcgtggtggagaaatatttatatgcgatggggtggagaagaagtctgaccgcttccgcgatagcgagtggctggctttggactcctcctcctcttggagaagaagaggagggcagggagggccaggtcgtttggtgcgaccgtgtcgccgacgccagtcgcgagtgccaccgcgtcgtcatatccagcgcccgcccgccgctgcctgctgctgctgtggcctactggctcgctcgctcgctgtggacttctggatgccaccgtggctactggcgcgcgtgtagagcgagggttttctggatgcctcatgacgcgtgtggtggggtagcgggagcggttgccgtcacgcggccacacggcacgcggcgcggatggggaagggatcgtgcgtgcgctgccttgtatcgtctttttctatgcccttttctctggctcgtgtaatcgtacgtgttggcggctgcagacgaggagtaaggccatccacaatgggtagcctcagagcgtgcccctgctcacggcgtccgcctcccgtccgcacaccgtgcccttggagggggggcgcgacccccacgagggggacggccggctcgggctcctccaatctccttttcctgaggcacggctcgaaggaacccgttgtggcgacctcggtgccccattccccgcctcattcccctgcattttcccttcttgcccccccctctctcacctgggcgtggtgacggagccggcgcggcctcgtcggtgtggtggatggcgacgagagagagaagcggcgccggccagatctagcccaccggcagccggatctggaaagagaggcggcagcttggacgccatcggccaccgcaccgcgctcctgctcccgctcccgcgctcgcgcgccgtccagcctcccaccgctcgccgtcggccagatcgcccctcgcgccgctcgcccgtcgaccagctctccggcgtgcgcggagacgggcggcggccggcggcagccgaagggcgcggagggagcagcgacgagagagagggagggaggcagccctccttatcgcctcgcggccgccggcgacgagagagaggcgagcagcgagagggagacagagaggcgggcgacagcggtggctggggagagagggagatggatgcagggctggggatggcgaggagggaggcggcggcggtggctggggagggcgaggaggaaagcggcggcggcgagcggcaggggaagagaggagggaggtggcggcggcaagctgggaggaggcggcgacgaatgggcgacgaggatagcgataagaagaagctagaagccaaaagtgggggaggaagaaaagagaaggaaaaaaaaaagaatgagctggggaggggtatttggggatttttcacctgggactccattgggccaagacacccattgtgggctatagtactctcaccgggttgttttagattttgaggaacccatttagggataccttctattgcgaattgagtttcctacgagtgtcctcagttagtgaggatactctatgagtgtctcacattgtatatgtgagtactcctactttattctcctgttttaaacaggtcaagaaaataaaattggttagtacgagaactatttatttgcaacaaattgtactagtgtgtaccaactggagtccggaatcgtgtgcatagcacagacaaagcaagttttgcagacacacgcaatcattagaaaaaaaaaacgccgcggccaaacagaacagcaataaccgcatgaagcatgttccttgcttaaacaaagaagaaaagcgcaagcatgccgtttcacatccatacgtggagcaagcgagctagagagaccaacccactttcaatgggcagcgatcacttacacgaggaaaataaaaaggcaacgatatgtgtatgatggtctttgacctcgtgcagagctagctagctctatctatctcttggcatcgtacctgtgtactataggactatctacgtgtgtgcgcagtgagcatagaaaacgaagtgccgttgatagttttggtcgtgatgttgttgccgcatgccggtgcgacaaatatcacataggaggctcaggaaggcatggaccgatggacggttcggccaaatgaatgagccgatagccacagcgttcggctatcatgatcatgaaacgaaaaaggcgtttcttggctgcaggtaggcaccgtcggtgtacacatggcagctagagcggctcgttctcgtacggcctcgtactagtacgcaacgtacgtgtggccgcgggcggcgccggtgccggccgcctctgcgactgcacggtgcgactgtgcgagcttcaccaacctgcagctatcgacctacttctccttaccaaccggttcgcgcgcggcatggcacgaggaaaaatagttttaattacttgtttactagtatcttttctaaaagaaaaagaagatagattaatgtgcaacatttatataaattataacaaacatataaattagactttaatagtatatgtatattcatcttttttataacttgtaaatgccgaatttaaacttatacttcctccgtcccaaaatataagggattctgggtggatgtgatacttcttagtactacgaatctgattaagaaacctgttaagattcgtagtgctaggatatgtcacatccacccaaaatcccttatattatgtggcggagggagtatgtttttacaataatatattagtacatactagtaatatactccttccgtattttaatgtataacgccgttgacttttcgaccaacgtttgatcattcgttttatttaaaaattttgtgtgaatatgaaaatatttatgtcatgcttaaagaacatttgatgacgaatcaaatcacaataaaataaatgataattatataaattttttgaataagacgaatggtcaaacgttgaaaaaaagtaaacggcgtcatacattaaaatatggagggaatatttcttaaaattaagtacacgagtgtacgttcactgagttttcctactcctatatgctttcctagcgaatacgcctatcaggatagaggtgaaagtgaaacgtgagcggggcccaaagatgctgggcttggcgactcggttttccggctctgaagtgacggttttttacgcgccaattctctcgcgcggatcacagaaacacgcgggcagatagagaagagaaagagacccggctgcgacgagtctaactgccaacctggcagcacttccagcaagcggaagagggtcggtcatatttatcccataatatggctaattttttttagaaaaaaagggaaatgagtaaacgacctggcggcgcggttagtcgggcccaccacccacccactggggagtgggccctccctcccgcatacacgttgcagctggacgcggcgttcacaccaactcaacgtgcgccaattcggaaggagcacccatctttcccctttctccttctcctcctcctactcccagccgctcactcgaacccccccccccaccttccttgccgccgctgccccgagggcgcgggagataacctcgccggagcaccgccaccgccgctgtcgatcttcttccccgaggcaaagccaggaggtctctacctctctctctctctctctctctgaattcgtcgccccgtttctcagcttgctttaatttgtgtgaaatttgagttgatcgatattgcttcgtgtttcggtttcttgatgtggatttggtcctttaggatgattcttctccctttttttttgtcagtggaaatgttgtgctttcctcccgcatctcatgtgcttctcctgaatgaatcctagggttgatttgtcgagccaggttttccagttttccatttttgttttgagcaatcggttaaattcaggtcggaagggagctcccctaccgccgattcctcaagcttcttacattgaacagatgatttcgatgtggagatgtggttgggagagggagaagagcttgtgccttttagactgagctttgcatgcttaatgggaatatcaattggatgaaaatgatccctgatcgggacaccattctcggttgattttttgttcaggcgttcagcaaaatgctggtagcgaactattgtttatgaattatgagattaactagggattagtgtgtacaattatcagtaacaggaggcgttgaccatcatagtgtagctacgatgaccatcatagtgtagctacgattatagtagattcttgagctaatttttaggctgaatgcatagtccctgctttattagaggtaggacattggttgaagcagggcggaagctttttactctagaaatttagaggtagactttatgaatctaaaggtcaactggaacccaaaggtttaggttgtaaagttagatgctctttgattgcttttctatgactctaatatgtgcattctgatagactgcaacggccagctgactggcattttttactttgaaacatatttctactagatactgtgattgattgtgattttgctttattgtgccattcagaactaaatgcaatatttagcatcagatatctgcatatgtataattccaaacaaagtaaaaactgaaaggaaaaatgttcccaaaagaattcagaataactttctaaacttcccatgcaaatgatttttttcccctgtaaattaactagttccacaaaaaagaatccctgtctagcccttataaaacctgttgttcagtatgttctctctttcctatagagataagactaacaccatattcattttgcttccagtctagacaaactcagcttcatgagttcaagttcaggaaaagcactggcatccagcatctcctattcagcaggaaagagcagcattttcttgctctgcctctttgcaggatacttgggaattcctggccgaaaattccacttgctcaagaccgtttgcagcactgcatctccttccatcattggaagttgtggagggaaccttctttagactactttagcacaagtcttcagtttctattagtgtggaagcttggcctgcaaaaccagcaaccttagctacgtagtaggcctttggatgatggtttcttctcagacatcctctctgacaagaactatcgcacaggaccccgagctcttcacagcaaaaataattctcccaatgggtcccccggatgttatctctgaaaatgatgagtttgatttctctgatgtttttggcaccactccagttcagacgccaacaggcatttcggtagctggtccagacagtcctgcacctttggctgagtccaatgagggggtttacaatgatcctattgtcatcatcaagcgatctcattctcttgttggtccaacatcacttgttagccagtccctgcgacttagcaatctcactctaaataaaacagaggggtcatcagaacctgcagaagaaaaggaaaggaacctagggcagctcagtgatgaagagtttgacaatgccacaacagaaaatgaaggtattgggcttgatgactttgaaatcttgaagcttgtaggccaaggggcatttgggaaagtctttcaggtgagaaagaaaggtacttcagagatatacgcgatgaaagttatgaggaaggataagatcttggaaaagaaccatgcggagtacatgaaagccgaaagagatatattaacaaaagttgaccatccttttgtagtgcagctcaggtactcctttcaggtacgtgtgtacatcaatgttcttatctctatgttgaaatcacttttagtgatatcttagtacctatgtttgaacacagacaaaatatcgactttatcttgtcctggacttcataaatgggggacatctcttcttccagctctacaagcaaggattgttcaggtgactgtatacttctagctagtacttttgtctgtcaaaagaaaatgtttccggccctataactcaaccgttttgtttaacagggaggaacttgcacggatctatactgctgaaattgtatctgctgtagctcaccttcacgacaacgggattatgcatagagatctcaagcctgaaaatatccttttggatgctgatggccatgtaagaatgccttcttcaacaatctcctcctgctacttcttttccattttgctgatatcttttttgttgcctcatttcaaggccatgctcactgactttggccttgccaaagaatttaatgagaatacaagatcaaactcgatgtgtggaacagttgagtatatggccccagagattattcttggtcgggggcatgataaggcagctgactggtggagtgttggaatcctcctctttgaaatgctcacgggaaaggtgtgctgccaacttgcatgagagggtaatcttcccatttgcattcattcattgctaaataatcccttactctttgcaacacgctgcagcctccgtttgttgggaacagggataaagttcagcagaagatagtgaaagagaagctgaagcttccatcgtttttgtccagtgaagctcattccctcttgaaaggagtaagtttcttaatgcattcgatcacagtatcaaattcctatgttgtgtttcttatctgaaaaagatggcaatccgttgtccatttcagctgctccacaaagaaggtggcaagcggctaggaagcggtccgggcggcagcgatgagataaagaggcacaaatggctcaaaccgatcaactggaggaagctggaggcccggcagatccagccgagcttccgacccaacgtgagcgggctcacctgcatcgccaacttcgacgagtgctggaccagcatgccggtgctggactcgccggtggccacccctgtcgccggcggcgccggccacagcagcttcgccgggttcacctacgtcaggccggctccgttcctccaggatgtcaagcctccctcttcctctaggctgaaagactagctagcagccagtgcgagtgaagaaacggatgaaccaagagcaaggggaaagaggcgaagggtaggaagttactactaaaatatctgtaaaaggacaactggtccatgtgaatgcacttccggagctaatctacccaggagatatgatccatttgctcagaccctgaaactgatacccaatttcaatcacaagttcacaacacacaacctagtttgcttggtcgtgttgttgcattcgcggtcaaaatcaccctatgatagactaaatgccatcggcatttacatgaccaaaactaggtccaaaactggccacacaagagtacaagatagagcaaaatcatttctcacacaatatagcagctcactgaatagacaaatccaaagcttcgacttatgttcaggccttccgccgaccaacttgtgcgacaaatccagccttgattggagcaacagacctcgacgatccacactagacagaataggcaaatgttgattcagtggcaagcaaaataacgagagaatattcggttttcatccaacaaatgttttaaaatgtttcagtggcaaagtgttttttagtcctccctctaattctactatctgttgtactctccttaaaccccgtgactttgagcaatgaaattcaggtggggaatctctcccctgcggtgacttgttaaaaaaatgttttaaaatgaagattgccttagaagtcagaactttgcagataatatcatattcctttactcaaacaatgtaggctaggcaaactattatgcagctcatcataggctaacaagcaaagagtgaaagttgacagcagctagcaggtacaaagaatgagggtaacaaattgttttctgtgcactatagaaaattcagatgctcgcaagtctgtttctgtagtcaaacagaaagcaagaatatacttatgtacagaggagattggcgaaaaaactactacctcctatccagattcattgtattaggatgtgtcacatccacccgaaatcccttatattataggatggagggagcagtaaacaataggagataatagatgtcacaaatttgcaacgttgtttaagcctcagttgttgcttttttatcatgaatttgtttgtcaaacaatgtaggcaataatgttgcaactcatcattggcagaaccatagggaatagatggtaaaatgaaattttaaaaaacaaaaggcaattaactaatgttttcacagaggagtgatcgctcatgccgaagcaaactggatgtaactgaacatgcacaagcagataatcagacggcatttacctgttcgcagcgaaggaagaacagacgattttccttggatagaatggtatcagggcttttgcaaccattgcaaatgacgtactcatctgaaaggtttaaagacgcaataagttgcatataacccttgaaatcttaagtcaactaacactaacaaaacagtaaacaacaaacgtacaacttatgatagtttaccacacatgaaaaaggggaagctcatctgttcaaccaagggaatgaagtaggataacttactgatatatctccgcaggattgcttcgaagtttttcggagcaaatcttcctttgatcaccaacctttgctgcccatcaagtgatccacttgtccccatttcagcaagcaaaaacatcatcacatgctcaggttgcctatgcatcctggtaaataatttccggttagttcatcacagctttatccattgtaagagcattcaatagaatatcaaatacaaaatacaatccaaatggtgaaaaagcgcacgttttgcacaagtccataaaattcacaaaaactgtcttcttcgtgccctctcgaagaacctgtggcggcctcatgacagttctgcgtctgtctccagcaagatctggattgttttcacgcagaatattgaacactctgcccagaagctgcaacaaaaatacccaaatcaggttttcacacgcactacagtaatttggtcattctgtgctagttctggatgacagttgtttctgtttcacaatgttgtttgagactaaaggatattgagttgcatgctagttcagtatagaattagacccacaaagccagaggaaaaagtaagtaaaattaataaagattatccaaagcaaattttaatgctctcaaaacatcgcgtgacagcagtacatgaacaatacattggaacaaataggtgtggttgtaagagcatgaaaacagtcaaaacacaaaattatggtgcatgcaaagctttggaaaatttaccaaaagattactgaataatgtgttgtctgcacaaggaaataatgaaaagaggaaaataaatgaggagaaatatataatagtagaagcacctcatcataattgtagtccctatcagttccctcccacgggtacctaggggcacctccaagcacaattccttccccttcttcctcctctacaacttggtcatctggaaagcaggagtcagtaaggacaaagaataaactgtcaagagtaagtaatcaaggattaatcctatacctaaaatgtcctccccatcaccaatgtcattaatagacaaatcaagatccacctgaaattttcagtaatgtgaagctcaattcaatctgtacctctcaaacacacacaaataatacaaaatgttgatctcacaggttcaagcacaaataatacaaaatgttaatctcacaggtttcttcttcttctttttcatcccagtgaagttgagctcaccaggctctgtgactaaggaataaaatggtacaaattagcaaagatattcccgtggcataatatttttttctacgctacattaagaatacctgtcaggttttctgtcttctctgccagcttgtccacctcatcagaaggatcttggataacaaccttcttctttttcttcttcttggttgggtcaaaaggagtaagctgtagaatatgaacaatgcaaataaataaacggagcaacggagaagacgtggaaaatctatagaagttttacacaaccatcagtaagaaatataagatatagcacttaataacttctcagacaacgtaatctatcacaacttttttaatatttactccatgaagaaggggaaagaagctgaggagtaagcactggctggtatcctggtactggtttcagataaggccggtagcctctggacaggcagaacatgatataatgctgttcgttcgtcaaatatataatcacttatcacgaaaccagagtcaaaatgcgccccttatatcatgctatgttgttgcaatgcgttgttcatatgctacgaatccctcgcccatgcgttctgaaatggtgactacacataaaacaaatgaacatcccctgatgctagtgtctcttaccctctaaaagaactcaagtccaacccttattccaatcaacagcaaacttctagctcgaaacccttcgaatggaaccgctcttaacgaaaccccaaatccgcatgaaccgcacccaaccgattaggggcgattggggagcacgttgcctcacctcggagacctcctcccgcttctccgcgtgctcctcgtccgccatggttgccgcccgccaagcctcacctcacctcacctcctccgccggtcgcgatcgaatcccctgcaaggcacgaacacgacggcagaaggatcagatccaaccgaaggaagaaagcgcgcggcgccgacgatcctatcgatgcgcgactcgcaccctgagctctcgccggaggagagcgcggcggcgacggcggcggcggcgtggattcgggtggtagggtttttcccggaggaatccttgcgcctttagctttactactggtctcgcccgtgcaaaattatgggaacacagggactctagtgagaaaagtcactccgtgtgatcaatcctggccgtctaaatttgatccaacggttcgctgtcaatggtggcgatctaagttgagcgtggagctttgtacagtgggaaaatttttgggaaaatgcgaggggcttaagagaaatagttcactttggatcgaacgaatgcaagattctacactgatttgaaaggaagggtgtgcttagttcacgtcaaaattggaagtttggttaaaattgaaatgatgtgatgaaaaagttgaaagtttgtgtgtgtgtaagaaagttttgatgtgatggaaaagttgaaagttaaagtttggaactaaactcggccgaaataatgaaatcacaccacaaaatgcacaattccaacaatcaaaattcccagagaaaaaaatcctacacttgtcaagaatcaagaattcaagactcataagttccaatcagaatatgctcagctttctgaggctgcatctaatgtcgaccatgtttagcatgaactcaatcacaaattagctaagaatcaaatgatctgcaactcgcagcttggtgaggcatatgaacacaggagcacataactaaaccgatggtggattggagtccttcatcttttcatcagaggaagctcggctctctgaagcagaatggcgcagtccctcgatcatcctgatcacatcctccatcgatgggcgtcgatctggagaccttgatgtgcaagccattgctatctggagcatctgaacaagctcctcctcgatgttttgctgcttgatcagctcgacgtcgaacacctcggctgtccactcctctctgaccaccgagtgcacccatcttggtaggtcgacgacatcgtcattgccctgcgactggagtggagctttaccggtaagcatctccatgaggaggacgccgaagctgtagacgtcggatttctgggtgatcttgcggttctcgatggtctcaggagcgcgataaccgaccacaacgcgagatgcattggctggaacactcatcagggcagttagaccatagtctgaaacataagaactgtaatcttgatcgaggaggatatttgtagacttaatattgccatgggtgagcttggcgccaccttctgcatgaacgtgtgcaatgccgtatgctgttccaaggattatcttcactctggtgctccagtctaatggtgtcttttcagtaacacccctgatacctgccgaatgttcatcagcaaatcagtacaaaatactaccaactgaaagttaactattcacatttatttaacacaagtttcatttctgagtatgagcatttttttagtgtgcaggagggctgtacaactttctattgatacaagaaaatatgattagactccctacttaagctagctacagaaggaatatggatgcagctttaggcaagttcagctgtagtgaaaaattaaaatcactaatatcctgtgttagtttaaactttattaacatcgcatggatatatcagtttacaaattttaaacttaatcagtgtaggcgttcaccttttaactaatgtgggactcttcttatgtttactcattagccaccgcagctatgagtctatacatgtaccagtgtcttgcaaaaaggatgaaaggaagaaaagcataccatgtaacttggttgagaaactgccattggtgagataatcgtagacgatgagcttctcgtccttagaatagtagtaagcacgaagtgggactaagtttgcatgtttacctaacctaccaattagttccatctgttgctcaaactctttttttcctgccacgacatcttttagtctcttgacaacaacaacggtaccatcctcaagtatagctttgtaagcagttccataacttcccttgccaaggacttctgcagaagctctcagtagatcctccaaatcgaaggtataggagcaaccctccaagaaaaccaacttgtttttctcggcgatctgaacgccactactgaactcctgttttggcttctcacttctgacaccagtgcccttacccttgtagtccacaccactctctttcttgcctttcctctttgaattacacacaaccaacacaaccacaacaaacatcagtactgcgaagcccccaacagcaactgcaattatgaatccggcgccaaactttttctcatgatgcgctgacattggagttggtgctgatgaaggggatgctggtgaaggcgtcggtgaatcaggaagcaagcatttagctagaggtggcccacataatccaggattccccaagaatgagccatttggaaatgtttgaagcgactgaggaatttggcctttcaaatcattgttgctcagattcaatagtctcagacttggaagcttgagatcagggatggatccagagagagaattttcttgtaaattcaggactgataactgagaaaggttttgtaagcttataggaatttcaccggtaaaggaattgtaggagaggtccactacactgaggttaggattcaaaaaggaaggcaaatctcctgaaaagttattgtgctgaaggtatatggatcgtaaggaaggaagcgtagtcacatcagatggaaggcttccagctaaacgattagaccgtaagctcagaacttggagagagtcaagctttccaagagtgtttggaggaattgctccaatgagaccagcacctggtacccttaattcaaatatgtgtgactgatctcctgagcattttacgccatgccaagaacacaatgatgtgctttgactccagttgagcctgttgccacgatacactgcagaggcaaagtctagaagggcttgcttttcagaggttaagtctgctacagacaagggattgaacaacaaaagtgacaactgcagtgagagcagaagagacaaaggatttctaatactgagatgatccatttgatgaatctccaaatcaggaactagacgagcagcatcttcgtttgtttatgtcaaataagtagccgatcctgttgaaataaaagtagcgagcattcagtgataacagttaaaacaactgcactaagatttcaatcgtagctccaaataagaaccgcatttcatcagaagatagcaaataaaggttaccaatcattccttgtatgcttctaaagtgcccaaa

SEQ ID NO: 8030 - DNA, 4191 bp, Oryza sativa
ctatttagggaactcttctcatcacttcttccacacacctcaagcaagaagtttcatacatcctcatgcttagtatagtctctagggtatagtggaatagaaatagaatagagttttcagtcgtcggagtcttcggaagaattcgggtatggctctagtagcttttccttcttttgtaagacttgtactttatttagaatattcttctttatactactttggtatagaactactttccgagtatgaataccaactttattatatatccatgttatattcattatgatgatagcttatctgggagatgcaatggtgtgggcatactaatcatatttacgatgactctatatcatgatgatgatattagagtagtatttggtgatttatgcgtggtgtttagattactggatatctttatttagggttatatgctacggaagcgaggtaggccgttgatggtgacagctcagtacgggtattcctccgcgtgtgtatatagtcctaagttaatttcctggggagggtactcctccatatttagccccggttggatggtcaagacggattgtcgtaaggaactcggtgtcacaccctgaagttctttcccaagccaaaattgaatttataaattacctagaggaaatatcggtgtaaaagcaagagagaaacctaataaattaatgcaaataataatcgggattggcatgtggaatttttcttgagttctacatgtcgaaatatgctaacaagatttttagtggaattttcagagccctagaaataattttaaccaactaaaaatgagcacaagcattatttaatccctagaaatcaattctttctttttcttttctttttccctcctttttcttttcgaatgggccgctggcccattctctccccctccccctccccgttgggccgggccgcaggccacggcctagccagccgcccgagccccctcctctctccccgggtcgccgacaggtggggccctcctgtcgggcccgtctccctcctcgagctggcgccgccgcgcccagcaaccgtcgccgcgccccgctcctgcgtctcccgggccacgtcgcccacgtcaccctcgtgcccgcgtccccgcgcccacttccccctctctcccgcccgcgcccgcgctcgagacggccgggattcaatttttgaatcccgcctctctctcctccccacctctccccactccgccggcgaaatcgcgatctccccggccacgatcgaccctcgtgggtctaaataaagcacccccgttccctcctctctctttttcgttttgcaatcacctgctccagtgcactccaccgccctagcgccgtcgtcctcctctccggcgcccgccgccgccgctccggtcgccgctagctgccgctagccaccgtgccgagccgtgccgtcgacgttgttgcgttcaccgtcgtgcgggccgtcccgtccacccctcctccgtagcaatccgccgccggagccccgtccgcgccgcgcgccggtgagcttcgccatggccggcgccttcggttgccgccctagccatccatggtttccccctccctctctaactcatcccttttgatcccttaggtggttccgcagcccgtctcgccgtcgccatcgccctccgtcgctcgccgtcgtcggtcgccgtcggtgagacccctcctccccttcctccctctctcccgcgccgcttagccgccgcgccggcgcctagccgttaaccgccgctgtcgccgtctggtcgctgtgacgccaccgccctccgccgccggccggtcgccgccggtcgccgccttgcatcgccgtcgcgtcgtgctgcgccgcagcgcgccacgaccgccgggtcagcttgagccgtgcccgtgcgcgcccggccacgagccgcctccgccgtccgatctaccgggcggtatatcggggccgtccaaccccgccgcccgcgtggctgccacgtggccgccacgtgtgcgccgcgtcagcgccacgtgtgcacaacgtggtgcgccgctcctccccggtccgtggacccggtccaccatggaccgccctccccgagtcactgccttgtggggcccgcatgtcggcgccgcccctccctctcccggtatttatttattacgcaataaatcaattaaggatgtttccgtttaagcccattcaagtctcagtaaatcaagaaaaatgtatagaatccattaaaaatggttttgttctctgtttcagtagtcttatggcctgtttgtattgttttctttgtatgtcgcttagattccggctctcccaccgctccggtgtactttgaaataatcgccgaggttcctccagcagcagagcaaggtaagtcatgcttgtcacttgaacatgttgatcctatattgcaaatgctctatcgttttcctttaaatactgcatcgttttataatgttactatgggatgtttacctactgttacagccacgctaatttttgtaccatgctcctttgttagcttggggtataacatgactagagattggactagggattgcttagccatgcttagttcaactagcacacaatgggggaaatacattaatacatagatatcagattctagtaatgatggttaataccaccgctccggtgttggttaattaaaattaactaaattgtgagctatgggtgcatggttttgatggtcgtgcccatggcatttaaggaccggttcgcgggatgccctggaagaacttatcgtacttaccacaagccagcgtgggcaacgactgggcttgtagtgtagctttcctctagttgacgcatctaggcaagggtgggcgtgatggagtttggatgggccttgcgacggcctatgtggcttccggattcacctaggcacgagaggggactgcccgctgccttgcgaggggtgggggtgaaacctgtggtgtggtgtgcttggttagagggggttatgcgaagggtcctgtcacggtctctatccggtatgtcgtggtggcatgtcggtgcacagaaacgtgtcgtggggctgtgtcttgtgggtacatgtcacgcccggaatttctatccaaaattccaaacgcttacatgtgtgtaaaccctcgtccaggaatcagccgaggcacacaataacaaagataatagagtaccattattactctaattaataagcgaataaaatgtcattacagaggtagatagttcctctcaatcaataaagatctaagtagcggaaaataagataaacggcacagacgactccactccacaggcagcttgaccagggttacacctaatcctccacaccaacagcttcactgtagaactcttcctctgatgaacgattgcaaggtgagtatatgacatactcagcaagtcacgcagcaaatatgcaagtgcacaggataacaaaggatggcatagtagggtttcatttgcataaacagcatttaataaacatttgagaatttaataaaacagttaagtaataattaaacaatattaatccaacgctatacaatataccctgttgtataagcccaaccattctgaacaaccacacccggctgtacagatctatctccaaaccaggaatataccattccaaaccaggagctaatcaaattattaccagttatagcatcttttattgtgatgagaggtgtgagactaatcacgaaagacattgttagacccgcccataaccgcgggcacggctattcgaatagttttactctgatcagaggcgtaccactgtacccacaagacacagccccacatcatgtcaccatgtgcctcaataccaccacggtacctcggaaaggagctgtgacaataccccttgcgtaacacaatccaccgcagcgcaccattcctggatcataatcacccccttataaacaaggcatggactccccagcatcccctgtgggcttatctccgccacttctcagtctggtgcccccgcaattaaccatgctatacaaaaggtaaagccgttgcccacgctggcttgtggttggcacggttaatgtttcacaaccgaaactcgtgaaccggtccttaattgtcatgagcacgactctcaaaaccatgtgctcacaacccaccattatcaaggtttagttggcaagtaattaattaaccaatcacgattgaccatcgtgaact

SEQ ID NO: 8031 - DNA, 1712 bp, Oryza sativa
actataggcgaattcgagctcggtacccctagtatatagaaggagttttggataaggaaggaaaaatagagttctacatggaaacgacaaggactattcggattatatccatattgcacagtcctatctccaaaccaggaatgtaccattccaaaccaggagctaaacaaattattaccatttaaagcatttgttatcatgatgagaggtgtgagactaatcacgaaaaacattgttagacccgcccataaccgcgggcacggctattcgaatagttttactctgatcagaggtgtaccactgtacccacaagacacaaccccacatcatgtcaccatgtgcctcaataccaccacggtacctcggaaaggagctgtgacaataccccttgcataacacaatccaccgcaggcccaccttctggatcataatcacccccttataaacaaggcatggactccccagcatcccctgtgggcttatctccgccacttctcagtctggtgccccgcaattaaccatgctatacaaaaggtaaagccgttgcccacgctggcttgtggttggcacggttaatgtttcacaaccgaaactcgtgaaccggtccttaattgtcatgagcacgactctcaaaaccatgtgctcacaacccaccattatcaagttttagttggcaagtaattaattaaccaatcacgattgaccatcgtgaactatcgttaagccatcattaattaattaatagtgaatcataagttatcccaaaagtgtgctaatgtttctaagcatggctaagcaattatatctaatacatctagttgaaccaatatataaagcccaactagtcaagttataataacccaaagtatcaaggaataaagtaatcaagaacaaaagggctataacaaacaataggttaattccacccaatgacattcgaaaataaatgcaatagttgaatagaaacagtagctttaaataggatcaacatgctcaaagggttatttgggatctgtgtgacttgccttgctggccttggaactcttcaaattcttctcctgcgaaaacggactctccggaaacgtcggaatctaaacagaaaagagcaaaaacaccaaaacagcacataaacaagcatgaatagtacatgtggatatttttaacatgtagatctcaattttagaaaaatttagagacttgaaccaactaaatcggagctaagatgaattagttatgaatttttaaagatttaatcggattaaaacacttatattgattttaattgaattatgacgcaataatgaattatttttgaaaaggaaaaggaggattattgcgtcagcgggctagggtttcggtggaccgggcgcacggcgggcggttcacgcgaacggacggccgagatcgacttgatccaaaacggacggccgagatcgatcggtccacgaccagctcacgggagagggcgacgatgacgtcagcggtgacgtcaccaccggcaacggcgactcggcggctcgggcgcgcatgctcgtcggcgaacggcgacgcttcggcacgaacggagggcaccaacgggtagagcgcgacgcggcgaactcaccggtgaccaaaggagcggcagaagaccaacagacggcgacggcgacgaggttaaaacggcggcggtcttccgcttgacgacggcgacggtgcttcggcggtctacagcg

SEQ ID NO: 8032 - DNA, 19524 bp, Oryza sativa
  unsure (1)..(19524): unsure at all n locations
gaaaaaccgtgcaaaatttatcgaaaatttaaattattttttaaatttatttgaatttaaggaggttaccgcagtttttctatatcgtaccccgcggcaagaccggttaccgtggttactagcggtaatgtaaacccgggtgaaaaccaactaaaacagtggaaaaagaaatagagttgtttcaactttcaagaaaagaaaagaaatggaaaaatacacacaacaagggaaacacgatttaaaaggattggacttttcctcgcaaaaataaaagaagaaatcgattgggacttggggtttagaattatagcggcgatctctacgatcgatctgttgcattgccacctcgctcgcgcttttactttaatctgcggtgatctgtatgattaacacgtacgattctcaaactttcgtttcaagaaagaaaaggactcaaattcacattgggttttatgtatatatatatatatatatatatatatatatatatatatatataggtaaattaactggtgctacatggagtatgggtttcaaaattcaaattgagtatctacccaatttgaatgagtatgaattttttttaaatgtttagatatgatcaattaacttctttcaaactgaattttttttgttagattttgattctagttatataacatccaaacatataattcgttaggtatgtaataatgaattgtgaaataaagttgagtttgagttgttttgttgttaggtatttgtatgaatcaaattcatatacctagatatctacttacaatttgtaaatttttaaaaatttgagagaatttatgtgttttatatcttggagcccgggcactatggagtcccatatggatatatatatagttgtacaatctcggattaattaacttatccctccatcgatcgatcacatcgtgctgttttatctctccatcatccccaccatcgccaattcaattcaattcgacgtggccatgacgcagacgaatcaagccatcgaggtggacggcgatcggctgtcgccaccgccaccggcggcgtcacccgccgtgtccgccgtactcgagaacgatgacctcgtcggcgagatcctgctccggctcgcctttcccaccaccctcgtccgcgccgcgctcgcctgcagacgctggctccgcgtcgcctccgaccccttcttcctccggcgattccgcgagctccacccgccccgccttctgggcttctacgtcacgagcctcaagataccgcgggctcacccgctcttcgtcccgatgccgccggctgcacggccaccggagctcgaccccgtcgtccttcgcggtggcaacttcagcctcgcttacgagggttacacgaccagtatctaccagtgcaggaacggtagcatcctcctcttcaaggagaggcatgatcggcgcgagctcaaatacgcggtgcacagaccgctgcagcatcctgagagaggcctactcgccatcccgttctcttcaacacatgacgatgacgatgacgtcgagcctgatctcggcttcgacgacgagaatgtgtgggggttccacttcggagaggatggcggcagccagctataccggttatcggtgatgttcaccccaaggggagctacttccgcgtggttctacgcattccgggacggcggatggcatgtccataccaaggcgacggcacagctacctggcttgccaccggaatcagctgggttcgtcgtggtccgagacaaggcctacttggcagccacttcgagcagcgttcttgtgttggacttgaagtcctcgagcttgtacaccatccagcttccagatggggtggagttcccacctgtgatgatgtggtataatgatcgaagccacgacgttttgttcggacgagcgagcgatgattctggggtttatatcgccgatctgaaggagcctcagcttcgtatttggctacttaagcatggcagcactggatggactctggttgataccatttgtttgcggtcgatgtgcgctaatttgcacataaattgtgtgggcggggatagtcgtgttgtttacatggattatgtaggggacgatgctgagtttttgttcttgaaaacagatgaatgtgcactctacttggatgttaagagtaggcaacttcacaaggtttacgaggtgacatgaaaaggatgaaatcttgttttcaatcatgccctttatgatgatatggcctcccatattccctgtgaggaaggaaatatcataataatggtgaattctcttgcaatgttctttcatgttattattatttgttccacaatgacacctggtagtgcttttgtacaatgaacccctagataaaaattttttccaaaggtttttttttttttggggcccctttcccttttataatattttaaaaaccccccgggggttaaagaggttgacatatatatatatatatatatatatatatatatatatatatatatatatatatatatatatatatatatatatatatatatatatatatatatatatatatatatatatatatatatatatgcgactttttttatatactttagtggtggttctggagttccatgtataatgtatggttttgctttaggatgcggaaacttggaatacactaaaaacaaattttggtacatcaagatatattttttttgagatacttagtatctggaagtacaaaggcaatagaaaatatgatacccttgtacctttttaaggactagcaaaaatatttgtgcgttcaacagataaagataattttcatgattgataagaactctgccaatttaaacgataaaaccgaaataagacagacaaaacaatggaaataattcaataatcacatatagattgaactaggttgcgttcgcttcatgcgttatcgcacaaaggatcccttatatacaccattccatagcctcatagatccacgagtggatatgccataagttgatacatgggtatttcgctatatcttggaccaaatattgaaattttgattattcaattagtgaaagttttttttactgtagatagcagggggaggcctatccaccagtggagcatgagccaacaccaacgcccagaaaattccctacatgctgccaactgtgagggatgtcgcctcgtcatgtcgcgacagcatctcttgcaccatatgcatcggccacgatccgaacaggggacaccgccacaccggcagtgacaccgtgagttgcccccgccatggccaaccgtcgaagtgccatgaccatggcgacctccatcctaacgccgccgactcctccctccttcctcgtgcacagcagccacggccagatctgcaccgccatcggcaaccttccgaaactccgccatccgcgcacacagcgtgtgctaaatttgagcatttcattgcatgtgttgtagtggttcacttgcttagtgagatgtcacgaagtcccaggttcgaatctccccctcgacgtattttttgcctttatgatcatcgctcacgggaaatagcgcaaaaatttacaaaaaaaacatgggaaccgggtgatcaaaccacgtgtctacttgtggttttaaaaaaacggatgaccaacaccacttcggtacaagatggtttatgtacgataggaacatatactctcacttaacagatatatagggttagcgccatgattgctggcacagagccattggactgaggtgacggcttatttttgaaataagtttttgatatagttctcttttcaaatatgttttctaaaagcgttagattgtcaaaattatagcaaagaccattggtgtcatgtgacaccattgctataacactagctccacccccgagtcacaggtttatctatccagaagcggttgaactaaatagccaatatatagcagaagaatagtaggaagagctcatgtaaattattttcaaaatgaatgaacatttttcatcaatttgtacatgctgaagtttttttacagtatatatcagcgttagtaatgttaaggaacaataatgagatgttagggttagggtttatgcgccacccgggcgaccgggcggcggcagagctctcgcgcgtggcgagatgggtctggatggagatctcctctgatctgctcctgatgtctccgggggttttacccgccgtgggttgttctgggggggatttcctccctgtgttgaaacgtgatctggtagggtggcctgatcatactcgtataggagataagttgaaggctttccctttaggcggattgatctatgggaaaggttcgttctctgctttccgtattgttccaggggatctgtggcccttgcgaaattctagaagggggaggagattgaatctgttttggtatccgaagttcgagttgtattggagacctaattctgtggcattgcagtataaatacaagtcacagtggtggccgaaggtgcggttcaaagtttttccggcgatagggctaggcgttgtcaaccccgtctctttgtttgttggatctagcggaagtctcatggcggccaatgtcggtgggggtgataaagggatcgtcattgggacgatttcccacccgaagctgatgagcggtaatgagacggacgcggtgattctcgacaggattcctctgaagatgatcgagggagcagcgggcacatctgatcagggccaggaacacacaacggctgcgaggaggggatctgcagagaacaaccaagttgatgcaacacagtgtcctgcagtgttcactgaaggagatctggtggaggatgaggaggatgtggttgcggtgaatattgaggatgatgaactgcagactgctggcctgtggacgatcttggcgaggttctattctctgagaactccgaaccaagtggccctgtttgacgacatgcgcagagcttggaggttgagagcagatatgagctacaaatcactacgtgacaacatgttcatcataaccttctcggtagagggagactgattttgtcattaaagggggtccttggattcacagaggagatgcactcctggtagcgagttttgatggcattacgtgcccatcgaatgttcctttggatgttgttccgatctgggtgcgcatatatgacctccctctggtgttgatgacaaaggtaagaggtgggatgtttgggagcaaactcggcaaagttcgtgaggtagacgtgagggatgatggacgcaacaaacatgacttcttccgcattattcgtgttgatctccctgtcaagcgtcctctgaaatcacagatagctataaggatgactgtccaaggcaaggaggtccttcgcaggttcgatttacgttatgagcgggtaccgcacttttgctttatctgtggttttattggtcattccgacagagattgcaatagaagatctgccaatgaggatcaacctttccaattctcagctgagctacgatgctcccccccttaaaccttttgagaagaagatcagtaaagtgaaagctgcccaaacatcaagtgttgcacgtaacttgttcttcagaggggcaggaagtgctagttcatcgtcctccagacacaaacaagatggtcagatgcaggaagcaataccgcccagagttgatgcccatgatgggtttgagtttaaggaaagggaaggggacactgcaattgatgagatgttagctcaacaggctgggaagatggatgttacgggggacaaaactcaggaaacatcgatggttgtccctgctgggaagctagcccagcaacaataggagaaggaagcacccaagaagactgatggtgatgaaatttctgcttctgagatgataccagccatgaggaaccttcaacagcaagcctcgtttggggaagtgtcatccgaggagatcagcgatgccaataggaagaggatgccagaccagtcaggactccagataaaagggagggttcagcaagcattgttggaataccaacaatacacaggtggcagcaattccatgcatggggatatcggcaaggcagctagagcagtgaagagactcaagaaggctgcagagggtgaggacacagacgatatggaggcaaccagccatggggccgctggtaaactgacgggacctgtgattgggtcccgtcaggagcaatgagttgcttggcttggaactgtcgcggtatagggaacgcggcgacagttcgtgacctttgtgccttagtgaaggaggcaggttcccatattgtgtttttaagtgagactaggcaaaagattgagaaggttcgtaggctgcggaatagattgggtttgaagggttttgctggggttaacagtgatgggatgagtgggggtctggctttattctggcatgagtctgttcatgtggaaattataagtatgaatgagagatatattgacgcgtatgttcgtttatctgtgaatgctcctgtctggcatgctacttttgtgtacggggaacctagagtggaaaatagacatcgtatgtgggcgttgttaaattcagttaagcaagtttcggatcccccgtggttagtggtgggtgattttaatgagactctttggcagtttgagcacttctctctgaaacaacgaagtgagctgcaaatgcaagcctttagggatgtggtccagagatgtgatctccatgatctggggttctcgggggtgccatacacttatgataataggagagaaggccgcagcaatgttaaagtgcgcctagactacgcccttgcagatgatgggtggaggggactgttctctacagcacaggtgtttcatctgtcctctcctagatcagaccattgccccatccttgtcaaattttcttctgaagaccttcacaggaatcctgtgaagtgtgtccattatgaaatttactgggaaagagaccctgcaatctctgaagttatagcagaatcttggggcgtttccggagttaagcaggatctgcgcgacattaatcaagctctgtttaggatgatgtctgatcttcgcacatggagtaagaaaaagttcaggaatgtcagccgggagattgagaaaaatagaaagaaactatctgaacttcttctaagtaatgccgacaatagggaaataagacgggtgtccgatcaaatgaatgaacttctgtaccgtgaggagatgatatggctgcaacgatctcgaattgcttggctgaaagaaggtgatagaaatacacgtttctttcacagcaaagcagtgtggagagctaagaagaataagattacaaagctacgggatagtgacggtactgttcacagtacgacaaaagagttggaacgtatggcaactgagtatttccaaaggctgttcactgccgaccccagtattgatcattcgtgagtcactagcctgatgaagccgaaagtcacagatgcgatgaatgagaaactatgcaaacctttagtgaagagaaattgcaaatgccctgttccaaattggtccgttaaaagctcccgggccagatggattcnccggtcggttctatcagaggaattgggctatactaaaggacgacattgtgcgagctgtacaagaatttttctcttcgggtaccatgccttcgggggtcaatgagactgccattgttctgatactgaaaactgagcaaccataggaactaaaggatttcagacctatcagtttgtgcaatgtggtctataaaatagtgtctaagtgtttggtgaacagactaagaccaatcctggatgatctggtgtcacagaaccagagtgcctttgtccctggtagattgatacaagataatgccctgatagcattcgaatgcttccaccatatacagaggaataaaaatcctgagaatgcttactgcgcatacaagttggacttgtccaaagcgtatgaccgtgtagactggaaatttttggagtaagcaatggttaaactgggtttcgctcactgttgggttaaatggattatggcatgtataacctcggtgagatatgcagttaaacttaatggaaccctgttgaacacctttgctccatcacgaggtctgcgtcagggtgatcctctttcgcccttcctattcctttttgtggctgatggactgtccttgttactagaagagaaagtggatcagggagctatgaacccaattcagatatgccggcgtgctcctgctgtgtcgcatttactgtttgcggatgacacgctgttgttctttaaagcggcaaatgatcaggcggtagtgatgaaagaagttctcgaaacttatgcttcctgcactgggcaattgataaatccttgcaaatgctccatcatgttcgggcaaagctctcctactgctgtccaaaatcagataaagcagaccctgcagataagtaactcctttgaagataaatatttgggctttccgatgcctgagggtagaatgaccaaaggaaaattccaaagcctccaggagagattatggaagagaattatgctgtggggggagaaacttctgtcaactggggggaaggagattttgattaaagcggtcctacaggccatgcctgtttatgttatgggactcttcaagctcccggagtcggtctacgaggaattgacaaaactggttcgtaatttctggtggggagcagagaaagggaagaggagaacgcactggaaatcctgggactgtttgattgctcggaagttgaagggaggtatggggtttagggatttcaggctgtttaatcaggcacttctagctagacaagcctggagattgttggacagaccagacagtctctgtgctagaattttgaaggccaaatactacccgaacggttctctcattgatacaagttttggaggtaatgcctctccaggctggagagcgatcgaatatggtttagaattactgaagaagggcatcatatggcgcattggcaacggtaaatcagtcagattgtggagggatccctggattccgcggagcttttcaagaagacccatctcagctaaaagaaattgcagactgagatgggtttcagacctgattgatcagtccgagtcctgggatactgacaaaatctcgcagcatttcctgcccatggacgcagaggccatcctaaacattcgtttatcttcaaggctggaggatgacttcattgcttggcatccggatagactggggagattttctgtcagaagtgcttatcatctggcaatagctctggcacaggttgatgaaggctcgagttcgtccgggaatggaaatagcagagcctggaatgccctttggaaatgcaatgcgccccaaaaggtgaagatttttgcctggcgagctattactaacagccttccaacattggaaaataagaagaagaggaagcttgaagtttcagacatctgcaccatttgtggggtggagtcagaatatgttgttcacgctttgtttcgctgcccacatgcccggcaattctgggaagcgatgactgttgatatgaagcttaaccctctcagcaacattcgcaatggagatccgaaagtgatcttggacctattggagcagtcgcagccggaggaacaggttatgcttttaatggtactgtggcgaatctggcacacacggaatgaaatagtgcatggcaaaccagccccaggaatactagtgtccaaacgtttcattgaaagctatgtcctctcccttgctgagatcaagcaacacccccaagcaagtcctgagaaggggaaacatgttgtggatgtggttctaaagaagtcgcacaacatcaaacggagtcaagaacctgttcctgacaaatggtcgaagccgctcctaggaagcatgaagctgaatgttgatggctcattccaggagagtgacggcaagggtggtataggcgctgtgttgcgcaactgcacaggagaggttatttttgctgcttgtggacatgttgatcgctgtagcagtgctttggaaacggaactccttgcctgcagggatagtcttgccctcgccctacaatggaccctgctgccaatagtgattgagacagactgcttggcgatgatccatcttttccgcgatgcaacaggtgctaaatcggagctggcgtttttaatcagggagatagattctctcttggtgggaaatagggatattagcttcagtaagtgtcttagaagtcaaaataatattagtcactatttagcaaataagggccgttgtgacaagatcacacagttttggccggacaataagtgtacttttatctcgcagtttatctgtgaggaggctaatgagtaattatccctttcccctgaaaaaaaaaggaacaataatgagatgtataggttatcagggcaaaaacaaagggattagtgcatatgcatatgcagagagagtaggaaactcacaaactttgcacctctctttgccgagatgacacatgcttttcatggctcctatgctataaaagggcagcatatacagtcatacagactagtattaattagttactaagcagattagaattagttttggatcatcactgcaaattgaaggatcacacaaatcaatggctgagttgcattgtcgtttttgtgttttttggcattctgtaacttgaccgccccttgcatatatatgcagccagctgaaattagccttggctggcatcctcaagttagagaatgccaaaaacacaaaggcggccgggatgctgtgtcttgccggaaggcacgaagctgacgctggcgcacgacgaccacggcgtggctgcagcggcgccaaggttcatcatctacaaggacaaggccgacgccgtgccgtccaacctccgcgccatggacgccatcctcgccatgttcggcatcctccctggatccgacaaggcggcgcaggtcgccgacaccctccgcacctgcggcgaactgacggccgccggcggcgaggagccacgccacctcccgcgaggcggtgctcgacttcgccgcctcggcgctgggcaccagcgcgccgcgcgcggtcaccacgctcgtgcacgggagggagccccgcaggtacgtggtagcggccgacggcgtcgcccggatcggcggcgacgccgtggtggcgtgccaccctatgccatatccatacgaggtgtactactgccaccggccagccgacgcggtggcgctgagggtcgacctccacgccgtcgccggcgtgggcctgggcggcgccactgccgtcgacgtgtgccacgtcaacaccaccacctgggacagtgcctacttcgagctcctcaaggcaagccgtggcgacgccatctgccactacatgccgcagggctatgttctgtggctagccaattgagacgatattagtatttcctacaaacacctgatcgtagctactcaaccttccatgattgatgcttgatgcatctctcgctactacttcatccgtttcacaatgtaaatcattctagtatttcccacattcatattgatgtagaatgacatacattgtgaaacagagggagtatcttaataaacgcaaaatctatttcgagaggcatctcgatttagacttaacgagcgacgtggacaattacgtgagaagtattagtagcattacagacatgcatgtaagcagtttttctattaggttgtgcatattttttcttcttataaaattttcacttaaattacttatccgatctataatccgattacaccattgtgttcgttgcaattaaatctttataacaagatcttacatgataatattatgataaaaaaaacatttatgttataaattacttttataatatatgtaagttacttttatcttatatacaaattacttttagatttgattaaattacttctcataatttcataatgctttgagttgattacttttattattattgtttttactcagtttcataatttgtgttgattaaatttaatttctaaatagacttatatttttattcctacgacgaatttacttctaatatcataacaacttactttcattttatactaagttacttttatgatttttgtaaattactttcaggctttattaaatttactttcataaatgtatttacatgaaaatcttctctacacttttgaatttactccacatagtttcttattggaactcactcataatgtaattacttctatatagagttacttctattacatagctaagttacttttacaatttaaataaattacttttaaattaataaaatattttaatatattcaatctggatctcgttttatcacatattttaagtggagtacaatgatacaaatagatcttaaaaataatatatgatttaaaagatacaagtgattaaagaggtaaaaaaacatgcactatagtactttttaagctaaaataagatttaaatctaggatggagtgatcgctgctttaggcaaaccagagaccggtcgttgtgtagtcatgaaataaaactgatgctgtgctctctgctcgtcctcgactcctttttccttttttctttttttttatcgaagaacagtgaaggaagctatactaattactgttgcaatcccatgcctgttgctaacttctgaggaaggatgaagatgtcagagtccaaaaagaatcggtagactgaaattccaagttttcaggaaatttgaacccaaaaaagttgaaaatcgaatacatttttactaattgtcaacaaattagtaaaactgttacactgttcattcatcacctgtgttcgaccgtccgatctgcctatccaccaagctgttcatgtgcagatggactactcgagtagtgtggagatgacgaggacggcgccagagcctctcgctgcagctgatttggggatttccatttcctttattactgtgggggatttacagattttcattggctctgctcgctgctaatttgggcagtacaaattttgtgcagccttccaccgatttcgagcatccagtatgcatgccaaaaagggtttcccaaaccgtcagggccagggttaccgcgccgtgaaaaaccgtgtaaaatttatcaaaatttaaattattttttaaatttatttgaatttaaaaagattactgcagtttttctattaccgtaccccgcggtaaggccggtaaccgcgcggttaccgaaagaagataaacatgctattttatctctaacacgcccccgcagactgaacgtcgttcgaacaaacgtttaggctggaccgaaactctgtgaagactggagttggaagacccttggtgaagatgtcagcataatgtgtgagcacattaagagcgcgaacggaaccaatggcgaccttctcacgaacaaagtgtagatcaatctcaacatgtttcgtgcgctggcgttgcaccgggttagtcaagagataaactatgctgacattgtcacagtagaccagagtagccttgactggaggagcatgaagctcatggagaagctggcgcaaccaacatgtctcggcaacagcgttggcaacaactctatactcagcctctgcactcgaacaggaaaccatagtctggtgcttggaggaccaagaaacaagattatctcccaaaaacacagcatatcccgaggtgaacttgcgagtgtcaggacaactggcccagtcggtgtcagagtagacaaccaaatcatgtgaggctgagtgacgaatgtggagaccaagatccagggtgcctcgaacatagcgaagaatccgcttgagagctatgagatgagactctcgaggatcatgcatgtggaggcaaatctgctgaacagcatactgaataccaggccgagttgctacacggtttgcagtcgaacatacctacacgctccaatatctccaagccatactgccgttgagtgagaaacaagccgaaggaatggcgagagactgaaacaccgagaaagtgatggagctcaccaaggtccttcatactgaactcagactgaagagaagagattgtccagtgaagcagcgatgtcgacgaagcagtgagaacaatgtcatcaacatataataagaggtaggccacatcacctccacgtcgacaaataaatagagaagtatatgccttggcttcaacaaacccaacggagcggagaaaagtggcgaaccgactgtaccaggcgcaaggagcttgcttaagcccatacaaagacttgttcaggcgacaaacagagttgggctgagcaggatcaacaaacccagatggctgcatgcataacactgtctctgcgagggtgccatggagaaaagcattcttcacatcgagctgatggataggccagttacgagagactgccaagctaagcactgtgcagactgtagctggcttgatgatggggctaaaggtctcgtcgaagacgatgccggggcactgagagaagcagcagaggacccaccgcgccttgtagcggtccaaactcccatcggcgaggaacttgtgacgaaagatccacttgccggtggcgatgtttgtgcccggtggaagaggcacaaggtcccaagtgcaatttgacatcggtgccgagtactcctcttgcatggcatcacgccagttggtgtcggcgagcgcagcatggtaggtgcgaggtatcagggagagagtggcggcatggaggttcaggcgtgaagtggcaacccggacgccagccttgccccttgtcaccatggcgtggttgttgtcgatgggagagatgccgaagcctgtaaccggtggccatgtaactagggcgcgggcgcttctggcgcacgtcggtaccgcgagtggcgacggctagagaagcggggcacgcagcaagcgcgtactggacgcgccgtcatgagctggggaaggtgcgccgtcatgagccagggaggaagcgccgtcgtggacatgaggagcgccgtcatgggccaagatggcatcatcgtgggcagaccgagccggagaagctggccctaaagtagagaccccatgggccgtcggagatgaggccgcaggtgccggcccaggagagaggcgcccagcccagcccggcaagcagggaggggtcggccgatcgatgcatgcgccggtgggcccaagagaagtggaggcagccttccccgagcgattggagccaattggagcctgtataggagaagtaaaatcctccaggaaagcaagatcagtagcacaagcagtgtcaccagtcatttcggcaaagggatatgtatcctcatcaaacaccacatgccgagagataataaccatgttggtgatcggatcgaaacaccggtatctcttacgttcgctagggtatccaagaacacacacttggtggaatgtggcgagagtttgtggggtgcggtggcggataggttggggtaacgacaaccaaagacgcaaagatgtgtgtatgaggggtggacaccgtgaagggcgaagtagggagtgtgttgggctaaagttttggttgggtgagactcaacccataatgagccggggaggtgagcctgaaatagaagcgagcgtacaatgttattaagagaacgatgagtacgctcagctttacccttttggggcgaggtgtgtgggcaggaaatgcgcatggcgacgccgttggtgaggaagaaagatcgagcggcggagttatcaaactcgtgaccattgtcgcattggatgttgcgaatgggtgtagcaaactgtgtcctgacataggcaaaaaaaatgcgaaagagtggtgaatgtgtcggatttcaaacgaagaggaaatgtccaaacataatgagagcaatcatcaagaatgacaaggtagtatttaaaaccagacacactgagaactggagaggtccacaaatcacaatgaattaactcaaaattggccttagccctagacaaagaagtagcaaaagataggcgtatgtggcgaccgagctgacacgcatggcatacggtggaggagccgcatttgggaggagagatgaccaaggagtgagcaaaacgggtgagggcgtcgtgaccaatgtgtccaagccggcgatgccagagtgtggtggtagtggcagcgaaggaactggcaatggaggtgaagaagttcgccagaaaggagtacaagtcaccgaagctattgcacctggcgatcacggtcctggtaagtagatccttcatagtgaaaccaaacttgtcaaactcaatggagagattgttgtcagtgacaaaccgacaaacagagattaggtttttgataatgttaggtgaaacaagactgttattgagaacaaacattctattagcgtgaagaaatgaagcattgccagactgctagtagcaatgatgggcaaaagagaactgttgccgacgataatgtgggacagagtggcgtaggtaggttgggtgagaggataggataccggtgtccgatgtcatgtgtgaggtggcaccggtgtccatgtaccagccgttggaggcaggcgtcgtgagggtgtcggtttgaaacagacttgccaaagtctgttggtcccaagcaagtgttgggctggaggctccgtaccaggacgttggttgggccgatggctgcagttgttgttgctgctgagtgaggccggctggaaggtaagggccggcctgggagaccggctgcgggagggcagcttgcccaccggacattgccacgcccgcaaaaggagaagtgggccgagggcccaaaatccctggagcacgcagcatcgggccgcccagccacatttgaatcgtgccgacccaggggtgctgaggagtgggccaggcctgtccagcgcgaggctgaggggcagcctgccctacgctttggccacatgtgccctgagcggcgccgccattgccgccggcggtgccgcccccgttcccgttgcgtcgacagcgatttttgttgttgccgccgccaccttgtgtgttgccgccgccttgatttaggttcccgaaccccgtggcgtgcaattcatgagggcggtggaggagttggtggagcggttggaggggcccttgttgatctcggtgagaattagcttactcgatccgggcttcgacgaacatcgggaagggacactgcagaggaataatagtttggagaatttcatatttagggtttaaaccaccgatcattgcaaggacaagttgctggtcggtgacggggtcgccgagctcaccgcgagtgtcagccatagccttgagacgtcaacagtagtcgttcacgccgaggtcaccttggacgaacgtgtgaaattcagccgtgaggttgatggcgcgctgttcctagtggccgaggaacatctgctcgagggagagacagacgaggcgtgcgttaccatcaggctgaatgatggtctccaggaggtcggtggcgatggtcccatagagccacgagagcacgacacaatccgtccgagcccaggacgcatgatgaggaaaagcgtcgtcagagaggacgtggtcggtgagggcatatttggtaatttgcggcgccaaggtcgaggacgacggggacaagcaccttgacattgagaacagacaccgcctgggcatgaagggcatcgacagtgtcagaggttggcagagcgcccccggacatggagccggcgggctgttcgtgctagggtgtggctgatcggcgaccaaccgcgcgggcctgcacccgtgcggtcagtcctgcctgccttagtccattagtacaacaactactgctacaatactactactactactaatactactaccactagtacattattactactacttgtaatactagcactattataattgtttatatatatatatatatatatatatatatatatatatatatacacgtatacaaagtttatatatgatgtatacaaaatttatatacacgtatacaaactttgtatacgtgtatttttggtttttatatacatgtatgtataaaaataaaaaaatacacacatatatataaactttgtatacgcgtatacaaacgttgtatatgcatatacaaaagttttgggtttttatttacatgtatgtataaaaataaaaaatacacatatataaactttgtatacgcgtatacaaagtttgtatatacccgtatacaaactttgtatagaagtatacaaagtttgtatagacgtatacaaagtttgtatagacgtatacaaagtctgtatacgtataaaacgaaaataactgaaaaagatacgaaaagaaaaaaacagaaaaaaccaaaaaaaggaaagaaaaaaacagaaaaaagaaaaaaagaaaccgtccaccagaaaaaaaaaatttccacgcgccgtcctccaccctcctccccgcgcgcgacacgcgtccagtcgcgcgggggagggggcgcgcgactgaacgctaattagcgttctcgttcgtgctgtggtggttgaaggctgagtgcagcgaacaggctagcgtggtcggccggtgaagaagagccgaggccgatgggcggttgcgtggtcgcgctggctggaggaagtccgagggtggcgcgaagagccgcggcgtcaacggtgaccgttgtcgggaaggtagaacttgacgctgtggccaccgtgtcgttgataggcgtgatgacgagagcagaaatcaccgcttggacggccttggcagtcgcggccgaagtcgcgtcgatgagagccgtggcggcggcacggtcgtcaggtgaggccgagtcgtcgggccgaaggacctgccggatggcagaggtggcggcgtcggtgatggaggcgaccgccgcggtaagagccgtgtcgtcgacggactacatgggcgccggcaggagagagagccgtcggcgatgaggttttagggtttagcggaagcgattggatcgggagtatctgataccatgaaagcagggatagctcaacgcgatatcgattaatcacggaacatgtgtacatatatagctacatccataccagaatctctcaaccgatgtataacagaatcgggaagattggataggagatcggcaaaagcagaaagaagataaacatgctattttatctttaacatatttgatttacaagacttgtcaggggcctaggaatgccttcagttttcgactttttacaagataatagtgggtaaaatgagaatatgcttgcaattagtacttgcctcataatgtaattagtaaaacaaaatggcaaaatttgctacaagacacacaaaaaatatgtaattagctcaccccaccgccccgctcgcgccgacctcgccgacctcaccctcaccgcgcgcgttcccggcgaaggagaaaacgaagaaagagaagtggcaatccgggtatttaggaaaatatctcatctcttttgacccagaaataataaaataatacgaccagtgtcctaaaaccaattacacaatttttgtagtgtccatcagccatatcacgttttcgcggtgtctcccagctaatcccagctaattacatgttttttacgtgtcctgtagcaaattttgccaaa

SEQ ID NO: 8033 - DNA, 14464 bp, Oryza sativa
  unsure (1)..(14464): unsure at all n locations
aaataatgggatggtacatgcatcgagtttgttatccgagtaaatgcgagaagactaattagcgcgtacgcgcgagatgagttactggcgcgcacggacatgtgtcgttagtgtaacgcacgagcggtgctatggaaaaaaccgatacaaaaaaaagcgattagcatttggactagcttggttagttctggatttgttttcttttcccggataattaggcataatcaatgttgttttttttgtaacttttcaaatataatttaagtctttcgattacccaaagttagaaacttcatattccaaattgaaaactttcaacactaatttgaaactttcaactcatatttgcaaactttcaagttaagatttgaaaacttttaactaaaatttaaaaactttcaacttaaatttcaattatttaaaaaaaatcaacttaaaatttaaaactttcaactcggatttttaaactttcaagtcaaaattttaaaactttcaactcaaatttgaaaattttcaacttaaatttaaaaactttcaacttaaaccatgaattctttattcatatttgaaattttggtgtatccatataatatgatgatcaattaggaacggagggagtacatgcctatacatcatataaaccttatagtttttgcctacaagttttgcccatggtactgttttactatactactgttcagccaacagaaagtcagcgtgtctacttcgtatgatctgccacgcgtcaacgatccgtcccctcttgtgtgatctgccacgcgtcaactatccgtcccctcttgtctgatctgccacgcgttaacgatccgtctcctcttctgcttctaccctcccatgaaggcgcgattagtttctcctttggtttccctgtcgatcccctaccgcgctacctattcttgttcgccgccgcctgctagggttcctgcttcgacgcggccaacgccactgacgtgcaccgccattcttgaccgccgcggctggccgggtgagcttcttctacgcccccggtgaccatctagcgtcgttcctccggcatctgttcagcacctccactaccctcgaccttgcggggctggatccggagtcgcctgccttctttctaggctttcatggccagccgtcgctgtctccgtgcagggccagtgatcaccatcgttgcttcccatcgtgctaggtgcggatgccggtgtcttcttgcgggtcacagtgttaactgtagccgttgttttatctcctccctgcattcctcgcaggcttggttttgcaagatttatggtgcatcgaccgcccataagcacgtggtaaccaaaacgtgaaaattcacgtgggtgttcctgctgattggattcctcaaattaattgttcagttctccttgcaatcctttttctcacttctctttttcatatcaactttgcatgactagcggcagcctgtactttatttttctatttttctatggtgttggtaaatcaagtctaaagatatgaggtaaatcaagtctaaagatatgaggttacatatgttttacctacaatatgcttatgaactttcaatgttagaatgacatattttgttgatacctgcagttatttttttaagcacaaacactaagatcacatatgtatgttctgtttgttgattaccttttcctcagatacacatgctccagttggaatgtgcatagccattatgtcttgctttacatgttaattaattaactgatttagtgaatgtttactacagtgattggtccgtatcacaaagtacaatggacaagtgtgactgaaggtaattcactagccttttatgtatatttatagttataaaaatgtctgcagtgtgcatcagacaagcaaagagtatatatgggcggcgatggcacattcctatggaagggatttatgagtccaatgtcaaaatcctctctatcagtccatataatagcaattgcctaccatttatatgtatgtcaccccatcagagttatattcacgtgttcttatattctaaatccatatgttgttgagatgtgttcttcaatcgatatctatgcagagtgtcctatcataacattaacaatgttagaccatattttggcccttttcatagaaacctaccaaaatagcacttagactgacttggcaacaaagaagttacttggtcagatatatttttatgtttgagcttacttccatagtttccatctatgcagcgctcaaatttattcacccgtgttgccattcgcttaataaaccctattgttttgtcctataaactttccccacgttagatgtctacctcggctgccacgccgttgcctgatttcgcaccgtcgtagttgctcctagggttcaggttgagtttgtgccatcctttatgcctttatttttcacagtgatttaatttgtgtttattttctatcacttaatctctgctaaatgtgatctgcaagtattgattggctggtgagtttgcagtgcaagactcgtggctttgttttggttgacgaaggtagtttgatctaactataacttttagttttactttattttacttctatccatacagtctcgtagcctcatgctttcaactttctgatgctatagtacaggtgctacattcagctgtgctcttatgaattgataaataggtttattccactgaagaaacacttctggtagatatgttgtgccaaaacagcacttagattggattgacaggaaaaaatgcttgctcagatgtccttctattttgtgcttacttttatggttcacatatatgcggtcttaaaatttattcagctatgttgccagtgctttctacctatagaattgaacttctttggtttacctccaaggtaagtactatctacatataaaagtaaaaataatagttatagattcagtatgcagacatttttgttctccacaacattcttatgcatagaaagcaagtccatctgtttgcatgggtctagcaaatggtgtgggattgctatttcagtttctttttgattaatcggggcaacaacatcaaattaaaaaaacatgtgcatcttcctcctttcagtagcggagccaggatttcaaagttgggtattcccgtctaagcgctgaggcgctggccctgcccctcgtggccaccggccacccaaccggcctgaccgcccgagattggcggagtggcgggcgtcggccaccgctcgccacggcaatggcctccccctccgcgatagcacggtccagctcccgctgccggttgccgcctcgccgcgccgccgcctagggtttggaaatggggagcggcgcgaggggagccgagccagggagggatgggtcacggagagagagcaagagggggccgtctagaagggtggtggataagtgggtcaactgatgtctgatgggtcatgacggaatgggtcgggttggtggaggcgtcgcaagaggccggttgggctgtgtttggattgaagaattgaggatttaggtgcactaatatgtgtacatgtgtatatactagaagtatacttgttttgtgataaaaaaagttgggtattcctgggaatacccaggaataatggtagctccgcccctgcctcctttatgcagctgaagtgatgcttcttatacccaggttatgttcagaacacagccatatgtgcagtttagtcgacttgctttccacctctctatatggaaacatgcatatctatgtgttaggattaattccactgcttgtgcaatccagttcaaacactgaaggtttattctacttatcttttgcaccttaatttcactcatgagcaaactgtcttggtctctgcagctgcatgggaggtgaaacgcaggaattcggcaagaatgacatgctgcaatttcgtggtctcttcaagcacgtgtactaattatccttacattctgttgctaaactactgatatcttcatactagaaatatgaaattattttgtttgtcacatcaaggcttcgtagcagccaactgcatgtactatttcttttgaactaaaatagagtgatagaagcccaatgaggtactactgaactgctagcagcatctatcttattctccttatagctcaaaatgtattgcatagttatcagtcaaatgaaacatgactccactatctaacttattgttctatttctaccagattatgtagttctgcaacattcagcgactgtaatggcatatattttttttatggcatctcaaatttatgtcccgggtttttctgcgcacaatatttttccctttttggtaatttacataactactccctccttccctaaatgtttgacaccgttgacttttttaaacatgtttgaccgttcgttttattcaaaaacttttgtaatatgtgtaaacctatatgtatacataaaagtatatttaacaataaatcaaatgatagaaaaagaattaacaattacttaaatttttttaataagacgaacggtcaaacatttttaaaaaagtcaacggcgtcaaacattttgggatggaggtagtataatctttaggtgtaaattagaacatatcatagatactaatataatttaggtgtgaattactgatattataacatatatactaatctataggtataaagagaaaaactaaaatagatactaatctttacatatgaattaacacttgaactgctttcagaggacccagcaaagtggcatgacatggcttgcatgtaacatagctgtaccttgcaatattcttaggtattttctttggctctgtgttgactggaagtgaaactgtaatgtttgacataatcaagcactgctttgaggaactacaggagagattaatactttctttgctccaatacccaccattatgagtttatttttgttcttttcttaaactgcagcggttcagaaaggaaattttaatggttagggcaccaacaattgaagctgtaattccctgttccaagttaattcatgattctggagaccttaagtatcatggaatgtaagagttttatctttgattcttttccatgttacctctgtgcttgatattaggcactttgatgcccattaaaaaaaatatatcctttcatatatatcttgcctttttgtcatgtaaaatgagttcccttcatatcatctctgggacttgtgaagtcagttatacatataaaataaattaatcaagtttagcatgtttgcccatctatgtgatgtttgcacatttgattggataagtggttgcaaataaaattgaatataacatctatgtccatatatggctatgttcgcacccgcggcaacgcgcggggtaccgtctagttacaatgaaatctacatataaaaaataagatttagtttatttctagtctagtttttttatgatgtattggattttttacatttctttagagataatattttataacacttagataatttattgttttataaatagattagtttatcgtgcccctatttataaaatcctacatccgccactgactcatatatgttaaacttgatttacactatataatatatcacaaatagatatttttgaagtgcaaaatcactttctaatatgcacttgtttgtactacctaccctactgtgatgaatataggagtatagggctacgttgtaagcactgcccatgcactggaccagcggtgtgtcggtgtggacagcgtggggtcagcgctttctgatatgcaccttgtttgtactacctaccctactgtgattaatataggagtatagggctacgctgtaagcattgcccatgcactggaccggcggtgtgtgggtatggacagcatggggtcagcgcggacggaggcggtggtgacgatgtcttcccggatgtggaggtggcgacagctgagtggaggcgggcaacggatcggggatctacagtaccggcggcgggataacacgacggcagcgacgtgacagtcggcggtggaagagggcaaggggtgggaggggcgattgacagagggaggattgtgcagcggagaggaggagaccagtggtgaatcggggtgagggagtcgattgtgaggagggcgacgggatttgggggccgcgggttgttactgatgtaatagctaattaaagcaggactttgattcctccgaatgttattgtttccgaatgttattgttgcattgatttaattctttccatagcatcgtacgggcaatttgctagcatataataaaatttgactcgttaagtgctattctacaaacacttttaattcgctaaatgacactttaataaattaaatcgaccatcgattttcaaccatttagacagtaatatctattttgtaaaaaaaaaaccggaaaccccatcccgaactttccttgcattacttcatctgttttattatcttcatgacaaattaaaattatttttatgggcaaaaaacccataaatagacctctatctactatgtctagcggctctccctatgtcattttaagaatgttttctaactcactacgtggtgatactgaattagataaaatactagaaaatctaagaaaaacaaagtattcgactatcagtttcttattttaggtcgttagttatttcctttaataaaagaaaacaacccaaacatctctccctccctccgcccgtgtatgatgttaaagtccatttaacatcttatatatgcttctaagccactacataacattattaaattagagaagaatctggtaagttcttaataaaaacatccacaaaattgtgacttaaatcgatggacacattattttaggttggtatatctatttttttccaaaaaaaaaatcccaaacctcccctccctctacccccatgcagtgctaaaagtccattaaacatcgtatgctaaaagtccattaaacatcgtataaacgcttctaatccgctacatgatgttcttaattatggacaaaaacaaaacatccaacaatcagttttgactcaaattgatggacacattattttaaatcaattgagacattattttaggtcgttagatctatttttttttaaaaaaaaaatcctaaacctccttccctcacttcctcctccgtgcagcatgcggttttaaaagttcattatacattctataaacgctatgttacgttgttctcttaaatcagacgaaatcctaaaaatgatgataggaaaacaaaacatattatcattggttttaacttaaacatccaacccattattttaggtcattagattaatcattcagaaaaacatcccaaacctccctccctccctgattgcccgtgtgcagcgtgcacagttccttttctctttcttttttttatctccctgacaattaaaattaaaattaaggtagatccaaacaacaggctaatctagcacacagtgtttcttttttgttttctaagagaagtctagcagtactatttgatggcatcagagatctgtgattcttcaatcaaactctcagagcaagtacattcttatgtttcaaggctgagagaccccaagttggtagctttagcttttaggccctgttctttcatgattctggattctaggtttttgtttgcatgcttccaagctcttagatggtttgtttcgtgcaaaatttttataatataatttttattgtaatacttttctaaagcatcttttcaactttgttgtagttaatttattcgtttatcccttaaatagatatcataaaaaaaatagattatccatcaatccaacgtgtttagctatctcaatcatggccttagcgctagctaacagtgcggctacaagaattcatatatagtcgagcaaatttgcaacctaggaagagtttgtaccagtacatgcatttctgatttctgtatatactataaaaatacccgtgcgttgcaacgaaaaactaaaattataacaaatataaaaatattagatgattaaggtttagttttacatattgaaataaaaaaagttcaactgaagggacctaaagtgaacttattccgtgcggagtgtacatgcggtccatgaggtggcccaatagtgcgggcggcctgggaacaattcggggacaacttgagcgacataaagtaaacttatttgtgcggagcgtacatgtggcccaatagtgtgggcggcctgggaacggcgcccggcccgacgcgggagaagccgtagccatccgatctgatggacggtcctgattgatcccgatctatacaaatactcagcagcccaaaccctaaccctaaaaccatttcctcttccccatctctctctcactcaaaacaacgtcggcggcagagcctcttcccaacctttctcccaccagcgccggcgttcccccttccccttccttcaccggtgaccggcgccaccgttccatcttcccctctttctcctgtctcaccggcacggcgcggcgactgggaggggacccaccagcagcgccgtttcccttggccactccccccttccttcaccggcggcgctcttctttcggcacgaatccggcggcggcggcggctccctcaaccccttgtcacctccctcccgcggtatatccgncgncggtgncggtgncggtgncggcgtcgncggnagaaggtggatccgccagtgcggcgggtggctccctccgccccctctcgcctccctcntgcggcagatctagcggcggtggcggcctcgcggcggccatgggtggatccagtggtggtggcggctgcggaggacagatccggcgacagcggcggcggctccctctgccccctctcgcttccctccctcggctgaaacgacggtggtggcgggcgtcggcagcgcagctcggcaagccactgccggcggccactccgcgccccttcaccggttttggccatgggaggcggtggcagcagaggcggctatggaaaaatctgctcgatttctgttcgatttgttttttttatctccgtttgctgttcttctattcttatatttgggatctaacataaactggattaaaactttgtgtgttatttgatgcgcactctggatgatttgttgtttgttggacttatgatgttgcggacgaaatttttttaattaggttaggtatatatttgggagggagctatcggggtgggaatcggacataaaatttgggtgctacggatgcgatcgatctgagaaaaaatattgggagcgatctggaggcggagtaaaaaaaaccgtgcgccattgggaagttgaaaaaaagaccatgcgaaaaaaaaccctagcgctatttccatttgggggtgacttatgaaatttttcggcaaaaacaccttgaatttttatctatactaatataaaaagaaggagttcaccactccaatccaggagttcaccactccgatcctataggccaaatcaactatactccatccccagcgtcccacggccctcccacggtcccaccttcccaccatcgccttgcccacactggggataccatgactcggatacagaaacaaaatctgtcccacctcccaccatcgccttgcccacactgtggataccatgactcgaatacataaacaaaatcgcatgatttcctcccaacctccacgagaaaaagtacaatatgccactccattcggtgggtttagataaaatgctatccaatacattgtaaaggataaaataccactcaataggttacttttaggatattttgccactttgagagaatttaagaccaaaatacccctggccgtggatagagaggaagagggaggagcggaaggttgacccggacgacgctaatgctccccggcggcgggtggcgagcgcaccggggtgggctgcgacaggtggacaaggggaggaagacngcggccgaaagggaggaagaccacgactgtgatgggggaggaagacggcggcggcgatcggggagaagggcaacgccgacgggagggaggaggaggcgacgacgatgacgtggagggctctgcagcgctgcccgcgcatgcgctcaccccctccggtgccacccctgtgcgcttatcggcgtcttctttctctcctcgtcgctgctagcgggagcacggacggtgctcgttcttccctcgtcgctgcccgccgccgacgaccacggccgctgccgttcgactcctctctccggctctctctcccttcctctctctctctccaaagtaggggcatatttgtcttaaacctcctcaaagtggtaaaatatcctaaagataacctattgagtggcattttatcctttgcaatatattgggtggcattttgtcgaaacccaccatatggagtggcatgctgtcctttttctccaacctccaccacacaattttctccgccttcatcgccggagtcttttacccctgtgccattaagaaagttagaggttacgtgtgtgccacaaaaaagttttgagtcacctgtatactatgacacaaactttcgtttacctatgcgccactttggatggaatcagcactaacggagactaatggaggtttaaaggtttattttgcccttgctctatttcagccactttgaatgaaacattgaacatttgaaagagaaatcggctcacacaccgcataaaggctgaaatgtaggttgaaggaaaatgaaataaagtaaacattctaaaaaattgaaaataaagttaaaacaagaaataaatatggaaaaattagtaaataattttaaaattatggaaataaatagaaaactgggaataaataagaaaaaaattcgtaaataaattttaaaaaatcataaataaatatgaacatatgaaaaaataaggaaaattcgtaaaaagataaggaaaaaaaatgcgtgcataagtaagaaaatgcaaaaaaaaaaagaaaaagcagaaataatacttggttataggatcaacattcaagcaacagctagcattacagaatcacacccaaactgaacaaactctgaactctgcaacaatatgtagcagcaagaaagcaataaatgcaacaagctgttcgtcctcacagctgcttcagtccgtcggcgaagcatgagctgaaccgcgccatgtcggactccggcagcgccacgccgatctagatgccgaccctgccgtcgcgcgcctccgccatggacaccgtgccgggcgtcttgtcgatggacaggagctccaccttcatcggccggcccagcccgaagtcggtgtcgtacacggcgtaccgcgcgagccggcgatggacatcggccggtgcggcatcagcgacacgatcttctggaaccacccatcggcaccgtccagaacgccgttgtcgagccccctgatggcggcgccgatgcccgccgccgccgtcaccacgccgccggcgccgagcaggccggccatgtcaagcaagggcggaggcagttgccgaggtactcctgcggcaccgagccggcctgggggagccgggttaggcgcgccgccggatctggcgaggtgacgcgagactaggcgaggcagcggcggcggcgtgccggcgccggcgacgaccggcggcggctataaaggcggcggctaggctagggtgaaattgctcgggagaggagcagagatgaaaatgcttcaggggcaatttagtcattttcatacgtgggtcccacatgtcagagcttattatctaacaaaagatggatggaatggcagataggtaaacgaaagtttgtgtcatggtatataggtgactcaaaatttttttttggcatataggtaaccttcaactttcttaatggcatggaggtaaaatactctcgtcgccgcctcttccccttccgcgcggtgcctccatccaccgctgccgcatcggctcctgcctcctgtcgccgcttccgctgctcctgtcgtcaccgatgccgctcccgtcttcgccgacgacgccggtgactccctccaccgccccgcctccgtgccgctcgccaccacaattggacctgctggtccagggttccgttggcgccacagccccgtcgccgaccggtggtccagccttccgccagcgccactgctccgtcgttctccggtggtccagctttccgtcgcgcctccggtcttgccgccgttacgaggggcatagtctgccgtaggtacttccagccgtgcgtcaaaatttcttctgctggtgagatcgagtgagaccccattgactcaaattgactcttctgaatccccattagtcttctgtgtggattcttattcagctgaagggtatgcacatatattaaatctctcctcttaatggtgtgattcggttcttatcaatccatatgtgcatcattgcaggctatatcctatcaaggtgactggtgttgctccattcagactaacattgtagacttgtagttgccatgctgcgtctcttccagattactttatagagaaattatattgtacaggtttgagaattgttcaagtgatactgcattccaccatttgatttctttagctagggatactataaaattgtcgtaatacaagcttatacggatatgctggggatgggtgaacaggatggaaggcattttttataggcccttgtcagatgatggcttttggctttaagatgctctatgagaagggtcaaggagattttgttctgttatttatcattgattggcatttggttgatatatatgaattaatatactccataggcacaacaaaaaggtaatattcatatatgcaggattatttctttgctttaagtttttactaatttttactatggttattggtcactggtcagataaggtacatacatatatttgcgtagtataaacatattaaagaaactcagcttagtgtatgcaagggggcatggaacaactctgattctgaataggaataacttcttcctttttctgggctaggaatttgagtgtttactttttcattaacaagccttatgtgctcctagctagcagctgccggtgaattgataaaattttggtgattttgtcctaacgcttcaaattttgttttgggtagatccaaggacaaatatattctccaaacagatgaacttttattaaagaaaaataagatattttattttgaggcacaagtatgtgctatagccccaacctctacccaggggcacacgaccaaaacacattccatgatgctccagaagtctagcactgctacaacatgcataatttcatctttatattggcattgatccgggattatcctagccattgtcacatgctgctaagaggcggtccttttttccttctttgtgagaggaggcaaccttcatataagcctggtggcatctctgaccacatgcttggaggatggaattaggcaatgtgatgcacatgacttcaatgaagcgagttaatcggggttgtagatttggaggatggcatcagggaaggtgatgcacatgacttaagtggagcaagttaatcacgattgcaggtttgaaggacgccattacttacacataattccctgtcagaataatatttgacattcatatgcttgtacacatatgaaatcccaaaattatctacctgaatgttcttgtttgccacatgcataccacaacactattgactatttgtgaattatctgaaatttgcattttacttatgtatgctgatggttctctctgctcaatctcaattcaaagagttacatgtcattttccttataatctactgttaagttcctattgaatttatattcgctgaactctacccaaccatgtttgctgttgctccaaccaaaattaggaggctttatagtctttgtgtgccatacaactttatatgtgaatttgaatttagttttacatggtctgaacttgggcttgcattgctcaagaacttggttgacaacattctgaaattgtccttgcattatatggcatcctgtgtagtgtaattaatgtattgtttctattcttccctgtgaactattggttatgtactgagttaataattcctgacagcctttagaaatgtggaacactttccttttttttgttacaaatttcctaggagcaaaaaaatttccaatcacatctcatgttgtgtcctccaaaaaaacaaaaaaaaatgctgtaattttctgtcatgctgatgacaaattctttatatatacctcaaacatgctattcattttctatatttggagtctttgtccttgcaatatgtgtgaaccatagatgtctaacatttgccagattagtgattgaacatttcatatattattttctgagcatttggcatattagtttctgacttgtccttatgatgtaggagcatctgaatttagaatctgaacttcgacaagcatctaaatattgttcaatgttttaatttgctgtgagctaattaaagttatgaatttctcatagctcaagtacctta

SEQ ID NO: 8034 - DNA, 1775 bp, Oryza sativa
caataaaagttaaattaattctctgtcctaagtagttttccccggtttctcttcttgtggtcctgtccatgccagatggtgctcactcgcagcaacgggaatggccctaacaacaataacaataacaacaacaatggaagaatcccacacttgcccaagtcttggctcaacaggcacagcttatgaacatgatgatgcagcaactccagaaccagcagaaccagggaaataaccatgcacctccccagaacaagttagcaaaattttttcgtgtgaggccgcctattttctctagcaccattaatcctgttgaagctggtgattggctgcatgccatagagaagaagttggatttacttcaatgcaccgatcaggagaaggtctcatttgcatcacatcaactgcatggccctgcctctgaatggtgggatcacttccgccttaacaggactactgctgaacctatcacttggcttgaattcaccgctgctttccggaagacgcatataccatcgggagtggtgtctctcaaaaagagggaattcaggtcgctcactcaggggtctcgctctgttacggagtatctgcacgagtttaatcgtcttgctcgttatgctccggaagatgtgcgcactgatgaagagcgccaggagaagttcttggaaggacttaatgatgagctttcttatccactcatgattggggattatcctgatttccataagttagtggataaggctattcgtcaggaggacaagtacaatcgcatggagcagaagaaacgccggattgctcaattcaagacacaacaggggaataatcagaagccgcgtcttactttaggaccccagtccatgccacagggaggttcttcgtctgttgttcgtccgcagcgtcagttcttcaacaacaatgctggcaacaacatccgcaatcaagctccacgtcctgtttgcagcctcgacacagcaacaacctgccaagagggagcaaggcagcaagcccgtggtgtgtttcaactgtggagacccaggacattacgctgacaagtgtccgaagccccgacgtgtgaaggttgtccctacccagagcaactctaccgtaccagcatcaaaggcccgtgtcaatcatgttgctgctgcagaagctcaagatgctccagatgtgattttgggtacgtttcttgttaacttagttcctgcaacagtgcttttcgattctggtgctacacattcattcttatctatgagttttgcgggaaatcatgggatggaagtagaagatcttagacgtcctttgatggttagtgccccaagtaatcaagcactctctttgcaacgtagcccctctgtcagaatagaaattcagggagtaccatttctggccaatcttatcctgttagaatccaaagaccttgatgtcatcctagggatggactggttagccagatataaaggtgtgatagactgtgctaacagaaaagtaactcttaccagtaatgatggtcgagttgtaactgttcatgcattgtcttctgagtctttaaggtcaagactgaaccaaataacgttggaagagattcctatagtccgggagtatcctgatgtgttcccagacgatttacctggtatgccgcctaaaagggatatagagttcagaatagatttggtaccaggaacaactccaatccacaagagaccttatagaatggcaaccaatgagtttctacgaatatgcacatacttataaaaagacacatgggtaccgagctcgaa

SEQ ID NO: 8035 - DNA, 958 bp, Oryza sativa
attaggcacgttttcccttagtttatcgactgttagtttttgtctgttagtttgtgtgtttaggtttgttcgcttgtgggtcagtcgacggtcgatatcatgtgcctatgatatggctatcctaataagtattttgcttgctgttttaagtgttttaattctgatcagaacaattgcagtttaaattcctataaaataaagcttagttcctgagcatctgtttttcttcttttccaccccctccgtctgctcttccttcagatggtcaacaccaggaatggcagccgtgcagcaggtgagggcagcaacggcgaagaacgcaccgacggtgggcatcccaacagcgactccgtcaatggtccgccaccgctccccgagaatccgactctggcccaagtaatggctcatcagactcagatgatggcagccatgatgcagcagatgcagcagcagcaccagcagatgcaccagaggatgtagcagcaaaccaagtagcagcagcagcagtttggtccccctccccctctatccaagttgccggagtttctacgcgtcaggccacccaccttctccagcaccaacaacctcatggaggcaaatgactagctccatgccatagagaagaagctcaaccttctgcagtgcaatgatcaggagaaagtcgccttcgccacacatcagctccagggtcccgcgtcagcttggtgggacaaccacatggctacccgtccgccaggtatggaggtcacttgggcagaattctatcgcagctttaggaaggctcaggtgccagacggggttgtggcatagaagaagagggaattccgagcactccactagggcaacaggacagtgactgagtacctgcatgagttcaatcgcctagcgcggtatgcaccagagaatgttcgcactgacgcagagaagcaggagaagttcctagcaggcctggatgacg

SEQ ID NO: 8036 - DNA, 1736 bp, Oryza sativa
cttgtgggtacagtggtacacctctgattagagtaaaactatgcgaatagccgtgcccgcggttatgggcgggtctaacaatgtctttcgtgattagtctcacacctctcatcataataaaagatgttataactggtaataatttgattagcttctggtttggaatggtatattcctggtctggagatagaactgtgcagccgggatggttgttcagaatggttgggcctaggcaacagggtatgttgtgtagcgttggattaatactgtttaattaatacttaattgttttatcaatttctgaaatatttgttaaatgttgtttatgcaaatgaaaccctactatgccatcctttggtatccttgtgcacttgcatattgctgcgtgacttgttgagtatgtcatatactcaccttgcaatcattcatcagaggaagagttctacagaaatgctgatggtgtggaggattaggcgtagccctggtcaagttgcctgtggagtggagtcgtttgcgccgtttatcttattttccgctacttagatctttattgattgagaggaactatctacctctgtaatgacattttattcgcttattatttagagtaataattgaactctattatcaatttgttattgtgtgcctcggctgattcctggacgagggttcacacacatgtaagcgtttggaattttggatagaaattccgggcgtgacaagggaataagaaaagaaaaagaaagaattgaatttccagagattaaataatgcttgtgctcatttttagttggttaaaattatttctagagctctgaaaattccactaaaaatcttgttagcatatttcgacatgtagaactcaagaaaaattccacatgccaatcccaattattatttgcattaatttattagggtttctctcttacttttacaccgatatttcctctaggtaatttataaattcaatttaggcttgggaaagaacttcagggtttgacaaacctacctcccttaaacggaatctcgaccccgagattcggaagagctggcgaagaggtgcggatgggcggcctttaactcatcttccctttcccaggttgcttttttttctgagtgatggctccactgaaccctgtagaacctggtgaccttgtttctagtccttctttcactggtctcaaggatacgaactggcttttccacataagtcagatcttcttggatgtcaatgtgctccgaatcggcttgttcttcgggtaccctcaagcacttctttaatgggacacatggaacacgtcatgaatgccgatcatgttggatggaagttctagctgataggcaacttctcctcttcgttccaagattttgtacggtcccacgaagcgtggtgccaacttgcctttcgtctggaaacgatgcactccccggagcagagtaacacggaggtacacataatcccctgcttcaaaagtgagctcccttcggcggttgtccgcgtagcttttctgtcgagactgggcaattctcagtctctctctgacggttctgactttctcttctgcttccgttagcacttccgttccgaacatttgatgttcgcctgtttgatcccagaagagaggcgtgcggcacttccggccatacaacgcttcgaacggtgccatttgtagactggcctgatagctgttgttgtacgagaattcagcataaggcagacttttatcccatgcccc

SEQ ID NO: 8037 - DNA, 1328 bp, Oryza sativa
tttataccccttaattggtggacttgacccccctaaactttttttgcaaggaaactgcccatggcttcaccgcctccttcatctaatccttatgagcataccttgcaccctcaattacctcattctccttatactcccagggtacatgatcaccctctgatataacaagtccagagaagtcctcatttgcccaatcagtggccattacatcaccttcctcatcggatgatgcgtcgtcgtccgcttcctcattatccgaatcttccctctccatttcatcaacaattataccgactctctccccctcatccgccatgcccatggcctgctcctcccttggttgattttcctcattttgcatcgatggtccaacaacatcccttgcattgataggaccctctacatcttcggtttgcattgaaacatttatatctttctcttgtaccgacacaaatataacgaggggccatgaccgttcaaaagccatttccacataccgtctccaagcagcagtgctgtccatcggcattagttcccaaaaataaccttctgttgcacgactcactacaactgatactgacattgtgtagacttcttggtctattctaaatcctctcaacaaccaactataaattgactgaaatgttttctccgcaggcctatcgatgcccttagatgtcattacaaaatctgacagatcaacaccatctggaccaaatctaatatttccttcaccgtgaactatctgaaatgtgaccttatttgacattgtgcctgatgaaaacaataactgcgttaacctcgcatttctgtactacgccctaagttacattctctacaatattgttctccaaaattctaaaagtaggttacattctccagatcaaactaaactacatcttacaattaacactactgtctatgtctcaattcatacaattatattctatgctctggatctacacatatgtgctgtgtgctacagatatgctaaaatatatggaactaaaactaaaacgcaacatatatactcaaacataacatattagtacaaatgcaaaagatgtatgggagcaaacctgtgatgaagtgagcgaaccagcagggcttcgccgctccccttctgctgccctctcctctctctctctttcgttttttttggatttttagtgaatataatgaaatttcagagaggggagactgggctttatagggggaggcaaaaatcgccctcccccagggcggcaagggggcccgctgcaaaattccatgccccctcgccgcccatttgcaggcggccccccgcacagtacaaaattcgccctatc

SEQ ID NO: 8038 - DNA, 5242 bp, Oryza sativa
agcatgctgtcttaaaaaggacttggaaatattaccattaggtgatcagacaattataggagagagaggcattaacctaagtggcggacaaaagcaaaggatacaaattgcacgtgctttgtatcaagatgcagatatctttctgtttgatgatcccttcagtgctgttgatgctcatactgggttgcacttgttcaaggtatttttcaaaacaaatctttaaatcctatttctatatgtgtgtaaatcatcactgaatgcttaaactaataacttattgttggtacttaagacttctaatactacaaaatatatatttacatcatatgatttcaacgccattttctcccagtcaatttagggggtttttttttaaccttcttcagttgtcagtgctagtgccgttatcaaatccttagacgaatagaacatgtttgttttgtttgatttttcatttcccaacttccaaaataagtaatagcagtttatctctttgcatagtttattgtgtggacagaaacctaatgtcttaatcagatcttttgtatgtttcagctaaacagtttttaggtagcctgttcttgaacaatatttagggttcaagagtatatctactgtatgaaagttattcatcacgaccttgtatttttcaggagtgcttgcttggactcttagcttcaaaaactgtagtgtatgttacccaccatgtcgaatttttgccatcagccaatgctatcatggtgagcttccaacaactatcaaatctacttatttattctactcgcaacaatcgttttaccatgtcaattcatttccctgttctaggtcatgaaagatggacaaattatacaagttgggaattacgctaaaatacttaattctggagaagagttcacaaaattagtattttcccataaggatgccatttctactctagaaagtttagaacactcaagtggcaatcccaaaagtagtcttattcctggtgacagtggaagtacgcttttcagataagcaaaaggatgataatcaaggagcagaagaagggattgttcaaaatggtcagttggtacaagaagaagagagggagaaagggcgggttgggatttccgtctattggaaatatattacaatggtatatggtggagcacttgtgccgcttattttgctcgctcagataatttttcaagttcttcaaattggaagcaatttttggatggcttgtgctgctccaatatccaaagatgtgaatcctccagtcaatagcttgaaaatggtacttgtatatgttgcgttagcttttgtgagctcgttattcattttcataagatcccatcttcttgtcatggctggatgtaagactgcaatgatgctatttgataagatgcatcgatgcatattccaggcttcaatgtctttctttgactccactcctagcggtcgaatcttgaacagagtaagtaatttaccttcaccatctttattttaatgagaaaattgaagttatctccttggaataccattagaatttttattcatattcaattaatcatgaaagttgaaacaaaattgtaggcttctagtgatcaaagcacagtggataccagcatttttgacctgatgggatatgttctatttcctgttatcgaacttcttggaacaattattttaatgtcacgggcagcatggccagtcttcgtaatttttgtcccaattattgcagcatctctgtggtatcaggtattctttttattatatattttatgttggatgccattttttggttccagtttataatttttaagtatgtggaaggaaaaatacattaattcatgacattattgacaatttttcacagattcaattgaaaattgaaaatcagtgtttttttcttttcacagatttaatttgaaatttaaaggcatggcaaagcaattaaatataatacataataaaaacatgaggtacatatatgatgtgattcttttcttggcaaaaatgttcccaataaaatttctaggttgatgctactgtatataggagaacttgtgcatttccgatgttcttctgaacaatcaaacttttagtcttaaaatatgctattaaccaataataattgtaatcatatttcaaaattataactatgtcctatggcattattggtttcaatacgactcatgttttgtttttatttttaatcaccataattccttcccttcagcaatattacatagatggtgctagggagttgcagaggttgactggagtttgcagagctccgctgatgcaacattttgctgaatcagtagctggatcaaatattattagatgctttggcaaggaaagacagtttatcaattatgtcagtcatttcatggataatttatctagaccaagtttatataattctgcttcaatggaatggttgtgctttcgcttggacattctttcatcctttatcttcgcatttgccttggtacttctggtcaccttgccagctgctctaattgacccaagtaagtacagtgggctttaatttgattggtccgatcaaattagttctttatgtgtattaccatccttgctaactattatttttatttttattgtattctcacagagacagctggtcttgcagtcacttatggattaagtctgaacatgttgcaagggtgggctattgcagtgctctgtagtttggaaaatagaatgatatccgttgaaagaatttttcaatacatgtttattccttctgaacaactccttacaatatcaaaaagtagaccaaactgccagtggccgacaaatggtgaaattgagcttcgcaacctccatgtttgtctcttgaactctatgttgttatataagttcacttctaacaatgtcggagctatgtcaattattgattagaactctcaacatttctattcataatattttctgagaaaaacagtgtgttattaaattaattttatatcgaagttattccacaaaaattggcatgcagattttttttctagtactgtagagttgcaatcctctttcataatatactattttgtacgacttccagcataccactgtggaaataccctcacaacactatatcttctttcttaacatggaaaacatacaacacctaatgcagaaatttctggtgaagtgttattttttcctctaagtgctttgtatgtgatgcaggtaaggtatgcaacacaattgccttttgttttgaaaggccttacttgcactttacccggagggttgaagaccggcatcgttggaagaactggcagtggcaagtcaaccttgattcaagcgctattccgtattgtcgagccatctattgggcaagtgttgatagacggccttgatatctgcaccattggactacacgacctacggacaagattgagtatcattccacaagatcctgtgatgtttgaggggaccctacgaaataacattgaccctttggaggagtacagcgatgaacaaatttgggaggtcttttaattttaatttactgacattttaattcttcaatgtgcacctgtcaaactaatgcataacttatatttgttgtgttatccaggcattgaactcttgtcatcttggcgatgaagttagaaagaatgagctcaagcttgactctgcaggttttatatctatatcagaaagctataatgcattgctccacagtgtcaaactcataagtcataactgatattttaatatgaaatatagttacagaaaatggcaacaactggagtgcaggtcagcgccagcttgtttgtttgggaagggtagttctaaagaagcgaaagatcttggttttggatgaagcaacttcttcagtggatccaataactgacaatttgattcagaaaaccctgaagcaacaatttttcgaatgcacagtgattacaatagcacataggatcgcatctgttcttgatagtgagaaggtcattcttctggacaatggttagtcatgtgctttgtgtttaattagtagccaacggttaatagcttggttctcccgttttaattccatgttgttgtaaacaggtaaaatcgcagaggatgactcgccagcaaaacttctggaagacaattcatcgttattttcgaaacttgtatcagaatacaccaagggatcagagtattaaactatgtagatgaaagaggggccaaatatatcaccgaaactaaatttttggcttaaatttaaatattctttcttggtaacttgttgcaacatgatcagttgtgtattcggaatgtgcaatggaacattcatatattattacatttgctcattggtttgcatttacgtgtgtactgactaagaaaattgcaatgctgacgcataggcgatgatgtgtttgcaaatgtgtttatctttcagaaagcactactccagaacttcaccatagacaaaaatgctactactaatatattcaccatcttattgtgttatttataacaattttttataaggcttctaaaaaaacgtacatgtgtcctttgctatcgaaatctcgaattgtgacgtgacaagtttttgaacgatcctaacaaggtgccaaatagacaaaagactgccgttaaaaataaatggaaaaagtatgaataaccccccaccccctatcccccgaactatcgcggtcgtccgaattaccccatgaaccataaaaacggacattcttcaccccccaactatgcaaaccggacgaattacccccctcgaaccaattcagagaggttttgtccaacgtggcgcacacgtggcaatccagttagcgtttttttaattaaaaaatgcaggacccgcctgccatactcttcttcctctctctctattctctctctctctcgctcttttctctctcgcggctcgcacaacacgcatggcgaggacagcgcagggacgagcggtcggcgaggacggcgcggacgtcgacacggagacggaggcgacggaggcggaggccgaccgggcgcacggggacacacagcgggcggcgggctcctcctccgcgcggtggaacaccgccgccaccgcgggctcctcctcctcctcgtcgtgggcgcgcggtggccggcggcgcgcggggactaggtggcagggcggcggggcagggcagtggacgaggcgagcgacggcgggagctcgcgctgctcaaggcgaggcgaggcggcggaggcggggtacggcagaggaggcgagcgtggcggc

SEQ ID NO: 8039 - DNA, 3033 bp, Oryza sativa
tgcctcggcagctagatttgattcggccgcaactggattttgccacattacgagctgctgcaagttaaggcaaaaattgttttttctgtgtgtgtgtgggggtgggggcggggggttgggatttgtttgtgtgtttgtgcttccacctttataatttttgtagcgtcgatcttatgtttggaataactaatgattgtccgattgggattttgattgatccttttgtgctttgtaagctgtaacggacagaggctgtcgctacatcggacatggcggatgaaaagttggggtgaccaacggaaaattgcagatttgcgcatttgcgcgtatgggatgggagcgacgcggtcgtgcatacggacgaaaattaggtgaagaaaggaaaattacgaatcttttaattagttaagataaagtaacacagtcggacgtccatggtagagtgaactgtgaaaaccagggtttcccaaaccgtcgggctcggggttaccgcgccccggcggtaagcacggtaaccgcggtaaccgcgaaaaaccgtgcaaaatttatcgaaaatttaaattattttttaaatttatttgaatttaaggaggttaccgcagtttttctatatcgtaccccgcggcaagaccggttaccgtggttactagcggtaatgtaaacccgggtgaaaaccaactaaaacagtggaaaaagaaatagagttgtttcaactttcaagaaaagaaaagaaatggaaaaatacacacaacaagggaaacacgatttaaaaggattggacttttcctcgcaaaaataaaagaagaaatcgattgggacttggggtttagaattatagcggtgatctctacgatcgatctgttgcattgccacctcgctcgcgcttttactttaatctgcggtgatctgtatgattaacacgtacgattctcaaactttcgtttcaagaaagaaaaggactcaaattcacattgggttttatgtatatatatatatatatatatataggtaaattaactggtgctacatggagtatgggtttcaaaattcaaattgagtatctacccaatttgaatgagtatgaattttttttaaatgtttagatatgatcaattaacttctttcaaactgaattttttttgttagattttgattctagttatataacatccaaacatataattcgttaggtatgtaataatgaattgtgaaataaagttgagtttgagttgttttgttgttaggtatttgtatgaatcaaattcatatacctagatatctacttacaatttgtaaatttttaaaaatttgagagaatttatgtgttttatatcttggagcccgggcactatggagtcccatatggatatatatatagttgtacaatctcggattaattaacttatccctccatcgatcgatcacatcgtgctgttttatctctccatcatccccaccatcgccaattcaattcaattcgacgtggccatgacgcagacgaatcaagccatcgaggtggacggcgatcggctgtcgccaccgccaccggcggcgtcacccgccgtgtccgccgtactcgagaacgatgacctcgtcggcgagatcctgctccgcctcgccttccccaccaccctcgtccgcgccgcgctcgcctgcagacgctggctccgcgtcgcctccgacccctccttcctccggcgattccgcgagctccacccgccccgcctcctgggcttctacgtcacgagcctcaagataccgcgggctcacccgctcttcgtcccgatgccgccgcctgcacggccaccggagctcgaccccgtcgtccttcgcggtggcaacttcagcctcgcttacgagggttacacgaccagtatctaccagtgcaggaacggtagcatcctcctcttcaaggagaggcatgatcggcgcgagctcaaatacgcggtgcacagaccgctgcagcatcctgagagaggcctactcgccatcccgttctcttcaacacatgacgatgacgatgacgtcgagcctgatctcggcttcgacgacgagaatgtgtgggggttccacttcggagaggatggcggcagccagctataccggttatcggtgatgttcaccccaaggggagctacttccgcgtggttctacgcattccgggacggcggatggcatgtccataccaaggcgacggcacagctacctggcttgccaccggaatcagctgggttcgtcgtggtccgagacaaggcctacttggcagccacttcgagcagcgttcttgtgttggacttgaagtcctcgagcttgtacaccatccagcttccagatggggtggagttcccacctgtgatgatgtggtataatgatcgaagccacgacgttttgttcggacgagcgagcgatgattctggggtttatatcgccgatctgaaggagcctcagcttcgtatttggctacttaagcatggcagcactggatggactctggttgataccatttgtttgcggtcgatgtgcgctaatttgcacataaattgtgtgggcggggatagtcgtgttgtttacatggattatgtaggggacgatgctgagtttttgttcttgaaaacagatgaatgtgcactctacttggatgttaagagtaggcaacttcacaaggtttacgaggtgacagaaaaggatgaaatcttgttttcaatcatgccctttatgatgatatggcctcccatattccctgtgaggaaggaaatatcataataatggtgaatcctcttgcaatgttctttcatgttattattatttgttccacaatgacacctgttagtgcttttgtacaatgacccctagtaaatttcagttttgctctatacatggtggtttaaagaggttgcacatatatatatatatatatatatatgcgactttttttatatactttagtggtggttctggagttccatgtataatgtatggttttgctttaggatgcggaaacttggaatacactaaaaacaagggctgcaggaa

SEQ ID NO: 8040 - DNA, 674 bp, Oryza sativa
aagtatttttaataaatggaattgcatttcacgaataatttaaattgaaaaaggattttaaaagtctcttttggctttgggccgaaagtcggccgaaaaccttctctctctctctccttcggcccagtcggcccagtccagctgcagccgccgctcgcgcgcgcgtccgcccgctgacaggtggggcccacctgtcagtcttcgtctacctctggccgccgccgcccgaaaccctagcgccgccgtctccttccaaattcggccgcgtctttcccgatccggtgaaatcatttgaggggaaacaatcttcgggatctcctctaccttttctcttttggaatcatcgtctaactcgctttggaagttcgtggatttgaggtcgaatcggattcctctttctctcccgaacccgaagtttccttcgcgtcgccggccgccgtgggccttcgccgccgccctccaacccctatataaggacccccggtgtctcctctacccgccgccaccctcgccttcgtctctcgccgtcggaagagctctagcgccgtgtgacctagcgccgccgtcgtcgccgtcgctccagccgtgcttcgccgtcgcttcagccgtcgccgtcgctcggggagatcgccatcgtggtcgccgtcgtgtcgccgtcctcgtccgccacttcg

SEQ ID NO: 8041 - DNA, 2508 bp, Oryza sativa
gcagccctggaccgggcgcatggcgacggttcacggaaacgaacggctgagatcgatccatccaaaacggacggccgagatcgatcgggtctacagcggctcacggcagacggccccgatgacatcggcgatgacgtcaccaccggcggcggctcgggcggcgcaaactcgccggcgaacaacggcgcttcggcatgaacggaggacaccaggacgtagagggcgacgcggcgaactcaccggtgaccaaaacgtcggcggaagagcaacggacggcgacggcgacgaagaagaagcggcggcgaccttcggcttgacgacggcgacggtgctccggcggtcttcggcagcggcgaaggggcggacgaggacggcgacgacttggcgaccacaatggcgacctccccgagcgacgacgatgaccggaacggcggtggcgcacggctggagcgacggtgacgacggcggctcaaggttgcacggcgttagggcgcttccgacggcgagagacgaaagcaagggtggcggcgggtagaggagacaccgggggtccttttataggggcaaggaggcggcggcgagggcccacggcgaccggcgacgaaaaggaaagttatggctcggagagagagagaccaatccgaatcgacctcgaatccaacactttccaaacgattttagccggggattccaaaagagaaaaggtagaggagatcccgaagatcatttcccctctattgatttcaccggaaacggaaagacgcggccggatttggaaggagacggcggcgctagggtttcgggcggcggcggccagaggtagacgacgggcctgacaggtgggccccacctgtcagcggcagcgagcgcgcgcgagggcagctgcggctggacttgggccgacttgggccgagaaggagagagagcggttttgggccgactttcggcccaaagccaaaagagacttttaaaatcctttttcaatttaaattattcatgaaatgcaattccatttattaaaaatacttccttagctcaaataaatcccaaaaaaatctaggaattatagaattaagcaaagtatttaataaaattttatctggccccattttatattggaatttattaattaaaattagatcttctcttctagacttttaaaataaattctaataattccaattaaacgacaatttatatattttggatttttagggtgtgacaaacctaccccccttaaacagaatctcgtcctcgagattcggaagaactggcgaacagatgcggatgagctgacttcaattcatcttctcgttcccaagttgattcttcttccgagtgattactccattggactttgcaaaaacgaataactcgatttctagttcttctctcgtctatttcctagatacggattggtttctcaacataggtcagatcctcttggacttctatctgttcaagattagcttcttcggtaggtactcttaaacacttcttcaattacgacacatggaacacattacggactcctgccaaagattgaggtaactccaactgataagcaacctctcctcttctactgacaatcttataaggtcccacaaaacgcggtgccaatttttctttggtgtgaaaacgatgaactcctcgaagaggcgtgacacgaagatacacataatctccttcttcaaaactcaaatctctgcggcgattgtcggcataactcttatgacgagactgggccactcgcaatctttcttgaatgattttcaccttttcttctgcttccctcaggatatccgtcccgaaaacctgacgttctcccgtttgatcccacagaagcggagtgcggcacttccgaccatacagtgcttcgtaaggagccatctgaagactagcttgataactgttgttgtacgaaaattctgcacaaggtagattcttatcccaacttccaccgaagtctaaagcacaagctctcaacatgtcttccaaaatctgatttaccctttcagtttgtccgtctgtctgcggatgataagcagtactaaagttcaacttagaacccatctcttcctgaagcttcttccaaaaatttgaagtaaactgactgcctcgatcggacactattttcttagggacgccatgcaaacacacaatcctggccatatacaattccgccaaccgacttccggaataagttgtgtttactgggatgaaatgagccactttggtaagtctgtcaactatcacccaaatagagtcatggcctgatgacgttctgggtaaaccagtgatgaaatccataccgatttcctcccatttccattcaggaatcttcaaaggctgcaacaaaccggcaggtttttgatgttctgccttgactcgctgacaaacatcacatactgctacgtactctgcgatttcacgcttcatacttgcccaccaaaatctttccttgagatcctggtacatcttggtactaccaaggtgaatggaatataa

SEQ ID NO: 8042 - DNA, 3509 bp, Oryza sativa
aagcttacaaaagaagaaaggaaagctattagagccatacccgaactcttccgaaggcttccggactcctgatttctactctattcctattccaccagctagatactactaactaaacttgagagaaatgagcgagctcttgcttgaggtgtgtgagtgaagtgagaaggtgaagtccttatatagaggtagttatgacggttgtggaaggggaattgtctgaagtgctctccaaccgtcattgggatgcaatcttggatgtccacgccgaaccctgcatccaacggtgccaggatgggtaccaggttcggctgaagcatcagctgggccatccctgcccttcttcggctggcggcctcctctattgcttcactttgtagacttgtgaatttttgtcaattctgagttcttggcccattcatacatcagtctgattctcgacatcgtctgattgatttatcgtttgatttgatgtcgattctcctctactttatggttattctctgcaaaaggttagtaaacctaatactagtggaatattattattctaacatgtttaagcattgcaagcatcactagttctcctctattttggaaatattgacggtcgaaactgatcgataacgaacatcaacaaaaccccccaagcttgaacctttgctcgtcccgagtgaaggatgaaaggaaacaatgacttggttgttgatcaggagttgctactatgctgcatatctcaatgatataggtgcaaggtatatgtaccctctctcagattaaataatcttttgcacggtggcttactcttacccctgattcccacgagacactgcttctccttgccttgggtggttgaaagaaagaacagcaattagagcaccaatcacccaacattcattcaactcttattccggaagttttgaaatgatttttgtaaaagaaagccaagttcctcaagtgattcgctcagactctctaagtgtatcaatatgacttcctcaccagattttgcctttttgattcctactttaaggttttaatatgtggagctcggtagagatcaaacatggcatacttgcattcacatttattactaagtcaaaaacttaaactaaagtagataattaaaacatactaaagatcaagatcgtgcaatgtgtgtgtggtatatcgtggaaatggcacacgaggaaaaataaagaaaatgcttctcctttgtgcttactttcttctcccaaaaaatccttcttttattgattagaagagggcatggctatttatttattttttttcaacatcatgctcatgcttgatggagcataactttattttttttcttttcataaccatgccttttccttcttctctttttttttcaaatggatttttctttttaggagaagaaagcatatgaaaacatggagaatttattttgttggtaacatggaaatggaatggaatatttgcttacctcccagtgtaggagtttggcatgtgtgtcgacgggggatacccgtagaccggatatagagggtattggtgtccgttggtacaaggatctacgtagtacgacatcaagcaaacaaaagaaggattatactggttcagggcccttggtaggtaatagccctaatccagttgatatgagattatatgatggaaaacacagattacaaagggaataacagaactcgatgataccgatgagaccgtagtcgagttggtccgactagatctcccggcgacttggctcctgcatgctccggctctgtaggctatagtgggtgtgttggcggtgatattcgatgccttaggtcctgcccagggggttccttatataccgcgggtcagttgatctctaagtaggactcggagatatcgaacccctcatgatatggtaaaaacccagtcttgtccgagtagaactccttccatccgtagataccatccctatcccgtgatagatttccttaatgtatacggaaactatctgtatacgcgtgggtatattgtatcagtatacaacgtacatccaaggatagagggtataacttatccgtaaccctgacaatgtgcatatatgtgggtgtatgatcttgatcatagagcatgagaagtatctacacaagtcacaagagtttgacaaagttcaatggaatggcaagtaaccaaaatgtatatggtttaatcatgatagcacattttttgctctggtaggaatttatatcaaatgaggaactttcaattttatcattttgaaaaacagaacattcggaatgtaagtcaaactaggatcatgatcatagtaacacttatttactatctcatatcttgcaacaacttagactcagattagcaagtgcagctcatttacctcaggttcctagataattgttggctacttatatttaacctttgagagagcacttaccatgaacccatatataagagatataaaacagagcaactattcatcatttcaacaaagagaactggcttgtcttatctagcatgactcaaacctgtcgtatccttttggtattttctactttgcaaatttttatattgttttcaagtttataagatgcaattggaaagcaaacatgcaattgaaaagggaaatatgcaatgtgatacaagttaccgcagtggggggagagacatctctccccccaagcttggctttcgctcagggtccttgacaaggattgaaccgttgaaagcggtagtacatttgaaggtcatcgtgctgttgctgcatcatgttgttgaagtttgcgaactgagcatcagcagattgttgccattcttgcgtttgtgctatgtgttccgtgaggttgtactggatctcccccgtctgcatataaagggtgtccattctcctagcgatttcacccaagccccaacgagaggaactcgagcgccattcacttcgagatggaggcacaccacttgatctggaaggttggttattcccccaatgtatgtcattaggcgcatgccatcggtcctaactggcacttgcccagtttgagactccgatgctatggcgttgagcttgggtccatccgggtgcatccccagttggttcccaacctgcctcatacatttgcacgagtgttgaggatgatgaacttccctgttcatttcttgccatgttgcgcgtctccctgtatgctccacctgcacgagattcttctatggtgtgcaggggaatggttagttcacgacagttgtacaaatgataccccgcatttggcaacgggatttcatttatacaaccgggaaaaaagtaaattaaagatccatcttctccatgtttcagaatatgcccttgcactagataagtctcatcaatacatggacaagcggctgagataaaagcaatttggtcgctaatgaccactagcccttttgctatccgagtaatcagagaagtgcactcaacaggagcagagaactttatattttctaaccattgccttatcatacatttcacaggagcaattttg

SEQ ID NO: 8043 - DNA, 5908 bp, Oryza sativa
atatcgattgagcatcaacaccttttcaatccttgggaccaatgtttctcattcaactcaatgaaattattggtctcaatgatctggttgtcaacctctacatgttgatcaaccaatcgcgcatataaaaggaagtggatgagtattaaccaatatcacaagtgtcatgtactcaaatgtaaagatcccaattaaatgcaagtgaaaaacttggatcaaatatgtcacgcccagaaattcactagtaatttccaaactaatttgtgcataaaatcctcgtccaggaatcagccgaggtacacaaactgacaatttaatatacaaatccatcataataataatgttacatacttacaaaagaaaaggaaaatagcagcggaattaacggtctagcgatggcttcagctccactcccacaggcagctcaactggagtataagccaaacatcttctccttctggatcctttttcttcaactgaggtttgatgattattgcaagaatgagcatatgacatactcaacaagccacacagcaaatatgcaaatgcacaaggataccaaaggatggcataatataggttcatttgcgaaagcagcattaagcaaacatttagaagtaaatcagtagagtaattaatcatcaattttaatcgacactgaacagcaccccaatgctgcacaggcccaaccaaacctgaacagccaaccccggtcgtacagatcaaacctccaaaccaggaattatccattccaaaccaggagtcaaattaattatcacattattaacattaatgagtaatgtgggactaatcacgaaaaacattgctcaactcacccataaccgcggacacggctattcgaatagttttactttgatcagaggtgtaccactgtacccacaagacgcaatcccacaacatgtcaccatgcgccttagcaccaccacggtacctcggaaaggaactgtgacaatacccctcgcacaacacaactcaccacagtgcaccgttcctggatcataatctccccctcaaaaccaaaggcaatggactccccagcgacccccatggacttctcgccgcttcacagtctggtgccccgtaatgaatcatgctatacaaaaggtaaagccgttgctcacactggcttgtggttggcacggtaaatgtttcacaacagtagctcgcgaaccggtccttaattgtcatgagcacgaccttcaaaaccatgtgctcacaacccaccttaatccagttttaattaccaattaatttacataacataacacgattaaccatcgtgagctaccattaaatataaccgtaattaataataatataatatgatttatatttaatcccctttaattagctaatgtttaagcatgactaagcaaacatacatatggcatttagctgaaccaatccaatatataaggtccaagctaatcaaattataacccataggaaaataaagtcatgttcggccattatttaattgggaaaggctcatcacccgatgacattcgaaaataatgcataagttgaaataaatcattagctttaaacgggttcaacatgttcaaagggttgtttgggatctgggtgacttgccttgagcttccgcaaacacttccgaaccttcctcaacgaaaacgctctcctccggaacgacggaaactaaagcaaatgaacaaaatcaacaaaacagtacaaaaacaatcataaacagtacatgtggatatttttaacatgtagatcttgattttagaaaaacttagcaacttgaaccactcgaatcggagctacgatgaattagttatgaatttccgaagttttaaactatttgcatctattaaaaaaactaaaaagaaaaggttatgacgtcatgctgacgtcatcaatgtcgactcgtcatcggcgacgacctcgccggcgctaggggactcggccggacttttggagggcacctacgcgtagaggagaacaacgcgatctcaccggtactaaccaatgcgacgaacgaccacggatggcgaccggcgacgagcttgtgcggcggcggcggttcggtggacggcggcggcggctctccggcgaccggtggcgacggcgaagggcggcggagcttcccctcttccacgcgcacccgacggcggcgtgaggaggcggcggcgacggctaaaacgacggcgcgaggcggctgttcgccggccggcgacggcggcggtttgggtggcgcggcggcggcactacgaggcacgagagagctcgggagatggggcaaacgaaagagggcgactaggggatgctatttataggcttggattgaagagatcggactccaaccgagaggatttgagccggaaaaaccgagggttagttggagagataaactcaaaaacgaattcgattccaggcacaggacggctggctcaggcttctgtccaagcttgaagatgaacagtgcccagggaagcaaactagactttcggctgggcttctacttccaaggactgattaaaggagggacacaaagcagacttcgggaaagagagggaaaggactgcaagctgagaggagactaggccgagagtgagaggactttccctaattcggcccgaaaaggaaaaggtgaattttaattacttttccaattaaattaatcactgaaatgatctttgaattgttaaaaatacttccaatgctcaaataatttcaagaaaaatcctgaaaatacttggacactcaaagtacttaacaaaattataatcagaccatttaatgattaatttaatatgtggataattactgaattgttctttgtatgattaaaattaagagttgagctccaaaaaatccgagaaaattccagagagtataattaaccatggagaatttaataaaaattaaatacatccatgctttatatttaggaaattttattttccacaattaacttcacttgtaaattaatgaacatttaatataaattctaataataatttattaaataatttataaatcctaagacgaaaatcaggatgtgacaaaatacatgcataactaaggtataggatttacccccctaaatgtatgcatacaatttttttgtgtgtgaagaaaaagtatgcataactagagataaaacatcgtgagcttaccctatacaagaatagaaggtatttatcatatgtagacattaaggtagaagcataccttcatcatctccatattctcaatgtgaagagactaaacaagatatggctcaacaaaacattagtctcaaatccatatgtcaatcacatgaaaatattatatatgaatatatcaatatgtgcatagagagaaagatgtgatttaggtcaatgcatttcatccttgtgatttaggtccacgaacaattaacatttctatttcaactcatatgaagtccgggaatcacctatcacaaacttcactttcatatccacatgacactaggcaaagaatgcttataaaaaaattagtctcatataattggatttatcattaatcaccaaaaccaaattaatagcacttgaactttcaaaagggaagaggttttgccttacatattgatagagcagagttgagggctgagcctcagaaaaaaaatatgtacaggacatggtcaaagagagctaatgttgaaaaaaccttgaatcttatggcttcattcatagagataactagaaagaaccttgaatccataatagagttgttgaaagactcacacatgttgttatcagcggagtcacaatttgacactagctggaagaatgccctgctccaatgctcaggtgtggtggtcatcatgtccttggctccttgaggggtgtcttgtgctagctttgctctattatagttgaaaagctccctacaagatgactttgcacagttttagatttttttctgaagcttctggtcagtgtccttttttctccagtttgcatatatttgccttgcacacatcctatgttctactctagtgataagctcagccactgcctttatgagtccctacaagacaggtaattcaaaatatttattacaacttaggacccattgcacattttgttaaaagataaatagttaaaaagcataccttttactggtcagaaattatcacccatccttcacctccatcatttatattgagatcttttttagctacccaagaaaccaataccatgaatcatatatttctttctccactgatgcccatgcaatgggatacatctaattattagcatctcttccaatagcacatattagctcgccattacaagcacccttgaagaaacaaccatctagcccaattactctcctacaaccagcaagaaacccttttctgcaagcatcaaagcatacataaaacctctcaaatactttcttgtcaagtatatctggattaagggtcacaactacaatactcccagggttgctccttaacaactccaattgataatcatacactcttgagactctcccctagttttatccaatgcttcttgtagcactaaggctttggcccgcttgcactttgaaatgggcacatcaacaagcatgtcctttagaactgacttcttaatatgttccactttccatgtcggattatccttgataacatcaaaatatttatttactatgatcctggatgtttttttttgaagtgaaagcggcaaaagatttgccggatatatttaggagattagaaagccaagtttacaaagttgagattacaaatatttcttaaaacaaccaactctagcaatgagtacaggactttctcccttcatggaggtttgaaaaccatatcctgctcctgtatgtcgtcgaggatgagtgatattgttctttgtagacttggggcttgggaattgatttttttttccgttttgttgcaaccaaacatgccaccatgtctttaacaggattccgatccttgacctggtttggcttttaaggccagtggaccctagagaacacatccactgttagtggtggaaatgttaggattgggaataatccctttttcagcggcaattcttgcccatacctgcttgatgaagttgcattggcaaaacagatggtctgtatcttcaaaagcttctctgcataaagtacagatccagtcgcattcccagtgtctaattagcaggttttctgctgtaagagccttttgatgaagaatgagccttccaatttaggttgaaaatatgatcaatcaccgaacccatgaattggaagcggcaggcgcttttaccgagaagattcatgaggcatttcttgtccaagatatttcatcatgatgttgatcagaaagagttatttgattgaggagggatcccaattgcactaattcatggatggtttctatattagtgatctgtctaaaagaatgtagccaggtgttgtctatcatttatgtttccaccttcctattctttatttttgccaatttgaagaggttgggagcaagatctttcgggcacaaacctggtaaccaattgtctttccaaaaaagagttttttttgccatctcctactgtgatttttgtgcatgcctggaagagttgtacatctcgcatattgcaaggcatctccatcagctcccaaggtctgcttgtatcaaacagccacaaccatcgtagcctaagcgtagatgtgaatttttccatttcgagaattcccagccctcccatgatgatcctggatgtgactagcttgttatctctcctaggtggacaacaatgctcattattaaaagtggccacttggaaccatttagacctacttgtctttgacacatatattagccatttacatcctggtcaatagcaggttgccctaaccttgtccctttcatcctttgggaatagaatat

SEQ ID NO: 8044 - DNA, 1265 bp, Oryza sativa
acaaaagtacataggcatggctagataaaacagtgataacgcgggaatttaaataaagcgataatgcaataatttaaatcaaaataactttataaactaggattcaatatgttcaaggatgatgtgacttgccttgctcgctttcccaaacgtcggcttcaacttccacgaagagcggatcttccgaagctgcagcatctacacgaccaacggaaaagaaaaggattttactctaattttaaaagggtttattgcgtcagccgaggggagggggcgcgcggaccgggtccaccccacgcggcagcctcacggtccacggtggactgggtgcacccgggctcaccggccgacgccgtgggtcccacgcgtcagccgcacctaagggcgcgggcggctgacggccgggccccacgcggcagcaactcggcgcgcccgagggcggccaagccggcgcagccggcgggaggcagcgcccgcgcccctatggtcgccggcggcggccataggcacggcggagcggcggccgagagaggggaagggaagggggaaaataggcggcggtccacgactcaccctaggtcgacggcgacgacgaaaaaggtggccggagcgaaggaaggcggcggcgcggcttgggtcgacggggtcgacggcgttccggcggtcggtgaccgaaacggaggggtggacgaggtcgtggaggatgcggcgaagccgaaggaggcggcgccgaggtgggaggtggtccggggcgacgacggcgacggaccggagctcgacggcgacggcggagagagagagcgacggcgcgagctcgattccggcgaggaggaagggcggcgagaggcggaaacggacggaggaggtgcggggagggtttaaatagagccgggtcgagagagggtggcccgggaagggaggaaaccggcgcgggaggtccggccgccatcaatggcgccggcgagatttgcgggggcaaatccgcccgtttgaacgcgagagagagagggaaaaaatggggggaaaggaagaggggatcacgtggagtgatttccctctctttattgcacgcggagacggcgggaggcggcgggattcgcggcggcggcggcgctagggcgcggacgaggcggcgggagcggcgggaggaaggggatgacgggtgggccctacccatcagcgagggtggcgggcgggcccgtccgtcagcggcgggcgcgcggggagaggccggatgggccgcggggagaggagagggaggggga

SEQ ID NO: 8045 - DNA, 3899 bp, Oryza sativa
gtcatgaagcgaggcttctaattgttcccctgaggaaagctgatctgagctacctttctatttcggtccattttgttgcgttgctcttcctgacggatagccttgtccacgagcttctcaaagtcatcatagactccggagatcagctggttggtcaatttatcatcgagaccaaacaaaaacttctcctgcttctcggcatcggtgcgcacatccttaggagcgtagcgcgcaaggcggttgaactcatgcaagtactctgtaactatcctggtttcttgatgcagtgcgcggaactctcttttcttttgtgccataatcccctcaggaatttgtgccttcctgaagctttgacaaaactctgcccaagtaacctccgttgaatctggacgggtcaccacgtagttatcccaccaagcagaagcgggaccttgcaactgatgtgtagcaaaagcaaccttctcttggtcattgcattgcagaaggttcagcttcttctcaatcgcacggagccagtcgttggcctacattgggttggtggtgcttgagaaagtgggtggctggatatgatgaaagtctaacagtttggacaggtgtgatgatggaggaccagactgctggttctgctgcgcctgctgcaacatctgatggtaatgttgctgcatctgttgtatcatcattgtcatcatctgagtgaccgttgggttctcgggcggtggagatgaactgctgtcagatgcaccactgatatgagctccatcggtctgctcttcgctgcccctagcgtcattggaggcacggggatcattccctgtcttcaccatctggacgaggataggtagaaataagagaaaggaagaaaacagatggcttggaaactaatctttcttatagatttaagtgcaattaatttaatcttgattaaaaaactaaaaagaaagcaaacaactcctaattaaggcagtcataccactaacacatgatatcgaccgccgactaacccacaagcaacaaacctaaacacagaaactagcaagcagccaaaactaagaaaatgttaaggataaaggcggcgactctgaagcttggagcagcgcttgcgatcagagaacaggtctgacatctaaagaggacagagggataggaaccaacacatgctcaaaaccaaattaaataaagcaacaaatgactcaaataactcgccgagcatgatgatttttatgcgtggaacatttttcatgaacccagacaaagatactaatgcaactgactaaacgataaattaatgcacaaaatagatgcgtagctataatatacacataaaaatgcccatcgaatctagacacgacttagtgcatatcacctaacaaattcccgactgaaggccaaataaattccaaataaagttttgctagaaccctagactgcctctagccgagaaatacgattaaatagcgatcaagatttttcccacaaatcaaaagagcaaaccccaaaattataccgaaacaaatccaagtgcaaaaggcatgtgcaaatgaaaaggtttaagaggactcttagggtttccagttggcttgtcctacggtcaaggtcggctctgataccaactaagaatttctaagctgaatgtgtattaaacccctgtccaggaccagccagggtacacaaacgacaattattgacatacagatccacgtcttacaaaaatataaaagattacaaatgcagcggaaaaaagaggaaaaaaacgagctaagcctgaagacttgacttctacagtgggcgactccattccacaggcatccttgacggtagcgacgaaaccaacttctttgtgacatcttcaactgagaaggacttcaactctagtgtgggggaaaagagagcaagaccgagtggcgaaggctgtcttgggaatatcctcttcccgaattctcaactgatgatagcctgatcgcaggtctatattggaaaacaccttagctccttttagctgatcaaacagatcatcaattcttggcaacggatatttgttcttgattgtgacctcattaagggcgcgataatcaacgcacatcctcttggtcttgtctttcttttccacaaagataaccggagcaccccaaggtgaagtactcggtcggatgtaccctttctgcagctgttcgtcaacctgctttttgacttctgctagctcattagctgccattctgtacggcctcttgtagattggagcagttccgggtgccagatcaatctggaactcgatttctctcttcggtggcattgtagtgaggccttctgggaacacctcaggatactcttgtactataggtatatcctccaacttcttgggatttttttccgctatttctgtctgatcctcaataacagcctgattcagactcgctacggacttctgtgacactggagaacggaaggtgatcttctcccctttgtcgttgcttagggtgatagtgcgacttgcgcagtcgatcactcccttgtgtctggtcaaccaatccattccgagaatgacatctaggtctttggattcgagaaggatgaggttggatagaaaccgtgacctcttgatctctatagtcactgaggggcagtagtgtgctgtcctcatgtcatttccaggggtatgaacctgcatcagtattttaagttccactaccgataatccatgtgccccagcaaatctcttggatataaaagaatgcgaggcaccagaatcaaagagaactgttgctggatatgagttcaccggaaacgtgcccagcacgacctctggtgatgcctgtgctttctctgcagacgcatgattgacgcgggcctggacgaacctaggtccaacgcgctttagcttcggacacttgccagcaaagtggccgtgcttgccacagttgaagcagggtcttggctttcctgcagactccttcttgagctgttctgactgagctgacatagctggcggatctgactgagctggtgccattaatgggggtgaagtcgagttgtggttatgctgcttactgttgttgtgactgccaccgttgtagtcgttgttgaagttactcgggtggtaaggatggtgctgacggatgatcagggtggaaggctcacctagctgtcccgtcatgaagcgaggcttctaattgttcccctgaggaaagctgatctgagctacctttctatttcggtccattttgttgcgttgctcttcctgacggatagccttgtccacgagcttctcaaagtcatcatagactccggagatcagctggttggtcaatttatcatcgagaccaaacaaaaacttctcctgcttctcggcatcggtgcgcacatccttaggagcgtagcgcgcaaggcggttgaactcatgcaagtactctgtaactatcctggtttcttgatgcagtgcgcggaactctcttttcttttgtgccataatcccctcaggaatttgtgccttcctgaagctttgacaaaactctgcccaagtaacctccgttgaatctggacgggtcaccacgtagttatcccaccaagcagaagcgggaccttgcaactgatgtgtagcaaaagcaaccttctcttggtcattgcattgcagaaggttcagcttcttctcaatcgcacggagccagtcgttggcctacattgggttggtggtgcttgagaaagtgggtggctggatatgatgaaagtctaacagtttggacaggtgtgatgatggaggaccagactgctggttctgctgcgcctgctgcaacatctgatggtaatgttgctgcatctgttgtatcatcattgtcatcatctgagtgaccgctgggttctcgggcggtggagatgaactgctgtcagatgcaccactgatatga

SEQ ID NO: 8046 - DNA, 2339 bp, Oryza sativa
ggacaaaagcaaaggatgcaaattgcacgtgctttgtatcaagatgcagatatctttctgtttgatgatcccttcagtgcggttgatgctcatactgggttgcacttgttcaaggtatttttcagaacaaatctttaaatcctttttctatatgtgtgtaatcatcattgaatgcttaaactaataacttattgttggtacttgagacttctaatactacaaaatatatttttacatcatatgatttcaacgacattttctcccagtcaatttagggttttttttaaccttcagttgtcagtgctagtgctgtttgaatagaacatgttggttttgttggatttttcatttcccaacttccaaaatcagtaatagcagtttatctcactgcatagtttattgtgtggacataaacctaatgtcttaatcagatcttttgtatgtttcagctaaacagtttttaggtagcttgttcttgaacaatatttagggttcaagagtatatctactgtatgaaagttattcatcacgaccttgtatttttcaggagtgcttgcttggactcttagcttcaaaaactgtagtgtatgttacccaccatgtcgaatttttgccatcagccaatgctatcatggtgagcttccaacaactatcaaatctacttatttattctactcgcaacaatcgttttaccatgtcaattcatttccctgttctaggtcatgaaagatggacaaattatacaagttgggaattacgctaaaatacttaattctggagaagagttcacaaaattagtattttcccataaggatgccatttctactctagaaagtttagaacactcaagtggcaatcccaaaagtagtcttattcctggtgacagtggaagtacgcttttcagataagcaaaaggatgataatcaaggagcagaagaagggattgttcaaaatggtcagttggtacaagaagaagagagggagaaagggcgggttgggatttccgtctattggaaatatattacaatggtatatggtggagcacttgtgccgcttattttgctcgctcagataatttttcaagttcttcaaattggaagcaatttttggatggcttgtgctgctccaatatccaaagatgtgaatcctccggtcaatagcttgaaaatggtacttgtatatgttgtgttagcttttgtgagctcgttattcatcttcataagatcccatcttcttgtcatggctggatgcaagactgcaatgatgctatttgataagatgcatcgatgcatattccgagcttcaatgtctttctttgactccactcctagcggtcgaatcttgaacagagtaagtaatttaccttcaccatctttattttaatgagaaaattgaagttatctccttggaataccattagaatttttattcatattcaattaatcatgaaagttgaaacaaaattgtaggcttctagtgatcaaagcacagtggataccagcatttttgacctgatgggatatgttctatttcctgttatcgaacttcttggaacaattattttaatgtcacgggtagcatggccagtcttcgtaatttttgtcccaattattgcagcatctctgtggtatcaggtattctttttattatatattttatgttggatgccattttttggttccagtttataatttttaagtatgtggaaggaaaaatacattaattcatgacattattgacaatttttcacagattcaattgaaaattgaaaatcagtgtttttttcttttcacagatttaatttgaaatttaaaggcatggcaaagcaattaaatataatacataataaaaacatgaggtacatatatgatgtgattcttttcttggcaaaaatgttcccaataaaatttctaggttgatgctactgtatataggagaacttgtgcatttccgatgttcttctgaacaatcaaacttttagtcttaaaatatgctattaaccaataataattgtaatcatatttcaaaattataactatgtcctatggcattattggtttcaatacgactcatgttttgtttttatttttaatcaccataattccttcccttcagcaatattacatagatggtgctagggagttgcagaggttgactggagtttgcagagctccgctgatgcaacattttgctgaatcagtagctggatcaaatattattagatgctttggcaaggaaagacagtttatcaattatgtcagtcatttcatggataatttatctagaccaagtttatataattctgcttcaatggaatggttgtgctttcgcttggacat

SEQ ID NO: 8047 - DNA, 2584 bp, Oryza sativa
ctcccacccccacctccgcctccgcctccgcagccatgcagatgcaggcggccaccaccaccaccgccgcgcgccgcctcgcgccgaagccgcagccgcaggccaaccggtgccgcccctcgagcgtctccgtcgtcgcggcggggaggtcccggaggaggagcgcgcgctcctccctcagggcctccgcctccctcgaccaggaggtcaaggagcgcgcctcccccgccggtgagcgctaaacactctcatgactgcaaacctcgcttgcttgatcagcggaggggggtttgtgcgcttcggaggtagggctaggcttagcgctggatttttggtgccgccatggttgggttgctgattagtatcgtgaggtgaggtgaagtgctgtggttcgctttgagtggggttggttggggcactatgcccattgacgcgagttttgctacggcctcgctgatcaagtgcaatgagcacagaatgtgtatgctggtgcttggtagaggttgcccctccttttttttttttggtcctggaatgagttagcaatctgtaagtggtatatataattgggtgcaatctgattctcgctgtttagaattgggtggctgcagctgcataggatgacatagttgacatttcgagtatagcaattgtggcttcacaagctgagtagctccttagttgtaactgctaacaaatagatggagggttcaaggtctcaaacacttcatggaatgtattttgtgatttgctggctactcttgcatatttaatcgttgaagtttgttgaatgtgtttattgtgtgaaagctaccttgcctacattttagtttcacaaatacactatatcttccttccacattatatgtgcactggcttgacctagtgccatcagaacgactggtatttttcatgcatttatctatctatacatatcagcttcctgtcttttctgttatatgatgctaatctatgtaccatcttttcactgaattattcagctgggaagagtggtcaagcaactagaagagatgtgaggaatatagcaattgttgctcatgtcgatcatggaaagacaactctggtggattcaatgttaaggcaagccaaggtacattctagaagcttcttgttccattctgagattaatttcaaaattttaatgctaaggaaagctttactctgtagggaagaatatgtacttcatgaaaacaccttagaacgaacgacaaactatttgtgaaaattatttctgttcaaccacaaggttgtgctgaaaatcaatagtgcatttaccatttctgttgctgtttaaattatgcaggttttccgagacaatcaagttgtacaggaaagaataatggactcaaatgatctggagagggaaaggggaatcactatacttagcaaaaacacttcgataacttataagggtactaaaatcaacatcatcgatactcctggacattcagatttcggtggggaggtggaacgcgttctcaacatggtggaaggagttctcctagtggtactagctactgttgcggttaaatgttatataagaagattggcttacttcttatttgatgcttaaaacatattctattggcttcttttgcgcttcattgttcaataagtgttttgatgccatcacatcttgacatgccttatgtctatcaaaaattgtaacacactgcatatagggtactgattccatgttctgctgcatgctacacaagttcctatggaactgatttttcaaacagtgttctaatgtgaattgagaaaacgagctaaaatcattctattaacataatcctctatgcttcgtaggttgattctgtagagggacctatgccacagacaagatttgttctgaagaaagctctagaattcggacatgctgttgtagtggttgtaaacaagattgacagacctactgctcgtcctgagtttgtggtgaattcaacatttgagctatttatcgaattaaatgcaactgatgaacaggtaaatagttttgtccatacttttgttcattgatttgttctcttcctattccttatgttcttgttttgctgcaatatgtcagtgtgattttcaaacagtctatgcaagtggtattaaagggaaggctgggttatctccagaaaatttgggtgacgatcttggacccctttttgaggcaatccttagatgcataccagagccacgtattgagaaagacggtgcactgcaattgcttgtgagtaataaacttggggattatattgtcatgtacttaacttgtggctatgactttgcataatactttatatgcagccatcgtgattgttttcttggatgcatctgtaatttcggattttctctcaaaatggcaacttacacactgtatcactacatttttttcttctgtttgtttcttactgttattttcaactatggtaaagcttgaactttgggatgcttaactccatacagttgggagtaattactcccaagatgctgaaagccatgccatggatactaggttatgtaattatagttggaaatgactgaaatctgatagctaactagccaagat

SEQ ID NO: 8048 - DNA, 13754 bp, Oryza sativa
  unsure (1)..(13754): unsure at all n locations
tatgcagcacatgaccacattcccaaagtccaaaacggggcggccaaatcagatcagaaaattcagaagagggcagagacaaaaaaaaaaaagaacaaaaattccggcacgccgtcgcccatagatcccgtggagccagcggttcaggatctcggcggagatcaccacggcgctgctgttcctccaccagaccaagccggagccgctcgtgcactgcgacctggacctcaagccggccaacatccttctcgaccgcaacatcctgctgcaggtgctgacgagtccgccgccgacggactcgtcagccacactcgtctactccggtgacgagtctgccgcccatccccatcatccccgcctctccgccggcacccacctgtccgcgccgaccggccccacccaccgtcggccgcaccgccatgcgcgccgtccgctgccttccccgcactgccgtgcgccatgccatgctgcgccgcctggggccgctccatggccatgcggcacttggtcttctccatctcggccatcgccagcactgcctcctccgcgagccgcgcttcctccagtcgccgcccatcctcgtcgtccccgctatagatggccaaaaggcccgcccgacacggcccggcccaggcacggcccaccagccatcgggccagcacagcccgatcggcacttcgtgccgggccgtgccggctcatgggctgtgcctcccgcccaggcatggcccaccagccgtcgggccgtgccgggccggccgaaggcacgggtggcccatcgtgccttttttaaataagtctattttctatccctcctctttgggatgtgacatatatatatatatatatatatatatatatatatatagcgaaaacaagtctaatttcggtccctccactttgggctgtgacatatattagtgaaaataagtctattttccatccctcctctttgggctgacatatatgtaggtaaaataagtctatttaacgtccctattctttcgaccgtggcatataatatgtctatttttactccctattgtttatgtgtcgggcctggcctgcggcccatcgtgccatgccgggccggcccaatgtgtcggcggagaggcccaggcacggctcggtggtcgggccgggccggcacgggcccgacccttaacgggccgtgccgttcttgggccgggccaaaacgccgtgccgtgggccaggccatcagacctcggcccttttggccatctatagtccccgcttgtggacgagagagagaagagaagaggaagagggaagatgacatgtggaccccaccatttttttaataagaaaatgctgactggattgtcacgcgtacgccacgtaggacaaaaccactctggattggatcgagggggataatttgtccggtattgaaagttgagggtgaacgacgtctggttttcgggtttagggggtaattcgaacgaccgcgatagttcgagaaggtaatttgtaatttttccggaattgaaaaggctagtggttaccacttggcaaattctccatctttcttctgagttcctcttcttgatattcatcctgcagagtaaatggaagggtattctgtatatgtgtttatcattgcttcaactgaaaaacaagcccgggttgcctccttgttcatgctttatcttttttttcctgttttcaagtttgtttggattggactctaatttttaggaaaatatccactaaacttataaattgcaaatataatttctgtataaagtttatatatataaagtctagaaagattttaaaaagtttatatatactttttatattaaaaagtctagggtacacaaaagtctatatgtagaaaatttggatggaaatagttcatataaaaaagttttcgttaaaaaagagtaataaaaaaaggaaacaaaaaatttgagtggaagaaaaagaaaaaacgattcttatgaccatgatgaattactccctccggtttgataatacttgtcgttttacataagggtacggtcttttaaaaaacaacttttaccattattttttattatattatgtataaaagtgttaacaaatatatgattttattaaagtactttttaagactaatctattcatatagtcaccattttaaaagacaaatattttagaaatgatttataatcaaagattttaaagtttgacctcacatttatgtaaaacgacaagttataagtccggagagagtacgagagaataaggtacgtaaaagaggaaaaagaaatgaagacatacataagaatggagaaagaaaattgaaaacagcccatgcggtctccaaccttgaccagttcgcgataggctagcaaggcacagttgctgcgaattttttttatttttaattttttttattaaaagttttacaaaaataatttttcattttgaaaattgacagaagtggtcgcctaccgccctctgggagggcgatttttaaaaatcgccatcccagagggcggcgaaagtgacgtggcagacgtccgttcactctcgggcgacgaccgtcaatgaaatttgcaggcggcccccttgccgccctccgctagggcgattttacactgtgcggggggccgcctgcaaatgggcggcgaggggggcatggaaatttgcaggcggccccctttccgccctgggggagggcgattttatactgtgctttatattttttataaatatcaatagttatcaaatttttttatattgaaaactatacaagattaaaatctccaagactggtaaaatacaattttattattttttagggcctatttggaatgttaccgtacaaatattttgttagtgccaaaatataagcaagttttggcactaccaaatatttggtaaggtaaaattgcatttgatcatatttggtttgctgccaaaatgtaaaattgtagtgaagaatgttctacataatctcaaatctagattacgtattaccaatgaataggcttcaatcaaaatcaaacacaagtactattcaaattaccaaaatattggtagggcatgtttttggtagaaatccaaataggcccttagtcttacgcatacaaaaaatcaccatcataattaaacattgtaatgataagatagataagaagtgccatcgatacacggtacaaatttgtcgatcccgacgaatcaagcatgcggtaacctatcggccccttctaggtcggtcagaatgcattgcattctcgtggtccttcaatcgttgatactctacttgtgtttctgactctgttatcttctggccatgatatgatggagtgacattgtcgatccatcgagtaaatccacccatccttggattgccctgtaaaaatagtaatgttattcagtttgggtagtaattttgtgcaaatcatagcggattttgtaaatggttagacatacaacgaaatcgttgtctacattggggcagacaaaatatctccttcgaaatgtttgttcagcaaaggatgtagccacctgccagcgatctctgcacccacactttggacgctcggaccatttatgtaaccctaatggattgttcctccagtctaagcttgcaatttccacccgacgttcgtactccatccaagcatgaatgaactgtatggtcggttcaggttgcgttatcggcccgtcacttgaagtaactctgactgtgtcaatccattgtacgaaagtgtgttgtcgtgagcataagttgttctagcaccatatgaatgaaaagaactatgtagacgagacaaacacaagtagtactgcagtagtaatagcaaaagtagtactgctttacaagtttgtaagccaaaagaaacggtcacataaggactgaagaggtagaacactactgacgaggcctcttacccctgtccctcntaccntgcgccntaatgtgcccctgggagtacgtgagtcggtccgggggtacggcacggccaacccgtcctgcctgtacaggtgtgacctctggctgctcctgagtgtgcgcctctggagctcctccaagctgagaggagcctagtacgtcgtggtggtgtgcaccgtgcaagtcgttgtcgtagaactggctagtaggaccagtcctaccggcgtgagacgaagaggccccagtaccgaagatcccggctgcaaatcctgctggacaaggaccatcagtttcatacatgtatttaatagtattaataaaaagtaaagtaccgtgtgggcgagggatcgacgctccgtgagaggaagaggtggcgaacgcgcccgaagaggtggcgaacgcccctgcggagctcgcggaagcgccggtcgtgcctgcgaacacgctcgaaggcagacgaggtcctgcgatgaggaaacgtgcagttaaaacatggtgacatattcgtgcaaaagctgaaacaaaaatgaactaatctctgggctgaactgtaccgtgtgaaaccggtgctgtaggtcgcactgctccgaagctaggggcgctcgaaggcaaacgaggtcctgcgaggatggaacatcaagttacgacggggtgatgttttcgtacaaaaacataaacaaaacttaagaaacctatgggctgagcagtaccgtgcgaaacaggtgccgtaggtcgaggtcctgctccgacggtaggcgcgcgaggccgtggttgtaccggaccagctggaggtacgacgtccacggcgctgcgacaggagaagacgcgcatgaccgcacgcatcttctcctgcatccggtcgaaggtcaccctctgctcaacgtcagtcaagtgcaaacctctgttcaacctcacttggactgcggtgatatcggcactgatatcccgtgcggcatcagcctatgcaagatggaaataaaaaattcagtagttgtcctatattatgcaagataaatgaaataattgtaagaactaatacaaattcgacgtacccccacgaagtagtctcggtcacggtgcgtgggatacgcatccgtgacagcggcaacgtgcggctctggggcgtctggagtgaaggtcacacgcgcacgagtgcgaggaaggtaccagcgaaggtagtcacggtagttctcctccgtgtgtgggaagagctcgttgatcacctcctctgtagctaacacccagtcgtcaacgtactgctgtacacgtggagcccaaagtgcacctgctagctgtccccgtcgagtcaacctgtgaagagaggtaaattatatggctcgatgaagtaagtatcataaaaatttagaaatgaacaatccgaactcacgagtggtcggcagggaggacggtcggctgcacgatgcccggaaacacctacctaagtccgaactgtctcatcacacgctgcgggcagtgaggctcaacgaaaatgtcgaacaccatcggcaggatggtgagccagtaagcctggtcgcgtgtgcacaaggacgaaagtcctagcggtgctctcgcagcgacggcctcttctgtgtacggctcccagataacgtcgctcggctggagacggtcaaactcgaacacgaagtccgggtaacctcgtctcacctgtacgtgagcgtaacgacgctgcaataaacatgatcggaattagacatgttatgtgaagaaaaaaaagaagacgactgataaacttataacgcagcgaagttgcactaaccccacgtcgacaccagtaagtccccatcgtgggaccgtcctctggccactgcgcgctgcgtccaaccccgtagggtgcgctctccaccactggtcgacctatggcaaacctctcggctgcccaaagctgaagcaacatagggcagccagcgatgatcgctcccgcgtcagtcttcgtgcacgcctcaccgagggcacggtacgtggctgctagcacggcagaaccccagctccactgcggcacgtcctgtggctgagcatccgcgatggaccgtgcgtagtggaccagccggaagtccacagcgtgcccgtgggtgctagtgaacatcacccacccgaacaaccacaacaggtacgcctcaagggagcgtcggaccgagtaatcatcagcatcagggtgcagaaggtccgcctacaattaataatgaaatgttactacaaaacactctgttgatcgcaaataagcatgtatgataataacaacttatttacttatagtgaactgaagcaaccaagccttgctaggcccgatggtagagtacgggggaagggtgttgggcggtcctaggtgtggaaggcgcatcacgtgctcgaagcacgcggtgatatcctccttccagccaaaaacaccgtccatgggaccaactggggctcttgccagtggtagcccgagcaggtacgacacgtcctgcagtgtcggagccatctctccacagggaaggtggaacgtgtgcatctcaggtctccagcggtctaccagagcggcaaggagtgaccggtctgcatcccactgcttcgatgggtcacggtcgtccgccgccgcctcaacaagcctacaaagtggtagaaggcctgccgcacgcaacctgcatagagcaaactttaaacataagtacaagacaaagcacagttgagttgaaatgtgcttacgtaaaattgaacatacgcgtactaaggaacgtgacgggggtcgacacgcaaccactcgcgtgacgtgcgtggacggaaagtgccgagctgtgcaccctagactactgacaggaacgagcggtggttcctgtcaatcccacggttgaacagcgccggtgtgtcgtacaacatacctgtatccaatagattgatcagaaacataaaaataattagttcaacataactaacaaatgttcataagtgaattactaacacatattaaacaagagtaaaaacaaacaaaagggtcacaatacagaatatttctgattacaacaataactgcagttacacgatatgagtacttagtccgaacactcatcacgataacattatgatacaacaccgaagagttcacaatactactagtacaacaatagtcggaagtactcattacaacaacattcattgaaattacacgatagaagtacttagtccgaacactcatcacaacacaatatcattttatttcctaattcgatagcaatgttacaccatggaattgcctgctgcacgacgacgccttggccttgcgcgcctgcttgttgttccttcaccaggtggttgccttccatcacttgcctgtccagatggaccagcatccgcgccacttggaacttctgcattcttcgggcatttcttgtaagtatggccgcgcagatcacacttgctgcagcataaagtcctcccacctgcttctgactcatccatatcatttctgatgcgtctagtttggcgtcgaccctttttcacccttaacttagatggatctggaatataaaaaacttgggcactcagcgttgtgtaagatcctgagatcccgaacccatatatctcctcactccatgtatgaaagattgcttctttcctgaaataatttgagacgtacacattgggagatatgccacaatcaccggcagcagcaagaacgtgtgagcaaggaaggtgatgaagcttcggcttcatacaactgcaggtacatccaccatccgccttcaagacacattcctgcacggcttgcttgcgatagataccacgcctgctcctatcaacacacattatttcatacttatgcacttgtgtgccttgagcaacaactctatgtctccgtgcctttttgattttatcttccatgtactttgtcactacgttgccaaacactatgttgttatcggccatggacggaccaattttcttgtgtcgatccctaaagtaggcttgcgtgccgtgaaggatgaattcaacaatagcaaccaatggaagtacccgaactcctcgcattacccagttgtacacccccgccaaattggttgtcattatgccataccgagatccatcagtgtcgaacaatagagaccacttctccttaggctcattctcaatccactgagtgaaatttctgatggacgaccccgacctccttctcattgttggtgggtcatcatgtaatgcaccaagaggtatgggaggctcgtcaccttcaacttgtggtctgcgagattgctcatctgtttgcttcgttgttaactcatccaacttgtcccacaactcattaaatttcttctcttggttctgtgcacagagcctcttaaagagctccataagatgcttgttcttgaattgcttatagaaatttgcacccatgtgacgcatgcaccaccgactccgaacatcaggccacttagctggaagtcccttctcatcccaaccgttctgcaagtagtcaatagcccgcaacatacccgcatgacgatcatgtataaggcaaacgttgggcctcatacgcgccactgcaatgtgcactctctctaggaaccagtaccagctttcagtgttctcactctctacaaatgcaaaagccataggtagaacctggttgttcccatcacacccaattgctgtcaatatctaacctcggtatttacctgtcaaaaatgtcccatctatgcataggacagatcgacaatgcacaaaagcattgatgcaggcacccaatgagaaaaaggctctttgcagcacactctttgttcgatcatcagccgatgtaaatgtatgtaggtcatagtaagtactattattcctctgggcaatggtggctaacagactaggcaaattatcataagaagcttcaaatgtgccatacctcatctcaataatcttttgtttggctctccaggcttttgcatagcttatggtgtacttgaatttgttctcgatgtggctaataattgattttggttcaaagccaatgttaccaacaacactactgtacatctcacttgccacaaaagctgaagtgatgtttcggtgatacttctccaccccttgtaagtagcactggtgcttggtcacaatgctaactttccaataatcattccatttacccttatatgcatggacacgccacggacaatcttccttcatgcacctcacttcatacacataatttgttgacttgaccaccctaaactctctctacaaggaaactgcccaatgcttcactgcctccttcatctcatccttatgagcatacctagcaccctcaattacctcgttctccttatactcccagggtacatgatcaccatctgatataacaagtccaaagaagtcctcatttgcccaatcagtggccattacatcaccttcctcatcggatgatgcgtcgtcctccgcttgctcattatctgaatcttccctctccatttcatcaacaattataccgactatctccccctcatccgccatgcccatggcctgctcctcccttgtttgattttcctcattttgcatcgatggtccaacaacatcccctgcattgatagaaccctccacatcttcggtttgcattgaaacatttgtatctttctcttgtaccgacacaaatataacgaggggccatgaccattcaaaagccatttccacataccgtctccaagcagcagtgctgtccatcggcattagttcccaaaaataaccttctgttgcacgactcactacaatagtgatactgacattgtgtagacttcttggtctattctaaatcctctcaacaaccaactataaattgactgaaatgttctctccgcaggcctatcgatgcccttagatgtcattacaaaatccgacagatcagcaccatctggaccaaatctaagatttccttcaccgtgaactatatgaaatgtgaccttatttgacattgtgcctgatgaaaacaataactgcgttaacctcgcatttctgtactacgcactaagttacattctctacaatattgttctccaaaattctaaaagtaggttacgttttccagatcaaactaaagtacatcttacaattaacactactgtctatgtctcaattcatactattatattctatgctctggatctacacatatgtgctgtgtgctacagatatgctaaaatatatggaactaaaactaaaacgcaacatatatactcaaacataacatattagtacaaatgcaaaagatgtatgggagcaaacctgtgatgaagtgagcaaaccagtagggcttcgccgctccccttctgctgccatcccctctctctctttcctttttttttggatttttacagattataatgaaattttagagaggggggacggggttatataggagagaggcaaaaatcgccctcccccagggcggcaagggggccgcctgcaaaattctaggccccctcgccgcccatttgcaggtggccccccgcacagtgtaaaatcgccctcccccagggcagcaagggggccgcctgcaaatttccatgcccccctcgccgcccatttgcaggcggccccccgcacagtgtaaaatcgccctagcggagggcggcaagggggccgcatgcaaatttcattgacggccgtctgccacatcacatttgccgccctctgggagggcggcggcgggctactacttttgttaatttttgaaatagaaaattattttttaaaacttttaataaaaaaaatttaaaaattatgggctcaaatttctcttacccaacaaggaaccttaaggtgcttcgatgggctatataacccactaaagttatgggcccttttttttgcccacacttttttctcggcaaaacgtcgggcttaggccattgggcccatctcttctggccgtcaccacactagatcattctgtgacaaaattaatccaagtccctgttctttcgagcttatcacttaggcccatttgaattggaggaaaaacaaatgaattgaaatcctatcctatactaaaaacaaatgaattgaaaaggaaaaatgtaggaaacttttctattcctacgattctaaataaaaacgtagaaaatctagcatccactttaatctcttggaaaattccctttgagtctatctctcacatctgatttgtgcgtttatcctgcagtccaatcaaacgaccatttcttagttttccctgtgttttgcaatcctcagttttacacttgtattcttatcagaatcctgtgtttttcctattcatttgttttttcaatcttgccattcaaagggctctcggagttcatgtgcgtttttttttttgcaggtaagttaattaacagatagtctggtactcctatgtattttaataccattttatacatactatctataaaattaaataataaatatgtaaatttattacagataattgaactgttatacgagttgaaataaaaaaaagtacccattggataaaattgccaaaaatatgggcagtccggtaagtcactttagcaggattgggtccggtcgggtccggtctaacaaaaaaaatatataagatttatatattgatttattatagataagggagatagaggaaatgcactaaaattcccaaatcaatttgtaaaaatgttaaagttcctctagaatatgaagcaccttttcctatcatttgaaattcttttgaaccaatttcaccatccagaggctctcacagagaattttcttttaaaattgaactttcctacagatttcttcaaatctaatggagccttaaatagatggagagcaacaactcctccctaccctcatgcgtgtgtaatattaatgcattttcataacacagattaaaaaagatgatccataagcttgctaaatcatactggaaatataccatgcgtatcctggtataaacctcgctgctaatgcgtttctctcgtaaaaactttaagttgctttaaaatatcagtaaatcgatttgttgaatttgtaataattaaaactcaattaatcatatgctaatggttttctcgttctaagcacgtgaaaaatagataccacttgggtgaaatcatataactataaaagcaatagcagtgcagctatggcatttgaggagccaaagcaaccagctagactaagaaacaccctccacagtgcatgtggtatattttatccttcacagtacatgataatgggtctcacccgttctctctcttaacttttcatccctcctctctctctctttgcctttccccaccaaccactccccctcctccttcggctactccaccgccggcacccatctccccttccgtcgctctcctaccactcatgtcgacggatcgaagcggcaacaagctcggcactgcgtacgtgcgtggatggtgaggagcttggggcagatttggaatgtcggcggcttggcacgtccttctcgatgacagtgcctaggtggagaggtggccgagtggcgacgacgctgggcggagcggcgatggcattgggcgaagcgacgagggggcggccggatccagcccggggcagctccccttctccactatctccagcataactccccttctctgaccgccgcagcagctctccctcctctccgccgctccccctcccgcctgcgccgctcttcctttacctctccgctgatgctgctcaccccaccgcctgctaggtggctcgttggctgcatgcagatggtgacagcgggctaggcagctcatcgcaaggacaatgggctaggcggctcattggagggcaggggtgaagcctggatttatggttaggagggtgtgggcagggcgaacaagtcataagttatagtaagcaatgccgacgataaaacaagacatcatgtgttctgccataaaaaacttgaatttagctttttagctctatcattggatgtttgacagtttgagacttgagacaccatgctcgatagcgagacgcaatgggagtacggagagacgtgtgaagccgaagcaatgaaaacgaggagttgatttgcgttgtctctccgtctctttcttattaattaattttctatatcatatttattgataatggactaattaatatgctaatgcgctagttagtataatagggagggggtgggatgggggtgttagccccctccggccctgttggatgagggcgagcacaggaaggagcacgatgctactcgctccacagcgtagaagcagtgctgtctcccagcctcacgcgtcctctttttcacccaagaaccggtggtattctttggacacgagaactttattttggtgggtccggaagcaaacgtgccaagggtcaagggagaatgccactacaccgcaccgtgaatgccctaacgacacctccctcccatgcaaccgatgcttcttggcatacataatttagcaggatggtagttgaaatttattatatggaatatctcattggaagtaattgtttttctactggctagatcatctttagcatggaagataacacacaacctcacataaaaaaccgaaaactcgaaaaacgggaggcacacgcacgagtacaaagaggagttcgaaattgtgaccgtgtgtgttcacttcacagggcgcagtaatttttcttcgaccgcgactcgacgaacaaacggacgccacaggataattttcaaaaaaaaggaatatccccacccatttccaccatcgggccaccggtttgccggcggccgacgtggccggcctcgcagcggcacagccgcacccatggccgttatcccccaagcccccaccgccacacccccgcctacaaactcacctccacccccaccc

SEQ ID NO: 8049 - DNA, 3954 bp, Oryza sativa
tcccccctccccttcccccttttggccggaaatggaaggaaggggagggaagctgccccgggggtaggtgccgatgccgccaccacctggagccaccgccgccaccaccctcccctctccggccccccagccggatttgggaggagggaggggagcctgcgcagacacaaccctgctccctacccccttcggccggatctaggtgggagggggcaaccacgctggggtggatgtagccacagccaccaccttccagtcgctccccttcatctagatctgggagggaggggaggggagccgcgccggggaaatgggaggggaggggaaaggtgggagggaagagagacttaggctgtgtgaaatttgcatgggtaggtggtgatttttatgaggtataaatttttgcaggcgaaccttttacaattaccctacaaaaatacccttatttttacagacggacctctagatccacctgcgaaagctaatttttgcaggtgacactagatttatagtatctttagctattttttataaacggtgattttatagtctgccagaaaaaaaaatcataacgttgggaaaaataatttttctagtagtggtaactagtgggtgcaatcagtcagacaatcaaatattttgaggaagctagttgtcagttaggtgtgtggttacagttttcagataataaaagcttttattgaaccctaataaaaacttccattatataaaaaaagtgattgaaatattataaactgatctaccaaaatattaatcccggtatgattaaatatattttcttatttaagtacggggagttcaaccgctgaggctacttcgaagtcctaagttgtcaatatttcacaaatatgttatctagtaagatttaaagatatactcctttgtcccaaaatagaccaacttttacctataaatatgacaaagtcccaaataaactaacttttttaacctaaagctgatttattttggaaaggacggacttactagcaagctctaataactgattcatatcaatttttctttactctcccttcttcctccctattttctcaagtttgaatttgttgcattgtatcttgcgcctagagcccatcttaagaaaaatgtctactcccttctctctccattgtatgaaagacgaacaatcaggtttatattaataatattgtacattctgtatggtttttaacatggtccaatgttgccttaggcaaacgttttggacaatttgaacatttattatttataggctatatttttgtaaccgtgtaaacgaaatgtcttttgcttcaaagtcgacggaggtgcttgcatgttgttggtacttttacttccttctgtgccaatgcaacgaggcgggtcttctgcctctgctcccaggaagaagaaaaaagtattttgcttcacttatctggtcttcgagtatgaattcgttgtgcatgcatgcatgctaccatgttgacacatattgaatatatcagctataactctttaatttgtttaaattaatggcatttcttattgttcttcattttgtcgcggataagagattgatgtagtatatatgccattttatggtgcgtggtcaatattaattggagccaggaataagatcttaaccaaggcaggtgatagagaagtttttgagatgccattcgctaattactgttctcattcatccatttacctctatattattttccagattacacacaagcaagtcacgtgtttccttgtttttaaggtcaaaattgccatgaacctgttgggatacgcataggctacgatagcataaatcaaatttttttatcgcgtaaagcaggaacaatgcaagtattagattatagatcgttaccactcaacgcgctgcgcagcggaagaagacgctgagaagtcgaaggaactctcgcgaagtagcgcacgtcgatgtagaggaagtagtcgatcgcaccggctcgaccttctcctcctcgtgcgttctcctcgccgtactcccacgccgatcagcaccgcaaaccagcggcgcctctaccggtatccacacgtacaggaacagaacgccacgcgcagatgtgctagcacccgcgcgcggctagggttttgctcggggagggaagtgacggctagggtttctcacatgacgcaatgcctccgccggtcacacccctcacgaatatataggatccatcactcgggcctctaaggcccgtaggactcctattcggatccctatccgaattaagctcatattggatctccatccaatccccttattccagcccattaagcgtacgaccctgtaggttcatatatactcggctgtaactcgaaaactccttttcggtccacgcgtcaacagtggcccctagcagaacgtattgacccaccgggcatacataaagatcatatcggctgaacctctagtgtatacttgtatgaacccctttgcctcacgatatcgattaagctcaaggctagatatgtgccatcctctaatagctcaatcattcactcgaacctgttgatagattatataacttgtgattgactcctcaatcacctttggcatggccatgcacttccataatctacaacatcgaggggcccagagatatctctccataggaggggcaaatcccatcttgattattcatatcccactatatatttcatagcatatccgaaaactacttttataactacccaattacggagtagcgtttagtagtccctaagtaagctactacacatgttgggaaccataataatctcaggtttaaagattcaacaccaacactaaatgagatcactgatgacacaacacatatggctcttgcagtgtctcatgttggatctatccaacaacatgttcaccaacatgtgtccacattattaatttggtatatatataccatgatccatgagacatgatcatcaattaatacatgtgctaatcatctaaacatatttgttccacatatgatatttgatcagggatcctttagaaatagcaacacacaacataaagagtctcatgaaagaatcacatattcattaaccaataatgagtttatctatttcaaggaacaaagtcggataaatgtgtaaacatagtgtgtgatacaatcatctctatgattgcctctagggcatatcactaacagaaacctgctgaaactttcaacttagctggttgatatatgtaggtgaaatgtggctagatatgtacttcatcagcctaatcaagaaggggagattgtcaacacctggaattgttcagaattctgaaggtgcacatccagactttcagaagatagccggcaaccaagtcaccgataggtcgacttctcatgtaaaaatccatcgctcaagaatcactgagaagattaaatgaaatccaactgctggacaaagagatgataattactgttggatcggatgactattctccataaaagttcatgtttgcatgtttaataatagttcacctcgttctcatttactaatgtaaaaactgagagatactccgtatctctttactacagtgaagtttgtccaggctgtaaaatatttttagatccgctagtgcttataacccattatgatggtgaatggatgatacaaacaacaagttctctggctagctaagtagtagttcactggttattcggacctcatatctggatgggtggagtgagagactcgaagggcaggggacactgctgcacaaaccctctgtagtcccggtttctaaccccctatagtcccgagtagcaaaccgagactacgaatccaaaactaaatcgttatctttggtcccggttaaaatacctgggagtaaagatgtatctttagtctcggtcggtgtgtaaccaaccgagactaatgatggttgagccacgtgattgacgtctccatctttaatcccggggc

SEQ ID NO: 8050 - DNA, 5876 bp, Oryza sativa
ggttaggttgtgttctgatgcaagatgggaaggtggtttcctatgcatcttgtcagttacgtccgcatgagaactaccctactcatgatcttgagttagctgcagtggttcatgcgttgaagatttggcgtcattatcttttcggtactcgtacagaggtgtacacggatcacaagagtttgaagtatatctttacccagccgaatctgaacatgagacaacggagatggttggaattgattaaggattatgacatgggaattcataatcaccacggaaaggctaatgttgtagcagatgctctcagcaggaaaggctattgcaatgctacggaaggacaacagttgccatgggaattatgcaaggaatttgaaagactgaatttgggaattgtcagtagaggttttgttgcaactttagaagcgaagcccactctcattgaccaggttagagaagctcaaatcaatgatcctgatattcaagagatcaagaagaatatgagaagaggaaaggctatcgggtatttggaagatgagcaaggaaccgtatggttgggtgagagaatctgtgtcccagagaacaaggagttgaaagatgcaattctgaaggaagctcacgacactttatactccatttaccctggtagtaccaagatgtaccaagatctcaaggaaaaattttggtgggcaagtatgaagtatgaagtgtgagatagcagagtatgtagctgtgtgtgatgtttgtcagcgagtcaaggcagaacatcagaaacccgcaggtttgttgcagcctttgaagataccagaatggaagtgggaggaaatcggtatggatttcatcactggtctacccagaacgtcatcgggccatgactctatttgggtgatagtcgacagacttaccaaagtggctcatttcatcccggtgaggacaacatatttcggaagccgtttggcagaattgtatatggcaaggattgtgtgtttgcatggcgttcctaagaaaatagtatccgatcgaggtagccagtttacttcaaagttttggaagaagcttcaggaagagatgggttccaagttgaacttcagtaccgcttatcatccgcagatagacggacaaaccgaaagggtaaatcagattttggaagacatgttaagagcttgtgctttagacttcggtggaagttgggataagaatctgccttacgcggaattctcgtacaacaacagttatcaagctagtcttcaaatggctccttatgaagcgttgtatggtcggaagtgccgcactccgcttttgtgggatcaaacgggagaacgtcaagttttcgggactgatattctgagggaagcagaagagaaggtaaagatcattcaagaaagattgcgtatagctcagtctcgtcataagagttatgccgacaatcgccgcagtgatttaagttttgaggaaggagatcatgtgtaccttcgtgtcacgcctctccgaggggttcatcgtttccacaccaaaggaaaattggcaccacgtttcgtgggaccttataagattgtcagtcaaagaggtgaggttgcttatcagttggagttacctcaatccttggcaggtgttcataatgtgatccatgtgtcaaagttgaaaaagtgttaaagggtacctactgaagaagctaatcttgaacagatagaagtccaagaggatctgacatatgttgagaaaccaatctgtatcctagaaacagatgagagaagaacaaggaatcgagttatccgtttctgtaaggtccaatggagtaatcactcagaggaagaatctacttgggaacgagaagatgaattaaagtcagctcatctgcatcttttcgccagttcttccgaatctcgaggacgagatcctgtttaagggggtaggtttgtcacaccctaaaaatcccaaatatataaattgttgtttaattggaattattagaaataattttaaaagcctagaagaaaagatctaattttaaataataaattccaaaataaaagtgggctagataaaattttattaaatactttacttgattctatagttcctagatttttctgggatttatttgagtcaaggaagtatttttaataaatggaattgcatttcatgaataatttaaattgaaaaagttttaaaagtcttctttttggctttgggccaaaagtcggcccaaaacctatctctctctctcccacctgtcaggcccgtcacctacctcgcgccgcccggcagcgccctagctgcccgagccgccgccgcctccttccaaattctgtcgcccctttccttctctggccaaatcgattgaggggaaatgatccccgggatcccctctatcttttctcttttggaatcgtcgtccaatttcgtttggaaatagccggattcgatctcgaatcggattcgtctctctctcccgaaccctaactttccatcgctgtcgccggtcgccatgggcctccgtcgccgccctctagcccctatttaaggacccccgggacctcctctctccgccgccaccatcgccttagcccgccgccgcctgtagcgctgcctccgctagaacccgtgcgccgcagtcgctgccgcttgtccagccgtgcgccgccgtcgctccggtcgtcaccgtcgctcgggaaggccgctgttgggatcgccaagtcgtcgccgtcctcgtcccgccctccgtttctgccgaggattgccggagcactgccgtcatcgttgacccgatcgtcgccgccgcttcatcctcgtcgccgtcgccgtccggttgccgtccaccgtcgtttgggtcaccggtgagttcgccgcgtcgccctctacgcgtagataccctccgtttacgccgccgcgccgtcattcaccggcgagcgtgcgaggccgagtcgccgccggtgatgacgtcaccgctgacgtcgtcgtcgttgtttccccgtagaccgcggtagatcaagttgtctcggccgtccgttttggataggatagatctcggccgttcgttccgtagaccgccgccgtgcacccggtccaccgtgagccgagcccgatgacgcaataattcatttttccttttcaaaaataattctatattgcgtcataattcaattaaaatctatataaatgatttaatccgatttaatctttaaaaattcataactaattcatcttagctcggatttagttggttcaagtctctaaatttttctaaaattgagatctacatgttaaaaatatccacatatactgttcatgcttttttatgtgttgttttggtgattttgctcttttctgtttagattccgacattcccggagagtccgatttcgcaggagaagaatttgaagagttccaaggccagcaaggcaggtcacacagatcccaaacaaccctttgagcatgttgatcccgtttaaagctattgtttctattcaactattgcatttattttcgaatgtcattgggtggagataacctattgctttgttatagcccttttgttattgattacctattctttgtcacttgggtaataatatgattagctagaacattatatggttttagctaaagtgaataggatgcttagccatgcttagagacactagctcatataaatgggatacttatgattcattattatttaatcatggtttaatgatagctcacgatggttaatctgattggttaattaattaatttgccaactaaaacctgataaaggtgggttgtgagcacatggttttgatggtcgtgctcatgacaattaaggaccggttcacgattttcggttgtgaaacatttaccgtgccaaccacaagccagcgtgggcaacggctttattttctgtacagtatggttcattgtagagcaacagactgtgaagtggcggaaataagcccacgggggtcgctggggagtccatgccttgtttacaagggggtgattatgatccgggaacggtgcactgctttgaattgtgttatatagagggtattgtcacaatctctattcgggtacttgttaagtatcgcgatgcatggttgacatgatgttgaggttgtgtcttgtgggtacagtggtacacctctggccagagtaaaactattcgaatagtcgtgcccgcggtgatgggcgggtttaacaatgtctttcgtgattagtattacacctctcactataataaatgatgctgtaattggtaataatttgtttagctcctggtttggaatggtatattcctggtttgctgatagaagccaggattggttgttcagaatggttgggcctatgcaacgggtatgttgtatagcgttgaattaatattgtttaattaatactttactgttttattaaattctgaaagatttattaaatgctatttatgcaaaatgagactatattatgccatcctttgctatcctttgcacttgcatatttgctgcatggcttgctgagtatgtcatatactcaccttgcaatcattcatcagaggaggagttctacagtgatgctgatggtgtggaggattaggtgtagccctggtcaagttgcctgtggagtggagtcgtctgcgcagtttatcttattttccgctgcttagatctttattgattgagaggaactatctacctctgtaatgacattttattcgcttattaattagagtaataattgtactctattatcaatttgttattgtgtgcctcggctgattcctggacgagggtttacacacatgtaagcgtttgaaattttggatagaaattccgggcgtgacaagtggggtgtaacatcccggtctagggcttaataggattaatagaatactcatatcaacaagttgcaacttcttttctggaagataatctccaaagaactccagggttaagcgtgcttggcctggagcaatttaggatgggtgaccgaccgggaaattcttcgcgggtgcacacgagtgaggacaaagtgtgcagaaaagacatgtgttggtctgtgagggcagtctatgacctatgaaagctatcaaatgtaagcgggcccggcctggggaaggcgggacgttacaaaatggtatcagagccgactctcgcggtttcacgggcgcaggcatggtgcgcatgtctggtgtagaccgggagtggttacacagcatggcacatgcgctggcactggacacatggacgtggccaagagaggacgttcctggcctagggttgatcgacgggggcgtcgatctctcttaaggggggtgagggtgtaacatcccggtctagggcttaataggattaatagaatactcatatcaacaagttgcaacttcttttccggaagccaatctccaaagaactccagggttaagcgtggacaaagtgtgcagaaaagacatgtgttggtctgtgagggcagtctatgacctatgaaagctatcagatgtaagcgggcccggcctggggaaggcgggacgttatagccccttcgccgctgccgaagaccgccggagcaccgtcgccgtcgtcaagccgaaggtcgccgccgcttcttcttcgtctccgttgctcttccgccgacgttttggtcaccggtgagttcgccgcgtcgccctctacatcctggtgtcctccgttcgtgccgaagcgccgttgttcgccggcgagtttgcgccgcccgagccgccgccggtggtgacgtcatcgacgtcatcggggccgtctgccgtgagcccacgtagacccgatcgatctcggccgtctgttttggatggatcgatctcggccgttcgtttccgtgaaccgtcgccgtgcgcccggtccaccgaaaaccctagccgctgacgcaataaa

SEQ ID NO: 8051 - DNA, 17428 bp, Oryza sativa
tccgtgtatacgtccgggccgtcctcgcggagcgctcgtccatggtctgtccttgccatgtgtgttgtgcgagccgcgagagagaacagagcgagatagagagataatagagagagaggaagaagagtatggcaggcgggtcctgcattttttaattaaaaaaacgctaactggattgccacgtgtgcgccacgttggacaaaacctctctgaattggttcgaggggggtaattcgtccggtttgcatagttggggggtgaagaatgtccgtttttatggttcatggggtaattcggacgaccgcgatagttcgggggatagggggtggggggttattcatactttttccatttatttttaacggcagtcttttgtctatttggcaccttgttaggatcgttcaaaaacttgtcacgtcacaattcgagatttcgatagcaaaggacacatgtacgtttttttagaagccttataaaaaattgttataaataacacaataagatggtgaatatattagtagtagcatttttgtctatggtgaagttctggagtagtgctttctgaaagataaacacatttgcaaacacatcatcgcctatgcgtcagcattgcaattttcttagtcagtacacacgtaaatgcaaaccaatgagcaaatgtaataatatatgaatgttccattgcacattccgaatacacaactgatcatgttgcaacaagttaccaagaaagaatatttaaatttaagccaaaaatttagtttcggtgatatatttggcccctctttcatctacatagtttaatactctgatcccttggtgtattctgatacaagtttcgaaaataacgatgaattgtcttccagaagttttgctggcgagtcatcctctgcgattttacctgtttacaacaacatggaattaaaacgggagaaccaagctattaaccgttggctactaattaaacacaaagcacatgactaaccattgtccagaagaatgaccttctcactatcaagaacagatgcgatcctatgtgctattgtaatcactgtgcattcgaaaaattgttgcttcagggttttctgaatcaaattgtcagttattggatccactgaagaagttgcttcatccaaaaccaagatctttcgcttctttagaactacccttcccaaacaaacaagctggcgctgacctgcactccagttgttgccattttctgtaactatatttcatattaaaatatcagttatgacttatgagtttgacactgtggagcaatgcattatagctttctgatatagatataaaacctgcagagtcaagcttgagctcattctttctaacttcatcgccaagatgacaagagttcaatgcctggataacacaacaaatataagttatgcattagtttgacaggtgcacattgaagaattaaaatgtcagtaaattaaaattaaaagacctcccaaatttgttcatcgctgtactcctccaaagggtcaatgttatttcgtagggtcccctcaaacatcacaggatcttgtggaatgatactcaatcttgtccgtaggtcgtgtagtccaatggtgcagatatcaaggccgtctatcaacacttgcccaatagatggctcgacaatacggaatagcgcttgaatcaaggttgacttgccactgccagttcttccaacgatgccggtcttcaaccctccgggtaaagtgcaagtaaggcctttcaaaacaaaaggcaattgtgttgcataccttacctgcatcacatacaaagcacttagaggaaaaaataacacttcaccagaaatttctgcattaggtgttgtatgttttccatgttaagaaagaagatatagtgttgtgagggtatttccacagtggtatgctggaagtcgtacaaaatagtatattatgaaagaggattgcaactctacagtactagaaaaaaaatctgcatgccaatttttgtggaataacttcgatataaaattaatttaataacacactgtttttctcagaaaatattatgaatagaaatgttgagagttctaatcaataattgacatagctccgacattgttagaagtgaacttatataacaacatagagttcaagagacaaacatggaggttgcgaagctcaatttcaccatttgtcggccactggcagtttggtctactttttgatattgtaaggggtggttcagaaggaataaacatgtattgaaaaattctttcaacggatatcattctattttccaaactacagagcactgcaatagcccacccttgtaacatattcagactcaatccataagtgactgcaagaccagctgtctctgtgaagtagtaaatatgagagttagcacggatgttaatacaataatgaactaatttgatctgactaatcaaattaaagcccaccgtacttacttgggtcaattagagcagctggcaaggtgaccagaagtatcaaggcaaatgcgaagataaaggatgaaagaatgtccaagcgaaagcacaaccattccattgaagcagcattatataaacttggtctagataaattatccatgaaatgactgacggcattgataaactgtatttccttgccaaagcatctaatgatatttgatccagctactgattcagcaaaatgctgcatcacaggagctctgcaaactccagtcaacctctgcaactctctagcaccatctatgtaatattgctgaagggaaggaattgtggtaattaaaaacaaacacaaaatatgagtcgtcttgaaaccaataatgtcatagaaaatgcataattatagttttgaaatatggtaacaattattattgttcaatagcatattttaagacaaaatttgattgttcagaagaacatcggaaatgtacaaggacactcctatatacactaggatcaacctgaaaatttgattgggaatatttttgccaagtaatgtatcacatcatatatttacttaatgattttattttgtattatctgtaattgctttgccatccctttaaattttaaattaaatctgtgaaaagaaaaacactgatgttcaattttcagttgaatctgtgaaaaattgtcaatatagtcatgaatcaatgtatttttccttctacatacttaaaaattataaactggaaccacaattggtatcgaacataagatatataataaaaagaatatctgataccacagagatgctgcaataattgggacaaaaattacgaagactggccatgctacccgtgacattaaaataattgttccaagaagttcgatagcaggaaatagaacatatcccatcaggtcaaaaattctggtgtccactgtgctttgatcactagaagcctgcaattttgtttcaactttcatgattaattgaatatgaataaaaattctaatggcattccaaggagataacttcaattttttcattaaaataaagatggtgaaggtaaattacttctctggtccaagatcgaccgttagaagtggagtcaaagaaagccattgaggccgggaataggcatcaatgcttcttatcaaatagcatcattgcagtcttacatccacccatgacaagaagatgggatcttatgaaaatgaataacgagctcacaaaagctaacacaacatatacaagtaccattttcaagctattgactggaggattcacatctttggatattggagcagcccaagccatccaaaaattgcttccaatttgaagaacttgaaaaattatctgagcgagcaaaataagcggcacaagtgctccaccatatgccattgtaatatatttccaatagacagaaatcccaacccgccctttctccctttcttcttcttgtaccaactgaccattttgaacaatcccttctgctccttcattttcatccttttgcttatcttgtctgaaaagcatacttccactgtcaccaggaataagactactttcgggattgccacttgagtgttctaaactttctagagtagaaatgtcatccttatgggaaaatactaattttgtgaactcttctccagaattaagtatttcagcgtaattcccaacttgtattatttgtccatctttcatgacctggaacaacgaaatgaattgacaaggtaaaacgattgttgcgagtagaataaataagtagatttgatagttgttggaagctcaccatgatagcatcggctgatggcaaaaattcgacatggtgggtaacatacactacagtttttgaagctaagagtccaagtagcactcctgaaaaatacaaggtcgtgttgaataactttcatacagtagatatactcttgaaccctgaatattgttcaagaacaggctacctaaaaactgtttagctgaaacatacaaaagatctgattaagacattaggtttctgtccacacaataaactatgcaaagagataaactgctattacttattttggaagttgggaaatgaaaaatcaaacaaaacaaacatgttctattcgtctaaggatttgataacggcactagcactgacaactgaagaaggttaaaaaaaaaccccctaaattgactgggagaaaatggcgttgaaatcatatgatgtaaatatatattttgtagtattagaagtcttaagtaccaacaataagttattagtttaagcattcagtgatgatttacacacatatagaaataggatttaaagatttgttttgaaaaataccttgaacaagtgcaacccagtatgagcatcaacagcactgaagggatcatcaaacagaaagatatctgcatcttgatacaaagcacgtgcaatttgtatcctttgcttttgtccgccacttaggttaatgcctctctctcctataattgtctgatcacctaatggtaatatttccaagtcctttttaagacagcatgcttcaaggaccttttcatacctttccctatgcagttttgtgccaaaaagtatgttatgttcaattgtcccactctgtatccatggcgattggctaacataggcaatcctaccacatgtttgaacatctcctgataacctcggtatctcaccgagtatgcatgacaacaaacttgattttccagatccaacagttccacagatagcaaccctcattccttgtcgaatacggaagttcaaatttcggagagtaggaacctcagaagatgtgttccaagagaactgaccgttcctcacctcaatcgatacatcagttgtacctcttagaagtttagttacaacatcgctcgatagttcctcgaggtgcataaaagagcatatcctgtcaagtgatacttttgtctggatgatcacagagactgtgtctgggatactattgattggtccttgtagctgcctaaacgttgctagagcagacaatactttccctgtttctaatggaatgcctagaagcaaacaacttccaaaggtgaccatagcaataaaagcaggagctccaaagaagacagatataagcataactgaggtgtatacatctttctttagccaatgcatctcctccttcctcaactccatgatcttcgacaagaagaccatttcccatccttgaagcttgagaatgcgcatgttccgcagcatctcagacatagccctcattctagcatccttggcatccatcattttctcttggtaattttgctggatcctccctataggtagatttgctaacattgtcaaaacagtggcagcaagggctgcaaatgctgccaaaccaagagtggagtataggatcagcattgctagaataacctgcacaggaaacaaccaaagctcatgcatggacgaattgaaacccgcgacacgcaccgcatcaacgctcacggcattgatgatctctccacttgaaatgctttccctggactgatttgagagggagagacccttttggtaaatgatggcgacaagagctgagcgcacccgcacaccaagttgttgcgatctgaagagcaaatgccttgatgagaggcctttgatgaactgcgcaacaacaaaactcaacaccaaaatgtagccttctttagcggtccgtggacttcgattcaggtaatcaacaaagtactcaatcaggtatggaccaacatatgaagagacagtacggagtaaggcacaaactgcagtgaagaggattaatttccaggttgtaagaacaagagctttgaccagcttaattgttgtaacaccggtgtacttccctgaaccagaaactgagatgagcttcgcctcaaagttagggaggatgccttgaacactgtcattatcatccaaagttggcacatcatcaagatctagtgctttcctccttccaagatcaagtaacggccccatccaagaaaaagtgataacactaaagaatccagcatctgtgaaagctgctctactgcctgtggccttagacgaggaagaagctgcacggtccaatagtggctgatccatgataaactaataactcctgaacatagaacaacaaactttagcaagttacaactgattatttatgagaaagaaaagtataaaagtgttaacgtaaaaatgataatttaagtctgttcatggacattaataggattacagaaagtatagctaatttaaaggaaacaaacataactgtgagtgttaaagccatatgttgcatgaaaaacatccggatgaatccgcacgataccacagaattccattgtcacacatggtcaagatgatatcacaaatctccaagtaaacaaaatcgagacctagattacataaatagcatatgtaatatgtatgtaatctaatatgtgctaaacttcctagaagtaaaaaaaaaagaggatgtaccgaacttttaaatttagcaattgagtttttttttaaaagtatccgatctcaccatgcccatctcagcattgaagcacagacttaataaaaatagcaaaattagtgcaacagactgaaaatgagaatatatattacgcattactccttgcatacctcaaaaagaaagaaaaaaaaagcacgcatgtggaataggatggtgtcagccacaaatcgaaatctgtgcgaaatttttgtaaattaaccagatactggctattcggtgggagagatggaggagaagagaagttggcgatctcgagccctccggcaaagaggcggtggtggcggcggcgatcacggagagcctataaatgaatgcggcggtgagggtcttgagcccaccagcggggctagcgcaacggtgccgagccgaccgaagaggagcacggacgtgccgctggtggctggggcaagccgccgccgccgctgccgccacggccatccgggtgtctgcgtggtttttctcagtgatcagaagttggaaagaagccgcgtctcactgaaaaatttgataatttaacgcttttttccgttgcccaaattaatttaattgacgtttgtaaagatcgccgccacggccatccgggtgtctgcgtggtttttctcggtgatcagaagttggaaagaagccacgtctcactgaaaaatttgataatttaacgcttttttccgttgcccaaattttaaggagtgttaaattatcaaatatctccgtctcgctcgactcacgtgaccaaaggagacggaaattacctatgcttgcggtacgtgggttttttctaatttctcaaaatcttataaaacacatttgtttgttatagatttgggtggcgagtttattaacgacttaaaagtaattcctatcacaattatgaaaaaaaagctgttatagaacttatttgcaaatctgaaccccggttttcttcacagttcacacgctgtacgaccgtagcattatcaatgtcatgcctaaaggttattttaaaattgagtaaatttggagtttatttcaaacaaaacaataaaaatgttagttaagttcaaattagtgcggattacggatttcacatatgtaacgcttgaaaccaatatcataatccccgcttgttagtaacggttcccttcttccccttaccatctattttcctccatgtcataggcaactaactaaatatcttcaacgaatgttcacttgctctcgttctaggggtgggggtgggtgggcatgagttgcgcaggcagccgccctcctattcaaccggcggtgatttggagaactggtccggtatttcacgaggctcaaaatagtttgtaaggggtaaaaaacaatattaaaattcggggattcgtgaattaagagcaggtttattagtgtagtaagctaccagcgatagtatttgtccgtgtctgatatagccatcaagagagaagctcatgcgatgaactagctgtttcgctagctaaatggaaataaacaaacatttaattcatgcatgcacaaccaaattggcatgatcaaaactaaccaccatccttgtagctatgtgtgttgcctgtgctctagcgtgttagatagggagaaaaacagaaatacatgcaaactagatcgtggagatatgtcggaggcccaccaaatacgtaggtatcacccatatcagctgcaagcgagcagtagaggctcgtttcttacactatcgcccggtgacagatctagcgtccgctttttctctttcttcttttctccctcacccacataggatttcgctaatgtggaataacgtatagcctactgactcaaccttattatatatacctgctctaagaagtgtaagtcgccatcttcctcctcgtacatcgtaattcgttgtaaagaaaccacctcaacaaaaacaaacacgtgtgtttccatccaaaactcatcccaccagtaaaaccagatggatgaaactcaagccttgcaaattttccttctaatccctttgcaaagtaagggtatagcgctagtaaaatttagaagttgagttaagtaatatggactattttttttgaaaaatgaaataaaattaagatcgttctcgaatcgggtatacatggatgaatacaaaggaaaagaaaaaaaaggaccaatgtgaagaatcaaaatagagatgacaaagtctgcaggcatatacttacctgctagcttcttcgttatgcctaaaagcctaacaaatcgatcagaagatcggccgctccccttctcaacgccggctgctgcctgctatgcgccgtgccaaggccagccgtcttccacggggtttcgtagcagaaggggttcatatgtactgcactcctgtatttgtgtggggatttttttattacagtacaaagtacagatttgtttaggctaatccaatagaggtaataatcatatagaaggaaaccattgcattcgtacccttcttatgtggagaattaatgccccttttatttgacacctacagctacccaaaagtatgattagtcaattaatgaaatataatcgtacctgccatatattgaaatccaaatttacagccgtgggcctatttggcaagtttagagaatattgcgagtttatagaagggaaatagtagtgtggctgcattcggcatgtttggcgatggagaggactgatagttttgagaggaaattaattaatagtaagattagaatttgatttttaagtctagcatgttttgcgatgaagaggatggaaagttttgatgggaaattgattaatactaagactagaatttgactttcaaatcctagtatagcatgtttggtacaagtggtgcgaagtgatggaaattactactccgtcccataatataacaaactagtaccgaataggacactttatagtataacgaatccggacatgcttcctgtccagattcgttgtactatgaagtgtcacatctggtcggagggagtatcttcctagtttctctataaaagtttggttagtcccttcggatacaagaatgaatatatatgtctagattcatcaacatctatatgaacgtagatccaatcccacaaccgaaaaaaagtacaatttcctataaagcgaaaaacaaaaaaaatccataaaaaataaaaaaaatctagaaaacatctagaaaggatttatatttgtcgttttagtagtccatatatatctcttctctatctctaatctaactaaaaaatgcgcggaaagataaaaacggtttaaaaaaacacgtgaggaaaaaatatcagaaaaaagcacaaaagaaaacacgctagaaaaaaaggttttcgtagtaaaaaaaacacgcgagaaaaaaatatttccatcgtctgtaaaaaagcaaaataaaaagcatacgaggaaaaaattgtcagaaaaaaaggctaaattgatggacgcttggttggttaggatcatcgatttttttttcatctcctaggcttttgtttcatcatctattctcctgtattggagaccctgcacacctctgtagtcaattatcatactattttttgtgaagtatagctactattcttgataacatattatatggaaataatattagaaaataaacatattgtaattgttatttagaaaagagtgcacagtggctctattttgtgtagacttgaccatgcgagtcagtgtaggatttgattggttgtaagaatgagattaaaataatatttaagattatatgcatgttgtcacatgaataatccaattattttaggtaaaccaaacatcggtaaggttgccatcatcgaggttgggccattacatttaagatgttctaattttctaattttctgattgtcatcaatatggttatgtatgaaaaagtatattatcattaggttttttcatccgttgcaaccacaggtatgtttgctagtatatataaagaaactcagtcggacgtccatggtagagtgaaatgtggaaatcaactaaaacaggggagaaagaaatagagttggtttcaactttcaagaaaagaaaagaaatagaaaaatacacacaacaagggaaagacgagttaaaagaactgggacttttcctcacaaaaataaaagaagaaatcgattgggacttaggggtttagagttagcagtgatctctacgatcgatctgttgcattgccacctcgctcgtgctcttactttaatctgttgcattaacacgattgattctcaaactttggtttcaagaaagaaaaggactcaaattcacattgggttctatatataggccttgtttagttaattagttccctaatttttttttctaaaaaacatcacatcgaatatttagacacatgcatggagcactaaatatagattaaaataaaactaattgcacagttaggggggaaatcgcgagatgaatcttttgagcctaattagtccatattagccataagtgctacagtaacccatatgtgctaatgacagattaattaggctcaaatgattcgtctcgcggtttccaggcgagttatgaaattagtattgtcattcgtgtccgaaaaccccttccgacatccggtcaagcatccgatgtgacacccaaaaattttcttttcgcgaactaaacagacccataatttgtcacgcccagaaattcactagtaatttccgaactaatttgcgcataaaattcttgtccaggaatcaaccgaggtacacaaactgacaatttaatatacatattcatcaaaagaactaaagcgataaatacttactgaagaggcacttagtcctcacaacgaagaaatctgcagcggaaaaataaaaataaaatctggcaaagcttcggctccactcccacagcagctcaactggggtataagctaagcatcttctccttctggatcatttttcttcaactgagatttgattgattattgcaaggtgagtacatggaatactccgcaagccacacagcaaatatgcaagtgcacacggataccaaaggatggcataatataggctcatttgcaaaagcagcatttagcaaacatttaggagtagtaaataagtagagtaattaatcatcaatattaatcaacactgaatagcacacccatgctgcaggcccaaccaaacctgaacaaccaaccccggtcgtacagatcaaacctctaaaccaggaatttaccattccaaaccaggagtcaaattaattatcacattattatcattaatgagtagtgtgggactaatcacgaaaaacattgctcaacccacccataaccgcgggcatggctattcaaatagttttactctggccagaggtgtacaaatttacccacaagacataactccacaatatgtcaccatatcaccatgtgcccatgctgaacatgccaccatttgtgtagttgtgacaagacccctcgcatagctcaactcaaagcagcgcacctttcctggatcataatcaccccctctacaaccagaggcgtggactccccagcgacccccacggacttctcgccgcttcacagtctagcgccccacaatgagccttgctatacaaagtgtccagccgttgcccattctggcttgtgattagtacggttaatgtctcacaacagtagcttgcgaaccggtccttaattgtcatgagcatgaccttcaaaaccatgtgctcacaacccaccattatcaagttttaattatcaattatttatcacaacacgattaaccatcgtgagctaccataaagtatccatcattaagtaatagtgaaacattaatcatcccaatagtatgctagtgtttctaagcatgactaagcaattattctaatatatagtcgaaccaatatataaagtccaactagtcaaattataacccaaggtatcaaagaatagggtaatcaatgcaaattggccataacaaatgaataggttcacaccacccggtgacatttaaaaataaatgcatagttgaaataaatagagaatttaaatataggagcaacatgctcaaatgattgtgtttaggatctgtgtgacttgccttgcaataatcggtcttcaattagtcttcttgaacacttctgacgcactcacgaaccttcacaacgacggaaatgacaagctaacatttataacggagaaaaaactaataaaaaccaaataaacagtactaaaaagtaaacaaacatgtagatcatgattttagatgaatttagagacttgaacggcctcattccgacttcatatgaattagttatgaattttacaaaattaattccaattaaacctattaaagaaaacactattccaaattgattaaacaatttacaaacgatttatactgagattaaagattaaaacatcctccgaaaattattggaactaatttagtggatgatatatagtaaaaagaactaatatgccattgaaaagggataacatgatttatattgactttggatggctgagattaatcttgaccgagtcgaccaagatcggatggtttggattgatctggcaagctggcctcacgagataccgactcaacgagtcaattctacgtgacacgggatcaccgaaatgattaaccgaaaccggcggctctgaacggctctaaactaaaggacgactcaacatggacgaacgaacgaagcacggggaacacctcgttcgaacgaacgagcaaacgactcaacaatggttgcggctaaaccgatgagctagacacgattcacggtaaaaccctggtacgacaaacgataggccggtagaaacctagggatgcacctacggctttgcaactcggctaacggactacgggaagcaaacaaaccacgatgacgatgacgtgggatagaggcggcgttgcacaatttggagcaacgactaagcagcgacagtgacacggtttagcagcggcacgactgcgtcaacgacttggcaaggcgcggcagcagcaacgactcaacaatgacttagcaagatggctaccgagctacggcaacgcggcagcgacacaacgcagcagcaagtggctcggtcgctgcggtagcgggacgacatcgacttttggcacgcacgagcagcagctacacagctgtggcagggagcggtacaacggcggctaggcggctagcgcagcggcaatgctaagccaacagctaagcgcggcacggcggcggctactcaacgacacaaacaagagattaaaacctaaactgagggaacacagatagaaacctcaccaaaccaaagcgatcggagagggagagacggcgatgactacccggcggcaacacacggagacgacgatgacgctagacatacagcggattagattagattggattaataccctaggaaaaaaacctaaatcggtgaacggcatgggagcggtggttgcaggcgaaccacggcacaataatgcaaacgagggcaccgggagaaagagaaggcgacggcgattcttaccaacacttatgcgacgacgaacagtgaaggagatggccggcgacggactccaaagggcggcgaggttcgggtccacggcagcgacgattttccggcgacgagcagcggcaacggatggatggacgggcttctccccggctgcgacgctgtgggtggcgacggcaaagcttggcgacgacggaaggagcagtagggcctcgccggagatcaaaacgcgacggcgaacttcgggttgacggcgacgatggagctccggtgggtttcggctacggggaaggggtggacggggtggagcttgaccttgcggagccgagagaggcgacggcgtaggtcgtcgacggctgaggcggctgctaggggcggctggagcggctgccggcggtggacggagaagacgaacgcggcgacggcgctacaagcgacggcggagagagggagaggtggcggccgaaagaggagagggagggaactctatttatagccatgggagagagatatcgatcctacaacgagagaatcgaagccgggattttctagagtttggtttggagagataaactcgaaaacgaatccaaattcgcatcgaattcaaagggataaaaccggatttttgggggaagagatagaggaggataagggggatattttgcctcaactaattttggaaatacacgagagaggaggccggagttggagggggaaggcggcggcaatggcggcatcgggctctgtctccggccggctggaggttaggggcgactactgtagcagagggaaggaaaacagactttcagctgggcttcttttactcagcccgattgaaggagggacatgaaatggacttcggagaagggatagaaccagccgaaaggaagagagaatggaccgagaactaaaagtgaacttttctagtttcggcccggaaaggaaaagggtgtttttttattactttcccaattaaattaatcactgaaatgatctctaaattgttaaaaatacttccggtgctctaataattccaagaaaaattattaaaatacttgaacactataagtatttaaaaaaattataagaagaccatttaatgattaatttaatatgcgaatcattgctgaactgctctttgtattattaaaattagtaattgagctctgaaaaattcgagaaaattgcagagcgtatatttaattatggagaatttaataaaaattaaatgcagccatgatttatatttaggaaattttatttctcacatttaacttcacttgtaaattaatgaacatttaacataaattctaataataatttattaaataatttataaatcataaaacaaaaatcaggatgtgacataattgtacaatctcggattaattaattaatttagggatttgctagacaactgccggctagacaatcaaaaaaaaactcaaaagcttttaaaacgcacaatataagtaagaagataaccatataaaattgtaagaccaaactaaacttagtttcggagtcattaaattaacaaattaaatggctaaaaactttgttcttgagtttttatttttttttcttaactattttgttaatattatatctaataattgaagtcgattttaattaatcttgtaattttgtaggtttactaataacactttagcagtgttcaaaatacataatctatatattagctatacagaaatgtccggttttgagcttagaacatatccccctgatgagaaatgtgtaagaaacatcaggaatacatgttgtatctgacatgaaagagcaacaaagaaaataaaaagaaaaatatgtgattatctgctatatatcctcctggttatgcatggttttagttctgttccaaagagtgatgttgaacccccaccaaagaacaatcttcccaattcccacaaatgacagcagcattcgtacttagacatccaaccaaaccactcaaactcattctcaagcaatgcaactaaataaatgaaaatttaaaataccatattattttgccatggtttattaaatataaattagaaaaattctaaaccgttacgagtcattcatgttaaaatgcattttcaatcgtgtgctataaattactccctccatctacaaaagttagacatatttcacatttgagtttttccaaataaattgtttctatttgtagtctttattcacttaaggctttatttagttccaaactttttcatcaaacttttaacttttccattatatcaaaactttcctactcacatcaacttctaacttttttattcaaactttcaattttaatcaaacttctaattttggtgcggaactaaagcccaagaatctcagttactacctgttagctcggtacgacaccatttaagaatctcatcagacatctgcagcattttaatttgttgggggtgctaatgagctttcaagatggaagaaaaattgaaggggaaaaaaaagaacgcatctggcatactggatgctcaaaatcggtggaaggctgcacaacgtttgtactgcccaaattagcagcgagcagagccaatgaaaatctgtaaatcccccacagtaataaaggacatggaaatccccaaatcagctgcagcgagaggctctggcgccgtcctcgtcatctccacactactcctcgagtagtccatctgcacatgaacagcttggtggataggcagatcggacggtcgtccacgggtgatgaacgaacagtgtaacagttttactaatttgttgacaattagtaaaaatctattcgattttcaacttttttgggttcaaatttcctgaaaacttagaatttcagtctgccgattcttttaggactctgacatcttcatccttcctcagaagttagcaacaggcatgggattgcaacagtaattagaatagcttccttcactgttcttcgaaaaaaaaaagaaaaagaaaaaaaggagtcgaggacgagaagagagcacaccatcagttttattttattaagaggggtgcaggaa

SEQ ID NO: 8052 - DNA, 14600 bp, Oryza sativa
atatctacccgggccaccggctagcctccaatcctgtcgccggccagccaccattccaccgcctcccctccggccggatctggcggaggggagggcgaggccgccgccccgcgcccagccgctgccggccggcctcccatcccgccgccccgcgtcgggccaccaccggctggcctccatcccgccgccccgcgcccagccgccgccggccggcctcccatcccgccgccccgcgtcgggccgccaccggcctcccatcacgccgcccgccagaggggaggagaggaggggagggggccataggagaggggaggaggagatggggtgagagaagaaggaaggggatggacagagagcaggacttagcatgcgcacaagggggctcgaggctttttttcccggttgtttaacaaccgggactaaaaatagatctttactccggttggtgttaccaaccgggactaaagataatagaggggtctgacaccgcatcccatttattgaaccgggactaatactccctccgggctaaaaatacttgccgttttagacaaggctaaggtcaaactttagaatctttgattataaatcatttttaaaatatttctctttcaaatatgatgactacatgtatagattagtcttaaaaagtagtttaataaaatcatatatttgttaacacttttatacatattataattgaaaataatggtcaaggttgtttttgaagaccgtgcccttgtcaaaaacgataaaaacgacaagtattatcaacccggagggataatgatttttagtcccaccaaccgggactaaagatcaaaaaatactcattggcttttgaaccgggaaaaaaatgatttttagtcacggttttttgagcaatgggactaatgtggtttttgaccaaccacaaaaaatggtttctccaatagtggaaaaaaggaattgatgcggtaaaaaaatagtaaaaatttattgatcttgtttaacatgccaatagcatgttaggccttgtttagtttctaaaacaaaaaattttcaccaatcacatcgaatgtttgaacacattcatgaagtattaaatgtggataaaaaaataattacacagtttgcgtgtaaattgcgagacaaatctttaagcctaattgtgtcatgatttaataatgtggtgctacagtaaacatttgctaatgacggattaattaggcttaataaattcatctcacaattttctggcggaatatgtaatttgttttattattagactatgtttaatacttcaaacatgtgtccgtatatccgatgtgacatccaaaacaatttttttaactaaaccgggctactgtattcctagctactaatttactttagatgatgtggcacacgtatatcgctagcggccgacgatactaaacctgctcttagccgaaagtcctaaggggcgatcgatcggtcaccctccccacattgatcaccacctcctccacgtggtttccttttttgacatcaccttatttttctattttagtaaatttatacacctaaaatttgtacacctcaagtttacacatctaaagtttatacacctaaagtttggagacccaaagtttagaagtcaaaagtttataaatccgattcaaatttgaatgacttcaaatatttttatatatagtatttctatacgtctaaagtttatacacctatagattatagtttatagaccgaaagtttataagtcaaaagtttacatacccgattcaaatttgaatttaaatttaaatattttttatatatagtatttctatacatcaaaagtttatacacctaaagtttatagacctaatatttataagttaaaagtttacatacccgattcaaatttgaatttgaatttaaatattttttatatatagtatttctatacataattttttccaactttgtttttttatttttttaaaaaatttatggtgtagtaggaagagaagaaggggaggaggaagggggagagagcgtatattggggatggggatcgaatcacccattagccacacccgctcttagctggtcagatacgtacgtatttttgtatcagcccagttaacaaacaccggtggagaagtgatttttactcccgtggagaagtgatttttactcccggttcgtaaccctcttagtcccagttttctatctttagtctcgggtgaaataaccgggagtaaaaattaatttttagttccggttggtgttaccaactgagactaaagatagagcctttttagtcccggttggtactaaagaatgagccaaactagatctggttgctcctttattcttttcttttcttcatttcattatttttaatatattgatttcactccatcccgcccccaaaatcccaaatcaatcatccccgaattgtaaaatctcaaatcgattatcacctctaaatcctcaaatcctcaaatcgatcatctccaaatacatcacaaaatcttaaaaaaattacatcacaacttctacaaaattcatcacaaatacaatacataaatcaaatacatctcaatccaaatcacaaatcctaaaaaaaaaagaaaaaacctaaatcggcacctaagcccaccgccgcccatcgccgcgcccccacgaggccgcccggcctaccgcgaggcggcccggagcatcgcccgccgtcgcgtcgccgcgaggcctctagctgctgccacgccagccgcccggctctccgcgcccggccgccgcgcgccgccactgcaggtggggaggaagggggagggagaggaggagaggaagagaggagttgaaggagagggagaggaggagagaaagagataaggtgtgagccagcggaggagatagaaccgagagggaggagtgtcgatccgatccgcgcgcatgcctctccatgtatgttgatcttttttgccggttggtaacgccaaccgagactacaaatatatctttaggtagtctcggttggtgttaccaaccaggaaaaaaagagaataaaatttggaaatatactgttcattcattttatttttagaaatattcaggattcaaaaattttaaaaaaaaatataccatcgatttcgtacaaccttgcgcgaaagtgacgtggcgtgacgtcgcgagtgaacaacgcgaaaccgcgcggaccgttcggtctcgccgaaccaatctgcgataccggatttcaaaatgattaattagtgactaattatcatgattagcaattaattaattaattaattattaatctctaattagtattagttaaatagttaattacgtcattagtgactaaccaaagggagcattggtacggtatcgcactctttttcagcgataccgcttggtctcgctcgttcttcccgcgagagcgcgcggtctcgcgccagaccgtgctatggcgcgagagaccgggcggtctcgcattttcattgtgcgagactgtctttaacgtcacctcctcgtcattttcgcttaatggtggtgcgagatcgacggtatatttttgaaaaaaattacatatgtgcactatatttttaaatttaattcggaaaaaagatcgatataacataagctttactcccggttagtgttaccaaccaggactaaagataaaaaagtactcctgagcttttaagctgggattaaagatatttttagccctggtttttaatacaaccgggactactgtgaaatctggtcgaccgaccaaagatgggtttctccagtaatgaaaggttgacaacatggagacttggtgtcttgacactgcaaccatactgtacccaaaatcacacaagttaagattcaagaactatatatttgtgcagttacatagcatcggaacaaatttacaggtaatatatgtatggaattcataaaatataagtatagcaacagcacatgaaatctgatacatccctgaggactgagatgcatggggttcgacagccttcagtcattagtgtcagtgatatgctccagaagcaatcatagagatgattacattacatactatgtttacatatttatccgactttgttccttaaaatagataactcattattggttaataaatgtgtgattctttcatgagactctttatgttgtttgttactatttctaaaggatccctgatcaaatatcatatgtggaacaaatatgtttaaatgatcagcacatgtattaattgatgatcatgtcttatggatcatgatatagagataccaaattaataatgtggacacttgttggggaatatgttattggaaagacccaacatgagacactgtaagagccatatgtgttgtgtcatcagtgatctcatttagtgttggtgttgaatccttagacctgagattatcatggttcccaacatgtgtagtagattacttaaggactgctaaacgctactccgtaattaggtagttataaaagtagttttcgggtatgctgtgaaacatgtagtgggatatgaataatcaagatgggatttgcccctcctatagagagatatctatgggctcctcaatgttgtagattatggaagtgcatggccatgccaaaggtggttgaggagtcaatcacaagttatataatctatcacaggttcgattgaatgattgagctattagaggatggcacatatctagccttgagcttaatcgatatcatgaggcaaaggggttcatacaagtatacactagagattcagccgatgtgatctttatgtatgcccggtgggtcaatacgttctgctaggggccactgttgacacgtggaccgaaaaggagtttttgggttacagccgagtgtacatgaacctacagggtcgtacgcttaatgggctggaataaggggattggatggagatccaatatgagcttaattcggatagggatccgaataggagtcctatggacctttggaggcccgagtgatgtatcctatatattcgtgaggggtgtgaccggcggattgattgcatcacgtgagaaaccctagccgccactcccctccccgagcaaaaccctagccgcacgcgggtgcgagcacatctgcgcgtagcgttccgtccttgtacgtgtggatagcagtagaggtgccgctggtttgcggtgctgatcagcgtgggagtacagcaaggagaacgcacgtggaggagaaggtcgagccggtgcgatcgactacttcctacgcgtaggggtggaaacgagccaggccctggctcggctcgacttgcagtggctcgtgacaagctaggcttggcttggctcgactcagttaggaaaacaagctaaaacttgagctcggctcggctcgtttcctggctcgtgtagttattaaaaaaagcatgaacaaatcatcaacatgcaaaatttaaataagtttatatattaaattcttcaaactcttaatgataaatttcaagttgagaaataataacaccatgaaaagtaaaataatctttataaatgcataatggcctaggctcgtgagccaaaacaagcagctcgcgagctagctcggctcggctcatttcagtaacgagctgaaaaggtggcttgggcttggctcgttaggcttacaagccgagccaagccaaccaaactcgagccaagcccgagctgagctcacgagcccgagattttttttccacccctatcgacgcgtgctacttcgcgggagttccttcgatttcttagcgccttcttccgatgcgcagcgcgtcaagtggtaacgatctatgatctaatttttgtatggttaatggcttacgcgatagaaaattttcatttacgctatcgtagcctacgcgtatcccatcaatttggtgacagtttatcccaaagattaccagaatgtacatggaagcgtcagaagaacgttcacctcaaagatttgccagagcgtacaggtatcttgtttgagcctccatcgcgtccttgcaaccttgcctgacgaagacgaatggcttgaagtactatattgatttctgatgctaggggactagaagctccaattgtttgcacattcgaggtgttggtgttttgccaacctgatacctaccattccccatcagttcttgtcctataccaatcttctcttgaacacatgtcttccattttctcatctaattaacaggtacacacttagaggacaaagaaaaagagaagaatgcgacaactattttctagttatctttgcatatgttctatttatagctagatagctagtgttgaatttataagcacataatgatttaatttattctatataaatcataacattgcagatataatttagcatgaagaacgcatcattaaatctacatatgtaaactaagcagtaaaacatgaatagatctaatatgcgcaacatgttgataacgtaccgagggtaccggaagaccggttgctcagcaggaattactcgcggttgcggacgtcgacaacggcgcgcagtacgcgagcgaacaggaagacgagccattgtggtcgaacagggagcagtcgtgcgaagcgcttcccaaaaaccttattgctgccttctcccggtgcgggacgtcgaaggcagaggttccaaagacctgctctcccgatcaccatgcacgccgacgagcggaatggagtagactacgagtgacagtgcagtacataggaggagacaaacccttaattttaaggaattgaaaattagtttttttaagagtagagtgggtgaattgaaaattagtttttttaaagagtagagtgggtgaatctggccaattctagcttcaatgaaaatccttaaaattgaccattagaaccaaatccaatgaaaaatagttttcagtcaggtgtttgtgagaaaagaggggtgaggaattgaaggaaaaagtatgaattaccctcgaactattgcggtcgtccgaattaccctcccttaacccaaaaaccatcattcgttcaccccgaacttttaataccggacgaaataccccttctcgacccaatgcaaaagcggttttgtcctacgtgatgtacgcatggcaatccagtcagtattttattataaaaaagtgctggggtccacctgtcatacatcctctttcctctccctcttctcctctctctctctcatccacaagcagagacgacgggtatgggcggcggctggaggaggcacggcacgcggaggaggcggtgctggcgatggccgagatggagaagaccaagtgtcgcgcggccatggaggcggccgaggcggcgcaccggctggccgacctggaggcgtagcggcggcgcaacgccgagaggccgacgagaaggtccgcgccctggagcgtgtagtccgattgcctgcgcttgaacacaaggcagacggcggaggcgaaggctgcgagcgcgaggaggaaccaggagcagacgcagacgcaggagcagcgggcgtggcgggtgtagacgtgtagtgctggaagaggcgcgcgttctccggcggcgggatgcggaacaccttgtccttgggcatctgcaccacgtacgtgtctagctacgccggcggcagctgctggtactgccgcgcgtcggcgggcggctgcaaaatcactgatgatgcaagccatcgactgcaaattaaggccatgcatatatacaagtgtgcaagttagctctcgacaaaatcctttacccaacattccaaaacacgagctttgatcaagagaaaccaatctgctacatatgcagcacataaccacattcccaaagtccaaaacgcggcgccaaatcagatcagaaaattcagaagagggcagagacaaaaaaaaaaaagaacaaaaattccggcacgccgtcgcccatcgatcccgtggagccagcggttcaggatctcggcggagatcaccacggcgctgctgttcctccaccagaccaagccggagccgctcgtgcactgcgacctggacctcaagccggccaacatccttctcgaccgcaacatcctgctgcaggtgctgacgagtccgccgccgacggactcgtcagccacactcgtctactccggtgacgagtctgccgcccatccccatcatccccgcctctccgccgccacccacctgtccgcgccgaccggccccacccaccgtcggccgcaccgccatgcgcgccgtccgctgccttccccgcactgccgtgcgccatgccatgctgcgccgcctcggccgcctccatggccatgcggcacttggtcttctccatctcggccatcgccagcactgcctcctccgcgtgccgcgcctcctccagccgccgcccatcctcgtcgtccccgctatagatggccaaaaggcccgcccgacacggcccggcccaggcacggcccaccagccatcgggccagcacagcccgatcggcacttcgtgccgggccgtgccggctcatgggctgtgcctcccgcccaggcatggcccaccagccgtcgggccgtgccgggccggccgaaggcacgggtggcccatcgtgccttttttaaataagtctattttctatccctcctctttgggatgtgacatatatatatatatatatatatatatatatatatatagcgaaaacaagtctaatttcggtccctccactttgggctgtgacatatattagtgaaaataagtctattttccatccctcctctttgggctgacatatatgtaggtaaaataagtctatttaacgtccctattctttcgaccgtggcatataatatgtctatttttactccctattgtttatgtgtcgggcctggcctgcggcccatcgtgccatgccgggccggcccaatgtgtcggcggagaggcccaggcacggctcggtggtcgggccgggccggcacgggcccgacccttaacgggccgtgccgttcttgggccgggccaaaacgccgtgccgtgggccaggccatcagacctcggcccttttggccatctatagtccccgcttgtggacgagagagagaagagaagaggaagagggaagatgacatgtggaccccaccatttttttaataagaaaatgctgactggattgtcacgcgtacgccacgtaggacaaaaccactctggattggatcgagggggataatttgtccggtattgaaagttgagggtgaacgacgtctggttttcgggtttagggggtaattcgaacgaccgcgatagttcgagaaggtaatttgtaatttttccggaattgaaaaggctagtggttaccacttggcaaattctccatctttcttctgagttcctcttcttgatattcatcctgcagagtaaatggaagggtattctgtatatgtgtttatcattgcttcaactgaaaaacaagcccgggttgcctccttgttcatgctttatcttttttttcctgttttcaagtttgtttggattggactctaatttttaggaaaatatccactaaacttataaattgcaaatataatttctgtataaagtttatatatataaagtctagaaagattttaaaaagtttatatatactttttatattaaaaagtctagggtacacaaaagtctatatgtagaaaatttggatggaaatagttcatataaaaaagttttcgttaaaaaagagtaataaaaaaaggaaacaaaaaatttgagtggaagaaaaagaaaaaacgattcttatgaccatgatgaattactccctccggtttgataatacttgtcgttttacataagggtacggtcttttaaaaaacaacttttaccattattttttattatattatgtataaaagtgttaacaaatatatgattttattaaagtactttttaagactaatctattcatatagtcaccattttaaaagacaaatattttagaaatgatttataatcaaagattttaaagtttgacctcacatttatgtaaaacgacaagttataagtccggagagagtacgagagaataaggtacgtaaaagaggaaaaagaaatgaagacatacataagaatggagaaagaaaattgaaaacagcccatgcggtctccaaccttgaccagttcgcgataggctagcaaggcacagttgctgcgaattttttttatttttaattttttttattaaaagttttacaaaaataatttttcattttgaaaattgacagaagtggtcgcctaccgccctctgggagggcgatttttaaaaatcgccatcccagagggcggcgaaagtgacgtggcagacggccgttcgctctcgggcgacggccgtcaacgaaatttgcaggcggccccctttgccgccctccgctagcccgcccccggggcggcaggggggccgcctgcaaatgggcggcggggggcctggaattttgcaggcggcccccttgccgccctgggggagggcgattttatactgtgctttatattttttataaatatcaatagttatcaaatttttttatattgaaaactatacaagattaaaatctccaagactggtaaaatacaattttattattttttagggcctatttggaatgttaccgtacaaatattttgttagtgccaaaatataagcaagttttggcactaccaaatatttggtaaggtaaaattgcatttgatcatatttggtttgctgccaaaatgtaaaattgtagtgaagaatgttctacataatctcaaatctagattacgtattaccaatgaataggcttcaatcaaaatcaaacacaagtactattcaaattaccaaaatattggtagggcatgtttttggtagaaatccaaataggcccttagtcttacgcatacaaaaaatcaccatcataattaaacattgtaatgataagatagataagaagtgccatcgatacacggtacaaatttgtcgatcccgacgaatcaagcatgcggtaacctatcggccccttctaggtcggtcagaatgcattgcattctcgtggtccttcaatcgttgatactctacttgtgtttctgactctgttatcttctggccatgatatgatggagtgacattgtcgatccatcgagtaaatccacccatccttggattgccctgtaaaaatagtaatgttattcagtttgggtagtaattttgtgcaaatcatagcggattttgtaaatggttagacatacaacgaaatcgttgtctacattggggcagacaaaatatctccttcgaaatgtttgttcagcaaaggatgtagccacctgccagcgatctctgcacccacactttggacgctcggaccatttatgtaaccctaatggattgttcctccagtctaagcttgcaatttccacccgacgttcgtactccatccaagcatgaatgaactgtatggtcggttcaggttgcgttatcggcccgccacttgaagtaactctgactgtgtcaatccattgtacgaaagtgtgttgtcgtgagcataagttgttctagcaccatatgaatgaaaagaactatgtagacgagacaaacacaagtagtactgcagtagtaatagcaaaagtagtactgctttacaagtttgtaagccaaaagaaacggtcacataaggactgaagaggtagaacactactgacgaggcctcttacccctgtccctcctaccctgcgccctaatgtgcccctgggagtacgtgagtcggtccgggggtacggcacggccaacccgtcctgcctgtacaggtgtgacctctggctgctcctgagtgtgcgcctctggagctcctccaagctgagaggagcctagtacgtcgtggtggtgtgcaccgtgcaagtcgttgtcgtagaactggctagtaggaccagtcctaccggcgtgagacgaagaggccccagtaccgaagatcccggctgcaaatcctgctggacaaggaccatcagtttcatacatgtatttaatagtattaataaaaagtaaagtaccgtgtgggcgagggatcgacgctccgtgagaggaagaggtggcgaacgcgcccgaagaggtggcgaacgcccctgcggagctcgcggaagcgccggtcgtgcctgcgaacacgctcgaaggcagacgaggtcctgcgatgaggaaacgtgcagttaaaacatggtgacatattcgtgcaaaagctgaaacaaaaatgaactaatctctgggctgaactgtaccgtgtgaaaccggtgctgtaggtcgcactgctccgaagctaggggcgctcgaaggcaaacgaggtcctgcgaggatggaacatcaagttacgacggggtgatgttttcgtacaaaaacataaacaaaacttaagaaacctctgggctgagcagtaccgtgcgaaacaggtgccgtaggtcgaggtcctgctccgacggtaggcgcgcgaggccgtggttgtaccggaccagctggaggtacgacgtccacggcgctgcgacaggagaagacgcgcatgaccgcacgcatcttctcctgcatccggtcgaaggtcaccctctgctcaacgtcagtcaagtgcaaacctctgttcaacctcacttggactgcggtgatatcggcactgatatcccgtgcggcatcagcctatgcaagatggaaataaaaaattcagtagttgtcctatattatgcaagataaatgaaataattgtaagaactaatacaaattcgacgtacccccacgaagtagtctcggtcacggtgcgtgggatacgcatccgtgacagcggcaacgtgcggctctggggcgtctggagtgaaggtcacacgcgcacgagtgcgaggaaggtaccagcgaaggtagtcacggtagttctcctccgtgtgtgggaagagctcgttgatcacctcctctgtagctaacacccagtcgtcaacgtactgctgtacacgtggagcccaaagtgcacctgctagctgtccccgtcgagtcaacctgtgaagagaggtaaattatatggctcgatgaagtaagtatcataaaaatttagaaatgaacaatccgaactcacgagtggtcggcagggaggacggtcggctgcacgatgcccggaaacacctacctaagtccgaactgtctcatcacacgctgcgggcagtgaggctcaacgaaaatgtcgaacaccatcggcaggatggtgagccagtaagcctggtcgcgtgtgcacaaggacgaaagtcctagcggtgctctcgcagcgacggcctcttctgtgtacggctcccagataacgtcgctcggctggagacggtcaaactcgaacacgaagtccgggtaacctcgtctcacctgtacgtgagcgtaacgacgctgcaataaacatgatcggaattagacatgttatgtgaagaaaaaaaagaagacgactgataaacttataacgcagcgaagttgcactaaccccacgtcgacaccagtaagtccccatcgtgggaccgtcctctggccactgcgcgctgcgtccaaccccgtagggtgcgctctccaccactggtcgacctatggcaaacctctcggctgcccaaagctgaagcaacatagggcagccagcgatgatcgctcccgcgtcagtcttcgtgcacgcctcaccgagggcacggtacgtggctgctagcacggcagaaccccagctccactgcggcacgtcctgtggctgagcatccgcgatggaccgtgcgtagtggaccagccggaagtccacagcgtgcccgtgggtgctagtgaacatcacccacccgaacaaccacaacaggtacgcctcaagggagcgtcggaccgagtaatcatcagcatcagggtgcagaaggtccgcctacaattaagaatgaaatgttagtacaaaacactctgttgatcgcaaataagcatgtatgataataacaacttatttacttacagtgaactggagcaaccaagccttgctaggcccgactgtagagtacaggaggaagggtgttggccggtcctaggtgtggaaggtgcatcacctgctcgaagcgcgcagtgatatcctccttccacccaacaacaccgtccacgggaccaactggtgctcccgccagcggtagcccgagcaggtacgacacgtcctgcagtgtcggagccatctccccacagggaaggtggaacgtgtgcgtctcaggtctccagcggtctaccagagcggcaaggagtgaccggtctgcatcccaccgcttcgctgggtcacggtcgtccgccgccgcctcaacaagcctacaaagtggtagaaggcctgccgcacgcaacctgtgtagagcaaacttcaaacataagtacaacacaaagcaaagttgagttgaaatgtgaacatacgcgtaccaaggaacgtgacgggggtcgacacgcaaccactcgcgcgacgtgcgtggacggaaggtgccgagctgtgcaccctcgactgctgacaggaatgagctgtggttcctgtcaatcccacggttcaacagcgccggtgtgtcgtacgccatacagcatcaaatagattggtcagaaacatataaataattagtcaacataaataataaatgttcataagcgaattactaa

SEQ ID NO: 8053 - DNA, 5675 bp, Oryza sativa
ggccgaatgggccgcgaggagaggagagggagggggagggagatgggccgggccggcccaagagggagagggagggaaaggggactttttagagtttttctttttataaaatcattttaactttgtttatttcttaataattattatttatactctgaaaattccactaaaatttatttacgcattttaggcttttaggaaatatacaaaaatcccccaagccttatttgacttttaactttgcaccttttaattgttggaggctttcacacggattttaattattctaggcataatttagaggatgtattttagagtcgttttgggacgtgacaggcattaaaaggacgatgtatcttatgggtcaagctgtacaacctagtgttaattaatctattcgaatagccgcgtccgcggtcatggacatgctcaatgatatctcatgaggggtagtttgtgaaaactggaaatgaactgtgtgcaggttaatgaatatagctatgtggtcctgtgtggacgaatcctgtgtggatggatagttggtaatacccattatttataactattgttttaaacctgtttataaattgattataactgcaaattgctgtgttatacaaaatagccattgcctttgttgtcagctttgcatatgcatatttctgtgtgcttgctgagtattccatgtactcaccttgcaattcccccaattctagaagaaaggttcccgctgtttcctgaggagtttgttgctgaagacgaggaataggtcgtgagtcccagttgactgcctgtggcaagttgaatggagctactacgcatttatcatatttccgctgctactttaatattgtccttaggccctttgtggcagaataattgtaaactttagccataaggcttaacacagtcattattattgttaaatattaggattccttcgtgatgttggctgtgatattatcgttgagtctgtgtgtgctagcttgatcctggactagcacttatacacaagaggtcctattttgggtactcacagttttcgataggtttatttttagcagatttatatattagttaactgcaaaagaatgagctagctaggaagagaagaagagaaagaagggtagtttggtaattcgtccgagggatagatgtatgttttatatatgcagatttttggttagctttaattatcttgttcaaaatatttgaactaactaaagttgtattattttttccgcaattaattaattaatacatagatggcggacagggcatgggtgaataaagagagatatcgggcgtcatacattgaaggagtcgacatattcatgaaagcagctaagaagaatgttgcatctaagaagaccaaagatattagatgtccatgcgtgcattgcaaaaatcagaaaagttggaacgatccatctgtaatcgagcaacacttggtcacacatggatttgttgagggatacacaaactggtcatatcatggagagatcccaagcaagcaagttccgaaccaggctacagtacacgacgaagtgttgagctgggacgaggatgtcattgtagtagctaaagaagaagaagaagaagaagaagaagaagaagaagaagaaaaagtgcatgcagtagaacccgttgatgatgatgatgttgttggtggcaatggtcagcacagtacagttgatgatgccgatgatggtaatgtcagcgtagatgttagtaattttgcatatttgccagagatgttgcgtcatgctgaacctgaggttgttgctgagtccgctcgtgggtaggataactttgatgcattgaaaaaggcagcgaatgatcttttgtacgatgaggcaaagggctgtgagaaggattccacattgttgtggacggtgcttgagcttatgagattgaaggccagaaatggttggtccaatagtagttttaacgacttgttggttctgttgaagaaactttttccgcaacccaactccctgccaacaagcacctatgaagcgaagaagcttatatgccctttgtcactgggtgtgcgaaagatacacgcgtgtgttaaccactgtatcctattccgtaaagagtacgaggatttggacagatgtccaacatgcaagagtagtcgatacaaaacaagccgtagccagtccgagagtttggatgttgcccttgacgatgtagaagagtccgatccatgcaaagacagtaacaaaaagaagattccccagcttgtcatgtggtaccttccggtgaaagatcatttgaagcgtttgttctcaaacccgagggatgccgaattgatgcgctggtatcatgaaaagcgaaaaaaagatgggatgattcgacatcctgcagatgcaagacagtggaaggaatttgacagaaagtatcataagtttgcagaggacccaagaaacgtaaggtttgcattgagcaccaatggaatgaatccattcaatgacttgagcacctcacacagcatgtggccagtactcctaaccatgtacaacctcccaacgtggctgtgttagaaaaggaagtatatcttgttgaccatccttgtacaaggaccacgacaacctagcaatgacatggatgtgtttctagagcctttgctggaggatatgcgcgatttgtgggaacacgggatccgagtttgggacgaattcctgcgggagtacttcacgctacatgcaattatctttgtcaccgtcaacgacttgaccgcactgttttccctattgggacagatcaagggaaagacgggttgcattatttgtgtagatggtactgtgtacaggtatcttaagggatcgaagaagctagtgtacatgcgacaccagcgtttcttaagaaagaatcactcgtaccgctcccaagcaaaatatttcgacggtactgttgagaaaggtgtggcaccagaaccatggaagggtgataaagtgtttagaatgaccaaaaatctgaaggttggttttgggaaggtaaaaaagaaggaaacaaataagcggaagagaaatgatgccgaagtgccagcaagccctagcgttccattcaagaagcactccattttctttaagtaccttccgtactggaaagatttagacatacgccattctatcgatgtcatgcacctagagaaaaatgtcttcgatagcaccattgggactatactggacatactaactaagaccaaggatggactaaaatcacgtaaggacctcgtggatatgcaaataaggaaagagcttcatcctgtggataaaggtaataatggaaaagtgtacctaccgcctgcgtgctacaccttgacaagagaggagaaaatggcattgtgcaaatccctacatcgggtgagagtgcctactggcttctcctcaaacattaaatgactagtgtcgatgaaagatctgtcgctttcaggctacaattcccatgactgtcatgtaatgctcacagtattcctcgccattgcaattagagcagtcgaaccagttcacgtaaagctggtcatcacaaagctctgttatttcttcaattccatatctcagaaagtaattgatcctgaagagttaggtcctctccggactttcgctatacagacagtgtgcgagcttgagatgtgtttccctccatcatttttcgatatgatggttcatatcgtgcctcatagttcatatcatgcctcatagttcgatatttttcttcaacgcctcatagttcatatcgtgccttagataattgcacttgggcccctatacctgcatcagatgtggcctttcgaacgatacatgtccattctaaaaggctacgtacggaaccgcgctcacccagagggatccatgatagagggatacacaaccgaggaggtcgttgagtgttgcattgattacctaaaggatggaaaagcaattggtttaccggtacctcgacatgaaggtagattatctaggaaaggaacaaaagggaagaaaagaatccacgacaatgactacaaaaaagtgaaagatgctcatttcactgtgctgcagcaattcgcaatagtggagccgtacatagagcaacacctgcatgaattacaagcaacaaatgtgggtcgatctaatagatggatcatgaagaaacacaagcatcactttactgaatggttcaagaacctcgatctaccagatggccataccatggaagaaagaacaattaaaatgctagctgacgggccatcaagtgtgtatacctcgtggcaagcatacgatctgaatggatacacattttacacaaaagcgaaagacaaaaggagtgcatgccaaaacagtggcgttcgagtagaagcaatcgacacaactgggcaaaagagcacatactacggattcatagaagaaatctgcgaactagactacgggccaaatatgcagattccactgtttcggtgccaatgggtgaaacacccagccagcgtgtctgtggacaactttaggctgacaatagttgactttgacaacgtaggccacaaggatgacccatgggtgcttgccgatcgggtcgctcaagttttctatgtgacagatccatctcatttgaagaaagacatagttatttcgggaaaacaaaggattttgggagttgatgatgtcgaagatgtcgaggcatacaatcaatatgagaacatgatactattcacagattttcgaaacaagatattacgcgtcgaagaatcaattggtgaatcgccgaagccatacatgagaaatgaaggtgtagggaaaagtgttagatgctaattcattatatatgtatcatgttggacgtatcgatgaattttaatgtactataatgcgtgacaatgatggatgagatgaatttttgtatatggaatatggtgacatgataattgttggatcaagaaatagtttggtataaatttatttgtatgcatgcattaaaaaaatatcaggcgcaaacattaaaaaatcatattttatttttttgataaattaatcatatttgtgtaaaaataaataaaattattttttcagttgagaatgacatgtggggccaaagggttttcgctggcggccggctttgcccaccgctagcgaaaactattttcgctagcagcccacataagcttgccgcaagcgaaaatgttttcgctagcagtcggcgcgttcctccgctagcgaatatgtcttcgcctataagtagctagcgcgcggctgaaaatttcctaagtcccagaggcgcgcgaaccctaaaatttgtgccgccaggctgccaaaatttcgagcgccgcttccagcgataaccacagcgcccgccactgccgccgcctcctccattcacgccatcctccattcggacacagctcctccattcacgcctccaccgcagccgccggctcctcctcttctcggcccgccgccgccgccgctagatccattaacgcctcctctccaccgccgccgctagatccagctcctctccgaccgacggccgccgcatcctcctcctctccgccgcctcctcctcgatcggcccgccgtctccaccaccgccgctgccagatcgagctccacctctcccccggctcctccttcctccacctcgggagttgtcgccaccaccgggactcgtccgccggctcctcttctccgccgccg

SEQ ID NO: 8054 - DNA, 4917 bp, Oryza sativa
ttgcgaggttgggtccattctttgtacagtaacatttccacacgaagctggcataaaaaagtgcattagaaaattattactgcaaacagtttaatacatgcaaaataaaaatcttgaaatataaacacacttctatagtatgtaaggaggctacttaaaaaaatatatttgtttggaacatctaatagatcaatcaattgtaaccttttgtagaaggtgagtatatgacatactcaacaagtcacgcagcaaatatgcaagtgcacaaggataccaaaggatggcatagtagggtttcatttgcataaacaacatttaacaaatatttcagaaattgataaaacaattaagtattaattaaacagtattaatccaacgctacacaacataccctgttgcctaggcccaaccattctgaacaaccatcccggctgcacagttctatctccagaccaggaatataccattccaaaccagaagctaatcaaattattaccagttataacatcttttattatgatgagaggtgtgagactaatcacgaaagacattgttagacccgcccataaccgcgggcacggctattcgcatagttttactctaatcagaggtgtaccactgtacccacaagacacagccccacatcatgtcaccatgtgcctcaataccaccacggtacctcggaaaggagctgtgacaataccccttgcataacacaatccaccgcaacgcaccattcctggatcataatcacccccttataaacaaggcatggactccccagcgacccctgtgggcttatctccgccacttctcagtctggtgccccgcaataaaccatgctatacaaaaggtaaagccgttgcccacgctggcttgtggttggcacggttaatgtttcacaaccgaaactcgtgaaccggtccttaattgtcatgagcacgactctcaaaaccacgtgctcacaacccaccattatcaggttttaattggcacattaattaattaaccaatcacgattgaccatcgtgagctatcattaagccatcattaaataatagtgagtcataagttatcccagtaatgtgctaatgtttctaagcatggctaagcaatcatatctaatatatctagttgaaccaatatataaagcccaactagtcaagttataataacccaaggtatcaaggaataaagtagtcaagaacaaaagggctataacaaacaataggttaattccacccaatgacattcgaaaataaatgcaatagttgaatagaaacaatagctttaaacgggatcaacatgctcaaagggttgtttgggatctgtgtgacttgccttgctggccttagaattcttcaaattcttctcctgcgaaaacggactctccggaaacgtcggaatctaagcagaaaagagcaaaatcaccaaaacagcacataaacaagcatgaacagtacatgtggatatttttaacatgtagatctcaattttagaaaaatttagagacttgaaccaactaaatccgagctaagatgaattagttatgaatttttgaagattaaatcggattaaaacacttatatggattttaattgaattatgacgcaataatgaattatttttgaaaaggaaaaagggatttattgcgtcagcggctagggttttcggtggaccgggcgcatggcgacggttcacggaaacgaacggccgagatcgatccatccaaaacggacggccgagatcgatcgggtctacagcggctcacggcagacggccccgatgacatcggcgatgacgtcaccaccggcggcggctcgggcggcgcaaactcgccggcgaacaacggcgcttcggcatgaacggaggacaccaggacgtagagggcgacgcggcgaactcaccggtgaccaaaacgtcggcggaagagcaacggacggcgacggcgacgaagaagaagcggcggcgaccttcggcttgacgacggcgacggtgctccggcggtcttcggcagcggcgaaggggcggacgaggacggcgacgacttggcgaccacaatggcgacctccccgagcgacgacgatgaccggaacggcggtggcgcacggctggagcgacggtgacgacggcggctcaaggttgcacggcgttagggcgcttccgacggcgagagacgaaagcaagggtggcggcgggtagaggagacaccgggggtccttttataggggcaaggaggcggcggcgagggcccacggcgaccggcgacgagaaggaaagttagggctcggagagagagagaccaatccgaatcgacctcgaaaccaacactttccaaacgattttagccggggattccaaaagagaaaaggtagaggagatcccgaagatcatttcccctctattgatttcaccggaaacggaaagacgcggccggatttggaaggagacggcggcgctagggtttcgggcggcggcggccagaggtagacgacgggcctgacaggtgggccccacctgtcagcggcagcgagcgcgcgcgagggcagctgcggctggacttgggccgacttgggccgagaaggagagagagcggttttgggccgactttcggcccaaagccaaaagagacttttaaaatcctttttcaatttaaattattcatgaaatgcaattccatttattaaaaatacttccttagctcaaataaatcccaaaaaaatctaggaattatagaattaagcaaagtatttaatgaaattttatctggtcccattttatattggaatttattaattaaaattagatcttctcttctagacttttaaaataaattctaataattccaattaaacgacaatttatatattttggatttttagggtgtgacagtacagttgtacacctctgatcagagtaaaactattcgaatagccgtgcccgcggttatgggcggtcaaccagattcaccgtgattattctcacccaagtctagtctaatggaattgaatagtctaggtggatggttgggcctgttgcaacgtggggtagcgttggacagtgggtggttaatattgattaattattacaactgttttactgctttcaactactatttataaatgctcgctctatgcaaacgaacctctatagctatcccttgttaattccctgcatcatacccctattccggtatgacttgttgagtacagtgggtagtactcagtcttgctctattttccccaaaccccagagtttgagtatgcgttagatggtggcttctccgaggagtaggcttcgtccgtgccgtcaaggatgcctgtggagtggtgttcccgctgcagtccaagtcaaggcttagctccagttatcttttaattttccgctgcatttatgtaagattttatgatgtttgtaagacgtggatctgtttgtcaactttgtcgtttgtgtacctcggccggtcctagacgggggttttaacgcacattctgtttggaatcctattcgggaatttctgggcgtgacaagttggtatcagagccgaccttgattgtagtacaagccaaatggaaaacctaagagtctgaatccttttcattgcacacgttctttgcaattggatttgttcctgtggttcaagggaaaaatcttggtcgcttgttcaagtgagatttgtcaaatcaggtcagtctagggttttagtaaaattatttgagatttatttaacagttagtcgggatttgatgggaggagtgcattaggtgctaactaagagatgtgggttgcaagttatttatgttcctattgttattgttattattagtatgtatctaatttctcattattttatcgctatgtaagtccgtctcacttattcgctctcatgcaaaaatgatctatgcataaaattccgctcttattcgcttattttatttgtgtcctttattgctttatttaaattggatttgagcatgcattgatcctacccctttgccttctctagatggccgaccacccacccaaccaccgtggagaaggcatggatgattttgtggctgaattggcttgcatgaccttggtggtgggctaccccaacgcgccagagtactcaactgttccaccgctcagtggcgagcttcctcaccgtgttcgtctggaggttcatggctatgtggacacctgccttgctaatatggtggttcaggcatctggaggcaccgcagatcacgcctgtcaggaggcagcatatctggtgatggccaggcttcgtgatcgccacaactacactttctgcaacacggcgtaccgcttccaccctcgccgagcaagcggtgatgacgtcagcacctttcgcccgacggccggcgagaacgacaccaccttcggccacatgtgcgccgtgatgaggggaagggacaggatgcactctgacctgcacaaggcgtccaaggccttgaatgatgggaagctcgtgaggatcatagctctgaaggatgagatagcacgcctgaagaaggaaaacgctcagttgaagggtttcccagcgccaggaggagtccggatccgcaccacgcccctcaagttgacgactgtacccatgcgcattcagcttgcgcctaggaacccacctcctcccgcagctcctccagtacctccagcagttcttgcagtgcccgcagctccagctccagccccagctccagtcccagtgtcagctcctgcgtctgctctctcctttgctccagcgtcagccgctaggggtccagccagtggcaacggaggttggttgcctgctactcccagtggcagccgcgaccacagcagcagcagttctagtggcacagagccgggcaccggcgagacgtatctgccagactccaggagccgctcagagggacctggtgacgagcagga

SEQ ID NO: 8055 - DNA, 9398 bp, Oryza sativa
gatatgggtgaggcagtgggtctggcggaagggcaaaccaccccggcgccgtcggaggccgaggtcgagttcggttccggcagcggagaaggggccgaagtcggctccggcggtggctccggcggctgatccgagtgggagaagcacgatacggaggcggctccggcgaggacgcggcgtagcgccggcagcggggcggaggagaagcccgtgaggaggacaaccgccgcggtggggaagaagaaggacggccgcgggctgaggtcgatgtcggttccggcagcggagaaggggccgaagtcggctccggcggctgatccgagtgggagaagcacgatctggccgcgtctccggtgaggacgcggcgtagcgccggcagcggggcgtggcggtggggaagaaggaggacggccgcggcggctccggctaggacgcggcatagcggcggcagtggggagcaggaggatcgagcgaggaggacggccgcggcgggtccggcaaggacgcggaggagcggcggcagtggggtgtcgctcctgcgaggacgcggggggtagtgagcgaggaagagaggcgcgcggtctccgcggccgcgggtggagaaggagcgctgtcttcgcgcgtggaatcctcggctgtgaaatcgtgcggtggagaaaacttgcgcacggatggacggtccagattagtccggatgatttggcctagtattggaggggaagtaactcctactttttatattagctaaatatttcaagtgtcatatgctacttaaattgtactttcaatagcacagctaagaatagcaagtgtgttatcccaacatctattgtgatatcaattgtattgcacttccaattaaacatgggttttcaaaatgtttcatgctaaatcgcatagttccatggcattctttcttaactatacttatgaaattatattgttttgaaccctttctttctctcatgttgtcaatttaatttcatgatatattctcaactataacatgccactctctttagttgaaacccatggagaaggacctaaggtgattgtatcccgtatttagttttgtgttcagttgggcttatggaaatggacacatcaacgtttcattctttgtctagctggctgttgaggtacatttgagatatgtttttctactaatgtcagttttcaaatcttttggtcttccttctttcacaacttgacattggcaaagaaccatccgaaaaatatttctatagggaaatattgatctaaccatactttgttcacttcaataggacatagagcaatttttaaaattttaaagtttaggcactaatatattatcaatgaatgtggcgaaaatattttgatatattcttctcatagggagtagcttgcactaaactgttattagtgtaggcggttccttgggacaatcacctgcattaaactattgagaaaaccttgtctatgccaccgagtttactctagttcaacgatttgccattagctttgtctccctctataatgcatcattgactttatctgtttttttctataatatgctattggaacggatacttttaaaaaaatactcaaaatgtcgttcaagacctacaaaaggttacaattgattgatctattagatgttccaaacaaatatatttttttaagtagcctccttacatactatagaagtgtgtttatatttcaagatttttattttgcatgtattaaactgtttgcagtaataattttctaatgcacttttttatgccagcttcgtgtggaaatgttactgtacaaagaatggacccaacctcgcaataccataagtaagtcctacgagtttccacccacatcttaaggctacaaaaattgcttaccatcgcatccgtgtttgagctctgtctgcttctgctggccaccaccagtcaccaactattggcagtctttaaaccataaatataccagtaatattctaataaaaatgcaaataatagataggttccacaagtttcgatgtccccaatacattttgtaggaacatgcatgttaaagaaagagaatttcggctgcttagagctaattctaggtaggcattacatcaaccggaccgagacatggttcagccggcctccacagcccgagtgacctaattacctggtccaacaggccagagtaatccagccaacccccttccatagcacggctggccactcagctccattgagccaggcacagtagtagaaatgaaatgacggacctaaatttgtccgataatacacacttaaggtattcaaattccttagcaaccatatatggtctatatgtcacgagcctactcgataacagaatggttgtcaaccatcctgatatcatgaaattgcgctaagacatacagatcattactagcatcaatagcaccgaatttgatattcattacatcccgcaactcctttgtttcggtcatgtacatatacaccccaaccaaacaattgcaatgaatgctaagaatacatcccacgaagatagtagtgacttcctcaaatttcttctggttgctagtactaacccaaaagcatttcatagccatcaaccaatgagtaacccttatgtgccatctcgtgaagtgcatatcagtgaatttatgcggctttagtgcatcggcaaattaagctctagtaaaaccatagtgcctatagtaaggtttttggactattgaaaacataattgcatgtagatttaatttattccataaataaatcatgaggttaaaagaggtaaactagctgaaccaagtcagttgatctggacttgtatacaagatagctacgaataacaaatcaaacatacgaaacatgattgagatttaccgatggttctgtttcgattgtggaagaggatcagcttgaaggggcaaaccagctagcagtcacatagagcgcttccaagaaaccatattggtgcctttttcctactgtaagtcatcaaaggcaatggttccagagactttctctcctggtggcgcggtatagagaaagtggcaaaccctgattgttttttgtgtgtgctacgtgcaggcagcaactccgtatctatagagataataggacatctacatgatctcgaaaatacgtttctttgcataagtggatgttgataaccgttaaatacaaatttcgaccaccaactatcacaataaacaaagggagaactaacatttcttacatatatatcatttacaaataatgtagttccacttatattgtagaaatactatggatgcagggattatacactaaagtgaaggagaattgagccggcatgcaaagaaacacacctctagcgaacacacgtattgaggggctcacaagtcagatcaaactgacctaaagttgggcctaaccaccaggaacaaaccaaggagcccacctgttagccactcaccaaaggcggtgccaattggcgttgggtctggtacattcgaaccctggttcggctgaaccaatcgtggtgcccccatttcctcccttctacgtggtgatcccttgttggctcctgatggcggttgtggagttaacgacctcctcaaccatcataagccagctataaacagagatcacctcttcactctcaaagcacacactcaaggtgtaaatctctcactccataccttgcattctctctagtagcagtggagttaggttatgagtaatctttgagcctatagtcttcttggagattccggtatgtctttggtacttcacctttcttgtaagactatagttgctttaatagaattatcttctttattctattgtgttcatagttgatatgctaattcattagttatatgctctatgaatagattatacttcatttatatgattcacttgattagattagtcgatctatgctatggtaatggtccagtgaccttaacgggttgcactagttctaacttgtccatccgaagggtgggagtgccaggggaattagtgtcattatttagtaacataagcatggtgcttaggtcagcaaaatgttgttggatgcgggtatgtcccacggaaagtgaggtagatgagaggtggtgacaaacatgtccgtcctttgtgttcctccacatctgggtatgatgtaagagttcgtaaaatgccataaccacgctggcaaaccaacaaggagtggtctctcggtagtacctaggtgcctagaactaagtcctaaccttctaagcatgtatgtattaagtgtaaactatacattataaatacaaaagtacatttaaaccatagatctctttagttcttctccactacctagtgtatcatttttagagatgaatctcctatgtatcacactacccttatccatactatcaattaacccctatttagaaaagtaattatagcttgattaaggaatgcatgaacttatttttttacaccgccgcttttcctgtgaaaagataaatgtgatacccttggaatactccttgggtgaaatgctacatatgtatccatgcgcttgcggatttatctaggaccttaagaaataccaacagttgctctaaactatcctaactagatgtcgttccacacactagaaaatccaatccgcacaaatcacactaacctatccagactacacgtcattccatgcaccggaaagtccgatgtgttttcaaacaccgaattacgcagcaaaacaaaattacaaaatgaagttgcgtctctgcaacaatgaggggccaattttggcatgtgcattcatctagttctcaccactacaagtttctaaggggcgaggagaacactctttgacggaggtaccgctctcctataataggcaatgtggtactaaagatttacatgcatccattcttttaaagtgggcatttatgatatttaaagaaattaatcttcatatagggtcttcatccacatatcaattccaatagcttcgagcagttttgcgaagtaaaacgcaaaatctttgctataaaccagtcacatggctatctgttagcaaaaacaagggaaacttaatctgagccagcttccctcataaaaatagaaggatgagagattggttaccttgggtgagagaaaacaatgactctaccatctagtgtcattgctggtacactgcagaaatagggaatgttccaactgaacaataagttgatctgaggcaaagtaccagtagctatggtgaagcacttggacagatttgacatctctcaagaggagagagagggtgctgatttcaaccagcagcaagccaaagggcgaccggcaggtgatgagcctcatgtggtgggattaaagcacggtggctaccattaaggttttctttttcttttagaacgactagtcctctcacgcatattcctttactaccaaagtaacgcatatacgtggaccttttcagcatacttcttttcctctatcaaaaagccaataccgacgctcgcttatcagcgaagttctatcgatagagcaagaaaaaattacaagattacaaccagaggagatcataaccagaaaaacgaaaaaagtataccaccacctacacaccgacagcgccaacacacagacccaagagaagttgctaccattaaggtgaacccttcagttttgtttctgtgcttcctagatttgtggcataacgaacgtttgggtttctgactatacatgcatgctgaagatggccaattcttggtttcctgctggcagttcgttagtgtacctctgggttaattcggccacattttgggcctggtttacaccaatggtggaaaagaacactcatctagcggttcacatcaaagatagatcatgttgatccaacggctaacacaattttgatgatgtgccaaaccatggaggatgctttatagtaattaatactttttagaagaaagggtaagttgtttcttttttccgttcaatcaagtctttttttttatttttatgtttggaattatggttggtcgatccacaacacatctcctgaacataagcacccggagactggcatctcataaagatatttctagataacacatattggttagaacaaacatatcaggtatcataattaatttcagtcctcagctgctcgatgcagtactttttttttttgcggggaagctcgatgcagtatatgattattactgatcaatcacttgttaattgtgaacctctgtgcacctttggtggtgtgcagtttggtaagcatccctcgagtgttggatagcagagctggtccagcgaacagcaatagaacccaccacgggtttgaacgcaatgatccggtttataatcaagtcccagaaatccgtttctgccttttactcccatcagcaaatcacttctgatcttgtttgtgttttgacctattgatgtataagaagtagtatgtttatcatgccggtgcaaagaaaatgaggaaaataacacacaggtaactgaaaaagcaatccaagtttcgaaattaattacctcttatttgtgcaggaatagcagagcacaccagaagaaccaagaaaaataacataactccttggtgggtgtaagtcatacattttgccattgcgtatgacgagttactaatactatgctacttttcttgttgtgactaataagttcagtgagatgagtctgcatctcaggagccatgggtcacacatatatatagaataacaagctgttatgtatggaagaacttaatgattatttactttcatatcttgaggattttactctataagattctggtagattgtcctgagatatagctctaatagcacgtccgacaatgcactatatcttatccttgtctgatttgttattaaagccattttggatctcgtagattatcctaattaaaatctactttctatagcatggataaatatatcaggtatctattgctacttaaattgtagtacttttgatagcacagctaaacatagcaggtgtcttatcccaaagtctattatcaattactccctcattccctaaatgtttgacgttgttgactcttttaaatatgtttgaccgttcatcttatttaaaaacttttgtgaaatatttaaaactatatgtatacataaaagtatatttaacaataaatcaaatgataggaaaagaattaataattacttaaattttttgaataagacaaacggtaaaatatttttaaaaaagtcaacggcgtcaaacattttgagatggagggagtacattgcacttccaaacacgtgttttcaaaatgttccacgctggtttatgaaaatggaaacatcagtgttttattctttgtctagctagctgttaaagtacaaattcccctataatattatttggggtattaccatttactaatgtcgagttgcgtattctttggtttccttcttatgcacaacttgtcattagtgaagaaccatatgaaaaatatttccatggggaaacattgacctaacaatataaacattgaccaaaccatgatttgttcacttcagttggagatggagcgattttgtatgaattatcaaagtgttggtattatcaaagaatgtggaaaaaaggtttccataggtagtacaggcagttcatcaggacagcggcctgcattaaattattgggttattagtgctagcggctccttaaaaaaaacgcccacactactttttcaagcgattgtcatacttgctgaattatcctccgatggatattataactacgaaaattaaccaacacccactgaacataaactactcaaattttctgtcgtttagtcagaagtgatcgaaataacgaactctagttcatagatgactaggagtagtttggttgggagacgattcgagtttagaaccagcctgtgcctgcaggagtgtcttcagaattttgtagtgattcttgtatctttccaagtttgtacatttcagtcaatatatttcctagatttcatatttccatgtatctttttttgtaattactttctctgtgtatattgtgtgctgaattattcttcgatcgaaaaattggttgttcaccatgtgtattagagtaggaatctgtggtttagagtttacaagcttcttgctcattcttagttcacctagctaagtcttggagtcttctgttttgatcgttgggagtactttcgtgtatgaccaaggcatagtggcctggccatatagttccaaggaaggttaactagacaaacagacgtacgtagtcggcagggtggtgacagccccatcatcctttgtggttgtccatggtaggtcaagtacgttggcattagagatcagggatcccagctcaccgattgttggaacatgtcccctgtaataccagtcatgctgagataacttgagccaaaatacctgggagtcagaagactcctatgaaactcctgaactagatatgtacgttcgccccttataaactcatttgaaactcccgtgttatatatcatatatgtattataaaggatcgtacccccgcgtgtggatagtataaatatccttagacaagcaaggtagaaagaaggtaacattataagccatccatgggtccgtgtggagaatataaatatgataccccggaataatccgaggtaaagtgctaaatcactaattgcgtgcgcttgcggaacatttttatgaaagcagcatttctagtatcattgttgtttgtacttttaaagttgccttgataagtcgaaacttgtgtattttcttagcaagttcatgctagaaaccaggtgtccctacctatgcccacggcatcaaccatgataaaccaaggctgagtttctccttattgagaaagatagtttcttgacgcggcgtgccaacttgcattgcctaatctgacacagtcagcaacagggcaccttgacatccctgtacccgcaaggtttgcttcttccttcttcttggcctcttgggtgctcatcatttcgtagagtagtgaccaaattcattatagttaaaatagcggatatggatcttgccacggccaccaccacctaaaagcctgcataatctttgcgtggttggtcgctacaccaccctttgcatggaccatgccacgccctcgactgccttggtcacggatcccactttctgtaggagcttttttctttcaggttgatagtaagtggatgctgttcttgaagcacacctcccactgggccagagtggcagagtgaggagcacctggatgtccgcactcatgccgatggtgatactcttctcgcgtgcgttctcctcgaacatcttcaggtgctgccgatcatcaccttggtatcgaatagcttcctcactagtgaagtgtcactcagggtacccccaagatggactagcacactgacatggccgt

SEQ ID NO: 8056 - DNA, 9759 bp, Oryza sativa
ggttaggttgtgttctgatgcaagatgggaaggtggtttcctatgcatcttgtcagttacgtccgcatgagaactaccctactcatgatcttgagttagctgcagtggttcatgcgttgaagatttggcgtcattatcttttcggtactcgtacagaggtgtacacggatcacaagagtttgaagtatatctttacccagccgaatctgaacatgagacaacggagatggttggaattgattaaggattatgacatgggaattcataatcaccacggaaaggctaatgttgtagcagatgctctcagcaggaaaggctattgcaatgctacggaaggacaacagttgccatgggaattatgcaaggaatttgaaagactgaatttgggaattgtcagtagaggttttgttgcaactttagaagcgaagcccactctcattgaccaggttagagaagctcaaatcaatgatcctgatattcaagagatcaagaagaatatgagaagaggaaaggctatcgggtatttggaagatgagcaaggaaccgtatggttgggtgagagaatctgtgtcccagagaacaaggagttgaaagatgcaattctgaaggaagctcacgacactttatactccatttaccctggtagtaccaagatgtaccaagatctcaaggaaaaattttggtgggcaagtatgaagtatgaagtgtgagatagcagagtatgtagctgtgtgtgatgtttgtcagcgagtcaaggcagaacatcagaaacccgcaggtttgttgcagcctttgaagataccagaatggaagtgggaggaaatcggtatggatttcatcactggtctacccagaacgtcatcgggccatgactctatttgggtgatagtcgacagacttaccaaagtggctcatttcatcccggtgaggacaacatatttcggaagccgtttggcagaattgtatatggcaaggattgtgtgtttgcatggcgttcctaagaaaatagtatccgatcgaggtagccagtttacttcaaagttttggaagaagcttcaggaagagatgggttccaagttgaacttcagtaccgcttatcatccgcagatagacggacaaaccgaaagggtaaatcagattttggaagacatgttaagagcttgtgctttagacttcggtggaagttgggataagaatctgccttatgcggaattctcgtacaacaacagttatcaagctagtcttcagatggctccttacgaagcactgtatggtcggaagtgccgcactccgcttttgtgggatcaaacgggagaacgtcaggttttcgggacggatatcctgagggaagtagaagaaaaggtgaaaatcattcaagaaagattgcgagtggcccagtctcgtcataagagttatgccgacaatcgccgcagagatttgagttttgaagaaggagattatgtgtatcttcgtgtcacgcctcttcgaggagttcatcgttttcacaccaaagaaaaattggcaccgcgttttgtgggaccttataagattgtcagtagaagaggagaggttgcttatcagttggagttacctcaatctttggcaggagtccataatgtgttccatgtgtcgcaattgaaaaagtgtttaagggtacctatcgaagaagctaatcttgaacaaatagaagtccaagaggatctgacctatgttgagagaccaatccgtattttggaaatagatgagagaagaaccaggaatccagttatccgtttttgtaaagtccaatggagtaatcattcggaagaagaatcaacttgggaacgagaagatgaattgaagtcagctcatccgcatctgttcgccagttcttccgaatctcgaggacgagattctgtttaagggggtaggtttgtcacaccctaaaaatcctaaatatataaattgttgtttaattggaattattagaatttattttaaaaagtctagaagagaagatctaattttaattaataaattccaatataaaatggggccagataaaatttcattaaatactgtgcttaattctataattcctagatttttctgggatttatatgagctaaggaagtatttttattaaatggaattgcatttcatgaataatttaaattgaaaaaggattttaaaagtctgttttggctttgggccgaaagtcggccgaaaaccttctctctctctccttcggcccagtcggcccagtccagccgcagccgccgctcgcgcgcgcgtccgcccgctgacaggtggggcccacctgtcagtcttcgtctacctctggccgccgccgcccgaaaccctagcgccgccgtctccttccaaattcggccgcgtctttcccgatccggtgaaatcatttgaggggaaacaatctttgggatctcctctaccttttctcttttggaatcatcgtctaactcgctttggaagttcatggatttgaggtcgaatcggattcctctctctctcccgaacccgaagtttccttcgcgtcgccggccgccgtgggccttcgccgccgccctccaacccctatataaggacccccggtgtctcctctacccgccgccaccctcgccttcgtctctcgccgtcggaagagctctagcgccgtgtgacctagcgccgccgtcgtcgccgtcgctccagccgtgcttcgccgtcgcttcagccgtcgccgtcgctcggggagatcgccatcgtggttgccgtcgcgtcgccgtcctcgtctgccacttcaccgtcgctgaagaccgccggagcaccgccgtcgtcgtcaagccgaagaccgtcgccgcttcttcctcgtcgtcgccgccgtccgttgtttctccgccgcttctttggtcaccggtgagttcgccgcgtcgcgctctacgtcctggtgccttccgttcgtgccgaagcgccgtcgttagctggtgagtgtgcgccgtccgagctgccgagccgccgccgatggtgacgtcatcgccgacgtcatcggggccgtctgccgtgagccgccgtagacccgatcgatctcggccgtccgttttggatggattgatctcggccgttcgttcccgtgaaccgttgccgtgcacccggtccaccgcaaaccctagccgctgacgcaataattcccttttccttttcaaaaataattcattattgcgtcataattcaattaaaatccatataagtgttttaatccggtttaatctttaaaaattcataactaattcatcttagctcggatttagttggttcaagtttctaaatttttctaaaattgagatctacatgttaaaaatatccacatgtactattcatgcttgtttatgtgctgttttggtgtttttgctcttttctgtttagattccgacgtttccggagagtccgttttcgcaggagaagaatttgaagagttccaaggccagcaaggcaagtcacacagatcccaaataaccctttgagcatgttgatcctatttaaagctactgtttctattcaactattgcatttattttcgaatgtcattgggtggaattaacctattgtttgttatagcccttttgttcttgattactttattccttgatactttgggttattataacttgactagttgggctttatatattggttcaactagatgtattagatataattgcttagccatgcttagaaacattagcacacttttgggataacttatgattcactattaattaattaatgatggcttaacgatagttcacgatggtcaatcgtgattggttaattaattacttgccaactaaaacctgataatggtgggttgtgagcacatggttttgagagtcgtgctcatgacaattaaggaccggttcacgagtttcggttgtgaaacattaaccgtgccaaccacaagccagcgtgggcaacggctttaccttttgtatagcatggtttattgcggggcaccagactgagaagtggcggagataagcccacaggggatgctggggagtccatgccttgtttataagggggtgattatgatccaggaatggtgcgctgcggtggattgtgttatgcaaggggtattgtcacagctcctttccgaggtaccgtggtggtattgaggcacatggtgacatgatgtggggctgtgtcttgtgggtacagtggtacacctctgatcagagtaaaactattcgaatagccgtgcccgcggttatgggcgggtctaacaatgtctttcgtgattagtctcacacctctcatcataataaaagatgttataactggtaataatttgattagctcctggtttggaatggtatattcctggtttggagatagaactgtgcagccgggatggttgttcagaatggttgggcctatgcaacagggtatgttctgtagcgttggattaatactgtttaattaatacttaactgttttatcaatttctgaaatatttgttaaatgctgtttatgcaaatgaaaccctactatgccatcctttgttatcctgtgcacttgcatatttgctgcgtgacttgctgagtatgtcatatactcaccttgcaatcgttcatcagaggaagagttctacagtgaagctgttggtgtggaggattaggtgtaaccctggtcaagctgcctgtggagtggagtcgtctgtgccgtttatcttatttttccgctacttagatctttattgattgagaggaactatctacctctgtaatgacattttattcgcttattatttagagtaataattgaactctattatcaatttgttattgtgtgcctcggctgattcctggacgagggttcacacacatgtaagcgtttggaattttggatagaaattccgggcgtgacaagggaataagaaaagaaaaagaaagaattgaatttccagagattaaataatgcttgtgctcatttttagttggttaaaattatttctagagctctgaaaattccactaaaaatcttgttagcatatttcgacatgtagaactcaagaaaaattccacatgccaatcccaattattatttgcattaatttattagggtttctctcttacttttacaccgatatttcctctaggtaatttataaattcaatttaggcttgggaaagaacttcagggtttgacaaacctacctcccttaaacggaatctcgaccccgagattcggaagagctggcgaagaggtgcggatgggcggcctttaactcatcttccctttcccaggttgcttttttttctgagtgatggctccactgaaccctgtagaacctggtgaccttgtttctagtccttctttcactggtctcaaggatacgaactggcttttccacataagtcagatcttcttggatgtcaatgtgctccgaatcggcttgttcttcgggtaccctcaagcacttctttaactgggacacatggaacacgtcatgaatgccgatcatgttggatggaagttctagctgataggcaacttctcctcttcgttccaagattttgtacggtcccacgaagcgtggtgccaacttgcctttcgtctggaaacgatgcactccccggagcagagtaacacggaggtacacataatcccctgcttcaaaagtgagctcccttcggcggttgtccgcgtagcttttctgtcgagactgggcaattctcagtctctctctgacggttctgactttctcttctgcttccgttagcacttccgttccgaacatttgatgttcgcctgtttgatcccagaagagaggcgtgcggcacttccggccatacaacgcttcgaacggtgccatttgtagactggcctgatagctgttgttgtacgagaattcagcataaggcagacttttatcccatgccccaccaaatcgagcgcacacgctcgcaacatgtcttccaagatctgattgaccctctcggtttggccatctgtctgcggatggtaagctgtactgaaattcaaacgggtccccaattcttcctgcagtttttgccaaaattttgaggtgaactgattccctcgatcggatacaatcttcttgggtactccatgcaaacacatgattcttgagagatagaactctgccaaccttttgcctgtataagtagtgtgcactggtatgaaatgagcaaccttcgctgtcggagatttagatcaggttgggtgaagatatatttcaaactcttgtgatccgtatatacttcgcagcggttgccaatcagataatgcctccagattttcaaagcatgaaccaccgctaccaattccaagtcatgtgttggatagtttccttcatgtgggcgcaactgcctcgaggcataagcgaccactctgccctcttgcattagaacacatccaagcctgtgacgggacgcgtcgcaattgacttggaagtccttcatctgatcaggcagaatcagaactggagcagacactaatttcttcttgagctcctcaaaactcttgtcacactcggccgtccacttgaacttttcttctttcttaagcaactgagtcataggtctggcaatcctagagaaattttcaatgaaccgacggtaataacccgcaagtccaaggaaactccgaatctgtgacattgccttaggcggggtccacttggtaactgactccacattcgacggatcgactgccacgccctgagctgtaatgacgtgacccaagaatttgacctccgataaccaaaagtcgcatttactgaacttggcatataactggtgctccttcaacttctcgagtaccagacgaagatgttgctcatgttcttcttcagactttgaatagatgagtatgtcatcaatttataccacaacaaacttatccagaaattccatgaacaccttgttcatcaggttcatgaagaatgcaggtgcattggtaagtccaaaagacatgacagtgcactcatacaacccataccgagtggtgaaggctgtcttggaaatatcctcttcccgaattctcaactggtgatagcctgatcgcaggtctatcttagaaaacactttagctcctttcagctgatcaaacagatcatcaatccacggtaaagggtatttgttcttgattgtgacctcattgagcgcgcgataatcaacacacattctcttcgtcttgtccttcttctccacaaaaatgaccggagcaccccaaggtgaagtacttggtcgaatgtaccctttctgcagttgctcatcaacctgcttcttgacctctgctagctctttggctgccatcctgtacggtctcttgtaaattggagcagtccccggtgccaaatcaatccggaattcaatctctctcttgggtggcatggtagtgaggtcttcggggaacacctctggatactcgcagactatggggatatcttccaatttcctcgaactcttctcctcggtggccacagggttttccacctcaatctgatttaaggagattccctgcttcggtgagactggtgacttgtacaccacggtttctcccttctcattggtcaaggtgactatgcaattcgcacaatcaatgactcccttgaacttggtcagccaatccatcccaagaatgacatctaggtctttggattcaagaaggatgaggttggctagaaattatgatcggtgtattcctattagcactgaagggctataactgaccgaggttgaactatttcccggggtatgaaccctcattggtgtactaagctcttcttttcttaacccatgcatcccaacaaacttctttgaaatgaacgaatgcgttgcaccagaatcgaaaagtactgttgcagggattgagttaacaggaaacgtacccagtatggcctctggtgctgcttgcgcctcttctgtggacgcgtggttaacacgggcttaagcaaaccttggcccggcacgccttggcttcggacacttgtcaacaaagtggccatgctcgccacagttgtaataggaccctggctttgttccaatctccttcttggcttgggctaatggagctgactgtgctggtgccattggtgggcgcggagctgcactgcggttgggctgacctccctggtggctctggctgccacttgcgccctggtggaaactgcttgagtttaacgggcgatgctggcggacaatcatggtggtaggtccaccctgctgtccgggtgtgaagcgcggtcgctgatggcttccttggttggaccggaactgagctacctttctcttcctgtccattttgttacattgatcctcctgacggattgcgttgtctaccagcttctcgaagtctgcgtaatccctggagatcaactggatggtcagttcgtcatccaggcctgctaggaacttctcctgcttctctgcgtcagtgcgaacattctctggtgcataccgcgctaggcgattgaactcatgcaggtactcagtcactgtcctgttgccctagtggagtgctcggaattccctcttcttctatgccacaaccccgtctggcacctgagccttcctaaagctgcgatagaattctgcccaagtgacctccatacctggcggacgggtagccatgtggttgtcccaccaagctgacgcgggaccctggagctgatgtgtggcgaaggcgactttctcctgatcattgcactgcagaaggttgagcttcttctctatggcatggagctagtcatttgcctccatgaggttgttggtgctggagaaggtgggtggcctgacgcgtagaaactccggcaacttggatagagggggagggggaccaaactgctgctgctgctacttggtttgctgctacatcctctggtgcatctgctggtgctgctgctgcatctgctgcatcatggctgccatcatctgagtctgatgagccattacttgggccagagtcggattctcggggagcggtggcggaccattgacggagtcgctgttgggatgcccaccgtcggtgcgttcttcgccgttgctgccctcacctgctgcacggctgccattcctggtgttgaccatctgaaggaagagcagacggagggggtggaaaagaagaaaaacagatgctcaggaactaagctttattttataggaatttaaactgcaattgttctgatcagaattaaaacacttaaaacagcaagcaaaatacttattaggatagccatatcataggcacatgatatcgaccgtcgactgacccacaagcgaacaaacctaaacacacaaactaacagacaaaaactaaacagtcgataaactaagggaaaacgtgcctaatgctcggaacggctcctgcggtcggtggagtcaaaggcatcctcctgctcgtcaccaggtccctctgagcggctcctggagtctggcagatacgtctcgccggtgcccggctctgtgccactagaactgctgctgctgtggtcgcggctgccactgggagtagcaggcaaccaacctccgttgccactggctggacccctagcggctgacgctggagcaaaggagagagcagacgcaggagctgacactgggactggagctggggctggagctggagctgcgggcactgcaagaactgctggaggtactggaggagctgcgggaggaggtgggttcctaggcgcaagctgaatgcgcatgggtacagtcgtcaacttgaggggcgtggtgcggatccggactcctcctgg

SEQ ID NO: 8057 - DNA, 8280 bp, Oryza sativa
cctcgtccacccttccgtttcggtcgccgaccgccggaacgccgtcgaccccgtcgacccgatccgcgctgtcgccttccctcgctccgaccgccttttttgtcgtcgccgtcgacctagggtgagccatggaccgccgcctcttttcccccttcccttcccctctctcggccgccgctccgccgtgcctatggccgccgccggcgaccataggggcgcgggcgctgcctcccgccggctgcgccggccttggccgccctcgggcgcgtcgagtggctgccgcgtggggcccggccgtcagccgcccgcgcccttaggtgcggctgacgcgtgggacccacggcgccggccggtgtgagcccgggtgcacccggtccaccgtggaccgtgaggctgccgcgtggggtggacccggtccgctcgccccctcccctcggctgacgcaataaacccttttaaaattaaaatttaaatgaagaaattcgcaaatattcatttaaagagcatataaacttcaaatgaccataacttggccatttgaactcggaattggaccgttcaagtctctaatttttccttaagaagtcaagaacccatttttgggctttgttcctgcttgttatatggagtttattagagtaaaagccttttcttttccgttggtcgtgtagacgctgcagcttcggaagatccgctcttcgtggaagttgaagccgacgtttgggaaagggagcaaggcaagtcacatcatccttgaacatattgaatcccagtttataaagttattttgatttaaattactgcattatcgctttatttaaattcccgcgttatcactgttttatctagccatgcctatgtacctttgttatgaccttattattgttattgttattattaccttgttcaccctagaataaacaaaaccccaactagtggacactctactcatggtaccactagtatgattttaggtagatgcttcgctggttaattaggcaacattaggtggttttacaactctagactttgggatattcatatcacctggacactatggaatggttggattattgtggaattggattcacacctccccctctattcaaaatcctcaaaatggttttaggctgggctcggggtgcatggttttgatagtagcacctcggccatataaggaccggtcttcgggcctctgttgcaaagcactaccgtacttccacatgtctagtgggtaaggcttagtttgtggctcagtctggttataaacaaaagtacacggatggagatggacgaagtcgggggtcgatggacatctctagggcaaaggaaggctacacgagctgcggcccggtagtcgagatgtcatggcacagggccggtgtcctgctgctaggggctcagtcctgcctacctgtcccggaggttccggccgtaggtggggttgggtcggtactcttgtctatggctaggatgggttggaaactatgtcacgtcttccgtccgtataccgtggtggtatgtggcacgtggttacacatgaggaagatgtgtcttgtgggtaaagatgtacacctctgatcagagtataatctattcgaatagccgcgccctcggttatgggcaagccgagcaatgtacccaagttagtgttttaattcttaaaacctgcttaacaactaaaatgtggaatggttggcctaggttggcttgggacgagctgggacccagggtcgggttgccagttcggtctgaatcatcgtaggccttgggttaaggcaggttcgtgtgggttcatggccttgtttaataatattgtatagctctaggatcgtatttacaaaatagctttgagcaactaaatgtcttttaatgttgtttgctgcaaaccctaaccctttatattataacccccttgtactcccttgcatttatcctgcacttgtgggtgtgtcttgttgagtacggtggttgtactcagtcttgctcaatttttcccaaacccagaagaggagcccctggatgaggaaggctttggtgtctagctcgtgcctgccgtcaagcgcctgtggtcgtcgccctagtcttccgctgtttcccgtttgtctttgtgtgtgctgggccttcgccgcccatgtaataaattaactatttacgcttccgcttgttaaactctgaactgtgtcaacttttggtgtaccttacctcccgggacaaggaataatgcacacacgtaaggaacgcccgttgggttaattctggtcgtgacaatgcccatgcacaagtgtcacacttcaggttgtgtgcggccaaaaatcctttcttatttgtaaaaatcctttagtctctctctgtcctgctgcttcatttatcgtcaaaatctgatctttaaaatgttgcttttctcttttgtttgaagatggccggcagcatcaaccgtcgtggtctggacctgaccggcttcgttttggagctgcggggcatgtgcgttgtcttagggtattcgcatggagtggactaccagggcaagcagctcccggagcaggagggtgacgatgcagagccccacgctgcttgggaggttactgtagtgatcctcactggctcacccgagaggacttcgttggcagtcaccgtgggtggagattctttctccgccgcttgccagaacgccgctctccttgccatcggcactcttcaccagctctacccggacgagttgcagcactcgccctaccgctaccaccctcgccgcggaggagcccgcgactacgccaccttccgggatgctagctcggaggatgacgctaccatcaggcacctggcacgcatggtggaggcgtacgacgcggcccgtatcgacttccatcagatggtgcgtcgcgggttggtcgagaacaacatgaagatcctggagctgcgtcaggagaatctgcagctgaagaaggacctagacgcagtggaggcgcagctgcgtcagctcaagatcgcccagggagaggtcggtcgccccaagtgtcgccgcgtctgccgcagcctgaagatcactgcccgcaagagtacctccaggcccgagcttgttcgtcagtccctggcgtggacctgcttcgtcgagaccccttgtgccgagcccgcgcccgtggttcctcaggaggatggagcctccggcgttggcagcacggaggatgcgctgctgctcaccttccgccctggcccgtcgcagcagtagacgagcagttagtaggcttgcgtgtgtgttcttctcgtttgtttttctgctagagtcgtatggggcatggttatgccggtgtgtggtataactgtgtcggagcctgtctttattttatttgcttaagcaacttgaactttaatggaccaatttaatagcagtaataaattcaagaattatggtagtcgtgggtggttagttttaattgtcagctctctctgtttgctggttctgggtggggttttcagatggtgacaaccaggagaagtgctgctaccggtgaaggcagtcaccccgaaggcagcaaccacaacaaccatggcagcccacctccacctcctccccctcctccaccaccaccaccagacaccaacgccatcctcacccaaatcctcgcccagcaggccaacatgatggctgctttcctccaccacatccaaaatccgccacaacataatgctccaccaccacccccacaacactctaaactcgccgagttcctccgcatccgtccacctaccttctctagctccaataaccccgtggatgcgttggattggttgcatgccgtggggaaaaagttagacaccgtgcagtgcagtgatgaggagaaagtcatcttcgccgcccaccaactgcaggggcccgcatctctatgttgggaccatttccaggctacgcagccaaaggggcagcctattacttgggcccgcttcaccgccgctttccggagaacccatgtgcccgccggagtcatggcccttaagaaaagggaattccgagagttgaagcaaggcaaccgctccatgatggagtatttgcatgagtttaacaacctggcccggtacgccctggaggatattcgtgaagatgaggagaagcaagagaagttcttggcaggaatggaccctgagctgtccgtgcgtcttgtctccggggactatccggatttccaacgtctggtggacaagagcatccgcttggaagccaagcacaaggaactggagtcgcacaagcgtcgcttggcgaatttccgcaaccaacagggggctaaccaaagggtccgctacaccaatccctatccagggggatcctccttgcagcagcaacagcagcaacaacctcgctccgcgccccgacctcaattcgtggtgcgtgtcccacagccgcagcaacagcagagtcagcaagggactcgtgcgccccgtcctcctacgccagctgtgcagcctggtcaaggccgccgggacgctcaaggtcagcagcgtctgtgcttcaactgcttcgagcctgggcactttgcggataaatgcccaaagccgaggcgccagcaaggccaagcgcctccccgctccaacaacggtggtaaggatgtcattcggggtcgtgtgaaccacgtgatggccgaggacgtgctgacaactccagacgtcatctttggtacgttccccattcattccatccctgctaccattttgttcgactctggagcttcccactcgtttatgtctgtgccattcgtggggagaaatcagttgggggtagaaaggcttaggaaccctctgctcatcaccacccctggaggggttatgacagcaaagtattatagccatgccgttcctatagaaattcagggaattccttttctctcggatctgattcttctagacaccaagaacttggatgtgatccttgggatgaattggttggctcaattccaaggagtagtggattgtgcaagacgcactatcactctgtaccgagggccggaacaaccggttgttttctttgcacccccaacctctgtcggcagttcagaacttcatcagataaaactgtcggaaatccccatcgtcagggagttcggagacgtgtttccggaagaactacccggtatgccgcccaagcgagagattgagttccggatagatcttgctccaggaaccgctcctctgtacaagcgaccctaccgtatggcagcaaatgaactggccgaagtcaagaaacagttggaagagttgaaagaaaaggggtatatacggccgagtatttccccctggggtgctcctgtgatttttgtggagaagaaagacaagacgaaagaggatgtgcgttgactacagagctctcaatgaagttactatcaaaaacaagtaccctcttccccggatcgatgatctgttcgatcagcttaaaggtgccacggtattctccaagattgatcttcgttccggatatcaccagttgcgcatccgtgaagaagacatcccgaagaccgcattcaccacgcgatacggactgtatgaattcacagtgatgtcgtttggtttaaccaatgctcctgccttcttcatgaacttaatgaacaaagtgttcatggaatacttggataagtttgttgtggttttcattgacgacattctggtgtactcacaattagaggaagaccatcagcaccatctccgtctggtgttgggaaagttgcgggaacatcaattgtatgccaaacttagcaagtgtgagttttggttgtccgaagtcaaattcttaggacacgtgatatctgctaaaggagttgctgtggaccccgaaacagcgaccgccgtcactgattggaagcaacccaagacagtcactcaaattcgcagttttttgggtttggcaggatactaccggaggttcatcgagaacttctccaaaatcgctcgacccatgacacagttgttgaagaaagaagagaaatttgtgtggagcccgcaatacgagaaggcattccaaactctcaaggaaaggctggtttcctcgccggttttaatcttaccggatactcgcaaggacttcatggtgtactgtgacgcttcgcgccaaggattggggtgcgtgctcatgcaggaaggtcatctggtagcctatgcctcacgccagctacggcctcatgaaggcaactaccctacccatgatttggagttagccgcggtggttcatgctctaaaaatctggcggcactatctcattgggaatcgctgtgaaatatatactgatcataagagtttgaaatacatcttcacccagtcggatctgaatcttcggcagaggagatggttagaactcatcaaggattatgatgtgggaattcactatcatcctggtaaggccaacgtggttgccgacgctctatgtcgaaaaagccattgcaacactcttaacgtccgtggcattccagccaaacttaatcaacagatggaagccctgaacctaagcatagttggtcgtggattcttggctacgctggaagccaagcctaccttgctcgatcaaatccgcgaggcccagaagaatgatccggatatgcgtggactcctcaagaatatgaaatagggtaaagccgctggtttcacagaggatgaacacggaaccctatggaacggaaatcgggtgtgcgttccagacgacaaagaacttagacagctgatacttcaggaagctcacgaaagtccttattccatccaccctagcagtacgaagatgtacttagacttgaaagggaaatactggtgggttagtatgaagcgggaaattgcagagttcgtggccctttgtgatgtgtgccagcgtgtcaaggcagagcaccaacgaccggccggacttctccaacctctccaagtaccagaatggaaatgggatgaaattgggatggatttcatcaccggacttccaaaaacccagggcggttatgattctatatgggtagtcgtggatcgactaaccaaggtggctcggtttattcctgtgaagaccacctatggagggaacaaactagctgagctctacttcgctaggatcgtgagtctccatggcgttcctaagaaaattgtatctgataggggaagccaattcacctctcacttttggaagaagctccaagaagagctgggtacccaattaaatttcagcaccgcgtatcacccgcagacagatggacagaccgagcgtctaaatcagatcctagaagatatgcttcgcgcatgtgtcctagatttcgggaagacctgggataagagtctcccctatgccgagttctcctacaataacagctaccaagccagcatacaaatggcaccctatgaagcgttgtatggacgcaaatgccggacaccgctattgtgggaccaagttggggaaaacaagtgttcggggctgatatcctgagagaagctgaagctaaagtcagaaccattcgggataatctaaaggtggcacagtcccggcaaaagagttatgcagataaccgacgccgtaatctggaattcgtagtggatgattttgtgtaccttcgggtcacgccattgcgaggtgtacataggtttcagacgaaagggaagctcgcacctcggtttgtgggtcctttccgtatcattgctcgacgcggggaagtcgcttaccagttggagctgcccgtttccttgggcaacgtgcatgatgtgttccatgtgtcgcaactcaagaaatgccttcgagtgccgtccgagcaggccgactcagagcagattgtagtttgcgaagacttgacctacgtgtagagactagtgaaaatcctggacaccatggagcgcaggaccaggaaccgggtaatccgtttttgcaagatccaatggagcaaccacgctgaggaagaacctacttgggagcgtgaagacgagatgaaggcagcccatcccaatctcttcgccagttcttccgaatctcggggtcgagattccgtttaaggggggtaggtttgtcacgtcccaaaacgactctaaaatacatcctctaaattatgcctagaataattaaaatccgtgtgaaagcctccaacaattaaaaggtgcaaagttaaaagtcaaataaggcttgggggatttttgtatatttcctaaaagcctaaaatgcgtaaataaattttagtggaattttcagagcacaaataataattattaagaaataaacaaagttaaaatgattttataaaaagaaaaactctaaaaagtcccctttccctccctatccct

SEQ ID NO: 8058 - DNA, 6823 bp, Oryza sativa
caagatcgccgccccaagaaaacctcccccctccctccccaacccgcgatcctccacacccaacaacaaaggcggaggagaaggtatggtgccctttgaaggcagacgaggatctcaaatccgaggcggagatcggagtggaggaggagagagagagagagagagagagaggatcggaggagaggtggagggcgacttggagttggtcgttcgttccaagaaggggaggagagagagagagaggcggcgctaattgtaagtaagtttgttgagaggagggaggcctttgggatgtctcggtttttcgttggattggatcatggatggaaggagggcggtgtgaggagggtggtgagtgagtgtggttgctttgcttgactgggtctggtctttcttgccctttgcctctctccaattctatcctaggcttccatcggttgccattttgcttaaaatggcttatttggtttattagaaaattaaagttaatttataagtaaaacttttgtagatttgttcgtagcgacttaaaagccaacattaacaaaaattacgttaaaagcatttcaaaatcaacttcaaaatcaagttcaaaaattcaaattttagcttattctttggctgtttaggccaaacgatggggctgctatactctcttttttttgttgttgttgttggataagaggaatttgtaatggttagttgtcttgaaattaactgttctgtagatataaaatatcatactttccaatgattggatctttcttgtctcgagatgaatttgaccaaattatcttccatgtgcttctttttcgtctttaacatcctaaatagtctacctgtcttgtgttaattttggtaccatccttattccaagcacagttatttgttatgtgttttttaataacgttgatataaaccttagcttgtgtccatagttctacatattgagttttttttaaaaaaaattggttaaaagttctctaaaaattaagttatatattattaattatggactaaaattctgcaaagacacttggcacgtgtatgccaccttagtaaacatggataaggaggaatgattgcacatgcaaggacatatgtatgagagatggaactaccggtgtgtagtaatgcactaatgcgccagtatcaatagaaattaaataattccggcaatcctagaataccaaggtctggctgatgattttctcgattgacttgagccaagagcatccagacttcttcacctggcatcgggagagccctggatgctactcgatgtgatctgcttacaatgcgatgttctttgagagtgtcaacttcccaacattcctaatttgggagagaaaagcccctagcgttgctagtactttgcatggttagttgctaactgacgatgttggatgaccgattggctgagtaagcgaggtttgcctcacccagccttaagtgtgctttatgatcaacaggaagaaacaattgatcacatcgaaacatgtatctcatcaattttggcagctgatcctgatcgccatcgggcatccatgcttctttgcaaaaaaaaaaactttcttcctctcatggtggtgtgagtgcaagaagaaagtaagcgggtagcttcaccgaggattcgacaccatcgtcactttagccacctggttgatttagaaggaaaggaacaatcgagtgtttaaccaatggcaacagacctagaccgaagtgacacgtgatgcggaaaaagatgtgctttggtgtgaagttgggctgctaaagtagcatcacaatatagtatcttggtcgcacaatggatgtcatgatagataatcttgtttacactttgtgtttatgtttgtttttctttttcacttgttggctgggttagcaagatgcacattaccctcttcttaatacaaaataaacacacatcttatgcatattctgcccccaaaaacaaataatttttgtctagaagcactgtagtttgttataaatttacaacaactttcaagcggactaatacttgtctcatgggcgggggtgctagcccttgctagatagatccggtagccttttcaaaattaaacctataaatgggagacctatcatgcacatgtgaggactaaaatagtaaagaaaaaaaaccctatgtcgattttgtttctaatttcgaataattctaatacgaatagtatacggaacgaaaatggtggtatgcacattgaggaaattcctatatttcttcctcacgcaacactccatcagcaacttaggtcttgtttgaggagcttctagtaacttctcttagaatctaaagttttccaaatactgcagattcttacctagcaatggtggattaggctcatcataaaagcccataaagcaattgaaccagcccaacaattgcatgttactgtgctacatgcacccagccatcccacacgtgcaatccccacctccgctccacccgagcctcgtattggtagttcagtggcattgtcttagcatctctcacccaagcgtgccgtgcgccaagccaaatctcgcctcccccctcctcctcctcgcccttgccctgttcgtcatcccactctccgctcccctctactgctgctccatggcccattcctcttcgcaaccattgtccctgtccccgtccacggtggtcgcacgcacgccactcgtcccggttctcttcgtgatcggcgactccacggctgatgtcggcaccaaaaactacctcggataactcacccgcgccgaccgcgagttgtacggccttgagttcgacactcgccacaacacggggcgcttctccaacagtcacatccccatcgactacatcggtatgtatctatgtatgtgtcgtccccttctcggcactatggctagctcgaggacatcctagctggtctaccgagcataaggcaaactggcgcgtgctaaccatgacagggtcccgatcatgaatttgttggcgacttcgatagggaatgatcactcttgcaatagctgaaaccccacttctccaacatgggctctcgcaccaatcttgatcaagacaacatcatgaccgcatattatggagagttgttgaaaactgatcgccaggtgtttgagactcaacttgaagaattgcttcaaaagatggcttcgtactaccgtaagacgaggcaaggcatcatcaagcaacaaaaattcatgttacccatccatgcaaaatcaaaggtaacaacgattctagcagtgcctattctaacatatgaagttgtgatggtgatgttatttctagtttaaataatcggtttacttctttgaatactacctttgagaaaacctttagtactaccttggaaagccctagatgatcacatgagtgagttagagaatcgactaaatagccggttccttggtggtgcatgtatttcatgcaacaacgagcatatgcatggtattccttcatattttcatataccaaaattttctgtacaacaagattggccgatgaaaaatacccacaattccctcgatacaatagatcctagattcactcctacgatactgtatgctggtccgaccgatgtgttattgctggtcagaccggacgcatcgatcggaccgacgggtgtaataccaccagtccgactagaggcagcagccgatccgattggagggacatcaccggtcagactacgctcggcatgtttcgtagaatcagctcatgtctggtgctcctctaaaagacattgacatgtggggtccacgggctgactcaacaagattggataaactgcctcctaaaccgttcaaggagtcaatttgtaatggttttgtgagttggaggataggttatagggatgcgattcaaccatgggcatgagttgagggaagcaaagtagacttagggcctgttcactttgatgaaaaaaaaaaccttaccaaattttggtaggcaacttgccaaaattttggcaggatttcttatatagttatcaaaatttggcagcaaattaaatatagtcacttttttggcaaatttactaaaatttggtaaggttgaaaatgacatcaaagtaaacaggcccttattacccacgggaatggtgtggggtgggctggtaatataagcccagaaaccaatccatccagcccagcaactgcgaggtcggctgctagtctaacgtgcacccaagccatcaccccacacgtgaaaaatccccgctccacccgcgccgcgccgcgcccaggtagttcagccgcgcgccaacccaagctcgctcgccggccggaaatggcgctccccttcctcctcctcctcgccttcgccctgctcttcccgctctccgctcccccgcgctgctgctccgcggcccccgcctcctcgccgcccccgtccccgcccccttcccctgcggcggcggcggcggccccgcgccgcacgccgctcgtcccggcgctcttcgtgatcggcgactccacggcggacgtcggcaccaacaactacctcggcacgctcgcccgcgccgaccgcgagccgtacggccgcgacttcgacacccgccgccccacggggcgcttctccaacggccgcatccccgtcgactacatcggtacgcgccccccaccttctcgatcggcggcgccatggctgtggcccctttgctctctcgtgaatcctccccccccccgcttcaaaggttgcaggtggttctggaatcgtcgatccgatgctgctttgcctctcgtacgcctatggatgcagcatgttgtgggtttagtgtaatctgggttttgggtttctggtatacgaaggttttgcttagttgttggttcctatgaatttggggcatctgatctcatacatcgggggtatgtggatttttgcccaacaattgctgaagctgaagagtaatcagttcatagcactctcctacacagctgaccacctggatctcacatacatagactcctgcggcttcctctccttgatctcacatagcaatgttgtgggtttagtgtaatctgggtatttgggtttctcgcatgcgaggggcttgctcagttgttggttcgtctgtgggtttctgccgaacaattgctgaagctgaagagtaaccagttttgcagcacaaccaccacagtctgggcatcatttgatcctgctgttcttagcactcctgcagagctgaccacctggatctcacgtatctatatagaatcctgcggcttcctctccaaatcagtatccagtatccaccaccgttatcagccgttgaggcaatgcattggcagaatgccagaacattaagaagtgccatcataatgtacaccattagtccatgcatccagaaaacattgccagaatcctgcaatgtatccatttgatagtcctgagtcccgaccagttgtctacatgctccagtctctttgccaccacacactgttaaatctctcttgtccaatgtccaccacattctggacagtttcaaggtcctcacaggaagcacagctgcacaacctttgttaatgttgctttaagaaagtcatatctactcattagtttctttgggagagtaaggagggaaaaggcataggaaagaaacatttaactagggctactggctcactatgtgaaagatgtttcccttcaatttcatttagctggtgttctttatctcttttgcccgtctctgtcagtacttatgtttttcatgaatcaatagtatcttgttctttcttctgtttttaaattattttttccgtgatttcttaatcttagacttttttgtgcatttgcagcagagaagctggggcttccttttgtgcctccataccttgaacagaacatgcgcatgggtgtcggcagtgtcgacctcagcaacattgatgggatgatacaaggtgtcaactatgcatccgcggcagctggcattctctccagcagtggttctgagctggtttgtcctcctaacttcccaacaactctatttcacgcttataatctagcaggaatgtctttgtgagacccttctctagaggacgaatcagaaggagggtgtttcaacaacagactagaagcaatgactcttctcatagtgtctacatcctctctagttaggaagaatacttgctcaaccatttgaactaatgctgaaagattctcctgttcggctgctcccttccttccatgtgttccaactagtgtggattatcagggcatcaaattcccttcttagttcctaggaattcatgacttatatatgcttcctaccagatgtgagattgtctacacgagacgattgatatgctggtgctgatggggggtttatttatgctgctggccttgtccaagtttgcttgtgaagctacagtgctataagttgtatggttgttttattttcctgcacgcataaagcaaaaggagatatatgtagccatctactcaaagctaatttatcataatttttttattgtctgaaactaaaaaactgcatttgttctatactatggcttttgggatgatcaaggagttagtaagaatcactgatccggcaccaatgtgatgaaattgatgtatatcatcctgaacattccattttcatatcaatctttattcctgcttatgttgttgaatctccaatctttgtgcccaaaacaacaaaaacttgtggagctgcaaatgctaattttgtcatttcaataaaacatcatggtggtgtctaaagaggagaaatgtttacgtatgaacattgctgcaaagttttcctttatgtggctatatgttttaactttctataaaggattggagcctcttggttagagt

SEQ ID NO: 8059 - DNA, 12305 bp, Oryza sativa
acgttccggtgggaggagttcagcctcaacttccacgccgacgagcggtgccggagcggcagcaccgggtgggtgatgcacgagttcgccgtcgtgccccccgccggctcccgcgtcgccgccacccacaccgcctgccgcatcgccttcaccggccacggccagaagcgcaagcgcgtgcccgacggctacgtcttcgtcgacgtccatgtccagaccgccgccgccgccgccgccgtcgctcctccgttgccgatgttgtcctcgtacggtgaaccaccgcacgaacacttctctgacgatcatccgccgccgcattcttacacttattacacccaagaataccagcagttcttgccgccgtcggagcagagcgatcaagaacaggaatactgtgcaccggagcagcagaatttccaagattatcacgtcgcggcggcggagcagaccgaccaagattacttctatacggaaatgatcaaccaagaacaggattacgcataccagcagcagcaacagcatctcttccatggagatttcctcgcgacttcgcagcagtttcttggtcaggatcacgaggtgatgttcactggcctcggtggtggtctcgtcgtctccgacaacggcgagcacgcctccgccgccgcgccggctacagagccgccggtgcacgacgtgttcttggaaactttggtgcctgagccacctgaaaatgcatatgttgacggagcaggggagtccgccatggcatcggctagctccgctggtggcgcgccattattggaacaaccctttgcgacgccgccgcagcagtttcttgatcaggagccggcgccggctggcctcaacgacggcggcgcgatgatctataacaacaacggtgacggcgagcacgacgccgcgccggctgcgcagccgccggcccggtactacagcgggccagttccggcagtggacagcgtgttcttggacaagatgcgggaatatttgatggctgatgcgaagggattatgccgaattgatgcgcccatcaacaatggcgaacacgccgccgccccagcgccggctgcggatgatccgttggctgctcagcacggccacggcgacgcgccgccgctgccggtgccgcccgacgcggcggagctagagcgggtggtcggacatttgttgagagaagtggaggatataatcaaggttgcggcggccggtggctatggaggctcgtcggacaagccgctctccgaatttgacaaagcacaaaaccaaattctggccaagttgatggcagtatttaatcaagtagccgaaagttaatctatgtttacttgttgttaatctctgatgtgacctgacatgatgagaggcgtcatacatctgaaagaacagctctcaccacgttcttttgcttgctggaggcctggagcgatgagatcagtgtgtacccgttctctgtttgtaactggtaggctagaacacgagaacaatcattgagagtgtaaaagatttctctattcttggcagcgtcgacttgtaaacaatgtatttcttttcttgtaaataatctcctgattcactccgagttggctgcaactccaccagttggatttgcacaaatttgtcgtggacacagatttgaggccgatccggcttagttgcgtccctttcctctcctagatctggctaaaggggatcaaggccgctagcagtggcagtagcagagtgagcagcggtgtcggcttccccactcccatccctctcctagatctggtcggaggggaggaggccaccagcggcggtagcaacaaagagggctaacgaccaccactagatctagcggaggatggctcggtgacaatgacggttactgcagtgaggtcgggacggcaacagctactgtggcgagagttgcgaacaagcttgggtgaggcaaatcttccttcaatgaggttgggagaggcggatccatcgctaccaagctcaggagtgtcggatccgtcattaccaatctcaggagtggtggatccaccgtcgatgggctcaggatctaggcggtgacggcggttgaggagacgcgtgcctggggcttgatagcctgccgcaaaggggcagttagcgatggtggatgaggcatgcgcctcggcctcatcctctgttgcagggttgggagaggtggatttggacctcggcaacgacgataggcgttgcgacaacgatgacttctgtgatttgggattgtggattttagggggggttttttttttaagaatgtggatttgggtttctaaggtagattttggagatgggggcatgaatttgtatattttttgtgcaattcttttccctgaaaatccttatcacaggcggtcagctcaatctctctgtgagtgaagtttcttttttactggcagccatcaagatgttgccggtaaagaatggatttcatatgcagataggcacccgccaatgaaaagtttgtatttgcactgaccttcggttactggcgatgccgccggccgccaacaaaaatccattttaggtgtcaatgtaaacccattttgtagtagtgtagtcctcgaagcccggggggaggtgccttcaaccccatcgcatgtagtgagcaacaaccaagcagagggaagggacgtcgaggaggtgttggcgatagagggatgcaaggcagggaggccggaggtatgcggatacggtggcccttagcctccaagtggccggatatggcaacccaatggggaggcaacctttagtgggctcctaggcctcaccaccaaggggaaggccgctaccgtcggtgcccgcgaggctagccattgccgtggtgcccgcaagcctggccattgatacctgtgaggtcagccgcatctgcaacacttgacaggctagccaccggagcccgcgatatcaacgtaggtgtttgtgaggttggccattgcccgtcagccgcctaaacgaagagtgagaggtcggacgaatagtagagagcgagagagcagagaatggggaatagaagagaaagagagcgaagagatcgagggataaggcttgggctgttctcgttttttaaaaaactgaaatcacgtcggcttagagtttagaagtaccggcactgatgttatcagtgttgtttagggcctatttggttctctaccataccaattaattagtagtaccaaaatctaggcaaattttggcactaccaattttttggtagggcaaagttagctagtctatgtttggtttaataccaatataaaaccaaaatttagtatgagagtgaagaagattttagaatgtagccaaattgagcgtggacactaccaattgtttggcttcaatccaaactagcatatttactattaaagttactaaaattttgataaggtcacgttttggcttcaatccaaaacggccctaattgttttaatgaatcgatattgatgtgggtctcatggatatgccatatatttcggtactaattgggagcatgcgagtcaaagagtagcaaaacttatcagggttgggttttgtccaactggtactgataaagggtatcgatatactccctccgtcctataatataatagattttgattttttccttgtactgtttaaccattcgtcttatttaaaaaaattaaaattattatttattttatttgtgacttaatttattatctaaagtacttaagcacaacttttcgttttttatatttgcacaaaattttttaataagacgagtggttaaacagtacaagaaaaagtcaaaatcccttatattatgggatggagagtagtagtgaaagcatcaatcctattcatacaaaacctccttcatcctcaaatattacaacacagttaacaaaaatggcaatatagttgcttacatgaaaataagcacatcgatcgttcgtcttaggccgtgtttagatttttttttttgccaaaaacatcgcatcgaatgttttgacacatacatgaagcattaaatgtggacgaaaaaaaccaattgcacagtttgcatgtaaattgcgagacgaatctttcgagcataattacgccatgatttgataatgtgatgctacagtaaacatttgttaatgacggattaattaggcttaataaattcatctcatagtttacaagcggaatctataatttgttttgttattagtctacgtttaatactttaaatgtgtgtctatatacttcaaaaaatattttggccaagaaactaaacacagccttagactataaatcacgagataagaatagacaaaaatatcctttatacatattcagtggtactctctctatgccataatataggcacggtcaaacttagcacgatctccaaaataacttctatataaaattataaccatataaaactaaattgaaatatcaatgatattattttcagaaaataaaataaaatttatattatactaattattgattaaatattataaaaattaaattttaaaatacgtgcacgtcctatagagcggagggagtataattccagcagtcttaggaattctctcgtcgtaagaaaacaccttcgcatatgtgccgttccccgtgtatttggcccaatccctccctgcccagtaacggccctaaacatacagcaaggccgaatcggactcggagacccaatcccgcagcccgcgagcgcgtttatatagacaccgacaccgggcccccgccttctcaaacacatccttcctgcccgcaaactaaatcccaccggccaccgcctctctcccaaaaaccctagctagggctaatcgcgagggcgagcgagcgagcgagctgcgagcgatcaagaaaggagccccatggcggcggcggcgaggtcgcagggtctctcgccggggttcaagttcaatccgagcgaccagatgctcgtggagctcttcctcctgccgtacctgatcgacggcgagctccccgtccgcggcctcgtcttcgtggaggacgaccacctggggggcctgccgctgccgccgtggatcctcctcgaccgccacggccgcggcgacgaggacgaggcctacttcgtcgccccgatgggtgccggcgatggggcccggcaggtgcgctccgtcgccggcggcggcaagtgggtgaagcagaggtcggaggggaaaggtgaggtggtggtggcccccggcggcgaggcgttcctgtgggagaatttcagcctcaacttccaccgcgacgatcgccggagcggcagcaccgggtgggtgatgcacgagtacatcgtctccccacccgccggctccgccgtcgccgcctcccaccgggccacccacatcgccttcaccggccacggccagaaccgcaagcgcgtccccgacggctacgtcctcgtcctcgacgacgccgtcccccccgccgccgccgctgcagcacctcctccggaatccgagcagagcaatcaagaggagcaagaatacgctgcttacaccgaccaaatccagcagcagtgcttcgtcccggagcagcagatgagcaaccaggaatacttcccggaggcggcggcggagcagagcaaccaacagttcttcgtgccggcggaggagcagagcagccatcagttattcttgccggcagaggagcagagcaaccaacagttcttcatgccggcggaggagcagagcagccatcagttcttgccggcggaggagcagagcagccatcagttcttgccggcggaggagcagagcaactaccaacagttcttgccggcgttggagcagatgacgcagagcaaccaagaatttgcttacggcgagcaaagccagtgctacattgtgccggagcagcagcagctgagcaaccaagaatacgcttacagcgaacaaagccagtgctacatcttgccggagcagcagcagctgagcgaccaagaatacgcttacagcgagcaaagccagtgctacatcttgccggagcagcaggagctgagcaaccaagaagcagaatatgctttcgtctgctacgacgagcagcagcagcagcagcaacagagcaatcaagaagcagaatacgctttcgcctgctacgacgagcagcagcagcagcagcagcagcaatacttacatggagatctcacatcgtggcaagaaccctttgtgacgtcgtcgtcctcgtcatcacagcagtttcttggtcaggaacagctgctgcctgatggcctcctcctcgacggctttggcgagatctcacagcagcagggcgaccaagaatacgcgtactgcgaggaaagccagtgctacatcatgcctgaacagcagcagcagagcaaccaagaagcagaattcgctttcgcctgctacgactagcaacagcagcagcagcactacttccatggagatctcacatcgtggcaagaaccctcggagacgacgacgtcgttgtcgtctcagcagtttcttggtcaggagcagctgctgccggatggcctcctcgatggcttcgatgaggtcgagatgcagaatatcatggctggtttggtcgcaaatcaatctccatagctctggagggggaagaggctgcaatccatgaagatcaacattgtttgttgccgaagcaggggcaaggttgctgacaaggaatcaaagcagcagctgccatgaattagtttatgctttagttgttgtaattaaattactgatgaacggcggcgtctgaaaccgctggctctcgccatgttttaactgagctctgatctgttgtagctgagctcgtaagtatataggttagaactctgcaatcagaagagtagagaattctttattagtttgacaatgtcaaattgtacacaagagcattcagtaaagtaatatatgtaatccattaattggttgtaaagatcattgcaaggagtatagttgcatgaatcttgtatatatggtatctatgtggcctacaaacatgtaacacagctgatatcgctgtgaaagaatatgtatctgcagcctagaatactacccaaagcttctctgtccaatgaggaatccagataataatttggcaacttataatcattgcaaaattgagtaatcttatatctgagtctgctcttgcaaagcaaagcagctccaaaaaattgcaggatgcttgagtaacctccactgcattatcggtttttcttcgaaactttcgggttcttgcacatgcggatgcttgcaggagtaacctccactagctcatcttcttgaataaactctatgcagtcgtccagactgtagcttaacgcttcatcgagaaccactgcagcataccaaaacggatggaaattaatcgtctttctatcaaaagttgggagtttgacagttgatgtgaaacttatgtaacaaatcaatggaaagccagctaggcaggctcacagatgtggaaaggcccaggaagatataggttaacagcatggagtacagagcacagggctcctctgcttgcttcccatgttgcctcctaagctttggtcaggcagatcacaggtgcaagaggattgctagcaagaagcaatgcatagaaggatttctgtgaattcaaaggtgaacgaaggcagcttatccaatgggataagggagaagcatgtcaatatttaggctgttccgagagcccaagtcagaaggcatgaagaaaatggtgactgtgatcgcagtggtaatgtaatgcactaatactagtgtttgttggactctattcacgggaatatgattccacagaggtggaaccagatcggctcacctgggctatggcccagagcctaggccttaagttcaataggctcaaattaaatttcaccatgctaagcccagtatgggccgaaacatgctaggcttggctggcccaggccttggcccaaggctggctccacccctgcgctgccacgagcctgtgcatacatgggttacagttttgcttacatggcttcgaactcactcagggaaagtagagcctgtttatgatgttttggttgcatcaatcaggtcaataggcagtaaagcactaaagcccctccagccagacctgcccagcctcaagatgcaagggtttacttatcaggaaccccaacctaggaactttttggagatatcaactgtaggtttcaagaaaggcatggattatgtgagttggaccaagctagctatggtttagttgaacagctattcacaagagaaaacaaccagtacctaattttcttcaataaaaagatatttctaccaaataatataatcgcagtaacgaatagtggttgcagatgaaaattttacctgtagtttccttgttggagcggacatttgttgcagcctttttcttgcacacattaattgctaaatcacctggtcgctgatggataccaactatttggcccttgtaaacatcctgtcctggactcacaaatagtatacctctttcttgagcattaagaagtgcatacgatgtagtacttccatcctcaaatgcaacctataccatgttatccaatttagatgttgatgaaaacggaagaaaaaaaacttgttgcttgaaacttgaaagtaatgtgtaccaaggagccttgatcacgtgaactaagatctccagcccatgggccatagctgtcaaaaattgtgttgagtattgctgtgcccctagatgctgtcaaaactgcattcctgagtccaatgaggcctctagtaggaatcttgtattttagtaatgttgttccctctggcctgccatttgaaaatgacacttgttatggcaacaactcctctatctcaggaataagcattatgcaacagaaaattttcaaagccatattgtattcattacatccattactgcatgatttcttcatagagtaagatatttgcttcaaaccatacaaataatccatccaaaaattcaatctcaaccaccatctgaaaatacataaaccactcccaacaattgttcttgcatttaattgatataagagggtcagaagttactccgagacacgacagcttagtacactcttgtataaaatgttgaggaaagtcatgcagttctcagagtaatgagacagactcgatgcataaacttttacactctaacttcaatatggtgtttgttggttgcttgattaattcaataggaaatttatacttttttgcgaagatagtattaaaaagttccaacataactctcctccaaaaaaaagttccaacataacttgcaagcatatgaaggaattagagtgtggtacgaacccactaggttgcatgtcaaccatttgtccacgccttttccccaaaagctcaacaactgaacccatatattcctctggaacttccacagcagctatctggaacacagtagcaagaataagttggttacatgaaaactgagggattaggagttgtaggatagtaaaatcaatagcaatactagtgccaaagacaatatttgttgagaaatctctactattctaaaggggagttttgtccgttcgacgatccctaccatccccactagtgcaacaaaaaaaaaactccatctaaaataaaccggtggatgcatcatgcacctgaaaactgctcaccaagaaaaaccgaaacagaaaaaactaaacgtgaactacgctgaagcatggaggggaacattcggcccgtccttcaagatctcgttgcaattgcaacatgcaggcaccttgctacttggtgaaatatacaagtgaatactggcattaaaagaaacatacctcataaggctcttgcagctttccatcaactgtcttgttaatgacctttggaggtccaatcataaactcaaatccttctctccgcctgttagcaattgaggttctttcaagaaaatgccagaagtacatgtcattctggaatcactgaatatgataataaatgcttacatgttttctatcaatatagtgaggtgcagtgtgcctctgccactaacaagaaatgtatcagcagtttccccgtcttctactttcatagctaagttcctttcaagctcacgatataacctatcacggagattacggcttgtgacatatttcccctgtgataaatccagtgagaacggacaaatatttcagcattccagaaaaggaagaaaactagcaacattatatttacaaacatggcattggtaccattacagcaaatgtggtggaaaagtgccactatggataatcttaatttaaataacttgcaagaaggcaagacattcaatcgattttagattaaacaagttcaatttgacaaaagagatttgaatataatttgacagcattcacttttttttgagacagcattcactttgtggcactttaatttgactccaatttgacagcattcacttcatgccactttaaagcacaatagagcaaaatctgcattctgtgaactacaatcatgatttgatactttctaagcatccagcaatggcagatcatttcaattgtcaaaataaaataatatttagtctaacaacttggaatgaccacatagttgcaatttagacatcgattttttttatcatttgaattcaaagcattatatcaacatctagcttaggcatttttcaactctctttttcaagcaggccatgctagactgctagacagtagagatacaatggagtttatccatacctctttaccgacaaaaggtgaagtgttgatggaaaaagacattctgactgtcggttcctctattttgatggtgggcaagggtgttccagaaactttatctgctatggtttccccaatctgcagagttcaaagaataacagattttataattatcgtgctcttaagataaatgtaaaccagaaagcttgaataaattgttaaaaaacaccaaccatgatatcattgattccacatactgcacaaatgtcaccagcactaacattatcaactggaactcggctgaagttctgataaacgaaaagctcacttattttgctaattctacaagcatcatctggtgtacaaacctgcaaaatatcttgaaatcagtagaagctatattgctgtcataagaaaagatattttttccctttgtcttgcaaacaaaaaaaaggtgacagatgtgcctagatgtaatttgaaaaaaagatcaaatctaaagaaacttcaaaagtgaaccattaaccaagactgcaatggttgctcatgcaaagagtatgagagatttaaatctaaattttggaaaggttgcacatatctttgatgctaccctgttgttctttttaatctttgttggaatattggcatttgcactacatgcacaaaaagaacaaatttgtaccttcacttccatgcctcgctgcagttctcctgcatgcagtcgcccaatcgctatccgtcctttatgttcatcatattcagtattagacacctatacatcagtcagcattgtggaattagtacacaggactacaaataatgaaagagaagttctgataatctattatcagaaaaatagatttgtcaaagtcagaaaggcagctccgcagaaatttgctcacaagaagacaaatcaaactttctaacaaacaataaagtgatgtagagaagaacaaaatagctaacgtactcatattatgtgcctggtaagtgtctagacttcaacactagttgatgtaactttgcatggaaaataatcttagaaatttgaacatatgttcatttacgaatgtggcagttattgcaaattgatcggtgaatattaatcatgtaggagtttccttagctgtccaagtacacaagatactgattgctgatcttggctagttagctatcagatttcagtcatttccaactataattacataacctagtatccatggcatggctttcagcatcttgggagtaattactcccaactgtatggagttaagcatcccaaagttcaagctttaccatagttgaaaataacagtaagaaacaaacagaagaaaaaaatgtagtgatacagtgtgtaagttgccattttgagagaaaatccgaaattacagatgcatccaagaaaacaatcacgatggctgcatataaagtattatgcaaagtcatagccacaagttaagtacatgacaatataatccccaagtttattactcacaagcaattgcagtgcaccgtctttctcaatacgtggctctggtatgcatctaaggattgcctcaaaaaggggtccaagatcgtcacccaaattttctggagataacccagccttccctttaatagggtaccgagctcgaattcgccctatagtagt

SEQ ID NO: 8060 - DNA, 14242 bp, Oryza sativa
caaaaggcttgttatacatatcagtgctataggcagcatcaaacataatgagatctccgaaaatatcatactcgatcctcaatcttgcatcagtccagaagatgcttgtaactgtgttgtcctcatctttttgcattacgtacagaaattctgggttttgaatctgcaattctgtgaagtgcttcaatgcgctttcaacatctgagtttgcttttctatgttctgtctgtgctatgttgtgctcatctttattttcaaatggtatgtctccgaaacaaactcttagtttcctgaaaatcttcataattttcttaggaggtaccctattttgttgcagaactcttaaaaatgacttctctccagttgacatttgtttgtggtctactatgaatcttgcaagcaaagggcttgggcataacggatgattgtgctcatggcgaactgctgtgaactcccattctcccttatcgagtttcactatcacccttgccttgcattgtgtcttctctacaagattgcttctcctcttcttcattgggttttcagatgacttcgttaacttcattttgccactcttgttgcattctaagtgaaacttctttctcttgtagttggttcccctctttcctacaaaaccagtaaggagagcatgtgcgtaatagaatctttgtgcggcttgaagggatggaaatttcattccgggttctggtggtcttgaattcttcagttcgtcgaaactaggatagaagtacttcccaagctccttatccgactcatcacctgagctgctgtctgaattgctttcactgcttgtatcctcgcttggcgcttcactgctttccacattatcatgtgatctgttatgctcttcagtatgctgaagtgaatggtctatcgagcttgtttggtctcccaatttatctacaattggtcgttctgtatttttgtctatgccatttgaagattgctcctgcatgcaagagaataacttacgttaagctactatttgataccttattattggtactcttgttagatttcaccttttcatacctgataatcaccagctcgctgtagtttgtcaacaggttccttctctacagtagatatactaatctctgcatgtctaggcatccttttgttgtttacctgaggtacaaccaggataacagatcattaaaaaatcacttccatcacatgtatacaaaacaaaaatatctggggaacctttgttagcaagcttacttcatttgaatcagctgaaataagaggttgcgacaaccgttcctcaagattatctgcctgtgtcagttggtcactatttctctgaacatccagctgtttctggcttggaggatttcgcctgcgtttgcgctttgagaatctaagcgaatagctaggacacaatggatggttgtgttcattccggactgctgcatactcccattgtcccttattgagcttcactaccacctttgcctggcattgagtcctctctataatatttttcttcctcttcctctgtgggttcggagttagctttgatgtgccagtcttgtggcactctatggtaaacttttttctcctgtagttcgtcccccgctttgcaacaaagccagttttaagagcatgtgtctcatagaatctctgtgcatcttcaagtgttgcaaatttcattccaagttctggtggtcttgcattatccaattccattaaactaggactatagtgtgctccaagccctttatctgattcatttcctaggcttctgtcagaatcgccatcactgtttctatcatcgcttgacacttcattgctttccatattatcatgtgattggttttgtccatcagtatgctgcagtgattggtccattgagttggtttgtctccctaattgatccacgtatagttgttctgcagttttgtctatgccatttgaagatagcagctgcacgcatgcaattgaatatttcttgttaaggtagctattcactgccatattcaaatgtccatattaaacctctccataagcattgtctggttttcatacctgatagccatcaccagcgagctgcagtcttccttctgttatcacttgcttctcaacaggtttctgcatttcgtttcgcagttaatgccaggcacaaagtgattctaaaaagtcaaagtgattctaaataccttgatcaactcgactggagttatcaccgtttgcccatcattgttactggtctgtaatacatgtatgtgagacaaagcaattagccaagtctttgttactacctatagctgcattttgccaaatttatgtatgtcattgtctgatggatgaacgcggtaggtaaacagataatgttcaagttaaaccttttcgccgcgcagctctggttggcaccaggcttgtacaggagaaatttcattccccagattgtttacacgagcaaaaacctggagaacagatctcttaaaaaggtcaatttcaccgaaagcacttaaccgattccaattctctgcaattctctgcaaaagatgcaatggcgagggtacatacattggctatatatatgtgatagcgatctcacctgttcggaatcaactggaaggatgtgcatcagcacgtcctccatgggaggagggccggcccgtgccagcagctcatcatctccaccatgaacaagtgcctgtttctggattggatttgggaggagacgaaatcaatcaaaaacccccctcacagcacagcatctactacctcgcacgggaagttgcggagaacagagtggaaatcgcgagttgcgcgcgtcttcgaccgtacctcatacatgtcgggaggagaagaaggcatcatcactccatagcccgcacggcgttcgttcgtggacaccccacctcccgccgccgccgccgccgccggtgacggagattgcgccgccgcgtgaggaggcagcagcgggtagggagggcggagatgaatcgattcccttcccggagaagggcggaggagagggctagggttcgcggttcccggcggcgaggatgctagggcatcgagaagggaacagcggccgcggctgccggggggacaggagagttttttcttttttcttttttcctttctcttcttttgtttttttcgtgagaaacaagcccatacatctggcttggtcggtggatgggccgggccgcttgtgcttcgtgggccgttgccatctgcggccgaaataagtccaccggcctttcctcaactttacgtcgagtccgcatgcgagaatgctattgggcgatcagtcgcgcgcctccctccccgcgcgactggagatgagagggggcggcgacgcgccgcgagcgagtttttcgttttttccttttttttcgtttctgtttgttttgtttttttctccggtttttatttttctgtttggatttttttctctggttttttctggtcggtttgttttttcccagtttatcttcttttggttttttctttttttaagatgtataaatataaagtttgtattcgtatatataccaagtttgtattcgtacgtatagaactttctatacgcgcatacaaactttctatacgcatatacaaactttctatatgcgcatataaactttttatacacgcatataaactttctataggtgtatacaaactttctataggcgtatacaaactttctatacatgtatacaaactttttatacgtgtatacaaagtttatatacgcgtatacaaactttctatacgttatgtattttctattttttttattttttagtacgtatacaaactttgtgtatgtgtgtatatattctttatgcattaaaatatattcgtatatatatatatatatatatatatattatatatatatatatagtatatacatacgtatatacataagacgtatatacataagatgtatacagtagctggggggggggggggtgactgaccgcgcgcgcggctgatcgcgtatcagcaccccccgtatgcatggcgttcttaatccccgttaccagacatgtcaactccttaagtgttcaccatgcttaatagtttaaaccatattttctccggttttcgctgacggcgggtctatttcggcctgttaggaatgatgatggccaacccttgggccaggttggacggccgtgatcgcttcaagatccgtgcaggttgttgctcgtattaaaaatccagctcttttttattaaaaaaaatattcaggaacaactttggttattcagaaacagagtacatgatggatgatatagattgcagtagagaaataatatctaagatttcttgcatgacaacttctattaggataagtgatgtgagatatgttgtgtcgatcatgaagaggtatgggcggctgataagattttacttaactagcttgtctgccaccctattgatctcccttggaatccacatgacctccatggaaccttctagaatatttgtttgactccaatggcctggatcctcatcaaatgggcctgtttagttcgctaaaagagaatttttaggtgtcacatcagacgtttgaccagatgtcggaagggattttcggacatgaatgaaaaaactaatttcataactcgcctggaaaccgcgagacgaatcttttgagcctaattaatctgtcattagtacatgtgggttactatagcacttacggctaatcatgaattaattagactcaaaagattcgtctcgtgatttccccactaactgtgtaattagttttcaaatttatctatatttaatactccatgcatgtgttcaaagattcgatgtgatgtttttggaaaaaagttttgggaacgaaacaggaccaaagtttctcttcttggctgtgtctgcattcactactacatgatagattttcctgtacgccaccccttttgtttccaagcggttcgtaagtggaacagcacggaaaaataaggggaccggcgcggggctgtcacccgcacaggaaaatcgattttctcaggcgggcctcctaatctgaccgcacgggataatcatcattatctcatgcggtcgatttaagtggaccgcacgacaaaatcgatttttccgtacaagctttttaagtggaccgcacaggaaaatacctccctccttcccacccatccacttcaaaattttcacatcctctctctcttactttatcccctattatctctaaactaccccctctctctctactttatctcttcctttctctaccttatctcttccccagtcaactccctccacaccttccactcctcctccccctctcctcctccccttcccctctgtcaggccggcgaggcgacaaacggagctaggcggcagaccggtgcggcgagcgggcgaggcggcggctggtcgcggcgacagctgggcgcggcggcgagcgggcgaggcggtggccgggtgaggcgacggccgggcgaggcgacaaagaagcggatccatagagtcaatggcctcgacgataccgcccaccaccaccgcaagccatccccgccgttcgtcgctgctacctcgagaggcgcggcggtagcttggctcagcggctgctcgccctcgccgctgcctcgggaggcccgcctcgatgacgacgacctcgacgtatggctgacctcggcgagctcgcgacaacgttgacgggctcgggggagacggatccgttgacggtgggcgtagtagaagcggatccgtcgccgatgagcttgcggtggcgacggccggatgcgggtgggcggcgattttcgattttttttttatttttggtatttttggttccgtgcgggcggcattatttgactgcacgtgataatcgattatcccgtgcggtccacttaacccgaccgcacagaaaaataattatcccgtgcgggtgggtcgtccgcacgcgaaaatatttatttttccagatgcatggctctagacgggggaaacctccgtatggaaaaatcaatttgaccgcatggaaaaatagttttttaagtagtgattcgccccgctgtcagggaggaaaataatccctgcaaatggcaaaattcaaaaatttggccgcctccttagctaactggaccgccaccaattctgcctgcaaagagcattgtgagtagctggcgaatgaaaaaaaattccaatcctgtcgttccatttttccactccgcatcaaacctaccagcaactggaattttttttatttttaattttttttattaaaagttttacaaaaataattttccattttgaaaattgacggaagtagtcgcctaccgctctctgggagggcgatttttaaaaatcgccatcccagagggcggcgaaaatgacgtggcagacggccgttcgctttcgggcgacggccgtcaacgaaatttgcaggcggcccccttgccgccctccgctagggcgattttgtactgtgcggggggccgcctgcaaatgggcggcgagggggcatggaattttgcaggcggcccccttgctgccctgggggagggcgattttacactgtgcggggggccacctgcaaatgggcggcgagggggcctggaattttgcaggcggcccccttgccgccctgggggagggcgatttttgcctctctcctatataaccccgtcccccctctctaaaatttcattataatctgtaaaaatccaaaaaaaaaggaaagagagagaggggatggcagcagaaggggagcggcgaagccctactggtttgctcacttcatcacaggtttgctcccatacttcttttgcatttgtactaatatattatgtttgagtactatatgttgcgttttagttttagttccatatattttagcatatctgtagcacacagcacatatgtgtagatctagagcacagaatataatagtatgaattgagacatagacagtagtgttaattgtaagatgtactttagtttgatctggaaaacgtaacctacttttagaattttggagaacaatattgtagagaatgtaacttagtgcgtagtacagaaatgcgaggttaacgtagttattgttttcatcaggcacaatatcaaataaggtcacatttcatatagttcacggtgaaggaaatcttagatttggtccagatggtgctgatctgtcggattttgtaatgacatctaagggcatcgataggcctgcggagagaacatttcagtcaatttatagttggttgttgagaggatttagaatagaccaagaagtctacacaatgtcagtatctctattgtagtgagtcgtgcaacagaaggttatttttgggaactaatgccgatggacagcactgctgcttggagacggtatgtggaaatggcttttgaatggtcatggcccctcgttatatttgtgtcggtacaagagaaagatacaaatgtttcaatgcaaaccgaagatgtggagggttctagcaatgcaggggatgttgttggaccatcgatgcaaaatgaggaaaatcaaacaagggaggagcaggccatgggcatggcggatgagggggagatagtcggtataattgttgatgaaatggagagggaagattcagataatgagcaagcggacgacgacgcatcatccgatgaggaaggtgatgtaatggccactgattgggcaaatgaggacttctctggacttgttatatcagagggtgatcatgtaccctgggagtataaggagaatgaggtaattgagggtgcaaggtatgctcataaggatgagatgaaggaggcggtgaagcattgggcagtttccttgcagagagagtttagggtggtcaagtcaacaaattatgtgtatgaagtgaggtgcatgaaggaagattgtccgtggcgtgtccatgcatataagggtaaatggaatgattattggaaagttagcattgtgaccgagcataagtgctacttacaaggggtggagaagtatcaccgaaacatcacttcagcttttgtggcaagtgagatgtacagcagtgttgttggtaacattggctttgaaccaaaatcaattattaggcacatcgagaacaaattcaagtacaccataagctatgcaaaggcctggagagccaaacaaaagattattgagatgaggtatggcacatttgaagcttcttatgataatttgcctcgtttgttagccaccattgcccagaggaataataatacttactatgacctacatacatttacatcggctgatgatcgaacaaagagtgtgctgcaagagcctttttctcattgggtgcctgcatcaatgcttttgtgcattgtcgatctgttctatgcatagatagaacttttatgacaggtaaataccgaggtcagatattgacagcaattgggtgtgatgggaacaaccaggttctacctatggcttttgcatttgtagagagtgagaacactgaaagctggtactggttcctagagagagtgcacattgcagtgatgcgtatgaggcccaacgtttgccttatacatgatcgtcatgcgggtatgttgcgggctattgactacttgcagaacggttgggatgagaagggacttccagctaagtggcttgatgttcggagtcggtggtgcatgcgtcacatgggtgcaaatttctacaagcaattcaagaacaagcatcttatggagctctttaagaggctctgtgcacagaaccaagagaagaaatttaatgagttgtgggacaagttggatgagttgacaacgaagcaaacagatgagcaatctcgcagaccacaagttgaaggtgacgagcctcccatacctcttggtgcattacatgatgacccaccaacaatgagaaggaggtcagggtcgtccatcagaaatttcactcagtggattgagaatgatcctaaggagaagtggtctctattgttcgacactgatggatctcggtatggcataatgacaaccaatttggcgggggtgtacaactgggtaatgcgaggagttcgggtacttccattggttgctattgttgaattcatccttcacggcacgcaagcctactttagggatcgacacaagaaaattggtccgtccatggccgataacaacatagtgtttggcaacgtagtgacaaagtacatggaagataaaatcaaaaaggcacggagacatagagttgttgctcaaggcacacaagtgcataagtatgaaataatgtgtgttgataggagcaggcgtggtatctatcgcaagcaagccgtgcaggaatgtgtcttgaaggcggatggtggatgtacctgcagttgtatgaagccgaagcttcgtcaccttccttgctcacacgttcttgctgctgccggtgattgtggcatatctcccaatgtgtacgtctcaaattatttcaggaaagaagcaatctttcatacatggagtgaggagatatatgggttcgggatctcaggatcttacacaacgctaagtgccaaagttttttatattccagatccatctaagttaagggtgaaaaagggtcgacgccaaactagacgcatcagaaatgatatggatgagtcagaagcaggtgggaggactttatgctgcagcaagtgtgatctgcgcggccatacttacaagaaatgcccgaagaatgcagaagttccaagtggcgcagatgctggtccatctggacaggcatgtgatggaaggcgaccacatggtgaaggaacaacaagcaggcgcgcaaggccaagcgtcgtcgtgcagcaggcaattccatggtgtaacaatgctatcgatttaggaaataaaacgctgttgtgatgtgatgtgtgttcggactaaatacttctatcgtgtaatttcaattgaatgttgttgtaatgagtacctccgactattgttgtactagtagtattgcgaactattcggtgttgtatcataatgttatcgtgatgagtgttcggactaagtactcatatcgtgtaactgcagctattgttgtaatcagaaatattctgtattgtgacccttttgtttgtttttactcttgtttaatatgtgttagtaattcacttatgaacatttgttagttatgttgaactaattatttttatgtttctgatcaatctattggatacaggtatgttgtacgacacaccggcgctgttcaaccgtgggattgacaggaaccaccgctcgttcctgtcagtagtctagggtgcacagctcggcactttccgtccacgcacgtcacgcgagtggttgcgtgtcgacccccgtcacgttccttagtacgcgtatgttcaattttacgtaagcacatttcaactcaactgtgctttgtcttgtacttatgtttaaagtttgctctatgcaggttgcgtgcggcaggccttctaccactttgtaggcttgttgaggcggcggcggacgaccgtgacccatcgaagcagtgggatgcagaccggtcactccttgccgctctggtagaccgctggagacctgagatgcacacgttccaccttccctgtggagagatggctccgacactgcaggacgtgtcgtacctgctcgggctaccactggcaagagccccagttggtcccatggacggtgtttttggctggaaggaggatatcaccgcgtgcttcgagcacgtgatgcgccttccacacctaggaccgcccaacacccttcccccgtactctaccatcgggcctagcaaggcttggttgcttcagttcactataagtaaataacttgttattatcatacatgcttagtttgtgatcaacaaattgttttgtagtaacatttcattattaattgtaggcggaccatctccaccctgacgctgatgattactcggtccgacgctcccttgagacgtacctgctgtggttgttcgggtgggtgatgttcactagcacccacgggcacgctatggactgctggctggtccactacgcacggtccatcgcggatgctcagccacaggacgtgccgcagtggagctggggttctgccgtgctaacagccacgtaccgtgccctctgtgaggcatgcacgaagaccgacgcgggagcgatcttcgctggttgtcctatgttgcttcagctttgggtagccaagaggtttgccataggtcgaccagtggtggacagcgcaccctacggggttggtcgcagcgcgaagtggctagaggacggtcccacaatggggacttactggtgtcgacgtggggttagtggaactttgctgcgttataagtttatcagtcgtcttctttttttatcatcacataacatgtctaattccgatcatgtttattccaacgtcgttacgctcacgtccaggtgagacgagattacccggacttcgtgtttgagtttacgcagcgccgtggacgtcgtacctccagctggtctggtacaaccacggcctcgcgcgcctaccgtcggagtaggacctcgacctacggcaccggtttcgcacggtactgctcagaccagaggtttcttaagttttgtttctgtttttgtacgaaaacctcaccccgtcgtaacttgacgttccatcctcgcaggacctcgtttgccttcgagcgcccctagcatcggagcagtgcgacctacagcaccggtttcgcatggtactgctcagcttagaggttagttcatttttgtttcagtttttgcacgaaaacgtcaccacgttttaactgcacgttccatcatcgcaggacctcgtctgccttcgagcgcgtttgcaagcacgaccgacgctttcgcgagctcttcaggggcgttcgccagcacttccggcgcgttcgccacctcttcctctcacggagcgtcgatccctcgcccacacggtactttaatttttgttactactattaaatacctgtatgaaactgatggtccttgtccagcaggatttccagctgggatcttcggtacaggtgcctcttcctctcacgccggtggtctggtcctactagccagttctacgacgatgacttgcacgatgcgcacgaccacgacatactaggctcctctcagcttggaggagctccagaggcgcacactcaggagcagccaaaggtcacacctatacaggcaggacgggttggccgtgccataccaccggaccgactcacgtactcctaggggcacgttagggcacagggtaggagggacaggggtaagaggcctcgtcagtagtgttctacaccttcagtgcttatgtgaccctttcttttggcttacaaatatgtaaagcagtactacttttgcttttactactgcagtactacttgtgtttctctcgcctatatagttgttttcattcatatggtgctagaacaacttatgctcacgaaaacacactttcggcgcttcacggtagtgtcagatccactagctgcacagtccaccacagcacacatgaaaagcgccagctcgagtagtcactatcaactttcggtgctgcctgctgacataaagtgaatcacgcccgcgcgtgctcgtcttgtcacatctaatgaataatgtatatcattaagtgcacaaatattgcactgaaaacaagctgaaggcaacctcttcatatcttctttccaactagcacacacctaacgagaatggaagcgccattacttgagcgtctcaactggcgaagcgatcctttcgctggttggtttctaccatggtgtgaccgtcctttgtgcgattgtggagatggatgcatactcaagtcttccctcatgatacaaactcggggcaagagattcttccaatgcacgaactttgatcaggtatgattcatctattcgaagttcaaatggataaaaactaacttcttcgtacacaatcgtaacatcttacgcagacatatcgtccaatgtgcaacttcatcgagtgggtagacatggagaacccacaaaacgacggaacacgtgcatacccatgtagtgaaacaagatcggactacctaaggcggaaggatgagcatgaacgccgaattgctgctgaggctttagaatggcaggtaaatcccctaggactccccacgtagcgtgagtgtccggagtgtcgttgtggtgaccgttgtcaggtcataaggtccgtaaggcaccgaactcgaggacaaaggtgtttcgtgtgtccaaacattgtcgacgatgatttcgtggtaattacaactattcttttcatcactcctctgtactatcattaacttaactatccccacaatggatgtacataggaggatgtaaggaaatgtcaattcgtacaatggattgacacagtcagagttacttccagtggcgggccgataacgtaacctgaaccgaccacacagttcattcatgcttggatggagtacgaacgtcgggtgaaaattgcaagcttagactggaggaacaatccattagggttacctagctggtccgagcgtccaaagtgtgggtgcagagatcgctgccaagtggctaccacatttgcagaacagacatttggaaggagatattttgtctgccccaatgtagacaacaatttcgttgtatgtctaaccgtttccaaaatctgctatgatttgcacaaaatttctacccaaactgaataacattactattttttcatggcaatccaaggatgtgtggatttactcggtggatcgacaatgtcactccatcatatcatggccaaaagatagcagagtcagaaacacaagtagagtatcaacgattgaaggaccacgagaatgcaatgcatattgaccaacctagaaggggctgataggttaccacaggctagattcgtcgggaccgacaaatttgtatcgtgtatcgatggcacttcttacctatcttatcattacaatgtttaattatgatggtgtatttttgtatgcgtaagactaaaaaataataaaattggattttaccaatctttgagattttaatcttgtattgagttttcaatataaaagattggataactattgataattataaaaatatctatttctcaaataaagggttgcacagtgtaaaatcgccctcccccagggcggaaagggggccgcctgcaaaattccaggccccctcgccgcccatttgcaggcggccccccgcacaatgtaaaatcgccctcccccagggcggaaagggggccgcctgcaaatttccatgcccccctcgccgcccatttgcaggcggccc

SEQ ID NO: 8061 - DNA, 11529 bp, Oryza sativa
ccttttgcgccgccgtttctctctccacctcaacttcggcgtccgcctctcgtcgccgtgcgccatctccacgccgtcccggagctcggtgctgtgccaccgcgttggcctcgacctcctctgcctccgccgctgttttccgtagccgccgtgcaccttcgccgacgaacgccgccgacgccgccgcgctggagccgccatggcgccatggccagagcacgcccaggcctgtggtggagcagctactcctcctcttccctgtgacactgacgtgtgggacctgccatccaaaaactcaaaataatcacagccgtccaaatccctagatcaaatcccaaccgttggatctacataatccctaacatatgccaccttagccctagatccaaccatgtcagtaccaccgcatcgccttgtgtcgccacgtgtcattccacgtcatcgagtccacatacaccgagtccacccatacactctatgccactgacagtgggcccacatatattttcctatccaaaattaattcaatttccgaaattaaatatccagagaatattctcgaaatattcctttttcttttaccttcggattttccctgaattcaaaattccggaggccataacttttccgtttgaactccgattcgatccattcttcttcctaaattcttctaaaatcgagctttacctcctggtctaattggttatttcatttgatgttatttagttagtttttctttgtgtttatttgtttttcgtttgtaatcgtgtagacgttggagctgaagagcatttcgcttcagaacacgctgtgcaaggacagtactgggatcaaggcaagtgcactctttgaacatattgaacccatttgtgaaatgttttgttttgaatacatgcattgttttgtttataaactatcgaagggtagcgtgacctaattgttattattatcctacctttggtaattattgattgcccatgataccttgtcaccctagtctttgtgagttgaacattaggctcaactcaaggtagagtagttatgcttagccgctcaaggttgttctacaagcaaaatataattttgattaatcatatacttataatcacttttatatgaactgtgtggctatgtgctatcttttcggtagtatgtgttgcaccatgtaaaacaacgggcggataaaacatttttgaccggggtgatgggtggttctgtgtgaacctggttaggtggtaatgtatctgtgtgatcgttcccgggtatggtctctgtgtgagtctactgttgagctgtgtgctattgtagtttggcaagagttcttggtcaattaaggacttcacttcataagtcatggatctgagcctaacgtgcaagcacatgttctcatgggaagaacctggcccagtaggattccgagtcttggcactatcggcccaggtggctagatgataggagtttaggttcgccatggggactttcttgtctgtgtgagggaaaggtgtctcatgggggaaggcagtgttgggacggagtttctaaaaagccttgttacagtctccttggccacacacaacctgaagtgtgacacttgcgcatggccgttaaaaggacgatgtatcttgtgggtcaagctgtacaacctctgcagagtgttaattaatctattcgaatagccgcgtccacggtcatggacatgcacggtgatatctcacgaggggtcgtttgtgaaaactagaaatgaactgtgtgcaggttaatgaatatagctatgtggtcctgtgtggatggatagttggtaatacccattatttataactattattttaaacctgtttataaattgattataactacaaattgctgtgttatgcaaaatagccattgcctttgttgtcagctttgcatatgcatatttctgtgtgcttgctgagtattccatgtactcaccttgcaattcccctaattctagaagaatggttcccgctgtttcctgagtcccagtttgctgctgaagacgaggaataggtcatgagtcccagttgactgcctatggcaagttgaatggagctactacgcatttattatatttccgctgctactttaatattgtccttaggccctttgtggcagaataaatgtaaactttagccataaggcttaacacagtcattattattgttaaatattaggattccttcatgatgttggctgtgatattatctttgagtctgtgtgtgctagcttgatcctggactagcacttatacacaggaggtcctattttgggtcctcacagagttggtatcagagctgcgtcgactgtaggccgcaaccttagttagcctggtcttatttcaaaactgttttcaagaaacgcaaaacaatataatgtgttcttcctttccttgctctttcttgtcttcctcctttcggaatatcttcttatctgttttaatctctaccgtcagccatgggaggatgttctacatcagtgctgctttggagtcttgatgaagttttgtcggaaaccaggtttagttgtagaagtggtttttgtcgtaggaccactttgcctctagttagtagttcacgttagtaagacgttaagcttgggtgttagaagcgttgcttgtttttaatttttggttcttccggtttgttgtacggtatgtttgaagctcccggctttcaaacaatcgtacgtgtgtttcgttaggatgtgtagttctacccccttaggttgccttcttcttagagttgtttttttcttcttagtacctttctaaccagccatatgttgtatagatggtgaacactaggaccggaggacatggttcagagcatgagaacactgatgcccgcactactagtcagcaaccgcctcaagcaccccaggtgaaccaacagaactttgaagtcttcatgcaagcccagattgagctcatgaggatgatgatgcaacaacttcggaaccagcagcaacagcagccgcagcaacaaccccaaggcggtccacctccacaaagcaagatgtttgagtttctacgtaccaagccaccaaccttcaagggaatgggtactccactagaagcagaagattggatgcgtaccatggaatgaaagctggacatcactcagtgctccgatggagagaaagttcgtttcacagtccaacagttggaaggagctgccttagactggtatgagaatctcaggggaggcttggatgacccggaagccttgacctttgaggagttccatatggcttttcgtgattactatgtcctggcatcaaggagctgaagaaggaagaattccgtactcttcaataggataacaagtctttgcagcaatatctgactcagttcactactcttgctcgctatgcaccagaggatgttactagagatgcagatcgccagaggcatttcctgaaaggtctcaactctggtctcaaggtgggacttgtggcacatgattttagtagtttccagagcctggtgaacaagacccttttgttagaagaggaacgcaggaagcttggtgaagaccgcaagcgcaagatgaaccagcaagcaagtggtccgagccagaggccacgtggagcattccagcagaacaataactgtcagctagctgctccacagttcaggactattccacagacactagtcctagcagctcagacccctcgtcaggctactccaactcaatctgtgcgaggtcaaggaagctaatcattcattcgtcgttgctacaattgcaaagaagtaggccatgtcaccaaaaattgtcctcatcccaagaacattattactccagtgaagttcaacttgggaaataccccagccaaggcgccagcaccaggagtagcacaacaaactgcaccagccactcagcagactatcgtcaggggtcgtgtgaatcatgtcactgctgaggaagctcagacctctacggatgttgttctaggtaagttcctagtaaactcagtacctgcaacagttttattggattctggagcttcgcattcgtttgtttctcggtcttgtgcttctcaacatcagtttcctactatccctcttaagtgttccttacttattcaaacaccggggtcagagatgagaactcaaactggatgtcctagagtaaagattgaaatagagggtgtagagttctttgccaatctgattatgttagatactcctcagcttgatgtcatcctagggatggattggttgcacagcagtaaagcagtgttagattgtggaagtaggtctatcaccttggaaaactctaaaggagaaagagtaaatttcaaagccatagttaatccaccttggaaaggagccctagtgcacaacatggaagtttctgagctacagaaagtacctattgttagagaatatccagatgtcttcccagaagagttgccaggcatgccaccacatagagatattgagttcgtcattgatctagttcctggaatatcacctatattcaagcgaccttaccgcatggcagcaaatgagttagctgaaatgaagaagcatatataagagttgaaagagaaaggttatgtcagacctagttcgtcaccatggggagcaccagttatctttgttgagaagaaagatggaactaagagaatgtgtattgattatagaagcttaaatgatgtgaccatcaagaacaagtatcctttaccgcggattgatgatctatttgaccagatgaaaggagcaggagttttctccaagattgatcttaggtctgggtatcatcagctcagaatcagaacagaggatatcccgaagactgcattttctactagatatgggctctatgagtttacagttatgtcttttggattgacaaatgcccctgcttatttcatgaacatgatgaataaggtattcatggagtatttggataagtttgttgttgttttcattgacaacatactcatctactccaaggatgaaaaagagcatgagaatcatttaaggcttgtgctagaaaagctaagggagcatcagttatatgctaagttcagtaagtgtgagttttggatgaaagaagttgaattccttggacatgttgtgaccgccgctaaagttgtagtcgatccaaagaaagtaagtacagttatcaactggcagccgcccaagaccgtgacacaagttcgtagtttcctaggtatggcaggatattacagaaggttcatagaaggtttctccaaagttgctcgtcctttgacacagttgttgaaaaaagagaagaagtttatgtggacatcagagtgccagcgtagttttgaagccttgaagaagagtttgacgtcagcaccagtgttggttttgccagatatccacaaagggtttgatatctattgtgacgcctctcgtacaggacttggatgtgttctgatgcaagaaggcaaggttgttgcttatgctttgagacaactacgtccacatgaggagaattatccaactcatgatttggagcttgccgcagtagtacacgcattgaaaatatggagacattacctgataggcaatcgatgcgaggtctacactgatcacaagagtctgaaatatattttcactcaacatgatttgaacttgagacaaagaagatggttagaggtgaccaaggattatgacatggggatccactaccatccaggcaaggctaacattgtcgccgacgccttgggcaggaaagcatactgcaacaatgtggagatcaaggagagccagttgtcactctaccgggagtttgaaaggctgaatttagagatagtacctaaagggtttgtggctaatcttgaagtcaaacccacattggaagatcaaatcaaagaagctcaaaaagatgatgctaatgtcaaagaaatcaagctcaacatgaagaaaggaaaagccataggattcactgaggatgagaatggtgttatatggttacatgagaagttggttgtaccagatcagccagaactcaagaagctcatattgtcagaggcacatgaatctcgttattctattcatccgggaactacaaagatgtaccaggatctcaggaacagactatggtggcctagtatgaggcgtgagatcgcagaatatgtggtactttgtgatgtttgccagcgagtcaaggcagagcaccaacaacttgccggacttctacaaccattgaaggtaccagaatggaagtggtatgagattggtatggatttcatcaccggtttgcccaagactcagttagggtatgattccatttgggttatagttgatcatctcaccaaggtagctcactttattccagtcaagataacttattcaggtgacaagcttgccgaattttatgtgaaccggatagtatgtttgcatggagtaccacggaagatagtctcagatcgaggaactcagtttacctcacgtttctagcaggctcttcatgaggcaatgggaactcatcttaatttcagtacagcatatcatccacagacggatggtcagaccaaaaaagttgatcaaattttggaggatatgcttcgagcttgtgctttagcttatacttctaattgggacaagaatttaccctatgtcgagttctcctacaacaatagttaccaagcaagtttgcagatgtcgccgttcgaagctttgtatggacgaccttctagaacaccgttgaattggaatgagactggtgaaagaatggtttttggaccagatgtaattcgtgaagccgaagaaagagttgctctaatcagggatagattaaaggtagctcaatctcgtcagaagagttatgcagataatcgccgaagggatttaacttttgagaaggaagattatgtgtatttaaaggtaaccccaatgagaggaaccaagaggtttcaggtgaaaggaaagctagcccccagatatgttggtccattccggatcattgctcgtcgaggagaagtcgcatatcagttggagttgccgtcttcaatgtccggtattcatgatgtgttccacatatctcaattgaagaaatgtcttcgtgtgccagaagaggaaacaccgctgcagtcagtggagttgcaaccagacttgacctatcgagaggttccaatcaaaattcttgagacagcagagcggactacaaggagtaagaccattcgtttatgcaaagttcagtggagtcatcacaccgaagctgaagccacatgggagcatgaggatgatttgaaggcagagttcccagagttgtttccaagccagtccgaatctcggggtcgagattctgtttaaggggggaaggtttgtcacgtcctgattcacatttgcgaaaattcacatttggtttattcgtctaaaatagcttaatgaaaaattcgttaaatcaaaaggctttaaagtgattaattagttaatttcgttgttcgctttgtgattcttaattggagttagttggatttaatttgtatttcggaagtggagctcaatccctaattcaaattccatccaaatccaatattccttttcaaatcctaaatccttcccaaaaattccaaatactttatatttggaattttccagagaagtccctgtctttttccctttttccttcctctctttttctctattctacccttttgcagtttagcccttattcttctttcttttttctttttcccccaccttcttctacctccagctctctctctccttcttgagttgcaggcccggggaggccaagccccgagcccacgtgccgcctcggcccggcctcctcctcctctctgcatcgccggcccaagccgccaccgaccgagcccgcgccggccgcgccacaagcccaatcgggcgccgccaaatcccgcaagccgcgccgccaaattcggagccgctgcctttccaaagtttgtgccgtgcgccctaaccctagctactctcctctataaatagcgctggccaccgcccctttttccccctttttccaaagccgccgccatctccaccgtgagcagccaccgccgccgttgctccgtgccgccgccgggagccacgccgtcgtcgtcaccatctccttcccgtgccgccgccgctggtaaagccccgaggctgagccctctctccctttcgcgctgccgtttctctctccacctcaactccggcgtccgcctctcgtcgccgtgcgccatctccacgccgtcccggagctcggtgctgcgccaccgcgttggcctcgacctcctctgcctccaccgctgtttgccacagccgccgtgcgccgtcaccgacgaacgccgccgacgccgccgcgctggagccgccatggtgccatggccagagcacgcccaggcctgtggtggagcagctgctccttgtcctcttccctatgacactaacgtgtgggacctgccatccaaaaactcaaaataatcacagccgtccaaatccctagatcaaatcccaaccgttggatctacataatccctaacatatgccaccttagccctagatccatgcatgtcagtgccacctcatcgccttgtgtcgccatgtgttgttccacgtcatcgagtccacatacaccgagtccacccatacactctatgccactgacagtgggcccacatattttcctatccaaaattaattcaatttcagaaattaaatatccagagaatattctcggaatattccttgttcttttaccttcggattttccctgaattcaaacttccggaggccataacttttccgtttgaactccgattcgatccattcttcttcctaaattcttctaaaatcgagctttacctcctggtctaattggttatttcatttgatgttatttagttagtttttctttgtgtttatttgtttttcgtttgcaatcgtgtagatgttggagctgaaaagcatttcgcttcagaagacgctgtgcaaggacagtactgggatcaaggcaagtgcactctttgaacatattgaacccatttgtgaaatgttttgttttgaatacatgcattgttttgtttataaactatcgaagggtagcgtgacctaattgttattattatcctacctttggtaattattgattgcccatgataccttgtcaccctagtctttgtgagttgaacattaggctcaactcaaggtagagtagttatgcttagccgctcaaggttattctacaagcaaaatataattttgattaatcatatacttataatcacttttatatgaactgtgtggctatgtgctatcttttcggtagcatgtgttgcaccgtgtaaaacaacgggcggataaaacatttttgaccggggtgatgggtggttctgtgtgaacctggttaggtggtaatgtatctgtgtgatcgttgccgggtatggtctctgtgtgagcctactgttgagctgtgtgctattgtagtttggcaagttgccttggtcaattaaggacttcacttcataagtcatggatctgagcctaacgtgcaaccacatgttctcatgggaagaacctggcccagtaggattccgagtcttggcactatcggcccaggtggctagatgataggagtttaggttcgccatggggactttcttgtctgtgagggaaaggtgtctcatgggggaaggcagtgttaggacggagtttctaaaaagccttgttacagactccttggccgcacacaacttgaagtgtgacacttgcgcatgggcattgtcacgaccggaattaacccaacgggcgttccttacgtgcgtgcattattccttgtcccaggaggcaaggtacaccaaaagttgacacagttcagagtttaacaagcggaagcgtaaatagttaatttattacatgggcggcgaaggcccagcatacacaaagacaaacgggaaacagcggaagactcgggcgacgaccacaggcgcttgacggcaggcacgagctagacaccaaagccttcctcatccaggggctcctcttctgggtttgggaaaaattgagcaagactgagtacaaccaccgtactcaacaagacacacccacaagtgcaggataaatgcaagggactacaagggggttataatataatgggttagagtttgcagcaaacaacattaaaagacatttagttgctcaaagctattttgtaaatacgatcctagagctatacattattattaaacaaggccatgaacccacacgaacctgccttaacccaaggcctacgatgattcagaccgaactggcaacccgaccctgggtcccagctcgtcccaagccaacctaggccaaccattccacattttagttgttaagcaggttttaagaattaaaacactaacttgggtacattgctcggcttgcccataaccgagggcgcggctattcgaatagattatactctgatcagaggtgtacatctttacccacaagacacatcttcctcatgtgtaaccacgtgccacataccaccacggtatacggacggaagacgtgacatagtttccaacccatcctagccatagacaagagtaccgacccaaccccacctacggccggaacctccgggacaggtaggcaggactgagcccctagcagcaggacaccggccctgtgccatgacatctcgactaccgggccgcagctcgtgtagccttcctttgccctagagatgtccatcgacccccgacttcatccatctccatccgtgtacttttgtttataaccagactgagccacaaactaagccttacccactagacatgtggaagtacggtagtgctttgcaacagaggcccgaagaccggtccttatatggccgaggtgctactaacaaaaccatgcaccccgagcccagcctaaaaccattttgaggattttgaatagagggggaggtgtgaatccaattctacaataatccaaccattccatagtgtccaggtgatatgaatatcccaaagtctagagttgtaaaaccacctaatgttgcctaattaaccagtgaagcatctacctaaaatcatactagtggtaccatgagtagagtgtccactagttggggttttgtttattctagggtgaacaaggtaataataacaataacaataataaggtcataacaaaggtacataggcatggctagataaaacagtgataacgcgggccattcaaataaagcgataatgcaatattttaaatcaaaataactttataaactaggattcaatatgttcaaggatgatgtgacttgccttgctcgctttcccaaacgtcggcttcaacttccacgaagagcgtatcttccgaagctgcagcatctacacgaccaacggaaaagaaaaggattttactctaattttaaaagggtttattgcgtcagccgagggaagggggcgcgcggaccgggtccaccccacgcggcagcctcacggtccacggtggactgggtgcacccgggctcaccggccgacgccgtgggtcccacgcgtcagccgcacctaagg

SEQ ID NO: 8062 - DNA, 17452 bp, Oryza sativa
aaatcgccctcccccggggcggaaagggggccgcctgcaaaattctagggcccctcgccgcccatttgcaggcggccccccgcacaatgtaaaatcgccctcccccagggcggaaagggggccgcctgcaaatttccatgcccccctcgccgcccatttgcaggcggccccccgcacagtgtaaaatcgccctagcggagggcggcaagggggccgcctgcaaatttcattgacggtcgtcgcccgagagtgaacggacgtctgccacgtcacatttgccgccctctgggagggcgatttgcctcccagagggcagcggacgactacttctgtcaatttttgaaatacaaaattatttttgtaaatcttttaataaaaaaaattaaaaataaaaaaattcccggtttttctgggccaattggtgggcttccaagcaggccaattggtgagcccctcatacttgtcaatctggtcgtcgtcaccaacgacctgccggccacccggccgcgcgcgtttgatgacggacatgacatccaccaccaaccaaccgatcaatcgtgtcgcgccgcctcaactccgccagttcgccccctccacgtcgacccattcttgtagtggcggccacgacgacgcgcccagccatggcgatccatacaatatcccctcccgatcgaacttgctgccggccggctgcattgtctccggccttaaaactccagcaacacgtacgacgaacaccccgtcgacggcatggagcgaaactgatcggagagatcgagcagcggcggccggcggtatatatatggaggaggcggggagcttcgacgccgccggcgtgtacccgatgacgctgccaagcccgaggatggtcgtaccggcgaaggatcagtcgccggacaagccgtcgggcttcaggaagagcatcaacccgatctacgccgacgccgtcgtcgtcgacatggccgccgccgccgcccgtccgtccaggacggcggcggcggccgccgtcgaagacgacgacgatggcggcgctgctccggcgctggtgcggcggcacacgggcggcgccggggacgggaggtgggaggcgatccgggcggcgagcgcgcgcgagtcgccgctcagcctgggacacttccgccttctgcggcggctcgggtacggcgacatcggcagcgtgtacctcgtcgagctccgcggcggagggagcggcgcgctgttcgccatgaaggtgatggacaagagctcgctggtgagccgcaacaagctcgcccgcgcgcagacggagcgcgagatcctcggcctcctcgaccaccccttcctccccaccctctactcccacttcgagaccgacaagttctactgcctcctcatggagttctgctccggcggcaacctccattccctccgccagaagcagcccaacaagtgcttctccgagcacgccgccaggtaaaaatttcttgttcgatcgatcgccggagttggagaagaagaggaggtgaaattctgaaatcatggcgatcttcttaggttctacgcgtcggaggtgttgctggcgctggagtacctgcacatgctgggggtggtgtaccgcgacctcaagccggagaacgtgctcgtcagggaggaaggccacatcatgctctccgacttcgacctctcgctccgctgctccgtcagcccggcgctggtccgctcgccgtcgggccgtgtcggtgccggcgccggactggtgcacggctgcgtgctcccgcggattctcccgagaaggagcggcaagaagaagaagaagcagaaggggaatgaccaggaggtgacgtcagcgaccggcgacggcaacggcaagaacaggccgccgccggcgacgtcgctggagttcaccgcggagccgacgggggcgaggtcgatgtcgttcgtgggcacgcacgagtacctggcgccggagatcatccgcggcgaggggcacggcagcgccgtcgactggtggacgttcggcgtgttcctgtacgagctgctgcacgggacgacgccgttcaagggctccggcaaccgcgccacgctgttcaacgtcgtcggccagccgctccggttcccggacgcgccggcggccagcgccgccgccagggacctcatccgcggcctgctcgtcaaggagccccagtccaggctcgcctaccgccgcggcgccaccgaggtcaagcagcacccgttcttcgacggcgtcaactgggcgctggtcaggagcgccatgccaccctacatcccggaggcggacgtcgccgccgccgccgtggactgccgctcgccgctcgcgcgcgcgacgcagggcggcggaacgccgaagaagagcgccgccggtgggaaggccagctcgccacgggatgatccgtcctacgttgaattcgagtacttctaggagaaaagatcgattattatcgcgttaattgttttttcgttggatttttgtatttcatatatttgctcggatctttcatgtgaaatatgccaaagttaaggcatgctgtgcttaattatgtagattgtcctctttcttaaactgagatttttttgccgattcctgcagaaattataacactgtaaaattccaatgaaatcatgcactccaaaggacgaaaaggatatttagcgagagatcatgtgtgggatcggattgtgatcagatcggaatttcagtttttgacaaccactgcttaagaccctgtttagatggaattaaaattgtttggacacgaattataaatattaaacttagagtgttaataaaacccatccataatcttggactaattcgcgagacgaatctattgagcctaattaatccatgatttacatatatgatgctacagtaaacattctctaattatggattaattaggcttaaaaaatttgtctcacaaattagctttcatttatgtaattagttttggaaggagtctatatttaatactctaaattagtgtctaaatacagagactaaagttaagtccctggatccaaacaccaccttatcctaatttctttttcgagtttccgcaaggtctccatttttttcttcaaactttccccacgctgtcctattttgtgtgatttttataggttggacctttgaaactagtaaggccgaccctatttgatttgttttttacttttgaattaccagaaaaaagcccgtgtattgcaacgggtaaaatccattttaatcttattattgttatatggtttagttaagatgaaatttatggaaattcacttggatatatatttttagaaaataatgagctgcaattaggagtccgttcgtctaaagttaccatgcgagttttcttatacgactccttctgtatttccaaaagcgaacgaacttaaaaaccgattcaaatacgtatatgtatttctaacagcaaacgaacttaaaaactgactcaaatacggatatgtatttccaaaagcgaacgaactaacaaccgacttatacatggatgacgtaccaaagtatcggtaaaaacatcttcaatttttataatagtagatattataatttatttatttacttttatgatgaccaacaaacatataataatatcatatttaaaataaaattttatatgtataaaattgtatgcataaagtttacatgttcaaagtatcaacgaataaagtttatataccaaatattttattataaagtttttttgtcaatttttttaagtataaagtttatatacctaatgtttctattttgtatgtataaactttttatatagagctttgatgtataatatttttgggccaatgtaaatacaaataaatgtgtgggtatttttcctagtttacacgtgggccacaagggagagggggggagtgggcagagcggtcaaccgcataatagacccttcaaagaaggctatttagtgtcccaaaatgttagcattgtggttgatttttttttccactggaccggcaaaagccagccaaaactttattgagatgcaaggaataaaaggtaacaaagtaacaagcaaggctattgaagaaaaaaatcgagaaaacacagtaaaccccctcccaacgctagaagtgaacactaaaaaaaaaaatttacaccgccatcctgatcaacatagcttcgtgtcaactccacaactcttccatgatcttatccacaacagtactaggcgaggaagatattgcccgaaaatcctttcgcttcactcttttcaaatgaaccaagtgaccaagattactatcgagttgaaaaaacttctgggttagtttggttagtggcctaaattgactttactaattttcttgtcaatgctaaattttagaaaatttagcatggctaattttaacaaagcatagctctgttaggattgaagtcaattttttgtttttttcaccttcatgttgatattctatacatcagtttaagattcagatcaccaagacatgcaaaagccaacatcttaattctttgataattctatgttttgcaactaataagcaattggttggctatcggcaaatgtggttctataaaataccatagcataaagtattttcttacctcattttgccattgtagttagtcttctgtcaatagcgctctattaacacagttgcaaaatggccattttacccccaacaagtgtatctcagtccaagaagtgctttatgttttctaggtgtaacatggactattaaatggtcatggaaattccggatagtccaagcaccgtttccgtataaaaggcactgttattacccttttcgttatatataaattttattctttctaacttctttctacatctgagtagtttaaatgataatcatggtcaattaccgattgatcgagcgttgtttccaaagaaatgctaccaattccgactgtttcacccctctatttgcataagattaattaacgagagactgacgtagatgacaaaagaagaaaagaaaaggcttatacactggcatttttcataaaaccttagttagatgatggcaaaacatagaacttactgttcaatggcaattgacaaaaacaaaattcttagagattcttccttatgcgtttgaaaagttacagtgatctgagtagtacccaaaggtcctgagttcaaatctcctatggagcgaatttcaaattgggttgtttgcggggctaagttccctatctcaatggccgtatatatccggttggatatggaggccgggtagaaaatacccttctctaaaaaaaattataaaaaaaatgcgtttgaaaagttagtgccctgaatggtcttaagtccagttgatctggcccaagatggggaaatatagtcatgcctaaacagcagcaatcaggaagcttcagcccagctgatacaactggggcttttcatctttttaatgatgagctgggcttttggtttcgtccaaacgcaatagaaaaaatacaacataatttgattacatttgctccattttttctgtcctggggacagttaactctttttaaacgttttcctcattatcctaactgaaacattaatactataataatttacatatatatagttaatcattcaaaaacacacatataattaatctataccatttttatagacctataaaacaagtgtgatgagaacgactgaacaacgtcctagatcctctgcattacagcataaaatgatcactgtagcaatagggaaaatacgtctgctacagtaatctaacgcgtgagtaagcagcgtcgttgtactgtatgcccccggaaataatgtacctctgttccagaatataataagttttagagatagatatgattattaagagaataggtaaaattaagtatggagggatgttgtgatcggttgagaaatagagctagacagaaaaattaaatggtggaggattgtgattggtttggaagatatattggtaaaaaggtgaacactagtacagaatggattttttttcctggcggccaatttgcgttttctatagtggccgacgttgccaccaatgactaaagaccaatgaaaatcaaccatcttcacaaacggttaggttaagctgactgtcagggttacgggtaaggtataccctctacccttcgatatatgtcacatatcgatatggtatacttgcacgtatacggacgttttcggcataagttaaggaaattcattatggagttcacagatgtaaggagtcctactcggatagaactgggtcgtcattgtatcatattgggtccgatgtctccgagtcttacttgaagaccagttgacctgcggtataaaagggaccccccggaggacctaaggcatcgaatcttaccgccaacatatccaccacagcctacgaagccggagcttacaggagccaagtcgccgggtgatctagtcgaatcaactcgactacgatctcgtcggtatcgtcgagttccactattccctttgtaatctgtggtttccatcatataatcccatatcaactggattagggctattacctatcaaggggcctgaaccagtataatctttgttttttgcctgcttgatgtcgtattacgtagatccttgtaccagcgtaccccaataccctctatatccggtctacgggtatcccccattgacactgaccatcaaggaaaaaagattttcgagtacaaaatgaatttcccaaatctgctgcccatgctcaagctccgccatcggatgcgctacccatgccccaagccatcgccgaatttgctgcctgcctccagcgaccgagctccaccgcctgtggcaaccccaccaccttgagcctccagatccaccacccaggccctgagccaccacctgtccctctgcttgatctgggagaggggaggggattggaggtgctgccggaaccttctcaaggcctagctgtcgtcatggtagccgccgccggatccacctcctccaccgtcacctgcccttctccttcaccaccggggcgacggatctagcagttccgagcaccaccgccgccgttgccgacggatccatcccctccactgtcactgtcgctggctagatgcgggagagggaggggaggcgggtatgccaaatccggatctatgtccttgcttgtcacttaagagctccgcttgcaaaaagaactctatttttgcaagtagatctcttaattgacaaccaacgaaaattaatttgggttggcggttggttaccgaaatccccatcaagtatttttgggttggcggttggttaccgaaatccccatcaagtattttttaaaaccgtgtgctcattaaacctgctagtaaaactaaaagggcgatgctatggaaaatgattttttaagtactgtaagggtgttttcaatttactatcattttcaacctgcaaaacatttttacagccaatggtattgcaacaaacaaaatatgaaaaacccaatactatcgtaccaaaatttagtaatttaagagggtttcgcccttagaaactctgcaaaactttaataagggttcgaacaaaataaaaccaccaaaattaccaaaatttgacattttagtgtgattaaaaatgacagcataaactaaaccggatctagtatgcaactcaggccctgtttagttcccaaacaaaaatttttcaccctgtcacatcaaatgtttggacacatttatgtaatagacaaaaaaataattacacagattacgtgtaaattgcgtgacaaatcttttaagcctaattacgtcatgttgacactgtggtgctacaataaacatctgctaatgacagattaattaggtttaataaattcgtctcgtagtttacaggcggaatctgtaatttatttattattagactacgtttaatactttaaatatgtatccgtatccaatataacacgctaaaattttttgtcacgcgaactaaatagggcctcactttccattttcttctccgtttgaaacaggcaaaaacctttgcgtgtgagcgtgtcagacaggcgcaagaaggttcatttcgaattttgtagatggaaacatgcatggtaggagtacagaatatccccccacccaggcaagtaaccgccgagctaaccatcgatcgatggagccaagccaactagggtttccaaagccccaaatgcaacgtatactccactacgtactcgacttccatttcatcacgcatccacggtcaagaacagctggcgcggaatccaataatccaacgcacatatacacggaatcgaaaggttggagatgccaaccgttgtctgtacgagaccaaaatcattggccaccaaccagccacagccgcccaaccgaactgatcaacccatgcgaaacacccatgttaatactactgctaagagcaacccgcaatggtaaagtaaggcgctatctataaaacatgtatatctcagcaatagactagattaatagtaaaccacttcaatggtatgtctacatgggtatctatagctctctaatccattgcctcatttttctctatagactatcttcaagttagtagatagttttgctctctctcttcatttaatctcttccaagtagaaaaatatgttgacatggatctcttatagagagtctatagataaccattgtgggtgccctaatagtagcagaacaggggctggaagggccaattgatgatgctaatgacgccctaatcctggattattaatgtaaccaaactcatcattgctaattattagtaaccgccagccatatgcatatgcacccaggctgcatccttgcattgcatgccaccgaactcgatcatgtttgttgtgtttatatatatgctcttttcctattgctaagtaagggatataagtggtcaactcgtaaacctacttagagcaaatttaatagtaaaccccactactagctccaattcatttatagccaatctaatagccaattcatacaatagttgcttactatactactaatatatggtcccacctgttatacacacattgcgtcttggagtccgtgctgcagctggctacagatctgtagcccgctgctcttctctctcatcttttatctcattaaaatatgtttacagctggctaatagcctgctattgtatctgctcttatagataaaattagtaggcaacctgcggattaactcacggttacctactaatttgatctattaatggttttaagggtcgatccacttgatgcgatacgccaggtcacaatgtggaaacctgcggattaccatttatttaacatataaataggtttatgagttagcccgtttgtatgcctagctaattttgtacactgatccgatcgaaaagaaaagaaggaaagctagcgcactgttaggttctttaaagaccaaaaggttaatacagtgcaccatcaatttaaatatttttattttgttgttcgatgtcgaacaatattgacttaaaaaaatcaattgttttatcaaatgtggacagactaacaaggactttgcagtaagaacaacacaaggcaaatgaacaatttttttttactgctaacagaactgattttacttctacatgacccaagggaaaaggcaggtactaacattagacctagaacaatcattccatcggccattcctaccgtcagagagtcttaagaaaagaaaaaactgtcagaaagttgagtcaggttactcacatgaccatgaacggtggcagccagcagccgatcgatcgaggacgcacagctctgcgctgagacacgcgactgctcgattgaaatcgaactacggttccctgaatttggctcagtgatctctcataaattagatttatttaatttttagaaaacttctatgcatatggttttcataaggcatatcgtttatcagtttaaaaagtagcatatgccaatagtgagatgttcatgatgatttcgttaatattaaaatatactgattcattgtttcagatgcgctaataaaagtaagatagtattaccatgtttttttaaagagaaaaaatgtacttcctccgtacttataaaggaattgaagtcgttttggacagcgactcgatctacaaaacacaactttgactttttatttctataaaaatatttattgaaaagtgatatatgtactacctccgtcccaaaatataacaatttttagctaaaaatgtttatattttaggacgaaggaagtatacttttatgaaagtatttttcaagacaaatctattcatataatttttatattttcaaactcaacaacttaagagttatttataatttatattcttaagatttgactcaaatattattttaaacgattttttttttaaaaaaatatggagggagtatatatgcttaaaaaaacgatcgaacgcacgcgtcacccggtcactctgaatctgaccaaggcggcgccggaaacggagccgcggattgaaacgagatttcgggggagaggagcaacggcagccacggtggcaagcggcagcgtagccagcgaggccacgtggtcggcggtctcctccgtcccagcgccgggccccacccacccctcccccgccagtccaccaacacgaccgttgcctcctccccctcgccacgctccagcgccgcacggcatcggtggccgtgaggtggggaccgcgctcgtttgtggggcccacctgtcagcgcgtggggatgggcagcacgtatcacgcatcaatcttgggacaccgaggcgggcgcgaggccagacccgaccggcaactgaactggcagcgcattgccagctgtgcctgccaactgtgccacgcgctctgcccccgtaggtctgggatatttacgccatttgccactggtgacttgcctgattagcagaacagagatgggatctccgtgctgaagattagtaaaagcattgtgatagttatttgattattatttagagatgtaggggcagttcagattgatgctatttttaactatatcatttttttaagtaaaggtgtaaaaaaaattgtacatttagtttgttgccaaatttaataatacataagaaatcctatcatcttgccaatactaaaatttagtgatgtttattttagctacaatctgaacagcccgtaatggtaacaattgaaagcaaattcatcatgtactataacttttgtgacatcagtactatgctagtaccatattttcatcattaaatctacaattagcacataacggagattggatctccgtgctaaagattagtaaaagcactataataatgttatagacttaattgtttgattatgtagagttgtaatgataacagttaaaaccaaatatattacctaccataagtacgtagtactagtgctttgtaccattatcggttttgttcacattttgatcatctcctgcggtttctgcaatcttaaatcttgtagtcataccagcttataaacccattccagactaaacttagcatcatatgaatctggacacgtttacgatagaagggagtctaataaacattgcacataatcagtacgtagaccggagggcaaattggtcatgtaggccaacacacattctaatcatcatcgggcggttcaccatcctgcagaagctctgctggcctccggccctggccctggctggaattccgcccaattattagcggccagtggcattcccgcaattcctgacctcttctgctgcccctccccccctccatttctataactgcagccaccccagcggcgcccatcaaattctgcaaaaaccacaggccgcacagccacagcagcgtccacttcacgttccatcatctcctctacctccaaccacatcgttgcttagcctcgccaccgccgccgccgccgccgatcagtggtagatcgatcgatctagccggccatggattactggaagaccaaggttctgccgaagattaaggtcgtcttcgccaagggcggcaacgccaagaaggctgccgccgccgaactcatcaagtcgtttgatgaatctaaggtacgccgccgccgccgccgccgtcgtttgattcgtctggtcgatcgatctggttgattgcgatgagatgctgatgattgtggtggtggtggtgcaggaggggatcaacggcgagttcgaggagaagaaggctgacctccagcccaaggtcgtcgagatctacgaggctgctcctgcgccgctcaaggtaaatataattcagaaactaatcacacgccaaccgtatcatccgtcctactaattcagtagttaattaactcgatcagtgctgccaactgcacgtattagtttgcggtaattgagacttaggcccatctaatcatgcaactaatgaagtgatgatcctgatgtatcgatgcttggctgcatcatgctgcatgcgttctgtacgtctagtcgccctcgctggctcagtgatgagcagtgatgcgtcatgcatatgcatgtaccctacacatatgagtagtgatcagtaaaagactgccagccagctagcttagcttagctcatactatctgccaagtttacagctaattaagtataggtcactgaaacatttgatgtgtccatggttggcaggttctgatcaaggacagggccaaggtgtccgggatcaagaagaactccgccgccgtcaccaagttcgtcgacgatctcgccaaaatcggtaatatataatcaacaaacacatctcatcaaattcttttttaatataatttcgctgatcattaattagctacgtgaaattttcatggtggattgatcagagttccccggagcgaagcaactgagcgaggggatcgccaaggtcggcccggcgctgctctccggcccggtgttcgccaccttcgagaaggtctccacgttgctccccgccgacgaggaggagatcaagcccaaggaggctacggccgccgccgccgaagaggagaagaaggaggaagccgccgccgccgccgccgccaccgacgccgccggcgaggagaagaaggaagaagccgaggagaagaaagaagaagaggccgccgcccccgccgacgagccagctgcagccgccggtgagagcgcacctgccgccgccgaggccgagcccccagtcgaggccgcagcgacgccggcggccgctgaggcggcgccggcgaaggccgaggaggaggaggcaccaaaggcctaactagctatagctagctagggttcatcgccgccattattgatggacgcctcaagccctagctagagagggatgatcgatgtcgtcgttgtgccatgtcaccagtcaccaccaccattctttgctcttacacatatgcatgatgatgcagatattccattattgttgttcattatttttctctaccatttcttcccctctttatggttagacgtgtaagcctataatttttgtctgtacttaaattaattatatgcagtgtgaggacatgtatgtatggcatctgtatattatcgccagttttgttcatcttggaagcatatgcattattaattcattgattggttattgttctttctttcatgatatatctctataaatattctgaaaatttcaaaaggtttgcacaatcttttcttgcacatatgtccatgtatgtgtgcagttgttaacatgtaccattgaggcattgacacaatgaatcggtgctgtgttgatctgtttctttagcgttgggcatgcaacaatgtaaggggatggatggggcccagtggtcatgtgctccgtgagttgttgttttccgggcctgactgcttcgtgttggatcttctgtggtctactgctggactgggccatgtatgcgtgccagtttagtgagggcccactttgtcggggcatggtgcatgtgccaccgtgcagccttggatacctactccagctatgccatggatcttgctgactcgaccaaactttggaaatggcctattttcagtgtaagaatatgtataagttgggggggatgacaggtgggatattcaaccgttggaaagccacacttcagtgcatgcatagccgttcagacagctacaatcgtatacagtactctaatttgatccacggtactctgaatatggtatatggtatatgaaaaaaatatcattatagttcgcgttattggttggatgtcactgaaaaattttaaaattgaaactatgtcactcccatcactatttttgtcctcctctctcatgtcgtcatcctcaccgtcaccagtagatgacgcacatcgccgtggagaagtagcagcggcggcggcggtggcggcgatggcagcactccggcgtgtgttgatatttcttaaagtcattactaggaatatagtaattcccagcaatgactcttgaaacattactcggtattctttacggttacagatataatctgcaggcatacggatataccgctgtaacatttcaccggaaatattccaaggtatatatcgtatttatttaatcacaagggatgatatgataagagagtactatgctgataatttatatcacttatatagatcaaagtctaattcatgggttaattgattcaagaatatggtaggttgacacacaaaagaaactaaccagaatacttttattaaaataataatctaaactaagtggagaaaaaataagaaaaaaataatttctgaactctagtatagtcattttagtctacacttgctattttacaattatgcagccaatatccctaactatgccctcctggtatatcgagaaaccacccctaattgtcgagttccttacgataacccgtcgtggccatccaaccggtaatgaatacggaggagtacccacaccaggaaattctcttatattatatacgcatgtggaggaatactcgtactgagctgtcaccatcagcggcctacctgtatatagacccgtggcatataaccctatttaatgatatctgataatctaagcattgcgcttacattattaaatactactctacatctttgcagatcacatagagcaatatataaatgaacattaaaccaataccattgcatatctccagtaagctagctacataattattacgagacaagtataagctaaagccggtactcgaataattatataaatgaagtaaaggaccgaaactatgacaagaagaataatttattaatgaattaagtcttacaagagagagaagagctactaaagccttatccgaaatctccggaagacttcaaaaactaagagactgttctaattctactccactagcactagaacaaagtaaataaactagagagagctcttgattgcttcttcttggtgtgtgttggagtggagaaggtgagctccttttatagggttcatatgacagttgtggaattgtcagaaatgccccgcaaccgtctttgagaagctatcatggaattgtcagaaagggcctgatggcggttcggcttggttcaaccgaaccctgggccccacctcctggcctatcctttgtccaggaggctgactggtgggtccttatggcggttatgacccattttatggcggtttcacctgacctatgggcccttcaatacttgtacttgcgactgattggtcggaggtgtgtctttgatgttattttcttttattcttcctccgattatgtgaagttctcctgcaaacaatattttgccaagtataaatggaaatagattattcttaaacaaatatgcatgaagcattgctagttctcctttatttttggatatattgacggttggaattggtctataacgaccgtcaataacaatccgttggcatttctggtacatgctacttgttaagggcttgtttggcagagttccaactccagttctggagcccaatcaaacggtttcagttccaccaaaaaagggagcggagcgggttaaagtgctctcacaaaataaactaaataggtggaatttgttttaggctgctccacagcttcacttcagatccgactcttagagttaaatttaggagttggagccctactaagcatgccctaaaccaaaaccttccattgaggcatttactattttgataaatatcaatggacgttcactacataaatatttggtcaaccctgtctaaagaatacctctaccctttttaggggtaaaccagccctagtaacttttatatttcattaactcccaataggaataagtccactttgactcccttgaatagaggtccaacattctaattcatatatcggttatctttaccaccaaactattaaaattggtgtaatttgcttctctcggctgctcttgagggcggtttcgctcatgtagcacgttgacttggtccaacctactaagttatcaatggggcccacatgcctcctttctttctcctctcctccactttccccacaccgctgagctatcagggagagccagtgatggcagtcgtcggcggcacgatggtgacgaggagtgtgacagcagtcggcaatggtgcatcgacggtttcgtcagcctcccatctcattgccactatcatcctcgttcacacctcctccttcctgatgaacgtgccacatcagcgaaaacccactctcaaaaccattaagggagtcaaactacacctgttttaataattgggaggtcaaaatatccagcattgcagatcaggggtacgaaccaaattagacctatattttgaggtagtcaaagtggacttattccctcctaatacaattgggcaggacaaaagtgcctctccatgctaaaaggaaaaggtacatcgaaggtacctcaacttgtcatcgagttacaaaatcgtcccccaaccgcaaaaccagatatagaacatccctcaacttacaaaaccattcactttaggtccttcggtggttttgaccccggttttgtctgacgtggcagctgagtcagcgtgggacccacaagggccccacatgttagggtgtccacatcagcgcccctctctttcccctctttctttctctctccctctctcacttttcacttttctcctctcttggcagccggccggcgggcggggaggaggtcgccggggcgaggcgggagaaggggagggcgccggctacgtgggagaaggggggagcacaggtgtcatgcccagaaattcacaaacaagaatttctaagctgaatgtgcattaaatccctgtccaggaccagccagggtatacaaacgataattgttgacatacagatccacgtcttacaaaaatataaaagattacaaatgcagcggaaaagataaaacgagctaaacttggaagcttgacttctgcaacgggcgactccactccacaggcaaccttgacggcagcgacgaaaccaaccctaacaagacagctccaactaggaagatcttcagctctggtgtgggagaaa

SEQ ID NO: 8063 - DNA, 11717 bp, Oryza sativa
atgtcgtgaacaaggggccttgcaacaagagcatcgtgggagcagtagcaatacagagcaagagcaacagcatacaggtggcttgtaaggcacagtgatgcttggtccaaaatgtgcagtgggtcagtagagcattacgggagtgagccaattgatctctttgtgcgggttctggtcttctggaagagactattttgtccaggaagtagaatggttagtatagttagtttagctgaagttagttgtggtaaacttgtctgttaggaaagtgttggtcgagagcaggaagacgtgtaaagatgcattgtatctattagctctcctgtctaaacatgcatcttggttcgcggcagtatgggaagctgatagttaattgacatctgtgttcgccaattttgcaggtatgccttctttttttgtctgcctttgttggtttcaaaatgatttagtgtgtatttgttgcaatgccatttcgttgaatcgcctgtaatatgtttcataggttttgatgtagtatgttccgtgcgctttggtcttgattgtatgatctttgtttcttatactgtttatgggtaaatagggagatgtatattgttctgtttgtgttagcatgtaaaatttcatatcattaaattgttctcgtcttttctcaaaaaaaagtcatcttctgttttgaaaagataatgcgattcaagttttttttgccattttgtgccatgccccccgcgggcgtcatgtagactagcttaaacttgctgtaaacgattcatctttctgcatattgaagaattataggtcttactttttcagtaacaagctatccgttgatttgcttcttaattataagttgatgcaaacttggtttgttagctttcaaatcctctgcttactaccgtatttttgttgatgcaatttctaatgataaataagctttcgagtcccttcctttaatagtttgaaagtaatctcaaattttagcttccaaaaattctctttccgaatcattttcacagttttattaacccgggctgttctttgttgttgcaccaaatttgcaagtctagtttgaggaattattatttttataggtaaattggaaccatgccattataattttgcaaagtttgagatatgtcatcagtatctcaatgacatggaggacccacgtgagtcaatgacatgtaggtcaggatggcatatctcaaattttataaaattataatggcatgtaggtcaggatggcatatctcaaattttacaaaattataatggcatggttccaattttccctattttgatataagggcaaatcttttcctgcaacatcaaagcaatccacattccacgctgaatacgtatggaacaagtgactgtcattgtaaataggcgtgtgtcgaattgccaggttgacaagaaaattacttgtaaatctttgtacctttttatttgacgatatttattatgaatgaggaagaatattaacggtgaatttcagggatgatatgcttgttcacattgcatattttttccacgcaaagtatgcattttttttccctcacaagtcataatactgatggatcctcttggcgttaaatgttccctttgtcttgtttaagattaaaattggatgaagaggcgtagaccttggattcaagactcaacggcctgttttggttagaagtttttaggagggattgagagtttagaaggatgaggctattaagtgttttatttggttgagagacatgggagttttggtaggatgggaatggggaattgtggaaggaactccctccttttcaatacctgggtaggggcagataattgggagggaatttctcctttactttgtctaagcaaatctcatccatccgtttttattaatgatctaatctccaactaaactccgtatcaattttcatcgcctctaccaaacaagatattgggattaaaaatcaaattctcatcttaatctcatcatcaattccctcgtgtaaactctcaatccccttctctgaagtggagttcagaaaggaccaagaagctagatctatgaaaggaccacaacaagtggcgaaaagagttcctcttttgaactcaatatcactaaaatcaactcattcaagtacgtgatagcagtatgcaatataggatggcttcccgcctctactgataccagcgctgtcggatcccaaaactaacgattcagaaaccgacatatttaactgtatcaagccctggatcagtaggttgaacaggttcaataatctggatcttcattgcatacatttggtcaaggctccaaaggagatatctttatatataaaataataggacatttacaagtttgtggctaactattacagcagaagctatacgatgacccaactctatcgttttactatagaactaaaccggctaactatactagacttgaagactaggtttaaagggaactaacttatgtgattgaactcccagctttggcaaaaactccaaatagactctgaaaaaaggggttgaagcaagggtgagtacatgccaatcaccccggccgcctgcaggctcagtttggggagaatcggtaatcaacttcagagaatctagagaagctactaacccagcttttagctatagttcattttctagattctacaactacaaaatctcataatcaactacaaaatctcataatagagtgacaatcttacagtttaaatggatagaaactccctaaacaagccttagcttggtccacaacaaggtgagaatgatgaggcataccgacatttaggctaacctcaccttccacgcactaaaacggagtaatgcttcttttgcaaaagacgcaccgtttatcaatttaaaaaacgtgcacaacacgagcgaagtgagttgaaaaaggtagggggagaaacccattagattaaggccattgaacggtcggatgcaagggagtgagtaccaccgctgccttgcaacacgcaagttggttatttagatgattcgtctcaagaatccttgagataggaaggatacgctccgaagtttggagctcagatgaacaaagcgcattgcacaaatgatgtacgaaggatgcttcacagggctggtgtccatcatgcaaagcattcatcgagctgatagagtgatagttgagaatcggcgttctgggaaacaattctaaaagacagctctacacataccgaaacacaactagtacaacacaaagcaaaacaaaataacacaacagcatcaggcaatacataaacaggaaaagaaggatcgaaatccgggcaaacagttactctcatctcatcaagataacaataccctattggcatcagttctatcagaccccgaagattttatgcgatgcaagaaaagaagaaacgcaataccacgacatgactgagtgccaatatcatagcgtgatgtggtacgtgaggagaagaaatgatcccatcagaactcatggaatcaattaaattttctaggtatatgacattctgaacaaatcgaggcatctttgttcaaaatagaacattttcaaaaaggcaagctgaacgttaggtgatataaataactttcccaaagcatcttctctagcttacacaacagaaagcaatgagcatctatgtaaaaattataatcactcataaccgcatacaagcaaaatactgaaactgtccattggaacatcacctaacatttaccaatgtattgtcaccaaaatcaaaatagaatcatcaaccatgccattatccccatgatataactcaatcagattgtacaaatttaggcgcagacttgtcacaaagcattgttagccagaacaactgtagtctaaaaaaacataaacagccaaaccacaatcccacaatacttgatgcaaaacatccagacctaccactaaactgtctaagctcaacactgaagtaggataggacaattacactttttttaatctatctaagatttctacaaggatcatagtgcagccactgattgcaacaactaaaagaatgaaataagttacttatagacgtcctatttcattactttgcattcggattcaaatccaacaatgcaaacaaataagcagctagccaattgaaccttaatacttgaagcataacataaacagctaacatacataacagtgcatagccaaccatgtaatccatccaaccaaagaaaccaagtgctaccaatcaccttgcacaccatgaaacaaacaaatcgatacctaaacactaatcaggcaacctatcgcaagttgcactaccattaccaaagaattgcctaagattacagttgctaaattttgatagccatgcgagttagtagacctaattaagttgcaaatcatgtccgcaaaacactgttgggcacatcgcaatgaatcaccgctggaaatggaggaacatggaaaacaaatcgcatctgaagcagtgtaattcccaaacaaaacttcaaccagatctatccttggcatgacttcataacacatgagcatcatcatgtcttaattttaaactcaatactaacaaccaagtcttcatggacacagataccaaaaaaagcagatatagattaacggatgatagcaagaacaagaaggcgcgcctagaagcggagcttggtgaagaaccacctgttcttgccggtcttgaacctctcctcgaggcgagccttggcggccttgcaggcggccaccttcttgtcgcgggtggcgagggcgtcgggtcccccggaggccacgtccttgaagtcgacgtcgagggtgtagcgggtgggcatgatgtgggtgaagttgacgagcttgaggaagcacttgaccctcgacttcttcgccgtcttcttcgccgagtccttgcggatcaccttcttcgggtacttggcgaggccggcgacgaggcagtggccgtaggggcggtcagggtgccctcctggaacacgcgcacgatcaccgccttccgccccgcgtaccgcccctgcagcaggatcaccgccttccccggcttcaggaacttcaccatcgcggcggctgtacggatctccttctccttcgccggtgtggttggtcgccgccgccgccgccgccgccgagctcacctctgctgctgctgcgccgccgccggatggtgttagggttcgcggagaggggagggttttatagtcgggatgcggcgaggctagggtttgaggtggggaacgaatggcggatttgcccctgggttgcggatcgttggatgtgaatcggacgggtgtttcctgggtaagttggtggtggggccgaggtggcagtgggagattgaagggcgagtggagggggtaaaatggggaaggttgagcgggtgcgctgagatgggctttgggcggagaaataggcccaataagacccatataggccgacctatcggtctggcccacttgtcggacggacggcctttcggcgcctgttagcaaagcagcagtggttatgtacagattatttgaaagagtactgctatatatacgactcaggtggtgattgaatcttctaaagatgaagttgaagattaagtgttttacgcaaaatgaggtggtaataatgtgtgtttaattgagttttaattactacaaacttgaaaaatggattaatctgatattttataacaactttcatatagaaagttttcgcacgaaacgcaccgtttagcagtttgaaatgcgtaccgcgaaaatccaaaacttcatctagtctttgtagaggaaacgaatgtggcctcaattgtacaactcatatatataactagatatatgcaacgatagattaatcgaaggagagcatgttcatatgcactgcaaccttttacagccgtcgatcaaattcagtcggatagttgggtcatatgcatagcaatttcctatttgaaattagcatggcatgtttagataagtactaggagtatttgttttctgaatggcagatgaatttaaattgctggagtcccaagatgatgagattgcgagaagggtaggggatgaaggcatgaagctgctcgatggttttttttttctttgggtggttgtgtgctaagctgaagttctgcttttcgatctgatctgggtggtgatctgctttggatcactctgggattgatgtctatgtttgtttttctctttgcagtagttgattagttggttgtaagatagttttcgtatatgcctgaagtctcccccaactatggttggatggcacctggtcaggtcgttttcgatgttgttttaaatcctctgaattttttgtagcttccgtttctggtaatagaaatggggagagcttggctctcctagttaaaaaaaaaaaaaaaaaaaacttctgaatgatgtccagtggtgttgggttgaactagtcagtgccaccgatttttggtttgaattttagtttgatgtcagaatcatgtttatgtactagttctccaaaaaatttggtaaggtaaaagtatttatcgagcgttcagtttactattaacaaactacgcgaagcaaactaggctgttattttgcttgcctgtccctttggatgtgctcaaatttgtgcctatatttgcagtgtttctgataggacttcccttcttttgttgaaataaaacacaagttcacaggagctggaaaagatcacaagtttgttatgtactcacatacatgtaaataccactgtaaaaggagtgacactgtaaaaaaaatattcgtttcagtacacatgcacaaacatatggttggttcgtcagctaattcagtgccagctccaagctttggaatctctgaactgttggtagcattttgagttcttgttcttccacctccttgactttgttgctccacttcgctttgctgttttcaacttgttgggttgtcaaacatccgttctaccggttttcctctgctttggcacttccttgatgttttcgcttgttggagaagaggcgactcatcttctcttgtttttttttttttttttttttttgctgtctatacatcttgggacagaaaatcccacctcatatcattcgaattttaaaccattggatatgcttcaagatttatgcagatccttttaaccctagctcctctcctcctcctcccgattcagatcgcacaccaccaccactcctccgtcctcgcgcgatcctccgccgccaccgccccaccgcgccgccgcccgcctcgccggaaggggtcaacggcgccggcgagccccctcccccttcccccctctccccgttccctcctctcctcgaggtgcccccgtcccaccgtcttccctgtctccggcggctccccgccaccggatccaccacctcctaatctcatgctttgtttgcccctgccgccgacgccggcccactgccttcctccatccccgcggcttcggcggcgccgccgccgcctcgccgcctgccggagtccaccacccaccgccagtcctccgcccacggccatccctctaagccccaaggaaaccccccgcttccccctccctcaacccccctcctaccctcaccccaaccccaaaccctaacccgccggagttggggtgtcgccagcgccggagaagaagggagcccaccggagttggaggagagaagccgatgcatgaatcttggcatgaatccaatggtccaagatctgtaagatttcttccccaaatttcattcgaatgccatatagcaatccctttttttttcatctgccttagtggcacaaacaagaacatggaggatctttaatggcatgagactatgagagtgaactgtgaattttacagaagttttgatttgttactcgcctttcaagtttggcagagtagatcacacaggtttaaaaaaccaaggctaataaaccacgacacattcaagcaaaatctctgtcagaaaccgtgcaaaactgaaccttttatgtattacgaagttgacatgctcggatagcttcggtctccttcagacaaaggaacaaaaaaaaattacagcaattctctgcttcaaaacatgataaacccaatcacctcccatgttattactactaattattgtttaattttcctttcgctctatctcgaattcattcttcgattctaaagaaagaaatcggtgagaaaccaaacaaacaatacatgagccgagccgaggtgagcgattcagtgcctcccacgcttcttcgcgggcttgcagtcgtcgtcgtcatcttcgaagccggacacctcgtcgtcgtcgtcggagtcttcgtcgaggtcgtcgtcgaactccccgtcgcttcccatggcctcaaactcatcgtcctcgtcctcgtcctcgctctcgctcaccgccttcgccttccgccccgcggcggcgtaccctctccgcgcgtgcagcgccgcgggggtcgcgcccgcggggtggagcaggaagcgcgccacggcggcggatggcggcgccgccgctgccaggcggggagcggcgggcccaacggcgagatgcgccggtggtgggcgtggggcggccgcggcgaggcggcggagggcgagggaggcggcgcgctgcatggttgggggttggcggcggcggtggcggcggtgggggtgagtgggagggtggcggctagggttttggagcgggatttgcgcgagggctggggatttttaatggcggggaagtgggagggagcgcgggcgtggctggaagattccagagaccgcaagcggctcccgcgctctactctgatgatctgatctggtcgccgccgccaccggcgtgcgtgtgcctgctttttcatttttcttttcctattcgggctttgttgggccggtgaatgcttgttgggccattgaagatcaggaacaggttagattgggggaataagtccacattgactcccttcaaagtgacccgaatctaatccatgaccctaaacggcaaaaccgaatatctcgacccccgaactattggaactggtgcaatttgactcccttggcggttttggagggctgtttcgctgacgcggtgctggcgtggcggtgttgacctagtctgtgaggttgacgtggcgcttagatggcacggaagttgacagccacgcagcgagctcgagcgatgactcgatgacgtcgtcgttgcaatgctgaatggcgtagcttgatggcggccctcgcccctaaccatcttgacaggctcgacatcagccatgtcatgagcctgccgcatatgtcgaatcttgttgttgcgatcggcgaaaaggccagagtgccggatcttattgtcgcggacagcgggaggcagcggagggagcagggagctcgttcccccggtgaggacgttgtgtcggtggaggtgaggactaggggtggaggaggtcgccggcgtggatccataaaggagatcggctccggtctccccccagcacccttaggccacgccggctcccagatcttggcccgctgaagccgtctaccgccgtccccccgctcgatctcgtcggcgctgtcgtcctctcccgcctccttgccggccatcgagctgcccgctgccgctccagaacccgccgttagctccaacccaccggcgctgccgcttcaactcccggcggccgccaccgctctagcccccgcccgccgccgctctagcccgtgctccccgcgaccggccgaaggggagagagagacaaagaaagagagaagggaggaagaggggaggaagaagaaagagataggatgacatgtggggcccacatgtcattgggccccataattttttgtgtgtgaatgacaaacgggtcccacatatatgtttttaattcaaatgccacctaagcaccacgtcaaccccacagactaggtcaacaccgccacgtcagcgaaatcgccctccaaaaccaccaagggagtcaaattgcagcggtttctatatttcgggggtcgagatatccggttttacggtttagggtcatcgatcagattcgggtcacttttaagggagtcaaagtggacttattcctagattggatcgtgaggcagcacgacaacaaacgggtgattttagcatggaaaaagtacaccaaaggtccctcaactttttatcgagttacaaaatcgtcccccaaccgcaaaaccagatttaggacatccctcaacttacaaatccgttaactttaggtcctccggtggttttgaccataattttgtctgacgtggcagctgagtcagcgtgagaccaacgtgatccccacatgtcagggtgtccacatcgtcaccctatttctttcccctcttctctcttactcttctcgtctaggactctgggtagggcgactgacggatggggaggagaccggcggggtggggcggggcgaggcgggagaggtggtccggccacaattgctatctcgcgccagttgcttatgtcgcgcgcacgtggcaagccaactgcacatgcatgcatgcaccacggtctccagtcgtgcagatgcattacacacatgcatgcatgcatctatacgatctttctttttttttatgctttcatcttaattaatttaggatgtagtgaaagttatcaaaatttctattataagataattttaataaaaatattttttataatgcaaatttaaaaactcgacatgaaagtttttaaatcggagttgaaagttttcaaatctcgagttgaaagttttcaaatccaacttgaaagttttcaaatctcgagttgaaagttttcaaatctgagtcgaaagttgtcaaatctcgagttgaaagtttttaaatctgaattgaaagttttcaaaatttatcttgcaaatttaaatttcgacttgaaatttttcaaagtttaagttgaaagatttcaaaatttgactttaaagtttaaatcttaagttgaaattttcaaatctaacctgaaagttctcaatctattagaaaaaagaaaaagtttttaggtactaattatgattagcactaatcactaatcacgtcatcattagtgctaatcacatctttgtgacgggggcagcgtacgcacgagttccgttcgcggcgcgtatgcgcgcgttaggactcccttggtccggcagccggcgacgacggtgcttgtgttggcaactttttttgacaagcggtgatcctagagtcgccaaccacctcgatctagcaaagagctaaacctagatgggttttgataactaaactagctagcggagccgatttctagataactacccgtctcgtgggcaaaacggaaggttttcaggacaaacctacaaagagatgtcgcactctcgcagcggcggcggacggtttacggcgcaaaccgacaaagatggaaaaactaagagaaaactaaaagcaatatgaaaaacgattcgattgattgattgtagattggttttttacaatgaaccggccatgtcccttatataggggttggtcttgccctctacaggccctcctccacgtccaactcggagtagaaaccaaaggaaacccgaaacatgctttcccgagcaagaaaacctcgagacccgatgaaacacagttagactcggacctgccggtcagaccggccacacaccgccggtctgactggccctcaaccggtggtctgaccgcccaacacacgcggtcagaccggcccactcgaaggaaaccggtagacttccaaattttggcaatctttcctattttaatcctaggt

SEQ ID NO: 8064 - DNA, 10212 bp, Oryza sativa
aggccatccccagcccggatccggcggcaacacccgtccctcgcggcagcgtcgggtgacggcaacggcatgcgtcagcggtggcggctcgggagcaaaaccctagctcctgccgtggccgccctccttccctcctctcctccacattcccgtcgtcgaagcgcgtctccaggagagccaggcggcgagtcgggatgtcggtggcggggccgtcttctctgccttcccgcgccggtggacgaggaacaggaggggatggggccggcacgtcatccggcagcggcgccgcggtgatccggtcgctgctccccgcccgctgttgctgctgctgctgctttcctgtcttcttgctctggtttttcccctctcatggcggttgctctgtctagagactactcctcctttggaatccttttcagttttggttggattaattggagttcgctttgctgcgcgattgcaattgttcttgattgatttgcttggctcagaatagtccaaggctctgtccttgtttctcttcgcatactgattcctggttaagaatggtcttcgctttgtgcactcgttcttctgtctccacgaagaaaattggctttctcaaaaacctgcaaaactggaaacaataaaaacgaaacgaattgcatatgattattatgttgctcgcaaacggaatagattgaatcagcacgattgatggatacagtacatagtccttgcttgtctctgactttgctctctactgataggtacagatgagcctgggaagcaagtcgatctggagtgctgtcaagatcaagaacatcagcaagtctaaatgtagcatttaaggtaattaacagagctcctctctgatggcttcttcatcaaattaaatgctaataccagtggttttgcaaatgatggtagttaccagtaactcagtaagtagtagccagcagtccagctcctgttaatttcaaagatgctgctcggattaatgataacatcaatcctctcaataactcaggttgaaggtgaactgtattttaggatgaaatcaatcctctcaataactcatattaaaggtgaactatattttaggattatctgtcaatttagagatgttcatattttaacagatgactatgtattgatctccaccataaaaatctgttggttcagtccccacctacactaatttgatggctactaataaagcactaatttgatgcatgccttttgttctggttccaaataacagcaccaaagagttgcttcataaaacctccaggtggcatacttgttctagcagtacaaacaatttcagcttttcctagtttagagatttgattctggcatgactggtatggggaatatgattagtgcttggcttttgggctatcggctcataagtcttcggacaacatttaattgataagccaatagtttctgaaattttctatttgatgtgctagtagattcttagattttctagttgatattttattaggctattagcttctgaaatttcctagcttggaagagtattacttgataggcaatacagttctctgaattttttttgttcacacagacatgtgcagaagtgataattttttaatccgtccagtggctgctctcaactcacctgttgatttgcagtggttattgctgaatgaaagatgggagaattttcgttcagagaaattatattcagagttctgagtgtcatgttctctcagtttgcaagtacatgcccttctcataaatttttagtttggtcggctggacaatttgatacttacagttgtgtcaaaagctctgaaatgttatgaaaattatggggtttatagacaaatcatgctctaaatgtcaattagaaatatgtcatttgcaaatttgtgtgtgcagtattctgagaaatctgctctcatctgaattatcatcatcatgttctctcatatgttggcgggttccagggtgaaggttggatcctcggtggagcatgccgatgctaccgactccaccatggatgtagctggcagtgggattttgacgtcgaccgtgagtcttcggcaccggcgatggtatttggcgagttgggatgtactcgcttcatctcaatatgtagcaacctcttccagatttgtagttctagtattggtttaatctcatcctagattgtaacatattgcgacggagggagtagtcattggttacaatcttcttgattttttttatcaaaatgaatatgtgtatgtctatttcccatctgtaatttttattggtaaggaaccagccaacaccgtaatattgtattcatgttgtgtaggatatataatttgaaaaaaaaactcttctcatatattgtcatcaagtaaaacatttactatgcgttaataagcgttcatgataaaaatactaatagattgatacatagcattaaaaataaaaatcacttggcagtaaaaatactactaccacaaataaggcatcgagctactgaaaataactaaaaaatcattactaataataaggaacttatctactaatatcattactaataataaggaactaatctactaataataagaaattaatctagtgatatattcgtgagtaactgatttactgaaaagatctaacatgactaaaagccaataatttatttaccaaatgaagattggttgggtgaagtaatctgttagtaattttttttaccgatgcttccgcgagggaagaaaaatagcagatgtgaatgagaaaaaaaaaaggaaaaaaggagggagcggagggagtacggacggttggaaaaaaaaagaaaaacgtggcctggagtgggtcaggccgggggggggggggggttagggtatctgaggggagcgttttagttattacgcaccctgggtgtagtttagctctattatatatatagtagctctattatatacccttcccttagaataactattctacaccacctccccaaccaactcccacccgatcccgccctcccccctctctcgtcgcgatcccgcccttccccccagtctcgtcgcgcccctccctcctccctctccctctctcttttttcgatctctctcccactcctggcgccctggtattttctccctctccctcatctcgatctctctccctctcctggttttttctccctctccctcatctcgatctttctccctctcccggcgccctggttttttctccctctccctctctcggcgccctggttttttttctctcgcccgttggcctctccccctctaatttttttttcatctcaccttggaaagaaaatttaaaattaaaatgacaaaatcaagactttaacccatgaccttatgattcaaagaaattctctattaaccaattaaccatatgagatcttgtgattagagtttattgcatcaattttatgtctctattcaagctttatgagagcaaatcacatatattgttgtgaaacttataatctgttattatgttccagtagtaatattattgtaaaagtgcaataacacgtcacgttactgcaaaagtatataggttgttactgtagttctgacaacatcatgtgaactagctgggtggcccgcgcaattgcgcggctagcgcccaaacaaaatcatatatttttagtatgattttacttaaaatttattaaatacctatctcgttgtcttaagactttgaatgactaaaccttatcatccccgtatttctagttatatagtttttaaaagtcacaccaatttctaccccttacttctgccatctccttctttatttgctggctagatctaccactttctattcattcttcttggaacctttaaaaattggatcttatagtttttagagtttttagagtctattgtcttgttaggtttctttttataatttctagaagtcacatcaaacgctgccattatactactctacggttcgtccaatgtcttttctctttattgtcattgggattttaaaaatcgaatgtaataatcgttcgggtttattttttactttttagaagtcccgccaaaccgttagtggctttgccattgaaatcctctatggcttatctgctgcctcccttctttattgtcattgagattttaaaatcgaacatgattatcattggtttttttttactttttagaagttccgaacctttaaaaattggaccttctagtttttagagtttattgtcttgttgggtttcaattttcataatttttagaagtcccgttaaacgatgccactatactcctctacggcccacccgccgcctactctttattatcattgggattcttcgaacataactactgttggaattcattttttattttctagaagtcccaccaaccatcggtggctctgcgactatactcctatacacccagcccgctgcttctcctttttattatcattgagattctaaaaatcgaatatgattattaatgtggtttattttttttactttctagaagtcctagcaaccgccttgtccgtttgcttcacgacatacctgttgtccctccttttaatcgtcgttaagattctatttggtgttttattaacagttatatgtcgtatcaaccgccaccactctactcctttataggcatgttacttaatttatcttgtcatgtgttttaggtggtcttttctttcaatagtccttattttctatcaccaattagttatcaataaattgtattccttatggaaatttttttttctttttctaatttcagaatttattttttttttcaaattttaaccaatactgtatattgttcttttaatatttttatttttcaattccagttgtttcaaaattgtattcctactcaaccctcttttactttttttatattattttattttttattcagaattttaattaatcttgtatcgggttcttatatggattcttctttcaatattgcttatttttaatttcgaatttctgttaattttaaattgtattcctacttgaactcttattttctttttgctaattttagattttatttttatttttcttctgaatattaactaatatcgtattgggttcttgtattgactcttctctcaatatttcttatttttaattccgaatttcagctatttttgattttgtatttctacttggactctacttttctttttctctgattaatgtgggagtttctctgattaaaaattgaacataactatcattggaatttattttttattttctagaagtcccgccaaccatcagtggctctgcaactatactcctatacactcaacccgctgcttctcctttttattgtcattgagattttaaaaatcgaatatgattatcaatgttgtttattttttttactttctagacgtcctggtaaccgtctagtccatttgcttcacgacctacctgttgtccctccttttaatcgtcattagaattctatttggtattttattaacagttatatgtcgtatcaaccgccaccactctactcctttataggcatattacttaatttatcttgtcatatgttttaggtggtcttttctttcaatagtctttattttctgtcaccaattagttatcaataaattgtattcctaatagaaatctttttttctttttctaatttcaaaatttatttttttaaaaaaatttaactaataccgtatagtgttcttttaatatttttatttttcaattccagttgtttcaaaattgtattcctactcaactctcttttactttttttttaatttttgatattattttattttttattctgaattttaattaatgtcgtatcgggttcttatatggatccttctttcaatattgcttatttttaattacgaatttctgttaattttaaattgtattcctacttaaactcttattttctttttgctaattttagattttatttttatttttcttccgaatattaactaaaatcgtattgggttcttatattgactcttctctcaatattagttatttttaattctgaatttttatttgtcttccgaatattaactaaaatcgtattgagttcttatattaactcttctctcaatatttcttatttttaattccgaatttcagctatttttgaattgtatttctacttggactctccttttctttttctctgattaatgtgggaatttctagcccccacagtgaacgtggtgccttctttcaaagctgttttaataatataatagatattgtagtaacacggaacatgtatgtagtagtaacgatacttctacagactacgaatgttgttactacgagcaagtaatcatatgttagtacagtatggttgtcttgttactgtgcaattcctgcgagatgaggatacgaaagaggtgggcgtggagggaagtgagcaacacaaaagatacataatagcaaactaaacacaagtggattatttgaaattctaatctttaaacaatcgtatctctcgcatcatatataatatttttgaaccgtttccaccataatgctttaaaaaaaaagctttacaaaactagatccgtcatcactatattttgacaacgttataatattgttactgcaagaaagtaaccctgttactgcacgatggtcgtcttgttactgctcctgcgagacgatgacaacaaagaggtggacgtgggggaaagtgagtgggcgggtttgaccgaggtctgaccggcgggaggatgctttgaccgacctttgaccggggtgggaggggggtttcgggctctagggagggtgggggaggtgggtttgacccatgggaggggggtgtagaataattattctaggggaggggtgtagaatagattatatatatatatatatatatatatatatatatatatatatatatatagagagagagagagagagagagagagagagagacgtttatcctggataatcctgcagtcctgccaatcgcgctcaactttctttttcccagactcaatagttgagccttttttgcatgataaaagaatcatttctgagatagattgcttggttttgtttttcgacccatcatggttttatgaattggaaccatagttggttgattagcagcacatccctgaacataacaaccatgaaaatagcagaacacacgctccaatatatttttagaaagtgcatatctcggctggaacaacgcacatcagctattcccaatttttcttttatatgctattcccaatcttctggatacatgattattacctgctcgatctcagtataagcagcagtgtctaatcactgagacatacaaagtgcagcagttagcctttgtgtcctctgctcaccttttccttgtagttgcactttggaaggcattgctcaagggttggatagcacagctggtcctttgaacagcaatagaacccaccggcggtcacggcgcaaacattaagtttaactccaatgctggctgccttttttactcccatcaacatattgcttccgatcttgcttgcagtttgacctagagatgcaaggagtcattatgtttatcttgccagtgcaaacaaaatgatgaaacggcatatgaatcacggaaaaatgcaatctaattttctaattacctcttgcttgtgtaggaatagaagagcacaccacaagaaccaagaaaaagaacaggaccccttgattggtgtgcttcacacattttgccattgtgaaagatatgtttactagtatgttctatatctgtcttgttgtgactaatgagtgtgaaaaagtatagcagttatatatcgaagaagactagcgtgtcaaaataggtgtatgtcttatccttgaatccctaagtaatctgctattaaagccacttctaaatatgggttttgaaaatggttatgattaattgcctgttttatgacaagaaaattatagctctagcatcaaacaagggaaattatcctaaagtctaattttaatagcggctaaatatgtctgtgtcttatcctaacttgtattatcgactaatgccattcattaacaatgattttcaaatgggcatatccatacttttctgattaatgatcataaattaatttttattttggtattaaatctgctaaattgtcctaaagtctaattttaatttcacttccaaacatgtactgtcaagctgcttctatccattgcactatacaatggtcttctaaatcgttcgtctattcatacttatattgattgggtactttctaccgatttttttacaaattgacccttttagaaaacttatttcaagaataaactatgccaaaaacttattgcaaaaatagaccgtcagctcagcgccatagagattgacgctgaggtataacggtttagcgtcatagatattggcgctgacatttcatccgacgtggcaaaaatttgacaggtcagaaggggtcagcgccaatgtacttggcgctgagttattggcaataaaaaaaatctacagaacactctgctgcatgtacactgctggtggggtggttagatgctactgctcttacttttttcaatgttttttttctttcatcttttttcaccaaatcctactcggtactaactcttgttttcttttgaaactacacattttccctggaactatatattttaagtattaaatgctatatactacatgctctcgtatttttattatggttttttcactcctaagtatggaaatatgtactatataatttatgttgacatttacctcctgatgtttattttaaaattatcatgtcttatgtttacgtaatgttcttgttctaaacatgaaacataggaaatgttaaatgccgtatactttcaaaattttatgaagatctttccctttgatgaatataagtattaatgctatacaatatatgttttcaaatttcgttgttcctaatttgtaagactaatataatattttatgaattagaaactaataatatagtatacgtattattgtaatcaaagattaactacaaattagatatttgtatttcgttttttgttaaaatataataatttgaaaaatatataagttaataatacttaaatattctgtaatatataagattggtagtaaacaaattatcaaacattacacaacctggaactcgaactgtggaccatgaactgtggaccatgaggtgagatggtaggcttctagccgccacacgaagcgagcacatttgactagtttgatccagcaaactactttagatagccaatatctcagcgccaagcaagccagctctgaccccttctgaccttggcaaatttttatcacctaggatgaaacgtcagcgcaatatatatggtgctaaagagttatatttcagcgtcaatctctatggcgctgagtcgacggcctatttttataataagtttttggcatggtctattattaaaataagttttctaaaagggtcaatttgtcaaaatttcggtacttttttggagctctcatgttatctagaaagatctaaccattgattagaatgtttgtatataaaattgagctcatctttactgactaacatttgctaacaaaactaatctttttgactgaaatttgattacagaactagcctatgttgactcaaatgtactgacagaactaattattctgggtgctgataaaactatacagatatgttggtgcctaaaattgttagaggcacacaaaactaagcattgattagttgacatttgcacatattttcagtgaatcaaaatgacctaaatagaactctgaaataattatagtgaaaaccctcctgaatttcttcaggccaagaacaaaaatagtgaattgtggataaatgatagaaattaaattgttgttgataaaacctaaaatcataaagtagtcatcaagggcatccccttgctctaattccacaaaatccatgtattgttaatgcatatatcaaggatcgatattcaagcaggtcttgttaataaaataatctcaagaatatcgaacagaacaaatatgcccccattgccagtacttgaaaatgctctaaccctcccccaaccctgttgccagtactgttacttctacacatacaaatcagcatagcacaaaaaagataatagaatcactaacctaataaaagatcaaatacatcctccccaacaggggcggatccaacgtgggt

SEQ ID NO: 8065 - DNA, 23168 bp, Oryza sativa
tgttttgctctgaaaagatcagttgaagtaatttcctcaaaactcaaatctaaatgtagttttttggaaactcaaaatgcattgataaagaatccaaattgatagaaataaatatgtaggtacataccaatttacctgtggtgagggccgcgtcattttggatctgacgagcaagaccgtttctcctttcgtttagattgctaattttccaaccgtctacggatgtcatggagcgagcatcttttgctacacttgccacaccttctttggttttggtgtggacggcggcttctctggagccgtctcctctggtttcttggctggtgttttagactgtgccggcgtcttccaataacggatcctaggaacgggtgctccctctcccaggaagttccgcatgaacttccccaggctatccattttgggtggctccacttcggccacttgaatattttgcgtgtttggtccatatttgatcctcaccatggagcattgttccatccttggctgaaactcgaacttttatccgtccccacatcaatgttggcgtccctggtgctaaggaatggtcgccccaaaatgagtgacgttttcttctccgaatccatatccaacaccacgaagtcgaccgagatgaagaaatcccgtatcttatccggtacgccttccgctatcctagctaggtaacagaccgaagaattagccagttgcatgcgcatcggtgttggtgtcaacaccgtgatgttgagtttatcgaagacgtccttgggcatgacgctcacacttgcaccaaggtcggagagtgcttggttgaatttttgtgtcccgattgagcaggtgatcgtgggacaccccggatccttcttcttttctaggagtttgtggagtataacattgctgcattcctctgtcagtttgaccaacttggttgtcggtagtggcctcttgttgcaaggatgtcctttagataacgtgcgtaggtgggcacttgcattgcgtccaataatggcacgttgatgtggatcttctggattacctcaacaaaccgagcaaattgttcatccaccgatggcttcttatacctttgggggaatggcagcagcctcatgtcacaacattcctgcggcccggtcctttctggccaaacttcttcgacagcctgttgctagatggtgcttccagagcgttgcctgttcctacaacgttaggatacggtggatcgcaagtggacttaccacccctcgtcgtgatcgccttaacattctcaacagagggttcgggttgccccagaatcctcccagattcattagcaggtactagaaacaaactaattgttgccagctgggtttcaatcattttattaaaactaagctggtttcggaaaacggaagcaaagccatctaatttgaaatttatgttttccaaagtcttgtcattagtagccagcttttagctaagagcatctgtggttttggcttggcaaaaacaagatccttcaaggaaggttggttaaaatagttaccattattttgcctccttggaaatataggcgtggctggttccacccctgacctccttgtggacggaacccattgttgttgttgttgcccatgtacatcgcctcttcacgggtttctgggcagtcattcccagaatgacccattttgccgcagatttcacacataaagtgtgagtccatggccttgacgatgccttgaggcctcttctcgtggtcgtccaatcgcttcatgaggaggtccagcttcgcaacgagcatttccgtttcctttacggtgtgcatgccacgctgacgggtctggactccttcctcgctccagctcatgttggagactatcttttctatgagattgattgctcctctgaccgtcttggaaaagaaggctcctccacttgccgtgtccagatgatcacgggacatgggagtgagtccattgtagaagttctgcaggatcagccagtcgtccatcccatgatgaggacaggcagccatgtactcctgtagtcgttcccatgcctcagaaatagactgatctctcgtctgctggaaacttgaaattcttccgcgaagggcgttggtttcgcccatcgggaaaaacttcgataagaatgccgttgaacatttatcccaattgttgatcatagcgcggttggcataaaaccactgtttcgcttttccaaggccaagagggaaaatgggaactgtcggagcctttcggcatcagaactgatgcccttcatcgtgtacatgttgcagatctcgaggaactattgcaggtgtgcattggcatcctcgtttggcttgccgcataacgggctagcctgcaccatcgtgatgaggctggacttcagatcgaaatccacgtctcccatattgatttgtggcctagtggccacgttgtcagcagagggagcagtgaattcgcggagggtcttgtcagccatagtcttgaaggttggtggcgtgggaatggctggtttctctatcggaagagttttctgcggagcaacgactcgcggcttgaagctctgaaagaaaacttctggattttccttgaaattttccggcaagttaaaaccagtcatgcactaccctatttccacaatagaagtgaaaacaaccaaggttagcctacaaaggacagtgattatacagaggtaaatataaagtattagttatagtaatcttttttatgaatcttccacggcaacggcgccagaaatgcttctggtatattactcgaaatataattcctagcaatggttgagaaatacttctggtatattatggttacagagttcatccgcaagtgcatggaaataccattgtagcttttcacccaagagtattccaagggaatcatatttgagtaatcccgtgggaagattataatagagagaaccacactaataattatatattacttgtaataaccaaagtctaggcaggggttaatatcattcaaagggtagagtgacactaagaaaaagtatttatactcttattcataactatctaagctaagtggaaaggaaaatagaaagatcctattcctatacttctagtatacatacatcctacttatatgattacttagtgtcatgcccggaaattcactagtaatttccgaactaatttgtgcataaaatcctcgtccaggaatcagccgaggtacacaaactgacaatttaatatacaaatccatcttaataataacgttacatacttacaaagaaaagaaaaacagcagaggaattaacggtctagcgatggcttcagctccactcccacaggcagctcaactggggtataagccaaacgtcttttccttctggatcctttatcttcaactgaggtttgatgattattgcaagaatgagcatatgacatactcaacaagccacacagcaaatatgcaagtgcacaaggattccaaaggatggcataatataggctcatttgcaaaagcagcatttagcaaagatttaagagtagtaaaacaatagagtaattaatcatcaattttaatcaacactgaacagcacacccatgctgctcaggcccaaccaaacctgaacaaccaaccccggtcgtacagatcaaacctccaaactaggaattatccattccaaaccaggagtcaaattaattctcacattattaacattgatgagtagtgtgaaactaatcacgaaaaacattgctcaactcgcccataaccgcgggcacggctattcgaatagttttactctggccagaggtgtaccactgtacccacaagacacgattccacacatgttgccatgcccggaaataccaccacggcattgcaaagggggaaatcgtgacaataccctttgcacaacacaactcaaaacagtgcaccgttcctggatcataatctccccctcaaaaccagaggcaatggactccccagcgacccccacggacttctcgccacttcacagtctggcacactataatgaaccatgctatacaaaaggtaaagccgttgcccatgctgccttgtggttggcacggtaaatgtttcacaacagtagctcgcgaaccggtccttaattgtcatgagcacaaccatcaaaaccatatgctcacaacccaccttagccaggttataattatcaattaattaacatcacacgattaaccatcgtgagcgaccattaaatataaccataataataatataatataatatagtttataattaacccctttagttagctaatgtttctaagcatagctaagcaaacttacatatagcatttagctgaaccaatccaatatataaggttcatgctaatcaaattataacccattggaaaataagatcatcttcggccattaattaacggggaaaggttcaccacccgatgacattcaaaaataatgcatagttgaaataaaataatagctttaaacgggttcaacatgctcaaagggttatttgggatctgtgtgacttgccttgggcttccgcaaacacttccgaaccttcctcaacgaaaacgctctcctccggaacgtcggaaaataaagcgaaagaacaaaaattaacaaaacagtacaaaaacaagcataaacagtacacgtcaatatttttaacatgaagatcttgattttagaaaaatttagcaacttgaaccacctgaaacggatctacggttatttagatatgtttttctgaagatctaatctatttcatctataaaaaaaactaaaaaggaaaggttatgacgtcatgctgacgtcatccatggtggccttggctcgggcggcacgaccaccggcgctacggaccttggccgggcgaaaagagggcaccaacgcgtagagggcaacaagacgaacgcaacggtactcaccaatgcgcccaacgacgaccgatggtggccggcgacgagaggatgcggcgcggtggttcagtcgacggtggcggcggcttcacggcgaccgacgacagcggagagggggcggacgagctagctctccctcacgcgcacctaacggcggtgagaaaaggcggcggcgacgacgcaagcggcggcgcggcacggctgagcggcgaccggcgacgacggcgactagggcggcgcggcggtgactccacggggcactagagagctcgggaaagggggcaaacaaaagaggaggactagggggtcctatttatagccttggattgaagagatcggactcctcccgcaagaaatcgatcgggaaatcaaaaactcggttttggagataaactcaaaaacgagttcgattcggataaaatactcaacgattagctccgatttttgggggtaaagatagaggaggacgaggggatcaaaatccctcaaacactcggactcaaatgcgagcgagggcggcggaatcggagacgggaggtggcgcggcgcggccggcttgggctcggcctgagtcggccggaggtaggggatgaccccgacatgtgggccccacatgtcggtggctagaggaggagggggcggttggcggcttgctgggccggctgagtcggctgggccggttcggccgcgggcgggagagagagagagagagagttgggccaaaaacggcccaacaacttaaaaggaggggttttggaactttttaattaaaataaatggtgaaatgttgtttcaattattaaaaaaatacttcccttgctcaaacaattcagaaaattctagaaaatagaggaacaagcaaaatatttaataaaattttatctagcccaattttatattgagatttagcaaattaaaattagatcttctcttttaagcttttaaaatcatttctgctaatttcttttaaacaacaatttataatttaaggattttaaacaagaaaagcacttaacaattataattagatcattattgatcaaataattactgaattgttctttgtatcatttaggaattgagctccgaaaaatccgagaaaattccagagagtataattaatcatggagaatttaataaaaattaaatccatccatgctttatattaagaaaattttatttcccacatttaacttcacttgtaaattaatgaacatttaatataaattctaataataatttattaaataatttataaatcctgaaacaaaaatcaggatgtgacacttagctaataccctccttccgatgccctcctggtgcttcgagaagccacccctgattgccgagtgtcacgcccagaaattcccgaataggattccaagcagaatgtgcattaaaacccccgtccaggaccggccgggtacacaaacgacaaagttgacaaacagatccacgtcttacaaacatcataaaatcttacataaatgcagcggaaaattaaaagataactggagctaagccttgacttggactgcagcgggaacaccactccacaggcatcctcgacggcacggacgaaacctactcctcggagaagccaccatctgatgcatactcaaactctgaggtttggggaaaatagagcaagactgagtactacccactgtactcagcaagtcataccggaataggggtatgatgcacggaattaactacggatagctatagaggttcgtttgcatagagcgagcatttataaacagtagttgaaagcagtaaaacagttgtaataataaatcaatattaaccacccactgtccaacgctaccccacgttgcaacaggcccaaccatccacctagactattcaattccattagactagacttgggtgagaataatcacggtgaatctggttgaccgcccataaccgcgggcacggctattcgaatagttttactctgatcagaggtgtacaactgtactgtcacaccctaaaaatccaaaatatataaattgtcgtttaattggaattattagaatttattttaaaagtctagaagagaagatctaattttaattaataaattccaatataaaatgggaccagataaaatttcattaaatactttgcttaattctataattcctagatttttctgggatttatttgagctaaggaagtatttttaataaatggaattgcatttcatgaataatttaaattgaaaaaggattttaaaagtctcttttggctttgggccgaaagtcggcccaaaaccgctctctctccttctcggcccaagtcggcccaagtccagccgcagctgccctcgcgcgcgctcgctgccgctgacaggtggggcccacctgtcaggcccgtcgtctacctctggccgccgccgtccgaaaccctagcgccgccgtctccttccaaattcggccgcgtctttccgtttccggtgaaatcaatagaggggaaatgatcttcgggatctcgtctaccttttctcttctggaatccccggctaaaatcgtttggaaagtgttggtttcgaggtcgagtcggatcggtctctctctctccgagccctaactttccttctcgtcgccggtcgccgtgggccttcgccgccgcctccttgcccctataaaaggacccccggtgtctcctcgacccgccgccacccttgctttcgtctctcgccgtcggaagcgccctagcgccgtgcaaccttgagccgccgtcgtcgccgtcgctccagccgtgcgccaccgccgttccggtcatcgtcgtcgctcggggaggtcgccatcgtggtcgccaagtcgtcgccgtcctcgtccgcccctgtcacaccctgaaaattcaaaatatataaattgttgtttaaatggaatttttagaatttattttaaaagcctagaagagaagatctaattttaattaataaattccaatataaaatggggccagataaaatttcattaaatactttgcttaattctataattcctagatttttctgggatttatttgagctaaggaagtatttttaataaatggaattgcatttaagaaataatttaaattgaaaaaggttttaaaagtcttcttttggctttgggccgaaagtcggcccaaaacctcccttctctctctcctcggcccaatccggcccagtccgccgccgcgcgcgcgcgcctttgctcgctgacaggtgggtcccacctgtcggacccatcgtctacctcgcgccgccgccgcccgaaaccctagcgcgtcgccgccgccgtttccttccaaatccggccgctcctttccgtttccggccgaattgatagaggggaatcaatctccgggatctcctctaccttttctcctttggaaacaccggctaaaatcgtttggaaattcgtggattcgagtttgtttcggattcgattttcccgaactttccttctcgtcgccggccgccgtgggcctttgccgccgcctccgagcccctttaaaaggacccccgagctctcctctacccgccgccaccctcgcctttgcctctcgtcgtcggaaacgccctagcgccgtgtgccctagcaccgccgtcgccgccgtcgctccagccgtgcgccgccgccgttccagacgtcgccgtcgctcgggaagaccgtcgtcgtggtcgccaagtcgtcgccgtcctcgtccgccccttcgccgtcgctgtagaccgccgaagcaccgtcgccgtcgtcaagcggaagaccgccgccgttttaacctcgtcgccgtcgccgtctgttggtcttctgccgctcctttggtcaccggtgagttcgccgcgtcgcgctctacccgttggtgccctccgttcgtgccgaagcgtcgccgttcgccgacgagcatgcgcgcccgagccgccgagtcgccgttgccggtggtgacgtcaccgctgacgtcatcgtcgccctctcccgtgagctggtcgtggaccgatcgatctcggccgtccgttttggatcaagtcgatctcggccgtccgttcgcgtgaaccgccgccgtgcgcccggtccaccgaaaccctagcccgctgacgcaataatcctccttttccttttcaaaaataattcattattgcgtcataattcaattaaaatcaatataagtgttttaatccgattaaatcttcaaaaattcataactaattcatcttagctccgatttagttggttcaagtctctaaatttttctaaaattgagatctacatgttaaaaatatccacatgtactgttcatgcttgtttatgtgctgttttggtgattttgctcttttctgcttagattccgtcgtttccggagagtccgttttcgcaggagaagaatttgaagaattccaaggccagcaaggcaagtcacacagatcccaaacaactctttgagcatgttgatcccgtttaaagctattgtttctattcaactattgcatttattttcgaatgtcattgggtggaattaacctattgtttgttatagcccttttgttcttgattactttattccttgataccttgggttattataacttgactagttgggctatatatattggttcaactagatattagatataattgcttagctctgcttagaaacattagcacactattgggataacttatgaatcactataatttaatgatggcttaatgatagttcacgatggacaatcgtgattagttaattaattaatgtgccaactaaaacctgataatggtgggttgtgagcacatggttttgatggtcgtgctcatgacaattaaggaccggttcacgagtttcggttgtgaaacattaaccgtgccaaccacaagccagcgtgggcaacggctttatcttttgtatagcatggttcattgcagagcaccagactgagaagtggcggagataagcccacgggggtcgctggggagtccatgccttgtttataagggggtgattatgatccaggaaggtgcgctgcggtggattgtgttatgcaaggggtattgtcacaactcctttccgaggtaccgtggtggtattgaggcacatggtgacatgatgtggggttgtgtcttgtgggtacagtggtacacctctgatcagagtaaaactattcgaatagccgtgcccgcggttatgggcgggtctaacaatgtttttcgtgattagtctcacacctctcatcatgataacaaatgctttaaatggtaataatttgtttagctcctggtttggaatggtacattcctggtttggagataggactgtgcagccgggatggttgttcagaatggttgggcctatagaacagggtatgttgtatagcgttggattaatactgcttaattattaactgctttattaaattctgaaatgtttattaaatgctgtttatgcaaatgaaaccctactatgccatcctttgttatcctgtgcacctgcatatttgttgcgtggcttgctgagtatgtcatatactcaccttgcaatcattcatcagaggaggagttctacagtgaagctgatggtgtggaggattaggtgtagccctggtcaagttgcctgtggagtggagccgtctgcgccgtttattttattttccgctgcttagatctttattgattgagaggaactatctacctctgtaatgacattttattcgcttattaattagagtaataattgtactctattatcaatttgttattgtgtgcctcggctgattcctggacgagggttcacacacatgtaagcgtttggaattttggatagaaattccgggcgtgacaagtggggtgtaacatcccggtctagggcttaataggattaatagaatactcatatcaacaagttgcaacttcttttctggaagataatctccaaagaactccagggttaagcgtgcttggcctggagcaatttaggatgggtgaccgaccgggaaattcttcgcgggtgcacacgagtgaggacaaagtgtgcagaaaagacatgtgttggtctgtgagggcagtctatgacctatgaaagctatcagatgtaagcgggcccggcctggggaaggcgggacgttacaaaatggtatcagagccgactctcgcggtttcacgggcgcaggcatggtgcgcatgtctggtgtagaccgggagtggttacacagcatggcacatgcgctggcactggacacatggacgtggccaagagaggacgttcctggcctagggttgatcgacgggggcgtcgatctctcttaaggggggtgagggtgtaacatcccggtctagggcttaataggattaatagaatactcatatcaacaagttgcaacttcttttccggaagccaatctccaaagaactccagggttaagcgtggacaaagtgtgcagaaaagacatgtgttggtctgtgagggcagtctatgacctatgaaagctatcagatgtaagcgggcccggcctggggaaggcgggacgttatagccccttcgccgctgccgaagaccgccggagcaccgtcgccgtcgtcaagccgaaggtcgccgccgcttcttcttcgtctccgttgctcttccgccgacgttttggtcaccggtgagttcgccgcgtcgccctctacatcctggtgtcctccgttcgtgccgaagcgccgttgttcgccggcgagtttgcgccgcccgagccgccgccggtggtgacgtcatcgacgacgtcatcggggccgtctgccgtgagccgccgtagacccgatcgatctcggccgtctgttttggatggatcgatctcggccgttcgtttccgtgaaccgtcgccgtgcgcccggtccaccgaaaaccctagccgctgacgcaataaatccctttttccttttcaaaaataattcattattgcgtcataattcaattaaaatccatataagtgttttaatccgatttaatcttcaaaaattcataactaattcatcttagctcggatttagttggttcaagtctctaaatttttctaaaattgagatgtacatgttaaaaatatccacatgtactgttcatgcttgtttatgtgctgttttggtgattttgctcttttctgcttagattccgacgtttccggagagtccgttttcgcaggagaagaatttgaagaattccaaggccagcaaggcaagtcacacagatcccaaacaaccctttgagcatgttgatcccgtttaaagctattgtttgtattcaactattgcatttattttcgaatgtcattgggtggaattaacctattgtttgttatagcccttttgttcttgtctactttattccttgataccttgggttattataacttgactagttgggctttatatattggttcaactagatatattagatatgattgcttagccatgcttagaaacattagcacattactgggataacttatgactcactattatttaatgatggcttaatgatagctcacgatggtcaatcgtgattggttaattaattaatgtgccaattaaaacctgataatggtgggttgtgagcacgtggttttgagagtcgtgctcatgacaattaaggaccggttcacgagtttcggttgtgaaacattaaccgtgccaaccacaagccagcgtgggcaacggctttaccttttgtatagcatggtttattgcggggcaccagactgagaagtggcggagataagcccacaggggtcgctggggagtccatgccttgtttataagggggtgattatgatccaggaatggtgcgttgcggtggattgtgttatgcaaggggtattgtcacagctcctttccgaggtaccgtggtggtattgaggcacatggtgacatgatgtggggctgtgtcttgtgggtacagtggtacacctctgatcagagtaaaactattcgaatagccgtgcccgcggttatgggcgggtctaacaatgtctttcgtgattagtctcacacctctcatcataataaaagatgttataactggtaataatttgattagctcctggtttggaatggtatattcctggtttggagatagaactgtgcagccgggatggttgttcagaacggttgggcctatgcaacagggtatgttctgtagcgttggattaatactgtttaattaatacttaactgttttatcaatttctgaaatatttgttaaatgctgtttatgcaaatgaaaccctactatgccatcctttggtatccttgtgcatttgcatatttgctgtgtgacttgctgagtatgtcatatactcaccttgcaatcattcatcagaggaagagttctacagagatgctgatggtgtggaggattagacgtagccctggtcaagttgcctgtggagtggagtcgtctgcgccgtttatcttattttccgctgcttagatctttattgattgagaggaactatctacctctgtaatgacattttattcgcttattaattagagtaataatggtactctattatcaatttgttattgtgtgcctcggctgattcctggacgagggtatacacacatgtaagcgtttggaattttggatagaaattccgggcgtgacaagttggtatcagagcctccttgaccctaggttgtgccaaatggttacccatagaagccctctaaaaatattggaaaagtagaactgttctcctccctttctcttttaattaaaccaaactaatggcacatgcacttcataatctcttttaatggttctcattcaaaatttattccagtgtaattagtactgtacatctattactgtactaatggctcattttaccagcaaaagttttacaatattgctttatttaatcttgctgcaattaaataaatttcgcatgttaatttataactttcttttatttcttttggaacctgttgttcaaaagtacaaaatttgtggccttgtttccaactgtttcaaattatcctgcaagtttggtttactttttactttgattttccaactttattcaaattaatccaaaaacttgtgctattaattggataaatgtcttaactccctcctttcatttgtctttagatgccgcgctacaagcctgagtacttgtttggtgttgagggatttgtccaagagttgtgtacgatgtcctttgccataggatttgggactgcccctttttatgcccagattcctcatgatcgtcatgaagagaagtgccgagtcaaagtcactttgaacagtaatagtgatgaaatcccctcagtgatgttcgaagctggaggaagaaactacatccatgcgtgtcaggaggtggcaaggatcgccataggagagctccgcgatcgctattgtgatcagttggccgacactgagtatcgctaccatcctcgccaaccacagggaagtgatcgtggcagctaccttgagactgaaggaattgagaatgatgctaccacaaggcatttggttgagatgctgtgggctatggatgaaacccgtgcggagactgtgttagcagctcaagatcgtgaagaccggaatcgtggtaagatttgcaagctagaggacaaagtggatcgtttggagaaggaactagccgcattgaagggagaagcaccaccgcagaaggccagggttcgtcttaccgcaaggaagagagctctatttgtccctcgttaccaattggcgccaaaggtccgtgtggtggagaaagaagttaccccagccctagcagatcctccggttatcattataagtgatgatgaagaagaagaatccaagcacgcccattacaagatcgagtggggagcaactcaagatgatgaagatgagccgaacgagccttcaatcaactccgatgcccggaagacttagaatgccttgtcaaaccgttgtcttagatcgttgtgttagtttgcttgttttaagtttggttgtgtgtgtctcgcatgtgatttacatcagtggtgggatgtaagtgcgtgcgtttgtttgctttcgagtgttaggtagttggtgagttcagtggtgtgagaatcttcagttttgtaataatgaaactcacttaagatcaataaaagctaaagtaattctcggtcctaagtagttttccccggtttctcttcttgtgctcctgtccatgccagatggtgctcactcgtagcaacgggaatggccccaacaacaacaacaataacaacaacaacaatggagagaatcccacacttgcccaagtcctggctcaacagacacagcttatgaacataatgatgcagcaactccagaaccagcagaaccagggaaataaccatgcacctccccagaacaagttagcagaatttcttcgtgtgaggccgcccactttctctagcaccactaatcctgttgaagctggtgactggctgcacgccatagaaaagaagttggatttgcttcagtgcactgatcaggagaaggtctcatttgcatcacaccagctgcatggccctgcctctgaatggtgggatcatttccgccttaacaggactactactgaacctatcacttggcttgagttcaccgctgctttccggaagacgcatataccatcgggagtggtgtctctcaagaagaaggaattcaggtcgctcactcaagggtctcgctctgttacggagtatctgcacgagttcaatcgtctggctcgttatgctccggaagatgtgcgcactgatgaagagcgccaggagaagttcttggaaggacttaatgatgagctttcttacccactcatgactggggattatcctgatttccagaagttagtggataaggctattcgtcaggaggacaagtacaaccgcatggaacagaagaaacgtcagattgctcaattcatggcacaacaggggaatagtcagaggccgcgtcttactttaggaccccagtccatgcctcagggaggttcttcgtctgttgttcgtccgcagcgtcagttcttcaacaacaatgctggcaacaacctccgtaatcaagctccacgccctgttgcagctccaacacagcaacagcctgccaagagggagcaaggcagcaagcccgtggtgtgtttcaactgtggagacccaggacattacgctgacaagtgtccgaagccccgacgcgtgaaggttgtccctgcccagagcaactctaccgcaccagcatcaaaggcccgtgtcaaccatgttgctgctgcagaagctcaagatgctccagatgtgattttgggtacgttccttgttaacctagttcctgcaacagtgcttttcgattctggtgctacacattcattcttatctatgagttttgcgggaaatcatgggatggaagtagaagatcttagacgtcctttgatggttagtaccccaagtaatcaagcactctctttgcaacgtagcccctctgtcagaatagaaattcagggagtaccatttctggccaatcttatcctgttagaatccaaagaccttgatgtcatcctagggatggactggttagccagatataagggtgtgatagactgtgctaacagaaaagtaactctcaccagcaatgatggtcgagttgtaactgttcatgcattgtcttctgagtctttaaggtcaagactgaaccaaataactttggaagaaattcttgtagtccgggagtatcctgatgtgttcccagacgatttacgtggtatgccgcctaaaagggatatagagttcagaatagatttggtaccaggaacaattccgatccataagagaccttatagaatggcagccaatgaattggcaaaagtcaagaggcaagtagacgaaagaacgacagttgccattggagttatgtaaggaatttgaaagattaaatttgggaattgtcagtagaggttttgttgcggctttagaagcgaagctcactctaattgatcaagttagagaagcccaaattaatgatcctgatattctagaaatcaaaaagaatatgagaagaggaaaagctatcggtttcttggaggatgagcaaggaactgtatggttgggcgagagaatctgtgtccccgataacaaagatttaaaagatgcaattctgaaagaagctcatgatactttatattccattcaccctggtagtaccaaaatgtaccaggatctcaaggaaagattttggtgggtaagtatgaagcgtgaaatcgcagagtacgtagcagtatgtgatgtttgtcagcgagtcaaggaagaacatcagaaacctgccggtttgttgcagtctttgaagattcctgaatggaaatgggaggaaatcggtatggatttcatcactggtctacccagaacgtcatcaggccatgactctatttgggtgatagtcgatagacttaccaacgtggctcatttcatcccagtaaagacaacatattccggaagtcggttggcggaattgtatatggcaaggattgtgtgtttgcatggcgtccctaagaaaatagtgtctgatcgaggcagtcagtttacttcaaatttttggaagaaacttcaggaagagatgggttctaagctgaactttagtactgcttatcatccgcagacagacggacaaaccgaaagggtgaatcagattttggaagacatgttgagagcttgtactttagacttcggtggaagttgggataagaatttaccttatgcggaattctcgtataacaacagttatcaagctagtcttcagatggctccttacgaagcactgtatattcggaagtgccgcactccgcttttgtgggatcaaacgggagaacgtcaggttttcgggacggatatcctgagggaagtagaagaaaaggtgaaaatcattcaagaaagattgcgagtggcccagtctcgtcataagagttatgccgacaatcgccgcagagatttgagttttgaagaaggagattatgtgtaccttcgtgtcacgcctcttcgaggagttcatcgttttcacaccaaagaaaaattggcaccgcgttttgtgggaccttataagattgtcagtagaagaggagaggttgcttatcagttggagttacctcaatctttggcaggagtccataatgtgttccatgtgtcgcaattgaaaaagtgtttaagggtacctatcgaagaagctaatcttgaacaaatagaagtccaagaggatctgacctatgttgagagaccaatccgtattttggaaatagatgagagaagaaccaggaatccagttatccgtttttgtaaagtccaatggagtaatcattcggaagaagaatcaacttgggaacgagaagatgaattgaagtcagctcatccgcatctgttcgccagttcttccgaatctcgaggacgagattctgtttaagggggtaggtttgtcacaccctaaaaatcctaaatatataaattgttgtttaattggaattattagaatttattttaaaaagtctagaagagaagatctaattttaattaataaattccaatataaaatggggccagataaaatttcattaaatactgtgcttaattctataattcctagatttttctgggatttatatgagctaaggaagtatttttaataaatggaattgcatttcatgaataatttaaattgaaaaaggattttaaaagtctgttttggctttgggccgaaagtcggccgaaaaccttctctctctctccttcggcccagtcggcccagtccagccgcagccgccgctcgcgcgcgcgtccgcccgctgacaggtggggcccacctgtcagtcttcgtctacctctggccgccgccgcccgaaaccctagcgccgccgtctccttccaaattcggccgcgtctttcccgatccggtgaaatcatttgaggggaaacaatctttgggatctcctctaccttttctcttttggaatcatcgtctaactcgctttggaagttcatggatttgaggtcgaatcggattcctctttctctcccgaacccgaagtttccttcgcgtcgccggccgccgtgggccttcgccgccgccctccaacccctatataaggacccccggtgtctcctctacccgccgccaccctcgccttcgtctctcgccgtcggaagagctctagcgccgtgtgacctagcgccgccgtcgtcgccgtcgctccagccgtgcttcgccgtcgcttcagccgtcgccgtcgctcggggagatcgccatcgtggtcgccgtcgtgtcgccgtcctcgtccgccacttcgccgtcgctgaagaccgccggagcaccgccgtcgtcgtcaagccgaagaccgtcgccgcttcttcctcgtcgccgccgccgtccgttgtttctccgccgcttctttggtcaccggtgagttcgccgcgtcgcgctctacgtcctggtgccttccgttcatgccgaagcgccgtcgttcgccggtgagtgtgcgccgtccgagctgccgagccgccgccggtggtgacgtcatcgccgacgtcatcggggccgtctgccgtgagccgccgtagacccgatcgatctcggccgtccgttttggatggattgatctcggccgttcgttcccgtgaaccgttgccatgcacctggtccaccgcaaaccctagccgctgacgcaataattcccttttccttttcaaaaataattcattattgcgtcataattcaattaaaatccatataagtgttttaatccggtttaatctttaaaaattcatacctaattcatcttagctcggatttagttggttcaagtttctaaatttttctaaaattgagatctacatgttaaaaatatccacatgtactgttcatgcttgtttatgtgctgttttggtgtttttgctcttttctgtttagattccgacgtttccggagagtccgttttcgcaggagaagaatttgaagagttccaaggccagcaaggcaagtcacacagatcccaaataaccctttgagcatgttgatcctatttaaagctactgtttctattcaactattgcatttattttcgaatgtcattgggtggaattaacctattgtttgttatagcccttttgttcttgattactttattccttgatactttgggttattataacttgactagttgggctttatatattggttcaactagatgtattagatataattgcttagccatgcttagaaacattagcacacttttgggataacttatgattcactattaattaattaatgatggcttaacgatagttcacgatggtcaatcgtgattggttaattaattacttgccaactaaaacttgataatggtgggttgtgagcacatggttttgagagtcgtgctcatgacaattaaggaccggttcacgagtttcggttgtgaaacattaaccgtgccaaccacaagccagcgtgggcaacggctttaccttttgtatagcatggttaattgcgggggcaccagactgagaaatggcggagataagcccacaggggtcgctggggagtccatgccttgtttataagggggtgattatgatccaggaatggtgcgctgcggtggattgtgttatgcaaggggtattgtcacagctcctttccgaggtaccgtggtggtattgaggcacatggtgacatgatgtggggctgtgtcttgtgggtacagtggtacacctctgatcagagtaaaactattcgaatagccgtgcccgcggttatgggcgggtctaacaatgtctttcgtgattagtctcacacctctcatcacaataaaagatgctataactggtaataatttgattagctcctggtttggaatggtatattcctggtttggagatagatctgtacagccgggtgtggttgttcagaatggttgggcctatacaacagggtatgttgtatagcgttggattaatattgtttaattattacttaactgttttattaaattctcaaatgtttattaaatgctgtttatgcaaatgaaaccctactatgccatcctttgttatcctgtgcacttgcatatttgctgcgtgacttgctgagtatgtcatatactcaccttgcaatcgttcatcagaggaagagttctacagtcaagctgcctgtagagtggagtcgtctgcgccgtttatcttatttttccgctgcatagatctttattgattgagaggaactatctacctctgtaatgacattttattcgcttattatttagagtaataattgaactctattatcaatttgttattgtgtgcctcggctgattcctggacgagggttcacacagatgtaagcgtttggaattttggatagaaattccgggcgtgacaagttggtatcagagccaggttgaccctaggttatgccaaatggttacccatagaagccctctaaaaatattggaaaagtagaactgttctcctccccttctcttttaattaaaccaaactaatagcacatgcacttcataatctcttttagtggttttcattcgaaagttattccagtgttattagtactgtacatctattactgtactaatgactcatttaccagcaaaagttttacaatattattttatttaaccttgctgcaatgaaataaatttagcatgttgattttataactttcttttatttcttttgaaacttgttgttcaaaagtacaaaatttgtgaccttgtttccaactgtttcaacttatcttgcaagtttggtttactttatttacttaccttttactttgattttctaactttattcaaattaatccaaaaacttgtgctattaatttgataaatgtcttaactccctcctttcacttgtctttagatgccgcgctacaagcctgagtacctctttggtgttgagggatttgtccaggagttgcgtacgatgtcctttgccataggatttgggacagcccctttttatgcccagattcctcatgatcgtcatgaagagaagtgccgagtcaaagtcaccttgaacagtaatagtgaagatatcccctcagtgatgtttgaagctggaggaagaaactacatccatgcatgtcaggaggtggcaaggatcgctataggagaactccgcgatcgctattgtgatcagttggccgacactgagtatcgctaccatcctcgccaaccacagggaagtgatcgtggcagctaccttgagattgaaggaattgagaatgatgctaccacaaggcatttggttgagatgctgtgggctatggatgaaacccgtgcggagactgtgttagcggctcaagatcgtgaagaccggaatcgtggtaagatttgcaaactagaagacaaggtggatcgtttggagaaggaactagccgcgttgaagggagaagcaccaccgcagaaggccaggattcggcttaccgcaaggaagagagctttatttgtccctcgttatcaattggcgccaaaggtccgtgtggtggagaaggaagttaccccagccctagcagatcctccggtcgtcaacataagtgataatgaagtagaagaatccaagcgcacccattccaagatcgagtggggagccactcaagatgatgaagacgagccgaacgagccttcaatcaactccgatgctcggaagaactagaatgccatgtcaagtcgttgtcttagatcgttgtgttagtttgcttgttttaagtttggttgtgtgtgtctcgcatgtgatttacatcagtggtgggatgtaagtgcatgcgtttgtttgctttcgagtgttaggtagttggtgagtttggtggtgtgagagtcttcagtttgtaataatgaaacccacttaagatcaataaaagttaaattaattctctgtcctaagtagttttccccggtttctcttcttgtggtcctgtccatgccagatggtgctcactcgcagcaacgggaatggccctaacaacaataacaataacaacaacaatggagagaatcccacacttgcccaagtcttggctcaacaggcacagcttatgaacatgatgatgcagcaactccagaaccagcagaaccagggaaataaccatgcacctccccagaacaaagttagcaaaattttttcgtgtgaggccgcctattttctctagcaccattaatcctgttgaagctggtgattggctgcatgccatagagaagaagttggatttacttcaatgcaccgatcaggagaaggtct

SEQ ID NO: 8066 - DNA, 14064 bp, Oryza sativa
atatatatatatatatatgtatatatatatatatatatatgtatatatatatatatatatatgtatatatatatatatatatatatatatatatatatatatatatgctgatctgaatatgatgcattgagatgactgttgggtgaatatttagatgcacaaatttgttagtttgactgaaattgagtaatttgttagtttgatactatggcgatcaaaatgtgttgtttgaaatttagttcaaatggaataattgatagattggccgcagatttaatgtagttcctaggttatcaaaccatcacagaatacaaaatgcatggggaattttggtggattggtcagtgtagtccatggacggaaccaacctagacaccaaaattctccatgcattttgtattctgtcattctttgataattaaggaacttaattagatttcaggtttgaaatttagttcaaatggaagaattgatagattggccgcagatttaatgtagttccgaggttatcaaaccatcacagaatacaaaaatgcatggggaattttggtggattgggtagtgtagtccatggacggaaccgacctagacaccaaaattctccatgcattttgtattatgtcattctttgataattaaggaacttaattaggtttagggtttgaaatttagttcaaatggaagaattgatagattggccgcagatttaatgtagttcctaggttatcaaaccatcacagaatacaaaatgcatggggaattatggtggattggtcagtgtagtccatggacggaaccgacctacacaccataattctccatgcattttgtattatgtcattctttgataattaaggaacttaattaggtagtttgaaatggtcagggttggtggattgtaatattgatgtcgttgccgatctcattgattggtaacaatatttatacttgtagtacaaaattagtatctaaatttttccttctttttggatttacaataagaaaatgattccatttcgcaactaacattaattcacattcaagcgatatcaatggacaaacccacccaagagcaacccacgggtgacaagggcaaggaaactcagctagtcatggaggaagatatttgcacgcaagtagtcgtggaggaatcttcgtcgtctagctcaagtgaaccaggcagtggatcgtatcacttgccgagtgacccccatccttctccggcaaagaagagaaagggcggtagcgacaatgaagttgactctggctacgttccccccgaactggtggtacgtagcatataatatatgtttagttccaatcatattaactgcaaactatggattttaattaaagtgcaaaacagtgcatttaaaaggtattaccagcgaggcgaataacacaaaaactcaagagaacgcatatccgtccgcaataagtggccggtaagtacatttatatggatgccaaacagtactacttaattttcataaatgcttgtgtgtttccatgtaatcacctattataccttataattattttgatgttgaaagtgtcacaagcaactggtgggaacagtactatgcggatattaccgttgtgagttcctaagggttaatgggaaatattgtgccaattacaacgaggtaagtaatacacacttgttaaattagtcgctaacttgtattattgtgaatagttaatttccttaattctgtcatgatctgatgcagcttccaaaattccccaagtctgcaagagagctcaatgatacatccattcagaatattcaggcggacatgtgctacttcatccaccgtgagtgcgcacatcagcttgggctgtttttcgacaacgaaggagtcttagctctactggagaacgaatccctgtctaactggaccaggcgtataatatagctagggtttcgtaattcattcaaaatacttgtaaatgttatgtcgtcggtcgaatttaatttgtcaatgtatatatatatatatatatatatatatatatatatatatatatatatatatatatataggtgcttccgaatatttatatatatgtacattattctgcttcatatatactcaatgcgtggctctaaaatacgcgaaagagaacatactctatcgatacctcgattagttatatcaaccacgtctgactctgaaatacgcgcacgaagaaaagaaaaaatagtatatataataatgttttatttttttaaaaaaaattgcatcttcactggcgggccacgtgtcagaactaggacggtctatatcttcgctgtcgggccacgtgtccatccacagaagccttacttcatttttcctagcgtgccacgtggcctaaaatactgtgagtcgccagcaaagaattatcttcgctggcggccgacctaaggctaacgcaagtggagatacttctttgctggtggctgcgttatgtccgccgccagcaaagacatgtcttcgctggtggccgtcctaaggctaccgccagcgaatacatctctttgctttgctggcgggcattcctttcttggccgccagcgaagatgcattttggctggcggtaaataaccgctagcgaaaatcgacattttcactggcctttgctttctggcggctgcgatttccgccagcggaagcccaaaatggccccacaaaagatgattttcgtagcagtgagtgaaagtgaacttattccttctggtggcgacgggcaaagcaggcggtgattgggctgccatgtctcgtgggcctcctcatatatatgtggtcgtcggcgttacaaaccaactcttctggactgcttgcaatcacagagaacgaccaacacttaattactcttggtggttaataatcgaatatctagtagtgaggaaagtttaatctgaactagctgcaccataagaaaaatagaaggatgagatattgattaccttaggtgagagctaacaattaatctgccatctagtgtccgtgccgattcactgtagacacagggaattttccaattcaacaataaagttgatctaaggcaaatcaccagtacctacggtggagcatttgagcagatttggcatcgatcaaggtgagagagtgtgcgttgatttcaaccagcagcaagccaaaagagcgaccagctggtggctaccagccttatgttgagccctccagtcctagagttgtggcacaatgaacgtttgggtttctgacttcgtgcatgctgttcgtgcatgctgatcacggccaactcttggtttccttgcaattcctcagtgtatctctgggttaggcctcatttggctgtttgtgtttcgatgtggaacaggccccaaacccacccttccgtggaatgcagcccacgcctggatcaattcccacatccggcccaaatgtgcatttggctgttcgtgtattgctgtgtattgcggctcgatacatgccgacccacgggtgagagaataatcctcacccgaggcctggaactctctcgcgtgcacgctgcagctcgcgactcctcctgcaccgtcgccgttttttccaagccgtccaccgcctcctcgccgtcctactgcgccgccgacgccgccgccttctccgagctgtccaccacgtcctcgccgtcctcctgtgccgccggcgctgctgccttctccgagccatccactgcctcctcgccggccgccgtcgtctgtcgcctcatcgccagcgtcgccccggcagcctactcgcttgatcaaggttcaaagtcctctcctccatctcctccttcatctcatctcattttctttgcccatcttctttcatccacttgttttgctgctaggaccttcaagatctggaaagtacagccatcctgctagggtttgacgatctgcaagagaaatattggagacgaggtatgtcaatgcttggagatatgcaaagtacagccatcctgaagggaacaaaacacagtagggaatcactagctttgatcttgtattagtgcaaagagattttgagcagaaataaactacagctagtagtactcctctacacactgctaagactgtaccaccaccactgcatgatataccaatgtatagcaagcaatacacattacagtattttacactaacaccattgaatgcacaaaacagcatgctagcatagtagtatagcacttctattaaacaaagtgagtgctcagttcatacacatgcataattagctttaattatttatgaacatatatagtgttgaaactaaaaactagagtgctgaaaccttttttcttttgctaactgcagtcatcttaaatattcagtattccttctagttagaaggtatgaattcgctaattaggaagagaaaagatgaggaggatgaggagattattatgttctggttgcctgccctatatcttttaactagtaatggagggatagagaaaagagtaagcatactttaagttagtacggtgaagaaaaacccagaaatatttttgagggacatgaaaacaattgccttgttgcattccgcatggagcctaacatatttagagcaatagcgacatatcttcgagagggcaagaagtaatgtgcatgaggatgagttcctgatcccagtatgcattgctgttgtggacagcatggaagatatgtcagatgatgagaaggtcctggcttatgatgtcttcaaagatccacaaaactgggccattttcatgactgcaaaagactctacatgactcaagtggttaaggaggaagattacaattgcgtaaatctggtattgctcctttcgtgttattgcctctatgaaactgatgaatatattaattagtactacactttagtcatattaaacagttggattttgtttgttgtatcacctaaaacttcaattcagtgatgctcagcaaaactattttttggggtaaatgttgtgcagattggcagatgatacatttgtagttttcacattgtagcatcacctgagatgcaggtatactatttatgctaaaaatgatgttcattatgccttacatattattcatgctcttttgtttttttggaagtgtaaactttttatacatatattctaaaatattgttgttgctctctccgggtgagcagtactgggctctgaaagtatgatttgaatttgctgaatgaatgataacgctgatacttggagtgagcttatctattcaaatttgaagatgcatagagtgaatttgtttaaatgtattacatccgttctaaaatataagcatttctacttatttatcaagatatagcttgtaaaatgcacaattaatttcatcttgctccaacttttcttagtcccctagtgctcttgtcctaggaatttgcaagcttccttattagctctgttctctagtttctctgtgttgctagcagtcagtttgccacggcagatatgaagccaattaatcttttgccttgtactttgtttcaggtgatgcatggaaaaaaagatgcaatggaaagtaaggagatatgctgctgttggagttgtctgtcttttgcttggatgtttcatgtcaaagaaattattcgtagatgaaacacctagtagacttcaaattaaacctctatggtagacttagctatcaaagttatttattactgtcatatatgcttggatgtgtatgtctggtgtgtgctgtttctacctggaaggtttatgttgaatcaattattctagttcacctataaatatttcatggatcagtaatatgttcatccatgtgcatgcatgttaatttctctattttctatgtgaaattctactcttgtgttttttttttaatttttaaagcaggatttttagagttacagatggatatacatgttggattttctattctggtattttatttcttaggtttttcagtattttttatattaactttttacttaacaaacgagacctaaaaggtaaaaggtaaacctaactctgcccaaatctccatgcataccactagcttagctagcactacgtacttgctgtggagtcaaacctgggcatcaccggtcgaaccaccagcccaccctgtgtattgaatcatgctgtgtattgggtgggtggtgtggattcactcaatacacaggtggaactattcacacatgtataatatacacgggcagccaaacgaggccacaatacgggcatggaatacataaacggtggagaagaacactcatctgattaacggttcacatcagagatacatgtcgttccaacagctaacatcattttgatgatgtgtaaaaacattgaacctgccttatactaattaatacgtctagtgggttacacttatataaacgataagttgctgggttttttttgtccaatcaagttttttttttatgtttgaaattatggttggtccaagacacatttccggatcataggcaccaagagactgtctcatactcaagatatttgaagaaactgcatatcgttttgaacatagaaatcaggcatccataactaatcccaactgctgggtggagtacatgattattcgtaattaatcacttgctcatcatgatcctctgcgcacctttgatgatgtgcattctggtatgcacagcccaatagttggatagcacagctggtccagtgcacagcaatagaacccaccgggggtttgaacacagtgatcaggtttataataaagttctccaaagctattcttgtttttcacaccggtcgacatatctttttggatctcatttgtggtttgacctatatctgcaagaagtagtatgtttatcatgccagtgcaaatagaatgatgaaaatggtgccaaataacataaaaaggaacctattttttaaattacctcttgtttgtgcaggaatggcagagcacagcagaagaaccaagcaaaacaacatgacttcttggtgggtcggccttaaacatttccccattgcgaaagatgacttactatgctttacttttcttgctgtaactaactagttgaatgaggatgagtctgcactccaagaaccatggttcacatatatatatagaacagatatgtatggatgaatttaatgactatttactttcatatcttggagattttactctaaaagaatctggtggattgtcctgaaaatagttttaatagcacatcaaagcatgcatttatatcggatccttgtgtgatctgctattaatgccactactgatctgggagattgtcctcattaaaatataatttctatacaaacacatgcaaaaacaatttgatttcatgatattttctcaactacaatattccactctttttagtagaaacccgtggagaaggacctaacgtgaattgtacttgtacctcgggttagtttagtgctcaatttatcaaaccttgattttgttcacttcaatcaggcgtagtgcggttcttttaaacaattttcaaagtttaggcattatcaaagaatgtggcaaaaagctttccgtactcagttatcatagggaacagcttgcactaagctatagtgcaggctatggcaccctcagctccattgatttaggcacagtagaagaaatgaacttgttagcggactgatcaacacatgaatattgatggaagtagggattacaatatatagctagcctctgtcttatttatctttgtaaccgattaatagaaactgggaggagatcggcgaggcggtgggtttgggatcgcaacagcaacaccaattgtggcgtttcggacgcgctacagtggcgcatggcaatgggcagggaagcccggcagtgcccgaaaatacggacgtgactacacagctagtggtagctaccactccatctatgagagattttgtctacatatactttaaataaaattttctcttaagctactcatccgatttacaatccgattacaccattgtgttcgtaacaattaaatctttataacaagatctcacatgattatattttgatgaaaaattataaattacttttataatatatttaaattacttttaaatttcactaaattacttcttagacataaaagtaaatttaataaagcctaaaagtaatttacatgtattatataagtaacttataacaaaaagaaagtaactttaatacatgcctttttttcatcggacgtaactacacatctagtgatagctggtagtactgtctcctttcaacttgaaaaatacaatagtatgtgacaaaatattgtttttaagatctatttgcatcattgtactccactcaaaatatgtgacaaaataagattcgtattgaatatattcaaacattttattaatttaaaagtaatttattacatgttagaaagtaacttccatattatcaggaagtaactattacatcttatacatagttaattcttattagttattccatcaatgtgatttacaatccataaaaggttttatcttcttttctcattctacatgaaaaacaaaaatgaaaagaaaaaaaacaatcggtgattaaacagatttatagagagttacttctgaaccatgcaaaagttacttccaattaacattgaagttacttttaaaaattattaaactttcgtgtgttgatctgtgctgattaaatttaatttctagataaagtcatatttttatccctacgacgaatttacttctaatttcgtgacaaagttacttccgttttgttttaagttacttttataatatatgtaaattacttttagactttattgaatttacttttatatgtctaagaagtaatttagtcaaatctaaaagtaacttatatatatgataaaagtaacttacgtatataatttacaaatataaatattttttcatcataatataatcatgtaagatcttgttgtgaagatttaattgtaacgaatataatggtgtaatcaaattataaatcggataagtaatttgagagaaaactttatttgaagaggaaaaagacatacatatctattaaaaaaaggcacgcactatgttgatccttctcattgcgccattagagcgtggccacgcggatgacgtcaggatgacatgcgcgatcagacggctatgaggcgcgtcgcgtgatacgactaaagcgataagcctctcggtttagattttacgcgaaaatatctgacaacccccgcaatcacagcagcgggaaaggcattgagactggactggaactttgtaaatacagtagtagtagtagggagactcttcgtgaatatgtcggcgtattgggacaaagttggaacgtataggacatggacctccccaatgtgacatggtcatggactcacggacgaagtgaagattgatctcgatgtgcttcgtccgttcgtgctgaactgggtgggtggataagtagatggtgctgatgctgacacgatcgagctgatcactgttggcagcgtcatccgtacattcaccgacattgtcttcaagtgattgccaccaaagacgtactcgagcttggtgccaccgccggcctcgcccatatggcgccggcttcatcttcaggtggctactgttgataacatgctcgagcagggtgagctatagcctgccggactcaacatgcattttctgatgacatgtctgagctcgacattgctaccgacctctacctctattggattaatttcagattaagcataactaactgagggcagtaatgggatagactattggactaaatttcaaattaagcataactaactgagggtagtaatgggagagacgcccaatgaagctatccaatgatgtgcgactcacgaaccaattcatgcccgctatgttcgggggcattcccaatagaatcgaggcactctcatcagaattggtttgaacccctatcatatcgtgcatataaaatatggccacgtttacctggagtgttaccccgtcgctcgtaggttatgctacgtcctaacattccctaaaaccacctaatcctaagagtttgttgtaatgatgagaaggccgactccatctcgtaccacgatgatcgttagccagtacttgtggagaccaacagggcgatactaccttgagtgccaatgtgttggttgatgcacaattacacaaatccgtacctctacagcgaggcaaatgattactccacggaatagataatcaacaatccgatggcatcattctccagtgctgccaacactgtactcgaggtcgacaccaccactggcatcatgcattcaccccctaacaccatctccttggctgccgccgaggatgtgctcgagcttggcggcacaatcaagctcatttgtacttctaataacgttggcttggtggctgccgctggtgacgtgtaggagcttgtcactgctgctggcatcaatgacgctttgccgacctcgtcgttgtactcgccactgccgccgatatcacactactatagaaaagcactttggtgccggttaggaaccctctttagatgccgttagtcccaaccggcaccatggaggtggcactgatgactttggtcattggtgtcggtttcaaaaccggcatctatatgtgtaatagatgccggtttgtagttttcaaaaccggcacctttgagatatacgcgagccaaaaaaaaggctggatgcaccagctcaaatcgagccgatgcatcgagggcatccaccccgcattgccccaaaatattaatccacaacatcataaaacaacgaacacccgaatcaaccaacatcagtcacagatcaacaaacattgaagaataagaccaacgcggaaagagagaaggccaactccaccgctgctcaccttcgccatctgccagatccgccgcgggagaagccgacgccatcgccaccgctggatccgcccgcggaagtgttccttcccaccacctgccctccctccagatctggcagagggagggcaccgccgcctcctacactccctctgttgcctgagtatccgtcgctgccgtcgctcgtagatttgccagtttgccaccgctactgccgttgcccgaggatcagctgtcgcctggccaccatctgccctccctccagatctagcggagggagggcgccgcaactgggccaccggcgcttctaccggatccggcccgcaggagttgccgcctcctatgttaccgtgagtcagaagagaggatgggggggagagggagagataaacgggtgagtggataaggcggagacgggaggagagacgggatcccacgtggtgttatctcggcgctaaaagaaaaaaacggctctccgtcggctcggctcgactcgtttacacctataatatacatatagttgtcggttcttgactatgaactgacatatattccttttaccacaaagatgcgggtttttagatgggccccatgccaactactccgatggaatgggtactaaaaggtaccagattttcaataaaaaccgacatctttctctgacaccagtaataggtaccggttctttggattttggcacgtgaacggacacgtgggcgggaaaagtaatataggtaccggtttacatactccggcatctataatgcaggcatctatttgatgttacgtggtagtgtcatgcttgagtcctcacccttgctcgcgtgagtcatgaccatcatgattgccgtttaagacgtctttgtattcttgctcccgcgctgcggacggccgctggcggtgacctcgaactcgtcgctgccgccggtatcatcctcacctgctcatcaccacagtcaacatcattctcatgctgtcctaggattgccactggcagtgacgatcttcgacttgctagctgcctccatcagcatatttctcatccatcactgctgtttgcgacaacagtaccctgtcttcaccgctgctgactatatctgcatcaatgacttccgcagtgacagttcttaccattccatcatgctagaatcaccgccatactaaagtcacataacttcgtgactacatacaggcaggcttatgcatgcatgccttactgttaatcaatggacccttgcaagtcttagaatcattatactaaataactttatgcataaataaaatatttttctaagaaattttatattagaacaaataaactacttccacaaatcatggtttataagggacaaaacttatagtatatctagaattgaagctaaaaactaaaggaaccttttcttgaacaccttatatatggtgtagatgttatatatggttcacatatatatacgtagaacatagtagatgttatatatggaagagtttaacgattatttactttcatatcttgaggattttactctaacagaatctggtagattatatgctgagatatagttttaatagcacatcagagcatacatatatcttatccttatgtgatatgttattaaagccacttcggatctggcagattttcctacttaaaatataactagttatcgtgcacgtgcaaggcacgttttgacattatatacacaaaatagaacattaaatgatacttttttatgcagcactccatagaccatagtgggatgataatttgaatgatctctataaaacttgcaacgtctattcctagagtgacaatataagatgcaatgcaccatccgcctatattaacagaaattccaaagctccatatgagtgcaaagcatatttttatagagatcattaaaaaacatcgtgcacatgcaaagcacgttttccaccccttagtgccacattaaaaggccaagcatacaataacatcaaaatataaaggacatccatagtaatataaaaatttatgacataccaaaatcagtgatgtaaacaattggtgtggattaaacaaattaacaattggtatggattaaacaaattagtggtgcagatagttagaaatagacatattgttattagcttataagcatgccaatgtgaagacatgttgtatatgaacccccacagcatatatactctgatatatatactttttgttagaacacgccgaagataagtgtatcatttcattaacacaccctaactcttaaatgaaaaagaaggaaaaaaacaaacaaaacgacctccctaggacacaagggctatcgacccaaccaacacatcttggagctttgatgttccatccaagcaccaaagtgtgcagcttcaactattagagaaacttcatagtaattggttagaactgatgaaaatgattagaggtaacatttgaggtcaatttaagccatacccccatagatggcagtctatggccatgcttaacatcttcttaaacccaatatggattttttaaaaaaatatataatatgactatttccagagcaaacatatatttaagcatcgagagaatagattcacaagcaagattttattatatcgttgacatgggtacaaaaatgagaccgactatgacaaacaaaaagaacctttggttatcccaggtaaacaacctgaaatcatgaatttctataccatgaatcaaatttaatttaacaatgatataaaaatgaatggcgtgtctcgaatatagtaaacatgtagaaaggtcaatttctcatttaatatatgcaaaaccagctgcaaccaatattgaaacatcagaatgaaaaagaattctaacaaatgattagggatttttccacttaaatcatctcagtaatatccttacaggcttacatttgcagggaagctaatcatattaatagaaaatatattaatgataaatatgaagcattttagcaaacaaatgatcaggagattataaacgctccatccagtcaaagcattttaacaaacatataatcattggataaaatagaatacaaataatcagataaacaacaggagtcacatgcatgaagcatattccttctttcctctgcttcccttttttcatctcccttggaaagcaaagtaggtagctatatgaatattgaatgacatttgtttcatgtacatgtgaaaattttccaaacagatcaagaaccaaatacctagcatctagtacagcaa

SEQ ID NO: 8067 - DNA, 13832 bp, Oryza sativa
gcatgcctgcagtcgactctggaggatccccctttaatttttgtagtatgaatgataaactaaaagtccctagatggctgaaggttgaagaaactgtataattgagcccctctaaattttttttcctggatccgcccctgctccccaaatgtatatagcgtcacaaactgcattatacatcctcccctaatgacataaaactttagatccaacttaatcaaccaaagtgaacgcacaacatgagacagatgacaaggatctaggagtactagcttagaaaatggaaataaactgttgcccacaatctgagccgtaaacatcacattgcctgatttttaggagctgaagccacagctgcaacggcaacctcaggattcatctccccatcacctgacgattgctgcatcgccgggataccttgtcgagtcagcggagtacagagtggcgttgctgcacgagagaagaatcctctggagaagactaacgaggccgtcgtcgagaagaaatcgccggagttggcagttgcctcctcccatcgtcgccacgacagcatcacccaccaccaccagtggaagatggaaaaaaaaaaaagtaaaaacctgacccccaccgtcgaacaagggtggaaaaaaacagatccaacccgaaaatagctttcgggcccgatgaaagaagcgctaatcttgaagagattggacggctggaaattcgagtgcgagttagagaaaaaacacgccggtgatgtatagcaaataccaataattaatatgtattacctagaaactcaaaacagtaagaagaatttaggccgtgtttagtttcccctgttcccaacttttcattacatcatatcacataaaaactttcctacacacgtaaacttttaactttttttccaattaaactctcaactttctttaaacttttaacttttttcaggaacttagcacaccgttatatacaaattcatgatagtaagaaattttatgtagctatctgcattatagtttgtcaggtcaaggactacgaccaagtagttcaccggataaattagtagcaaaatgtaatggtcgctatattagagccgatagcgtaagttgtaaatgatgtagtagtaaacgctttttattcactgtgaatggtacatcaaacttacacacagttgtacagggctattatgacttccttattttttattttttagggagcactcctcttctaaatctaaagtactacctccatttcaggttataagatttttgattttagttaaagtcaaactgtttcaagtttgactaagtttatagacaaatatagtaatatttataatactaaattagtttcatcaaatcaataattcaatatattttcttaataaatttgtcttaggttgaaaatgttattatttttttctacaaacttagttaaacttaaaccagtttgactttgacgtctcataacctaaaacataaaacggaaagagttgtcgctacttcaaacttcttgtgatcgtgcaatttctcgatatacgcctccttctccgtaggttccttgtccttgagctcctcacaatcttcatgcatcttcacagtatgttgccgatggtaaacctttgttgggtccacatagccaactggttttctcaacctttcagcgtcgtggaagtgtgacttacagacaacagctagcttgtgttctagttacttttgctttattgtataaaaatataataaatactttattgattgattaagatgtatctttttagttgtcttttcataaatatatttatatgtatacagtagatattaaaaatatgtacactacaaatgtaataatattattttaacttattataatgtcagaaggagaggagtattttttggaacattaccaagacttaggttcatttagttttttcatcgtatatccagtttaattattattaagttatatacggtgataaaatctattcattattttttctcataattttataattttttgaatcggacacaaaggtcggaaaatataaccaaaagttacatatatttttaaaagttgaattatagtgaatgtggacccttaaatgtaaaattatataaagaatgcggtgcgtatgtagacatggaggtcttttgattaaaataacattatttatataatttagatgtcatagctgcttaacttttttgcacaaaatttgatttctaactaatatattttgggaacattacttctgtgttctttgctaaacggtatgtttttttaaaaaaaaaaatctatacgaaagttcctttaaaaatcatattaatccattttttaagaaaatagctaatattaaattaatcatgcgctaatgagttgttttgttttgtgtgctcaagagattaggtcctgaacatacgctcaatgaggaagcccggttttcatggaagtggcggagaggcgattgctaaggtttcggctaaaacctaattggatctacgtgattcgatcatgatctctcctgtttctctatgggagtctcatcaagatctaatctttagtctctctttcaccgctacgtttagtcgggagcagatttctgtctgttttgactcggctttgaccctgtaggacttggtccgtctgctatttttctagggtttgtgcttccgtcgaaaccctagtatggctttgatctgcttcgtttgcctcgcctgttgttttctcttcctaggagttctggtggtctttggtgggggcgatcaaggggatttcggtaaattatgatatgtatgcatgaagagattgctcttgctggagttggttggagttggtgagaggtgatgttttcttttgaaccgaatgaccaccggctaacacgtgctggcattggaattttttgcgcttgtctaaccagttggggaattgaattttcagatgatatcactgaattgcttgctgcatcaatagatcaatttatgctagtccgcctgcacagaacattgagcggatttagacacaggagcctcagaatcgaaggcaaccaatcaatgctacaggattgttgaagagagcataatagtccatcataaaatcacatgataatgaataatgacttaagatcgttagtttaacgactctgcctattgcaatttgccataatagattaatccttaatctgattaatgaatcaatcgtaccagcatatgtcgacattggcgagtggcctggaatacaatgaactcatcgggagtgaaagggaggttatcgagaacacgaatctggctcgtagttagtgacgatggcgcccgcctggaccagcctctcgtcgtgcttcagcacagcacagagtagggttttttttcattatgtctacgctgttatgattcggtaccacacagtgacacagggtttttctttctttttttctagtacacaggcttttaattacatgtttcaatgggcttttagttgcacgtttattaatgggtttttaattgcacgctaattgtacggttaagatagaatgatcaatctaatcaatagtcagatctttctgattaacatggaagctcgtagaaagtgcctaattagtataggtatagatagataatattgcggtttgaggatataattcgaattcaacatcaaaattagttaaaaaagtgaactttttccttgtttgaatgggaaaatggaaggtgggacagaaagaggagaggacgtgcgtgggctgggaatgtggctggtgagtgcaggcatgcccacgtgtgagaaatacaaccacacacaccaataatagagtatcggctaaatattttcttagagatctactgcaacttgaactatttgtgcacgatataagagtttatgaaatatatcgctaggttttttcatccaatcatgtttttttatggttcgtcactccgaaacacatcgatgtcctaaacataagcaccaagagactgtcatctcatactcctagatattattagacagtacatatcggatggaacacatatcaggtattcataattaatcttaagtgatggatggaatacaagatattacggatatatcacttgctcattataatcttctgtgaacctttgctatgcatttcgctgctcacccgcggttcattatgatcctctgcgcacctttgatggtgtgcaggctggtatacatagctcaagggttggatagcacagctggtccagttcacagcaatagaacccaccgcgggttcgaacacaatgatcaggtttataataaagttctccaaagctgatcttgttttttactccgatcagcatatcccttcttatcttgtatgtggtttgacctatagatacaagaaatcatatgtttatcatgccagtgcaaagaaaatcatgaaaatgacacacaaaatacataaaaaccaatctaattttcgatattacctgttatttgtgcaggaatagcagagcacattagaagaaccaagcaaaacaacatgactccttggtgggtgtgtgtcctgcattttgccatttgcgaaagactagttactacgacttacttttcttactgtgactaattagttgaatgatgatgagtttgcacttcaggagctgcggttcacatatatatacatagaacatagaagatgttatatatgaaagaatttaataattatttactttcatatcttgaggattttactctaacagaatctggaagattatgctgagatatagttttaattgcacgtcagagcatgcacgtatatcttatccttaggtgatgtgttattaaagccacttcggatgtggcagattttcctaattaaaatatactttctatagcacagctaaatattttaagtgtcctatgctacttaaattgtactttcaatgcacagctaagaatagcaagtgtattatcccaacatctattatgatgtcaatttcatcgcacttccaaacatggattttcgaaacatttgatgctaaatcgcttagttccatggcattctttcttaaatatacttcattcgaaatattggtttgaaccctttctttctctcatttttgtcaatttaatttcatgatattttctcaacaataacatgccacttgctctctttagttgaaacccatggagaaggaggtgattgtacaccgtgttagttttgtgttcagccggggtttatgcaaatggacacatcaatgctttgttctttgtctagctagatgttgaggtacatttgtgatatgtttgccaactaatatcagttttgaaatcttttggtctctccttctgtcgcaacttgatattggcgaagaaacattagaaaaaaaatatttatatagggaaatattgatctaaccatattaaacattgatcaaacctttagattgttcgcttcaatcggtcatagagcaattttttaaattttaaagtttagtattaatgtattatcaatgaatgtgacaaaaagatttgggtatattgttctcatagagaatagcttgcactaaacagttattagtgtaggcggttccttgcgacaaccacttcattaaactactgagagaattggttctatgccaccgagtttactgtagttcaaggatttgcccttaacacaattgcgtttatctattttttctacaatatgctagttgggcagatactttaaaaaaaatacccaaaatgccattcaagacttacaagaggttacaattaaagttacgaaaaaaattaaattattttacgtagcctccttacataatatagaagtatgtttatatttcaagatttttattttgcatgtgttaacttttaaagaaaatataaattatgttttataggctaatataatgctcttgtgttaatgttcttctatatacatcattattgatatgctatacaatttagttgttgtccttggaagaatcctgttcttaaattatacacacatgttctctgtggatacgataccctagaatactcttaggtaaagactataatggtatctgtatacttgcagattattctatggtcgtaataaataccaacaacactatgtaataaataccaacaacactacgcctggagcgagggggtcgtcgtggatgaggatgaaccatgcgtgctttgttatcgcaccaccgccagagcgcatggataaacagtgagttaacactttcccgacccatacctcaatgaccatagttttgctgctcgccgccctcacatgcgctagccggctgctgcccggtgagcactcattgccttccactctgtccccctcattgacacctttcattgatgccgcagccgccatggtacagtgacgccgccactgtgctcttggccaacaccgcagcactgcatgcatgctcactagtggacaggctgctatgccctacagtgataatgatcgcgaccgcccaatcatcacaatccgaccattccatggcaagccaccactccggcacctttctcacccactctaggaacaattgcctggcccaaattagaacaggaccaccgacacactagagtgcgcgcgcacgcgcgcgcgcagacgggagaagagaagaaaaggagaaagagagaagagagagaatgacagccaggcccacccctaaaagcttttgttaaaaactaggggaatttgcaaaaaacatcccatacggcacttgaagtttgatattccactctataagtcattttgatgcaaatgcttacccacacacttagttttgttgaaccatcccgtacgcatatgcttaaccacatcaagatgttttcataaattatgagatgtcaatgcaatctttaccagaattaaatatttatatagtatagtcttgacacgtttttggagattcgacaaacagaaatattgatgagagcttaaatgtcatcgcactgagtatggctatatccacaaaagaagttcaatgaaacatgatgaaaaaaaaatctaatacaagcacttggacaagattgactcgggtagcttagcccgtggtagattcggttaggctggcaaaaagttaggatttaaagcattgtcacatctatgtgatttgttatatagaagatccctcaatgcattctctaatgcctcaaaattatctaatcctcttgttataaccattaacacttctggatcagttcagcatggtgcagcatgtgtcatcattaattgtcaaacaccaaccatattgtctggtttgtttgccactgttagggaagcaacatccagtatatattggttgtgccattattgattcacaatagaaatcacctccatggaaataattgcgatgtgcccatttggaattaacaatctcgtatattgaacaacataaatataaacagttagtacaatgagtaacaataacattctctgtctctattttatgaaaaggtacagagaacacacacattgtgatgttgtgatgtctaaccttactgaacaccaacacgtgaacgttagatatgataaaaatttgtaatcttggattgaagatgcagtagacagacgggagaatgctgaccactattcaaagaaccaattcttcatctgtaattattgtcactggatgcacctttctcatttgtttcgtcatgaatcctaccatcgacaaggatatttggaagaaaaacactttgcagcaaattaacaaggtcaatgcaagctgtgttttggatggcaattcattaatcaactcaagtatagcacaaaatagaaagctttatgtttgatgaaattatgaaagggtatatagcctagtggttgcagtaatctgagtagcactgaatgtcctaatgtcaaatcttcataggagcgaatttttgggttatttaagggctaagttccctatttgataggctaagttcctaatttcaaaaggctgcatatatcctaatttaaaatatttgacaaaactaatgaaaattccaaataatgagtataataattgttcgggctgaaccaatacactttcaatctgcaaactacaattcgcaaaccgacaaacgtatttcacacaatcaacccctcatctttccatgaactttgaggatagttttaactagcaaatcagcagcgaaacaacaataaacacatgcacacaagacacggtgatttacgtgaaaaaacctcctcggtgtgaggagtaaaaaaccatggaaccaacggtccactccaagcttccacaataatcaacaatgggtacaaatggagtcttctctagaacatgtagaggtacatcacaacagcagctacaacatcaagttacacacttggtatcatcaacatcaaccatcaattagctacaacatcaagttacacacaagaggtatatcaacaaacaagcaaagaaatggcagattctatcctcttgattagaaccacatatgcaaattgcacgaaacttggcaaaaatgatagtctatgagtcccttcctatatttccaaaaaacagcccaatcagacaccatttgaccccacaaactgacactttactaactgctgcacaatctataatttcaataactcgagctgaaaaactaccactcaaatctagtgctctacttaaccaatcctcatccatactgaccagattgaagtgctcaaagtgaggaacaaactcaccaagtttggtgccaatccaaccacgtttgagcctccaaacgctggcttgatgaagatcgggtaagagcccccactactacagaacccctaaatggtgctggttgggaaaccctcttaggtgcggcacagatcacataagcctaaaggtgccggtttcaaaaccggcacatttgaggtgcatatgagccaaaaaaaaatcggctcgttgcatcgaactgttgagccgatccctagaatacccaaaaatactccaaatccatgaacacatctagatcaaacaaatcacaaatcaacacatcaacaaatatcaacaaatcatcacatcaacaaatatgaacaaatcatcacatcaaaatatcaacaaatcaaaaatcaaaaatcagccgctgatgacgatgccgctgccgcagatgggaggatgatctcgggccgctgctgtcctttctcccgccggatttggcggaggaagagcgcctccggaggctgctgcttctcccgccaaacgccgccgctgccccacgccgctacagcggaagggactgcgctgtcgggccgccgccctccttcctcccaccggatctagtggaggggatggcgctgtccggccacacgccgacgacgccgacgccggcaccgacgcacgctgctaacgacgccgacaccgatgcctccgctcctcccaccgctcttcctgccgccaggagaggagaagagaaaggaagagaagagaagaggaggtgtgcggtggagaagagaaaggaagagagaccgagagagagagagagacacgtgagaaagattcggtctcccttatccgcttgatgagaccggggcactctcccttatccgctcctcaggcggctcggctcacggctcgatctgaaaggtgccgttttttttaaaaaaaatgacatctttaagtaaataaccgacacctataataaattaaaggtgtcggtttttttatagaaccgacacgtataatagcttaaaggtgtcagttttctgtgttttcggaccgcggaggtgggaaaagacttataggtgccggttttagcaaaaccggcatctatagtgccgacactatagatgctaacacctatttgatgttttgtagtagtgccccaagctgaacaagctgcacttcttcttctccactctcctctccctctcttgtgtttgttggttgtttcttcacctcaaaggctgctctgctcactctccctccaatggaaactagggtttttcttcccaccataaaggatgaggcaatctcaaccgttgatcaaggcatgaatcagtggctcacaattgttggacattttgggctgtaaatgggctgagaacaaaatgtccatatggagggaatttagcccaagaataattatgtggactttattgagctttagctttactgctcgaacctggtggtatcatccataattttattcctgccgaagataaactgtttaagtatgataataaaatttcagtagtatttgaaaaaatccacatgtcaggccaagttcaagtattcaagctaattcactccaataacttgtctggaatactcaacttcaaagaaatgctaaccagtcaattcttcaagtgtgtgtgctactggtgccagtgccggcgccttgccctccgcgtgaacgctgtgtcatactatcattgccagcctcacctctggcgttagggctcccattgtgtagtctagcacattcctccaatcacagttcaccacccaccagcgcaaatcgaatcactgatttgggatctagggttagggattgacattgggcacaaatttaatcattcgaataaatgcaaaatcgaatcagtgattagggatctgaggtcttgagtataccatacctttgagttgcagagcggaaagcctcacattgtaagcataccatcctcgtcgtcagccttgtccacctccttcccagctccgatccccggtgatgtgtgcccctaccgtatctggccttgctagcatgtggtgaccggatcgcacaggaggggattctggtggggaataagtttactttgactcccttaactagtgaccgaatctgattcgtatccctgaaccacaataccggataattaaccgctaaactattaatttaaaaccaattgaatttgactccctcggtggttttggaaggcggtttcaccgacgtggcgcctacatggcggtgttgactcggtctttattacacgtggacctgacgtggcgtttaggtgcactagaattaaaaatagtatgtgcgggacacatttgtcatttacacaaaaaaaattgtgagacccactaacatttgggggccaaatgtcatcccctttccctccttcttcctcttttctctctctcccttatatctctctctccccatttctctccagtcttcacgggagggccggattatcgacggcggtggcagatgggggctggagcggcagctgatggcgcctcctccaacccatctcgccggctatgcggtactctccttcgacaaacaacgtgttcacgctcgtcgccaccaaatcatcatagagaatgccgcctcctcagatggcgcatgccgagtaggagccggggcgggggaagcgacggcgtgtcgtcgaccgtgaggtggctgcagcaggatgaggaggaggtggagggcgagaaggggagtggaagggagggaacggagaaggagccctcctccaagccgaacgcaagacgtgccctgtcgccctcactcagacaccccgccgctagggaggagcccatcggcactcggcaccaccattggggaggagcctgccaccaccggcactgatggggatggaggaggcgccggtcgctgcccctgtcgttgctcctccgatctggcccctctactatgaagaccgaagagaaacggggagagagagggaggaagaaggaaaggggatgacatgtgggccccaaataaatgccacgttagctccacgtataacaaagaccaagtcaacatcgccacatcagcgaaaccatcctccaaaaccgctaagggagtcaaatttaactagttttaatagtttgggtgttgaaatatctggtattgttatgggatgtgaatcatattcggtcactagttaagggagtcactactagaaaatcaatttttcatggcgtttggaaaatatttttcatggcggccacgtggaaaaaccgcaagcgcagaaaattgtgggggtggggggtcaagggccgccagtggaaacacatcttcgctagcggtctacttaagaaggccgccagagaagatataggatatcttctctggcggctctcttaagctcacgccagtgaaggtattgtatcttcgctggcggtaaggggatgtggcccgccagcgaagatgtaggtgtcttcgctggcgggcctcttaacttaacgccagcgaagataccatatcttcgctggcggtgtgatgacggggaccaacagcgaaaatacctgcatcttctctggcggcatccttaacctctgcaccatctcaaataattttcaatggcagttcgaatgaaccgacatatgacgaccgccagggaaaatgcgctgaactatatgaaccagctacagtaacctcgagcaccattaggagcacgattttctctctcttaagaacacatacatagggggaaggttttgatctcgaatcttttgaaagatttattgtaccagacttactctttttgtcaactttttttttcatttttattggttgtatgttgagatttttcatcgcaaaaaatacatgacatggaggaagaaaaacattttttatttgttatttggagctcaaaatggcaaactttgcaagaaatattgtgcatgatcgatgttccatatatatatctagtttttgtcacgtcctgatttttcgctttctgttcatctcgcctatttgcgaaaattcacattttgtttattcgtctaaaatagcttaatgaaaaattcattaaatcaaaaggttttaaagtgattaattagttaattacgttgttcgctttgtgattgttaattggagttagttggatttaatttgtatttcgaaagtggagctcaatccctaattcaaattccatccaaatccaatattccttttcaaatcctaaatccttcccaaaaattccaaatactttatatttggaattttccagagaagaccctgtctttttccctttttccttcctctctttttctctattctgcccttttgcagtttagcccttattcttctttcttttttctttttcccccaccttcttctacctccagctctctctctccttcttgagctgcaggcccggggaggccaagccccgagcccacgtgccgccctcggcccggcctcctcctcctctctgcgtcgccggcccaagccgccgccgaccgagcccacgccggccacgccacaagcccaatcgggcgccccaaatcccgcaagccgcgccgccaaattcggagccgccgcctttccaaagtttgcgccgtgcgccctaaccctagctactccctcctctataaatagcactggccaccacccctttttccccctttttccaaagccgccgccatctccaccgtgagcagccgccgccgccgttgctccgtgccgccgccgggagccacgccgtcgtcgtcaccatctccttccggtgccgccgccgctggtaaagccccgaggctgagccctctctccctttcgcgccgccgtttctctctccacctcaacttcggcgtccgcctctcgtcgccgtgcgccatctccacgccgtcccggagctcggtgctgtgccaccgcgttggcctcgacctcctctgcctccgccgctgttttccgtagccgccgtgcaccttcgccgacgaacgccgccgacgccgccgcgctggagccgccatggcgccatggccagagcacgcccaggcctgtggtggagcagctactcctcctcttccctgtgacactgacgtgtgggacctgccatccaaaaactcaaaataatcacagccgtccaaatccctagatcaaatcccaaccgttggatctacataatccctaacatatgccaccttagccctagatccaaccatgtcagtaccaccgcatcgccttgtgtcgccacgtgtcattccacg

SEQ ID NO: 8068 - DNA, 27843 bp, Oryza sativa
gcctcctgacaggcgtgatctgcggtgcctccagatgcctgaaccaccatattagcaaggcaggtgtccacatagccatgaacctccagacgaacacggtgaggaagctcgccactgagcggtggaacagttgagtactctggcgcgttggggtagcccaccaccaaggtcatgcaagccaattcagccacaaaatcatccatgccttctccacggtggttgggtgggtggtcggccatctagagaaggcaaaggggtaggatcaatgcatgctcaaatccaatttaaataaagcaataaaggacacaaataaaataagcgaataagagcggaattttatgcatagatcatttttgcatgagagcgaataagtgagacggacttacatagcgataaaataatgagaaattagatacatactaataataacaataacaataggaacataaataacttgcaacccacatctcttagttagcacctaatgcactcctcccatcaaatcccgactaactgttaaataaatctcaaataattttactaaaaccctagactgacctgatttgacaaatctcacttgaacaagcgaccaagatttttcccttgaaccacaggaacaaatccaattgcaaagaacgtgtgcaatgaaaaggattcagactcttaggttttccatttggcttgtactacaatcaaggtcggctctgataccaacttgtcacgcccagaaattcccgaataggattccaaacagaatgtgcgttaaaacccccgtctaggaccggccgaggtacacaaacgacaaagttgacaaacagatccacgtcttacaaacatcataaaatcttacataaatgcagcggaaaattaaaagataactggagctaagccttgacttggactgcagcgggaacaccactccacaggcatccttgacggcacggacgaagcctactcctcggagaagccaccatctaacgcatactcaaactctggggtttggggaaaatagagcaagactgagtactacccactgtactcaacaagtcataccggaataggggtatgatgcagggaattaacaagggatagctatagaggttcgtttgcatagagcgagcatttataaatagtagttgaaagcagtaaaacagttgtaataattaatcaatattaaccacccactgtccaacgctaccccacgttgcaacaggcccaaccatccacctagactattcaattccattagactagacttgggtgagaataatcacggtgaatctggttgaccgcccataaccgcgggcacggctattcgaatagttttactctgatcagaggtgtacaactgtactgtcacaccctaaaaatccaaaatatataaattgtcgtttaattggaattattagaatttattttaaaagtctagaagagaagatctaattttaattaataaattccaatataaaatgggaccagataaaatttcattaaatactttgcttaattctataattcctagatttttctgggatttatttgagctaaggaagtatttttaataaatggaattgcatttcatgaataatttaaattgaaaaaggattttaaaagtctcttttggctttgggccgaaagtcggcccaaaaccgctctctctccttctcggcccaagtcggcccaagtccagccgcagctgccctcgcgcgcgctcgctgccgctgacaggtggggcccacctgtcaggcccgtcgtctacctctggccgccgccgtccgaaaccctagcgccgccgtctccttccaaattcggccgcgtctttccgtttccggtgaaatcaatagaggggaaatgatcttcgggatctcgtctaccttttctcttctggaatccccggctaaaatcgtttggaaagtgttggtttcgaggtcgagtcggatcggtctctctctctccgagccctaactttccttctcgtcgccggtcgccgtgggccttcgccgccgcctccttgcccctataaaaggacccccggtgtctcctcgacccgccgccacccttgctttcgtctctcgccgtcggaagcgccctagcgccgtgcaaccttgagccgccgtcgtcgccgtcgctccagccgtgcgccaccgccgttccggtcatcgtcgtcgctcggggaggtcgccatcgtggtcgccaagtcgtcgccgtcctcgtccgcccctgtcacaccctgaaaattcaaaatatataaattgttgtttaaatggaatttttagaatttattttaaaagcctagaagagaagatctaattttaattaataaattccaatataaaatggggccagataaaatttcattaaatactttgcttaattctataattcctagatttttctgggatttatttgagctaaggaagtatttttaataaatggaattgcatttaagaaataatttaaattgaaaaaggttttaaaagtcttcttttggctttgggccgaaagtcggcccaaaacctcccttctctctctcctcggcccaatccggcccagtccgccgccgcgcgcgcgcgcctttgctcgctgacaggtgggtcccacctgtcggacccatcgtctacctcgcgccgccgccgcccgaaaccctagcgcgtcgccgccgccgtttccttccaaatccggccgctcctttccgtttccggccgaattgatagaggggaatcaatctccgggatctcctctaccttttctcctttggaaacaccggctaaaatcgtttggaaattcgtggattcgagtttgtttcggattcgattttcccgaactttccttctcgtcgccggccgccgtgggcctttgccgccgcctccgagcccctttaaaaggacccccgagctctcctctacccgccgccaccctcgcctttgcctctcgtcgtcggaaacgccctagcgccgtgtgccctagcaccgccgtcgccgccgtcgctccagccgtgcgccgccgccgttccagacgtcgccgtcgctcgggaagaccgtcgtcgtggtcgccaagtcgtcgccgtcctcgtccgccccttcgccgtcgctgtagaccgccgaagcaccgtcgccgtcgtcaagcggaagaccgccgccgttttaacctcgtcgccgtcgccgtctgttggtcttctgccgctcctttggtcaccggtgagttcgccgcgtcgcgctctacccgttggtgccctccgttcgtgccgaagcgtcgccgttcgccgacgagcatgcgcgcccgagccgccgagtcgccgttgccggtggtgacgtcaccgctgacgtcatcgtcgccctctcccgtgagctggtcgtggaccgatcgatctcggccgtccgttttggatcaagtcgatctcggccgtccgttcgcgtgaaccgccgccgtgcgcccggtccaccgaaaccctagcccgctgacgcaataatcctccttttccttttcaaaaataattcattattgcgtcataattcaattaaaatcaatataagtgttttaatccgattaaatcttcaaaaattcataactaattcatcttagctccgatttagttggttcaagtctctaaatttttctaaaattgagatctacatgttaaaaatatccacatgtactgttcatgcttgtttatgtgctgttttggtgattttgctcttttctgcttagattccgtcgtttccggagagtccgttttcgcaggagaagaatttgaagaattccaaggccagcaaggcaagtcacacagatcccaaacaactctttgagcatgttgatcccgtttaaagctattgtttctattcaactattgcatttattttcgaatgtcattgggtggaattaacctattgtttgttatagcccttttgttcttgattactttattccttgataccttgggttattataacttgactagttgggctatatatattggttcaactagatattagatataattgcttagctctgcttagaaacattagcacactattgggataacttatgaatcactataatttaatgatggcttaatgatagttcacgatggacaatcgtgattagttaattaattaatgtgccaactaaaacctgataatggtgggttgtgagcacatggttttgatggtcgtgctcatgacaattaaggaccggttcacgagtttcggttgtgaaacattaaccgtgccaaccacaagccagcgtgggcaacggctttatcttttgtatagcatggttcattgcagagcaccagactgagaagtggcggagataagcccacgggggtcgctggggagtccatgccttgtttataagggggtgattatgatccaggaaggtgcgctgcggtggattgtgttatgcaaggggtattgtcacaactcctttccgaggtacctgggtggtattgaggcacatggtgacatgatgtggggttgtgtcttgtgggtacagtggtacacctctgatcagagtaaaactattcgaatagccgtgcccgcggttatgggcgggtctaacaatgtttttcgtgattagtctcacacctctcatcatgataacaaatgctttaaatggtaataatttgtttagctcctggtttggaatggtacattcctggtttggagataggactgtgcagccgggatggttgttcagaatggttgggcctatagaacagggtatgttgtatagcgttggattaatactgcttaattattaactgctttattaaattctgaaatgtttattaaatgctgtttatgcaaatgaaaccctactatgccatcctttgttatcctgtgcacctgcatatttgttgcgtggcttgctgagtatgtcatatactcaccttgcaatcattcatcagaggaggagttctacagtgaagctgatggtgtggaggattaggtgtagccctggtcaagttgcctgtggagtggagccgtctgcgccgtttattttattttccgctgcttagatctttattgattgagaggaactatctacctctgtaatgacattttattcgcttattaattagagtaataattgtactctattatcaatttgttattgtgtgcctcggctgattcctggacgagggttcacacacatgtaagcgtttggaattttggatagaaattccgggcgtgacaagtggggtgtaacatcccggtctagggcttaataggattaatagaatactcatatcaacaagttgcaacttcttttctggaagataatctccaaagaactccagggttaagcgtgcttggcctggagcaatttaggatgggtgaccgaccgggaaattcttcgcgggtgcacacgagtgaggacaaagtgtgcagaaaagacatgtgttggtctgtgagggcagtctatgacctatgaaagctatcagatgtaagcgggcccggcctggggaaggcgggacgttacaaaatggtatcagagccgactctcgcggtttcacgggcgcaggcatggtgcgcatgtctggtgtagaccgggagtggttacacagcatggcacatgcgctggcactggacacatggacgtggccaagagaggacgttcctggcctagggttgatcgacgggggcgtcgatctctcttaaggggggtgagggtgtaacatcccggtctagggcttaataggattaatagaatactcatatcaacaagttgcaacttcttttccggaagccaatctccaaagaactccagggttaagcgtggacaaagtgtgcagaaaagacatgtgttggtctgtgagggcagtctatgacctatgaaagctatcagatgtaagcgggcccggcctggggaaggcgggacgttatagccccttcgccgctgccgaagaccgccggagcaccgtcgccgtcgtcaagccgaaggtcgccgccgcttcttcttcgtctccgttgctcttccgccgacgttttggtcaccggtgagttcgccgcgtcgccctctacatcctggtgtcctccgttcgtgccgaagcgccgttgttcgccggcgagtttgcgccgcccgagccgccgccggtggtgacgtcatcgacgacgtcatcggggccgtctgccgtgagccgccgtagacccgatcgatctcggccgtctgttttggatggatcgatctcggccgttcgtttccgtgaaccgtcgccgtgcgcccggtccaccgaaaaccctagccgctgacgcaataaatccctttttccttttcaaaaataattcattattgcgtcataattcaattaaaatccatataagtgttttaatccgatttaatcttcaaaaattcataactaattcatcttagctcggatttagttggttcaagtctctaaatttttctaaaattgagatctactgttaaaaatatccacatgtactgttcatgcttgtttatgtgctgttttggtgattttgctcttttctgcttagattccgacgtttccggagagtccgttttcgcaggagaagaatttgaagaattctaaggccagcaaggcaagtcacacagatcccaaacaaccctttgagcatgttgatcccgtttaaagctattgtttctattcaactattgcatttattttcgaatgtcattgggtggaattaacctattgtttgttatagcccttttgttcttgactactttattccttgataccttgggttattataacttgactagttgggctttatatattggttcaactagatatattagatatgattgcttagccatgcttagaaacattagcacattactgggataacttatgactcactattatttaatgatggcttaatgatagctcacgatggtcaatcgtgattggttaattaattaatgtgccaattaaaacctgataatggtgggttgtgagcacgtggttttgagagtcgtgctcatgacaattaaggaccggttcacgagtttcggttgtgaaacattaaccgtgccaaccacaagccagcgtgggcaacggctttaccttttgtatagcatggtttattgcggggcaccagactgagaagtggcggagataagcccacaggggtcgctggggagtccatgccttgtttataagggggtgattatgatctaggaatggtgcgttgcggtggattgtgttatgcaaggggtattgtcacagctcctttccgaggtaccgtggtggtattgaggcacatggtgacatgatgtggggctgtgtcttgtgggtacagtggtacgcctctgatcagagtaaaactattcgaatagccgtgcccgcggttatgggcgggtctaacaatgtctttcgtgattagtctcacacctctcatcacaataaaagatgctataactggtaataatttgattagctcctggtttggaatggtatattcctggtttggagatagatctgtacagccgggtgtggttgttcagaatggttgggcttatacaacagggtatattgtatagcgttggattaatattgtttaattattacttaactgttttattaaattctcaaatgtttattaaatgctgtttatgcaaatgaaaccctactatgccatcctttgttatcctgtgcacttgcatatttgctgcgtgacttgctgagtatgtcatatactcaccttgcaatcgttcatcagaggaagagttctacagtgaagctgttggtgtggaggattaggtgtaaccctggtcaagctgcctgtggagtggagtcgtctgcgccgtttatcttatttttccgctgcttagatctttattgattgagaggaactatctacctctgtaatgacattttattcgcttattaattagagtaataatggtactctattatctttgttattgtgtgcctcggctgattcctggacgagggtttacacacatgtaagcgtttggaattttggatagaaattccgggcgtgacatgtacccacaagacacagccccacgacacgtttctgtgcaccgacatgccaccacgacataccggatagagaccgtgacaggacccttcgcataaccccctctaaccaagcacaccacaccacaggtttcacccccacccctcgcaaggcagcgggcagtcccctctcgtgcctaggtgaatccggaagccacataggccgtcgcaaggcccatccaaactccatcacgcccacccttgcctagatgcgtcaactagaggaaagctacactacaagcccagtcgttgcccacgctggcttgtggtaagtacgataagttcttccagggcatcccgcgaaccggtccttaaatgccatgggcacgaccatcaaaaccatgcacccatagctcaccatttagttaattttaattaaccaacaccggagcggtggtattaaccaacatcattactagaatctgatatctatgtattaatgtatttcccccattgtgtgctagttgaactaagcatggctaagcaatccctaatccaatctatagtcatgttatacccaaagctaacaaaggagcatggtacaaaaattagtgtggctgtaacagtaggtaaacatcccatagtaacattataaaacgatgcagtatttaaaggaaaacgatagagcatttgtaatataggatcaacatgttcaagtgacaagcatgacttgccttgctctgctgctggaggaacctcggcgactatttcaaagtacaccggagcggtgggagagccggaatctaagcgacatacaaagcaaacaatacaaacaggcaataagactactgaaacagagaacaaaaccatttttaatggattctatgcatttttcttgatttattgagacttgaatgggcttaaactgagctcggatgaattagatatgaattttagaagattcactgtgtttctactataacagaaacatgcttaattgatttattgcgcaataaataaatcccgggagagggaggggcggcgccgacatgcgggccccacaaggcagtgactcggggagggcggtccacggtggaccgggtccacggaccgagggggagcggcgcaccacgtggtgcacacgtggcgccgacgcggcgcacacacggcggccacgtggcagccacgcaggcggcggggttgcacggccccgatctaccgcccggtagatcggacagcggaggcggctcgcggccgggcgcgcacgggcacggctcaagccgacccggcggtcgtggcgcgcggcggcgcagcacgacgcgacggcgatgcaaggcggcgaccggcggcgaccggccggcggcggagggcggtggcgtcacagcgacacagacggcgacagcggcggctaagcggctaggcggcggcgcggcggctaagcggcgcgggagagagggaggaaggggaggaggggtctcaccgacggcgaccgacgacggcgagcgacggagggcgatggcgacggcgagacgggctgcggaaccacctaagggatcaaaagggatgagttagagagggagggggaaaccatggatggctagggcggcaaccgaaggcgccggccatggcgaagctcaccggcgcgcggcgcggacggggctccggcggcggattgctacggaggaggggtggacgggacggcccgcacgacggtgaacgcaacaacgtcgacggcacggctcggcacggtggctagcggcagctagcgccgccggagcggcggcggcgggcgccggagaggaggacgacggcgctagggcggtggagtgcactggagcaggtgattgcacaacgaaaaagagagaggagggaacgggggtgctttatttagacccacgagggtcgatcgtggtcggggagatcgcgatttcgccggcggagtggggagaggtggggaggagagagaggcgggattcaaaaattgaatcccggccgtctcgagcgcgggcgcgggcgggagagagggggaagtgggcgcggggacgcgggcacgagggtgacgtgggcgacgtggcccgggagacgcaggagcggggcgcggtgacggttgctgggcgcggcggcgccagctggaggagggagacgggcccgacaggagggccccacctgtcggcgacccggggagagaggagggggctcgggcggctggctaggccgtggcctgcggccggcccaacggggagggggagggggagagaatgggccagcggcccattcgaaaagaaaaaggagggaaaaagaaaagaaaaagaaagaattgaatttctagggattaaataatgcttgtgctcatttttagttggttaaaattatttctagggctctgaaaattccactaaaaatcttgttagcatatttcgacatgtagaactcaagaaaaattccacatgccaatcccgattattatttgcattaatttattagggtttctctcttgcttttacaccgatatttcctctaggtaatttataaattcaattttggcttgggaaagaacttcagggtgtgacaccgagttccttacgacaatccgtcttgaccatccaaccggggctaaatatggaggagtaccctccccaggaaattaacttaggactatatacacacgcggaggaatacccgtactgagctgtcaccatcaacggcctacctcgcttccgtagcatataaccctaaataaagatatccagtaatctaaacaccacgcataaatcaccaaatactactctaatatcatcatcatgatatagagtcatcgtaaatatgattagtatgcccacaccattgcatctcccagataagctatcatcataatgaatataacatggatatataataaagttggtattcatactcggaaagtagttctataccaaagtagtataaagaagaatattctaaataaagtacaagtcttacaaaagaaggaaaagctactagagccatacccgaattcttccgaagactccgacgactgaaaactctattctatttctattccactataccctagagactatactaagcatgaggatgtatgaaacttcttgcttgaggtgtgtggaagaagtgatgagaagagttccctaaatagactgccaatgacggttgtggagttggaatggttggaattgccctccaaccatcattgggaagtgatccacactgtccagggagggttcgactgaaccatgggccggctcaatccagcctatcatcggctggtgacctcctctcttgatatattttgcaggcttgtgaattttggcccaattgtccattcattgataagtttgattctcgacatcgtccaattgatcgatcacctgttttgatgtcgtttctccttcattttatgtacattctctgcaaaaggttagaatcctagtgctagtggaatatttattatttaaacataaatatgcatttcaagcataactagttcttttttatttaggtaatattgacaggcaaaactggtcgctaatgaccgtcaacagcaagcgtagcctaggagggagggaggcgcggtgtattgcaaggctaggagggagggcgctaccaggccacaacacgtctcttccgcttcgtttctcctttttttcgcgaatcttgcgctactctcgactccacaacccaaccacgacgcgacacatctccttctctctaattctccctccgtgcagcgcagaccacagaggcgcaggtactttaccaccgagtggcaggcgcttggctggctggccgccggcacgccgggccagcctctgatcactgacacctcacgcttcttctcgtctcatgccggcggccagcctctgatcactgacacctcacgcctcttctcgtctccactccccagtacctttagctctaagccctaggaaaactgaggtgtttttttgttcttgtgttatttctttaatttttttctaagaaatttacgttcgcagcatgcggtgacgggaggagaggcggcagcggcgggcggccctctgctagatccggtgggaggggaggcagtggcagcggcggcggcccacgggcgacgtcggcgggctcacgtcttccagatccagcaacctctccgaccgcctctcctcctatcgcctacctcctccttcatccggtgagcagcggtggtcaacgctctgctgctttcaccctgccgattctctgatttggattggtttttaagatatctgatttaatgatgtgaagcactccatgaatttttgatcgtgtgatccaagaattgttgattgtgtgatggctgctgatatgcagttgtctttttggtagatttttggatgtttatatcggctcggctcaaatcgtatacgtcaattgctggcacctttgagtgttcttactagtgccgtcttcgtggtgccagttgggaaaaccgacatctttgtggtattcctaacaagcaccagtaaccctatctgggatagtgtattatgccaatttttgtttcgttggctcacaaaagtttattagatgttccatatcggctagaagtttaaataaaatacgtcagagaatctaccacgtctaataaactgaacccttattagagcggggcagctcaaattttaacattgacggtagaaacagtcagtaaaatgtagttcaatttttaagatgggactttacttttcagtgagattcgaataaacctgacggtgttaataacgtcaggaaaattcactgtgacggtcaaacctgtcagcactatttttcctgaagaatacacgtcaggcaaattaaaaatttcccaacaagccagttcggacagaattttcctgacagtttcacgtcaggagggttttggttgtcagggctagttgagtttttggcagtgttatacgcgtgattgcggaacatgaaagttcacacgtacaactcacagctatgcatttttgcatgtactatacctccaagtagattcatagtattggatatacctccaagtaaattcatagtactggatatacctccaaatagattcatagtactggatatagtactggatagtctatttttatccatgttttaccattagacttatttaaaatgttttgtaaatataaaataaataataactacataaacttttaataacatcgttgattttttatccatattttgccattagtcttatttaaaatattttgtaaatataaaataaataatataaatttctaataagacgaatgatcagttttataatacaatggtgtcatgcatcatgcattacaaaatgaatagagttagacggtgatcaaacataaaaaaaatcaatgatatcatgcattagaaaacgaacgtcatgcattagaaaacgaatgggcggaaaaaaaagaacagaaaagagaggattgagcactccatcataaaagaacaacctaaagagcatgtgcaaatttacccctggttttttctaatttagctaaacataccactcgaatgacagtttggttgtaattttctagtggcagtactgtaataacgatcgtagaaaattataatcaagattcaaagcagtagaaaatttataattacccaaaaagagggggaatctgtaaataccaaaaagagagggaatttgtaattaacaaaaagagggggaatctgtaattaccaaaaatttataattaccaaaaagagggggaatttgtaattaaaaaaaagagagtacgccttccgttccataaaaaacacaccataaaaaacacattataatactacgaatatgaacatacttataaaaagacacattgtaatactacgaatataaatataacacattataatactatgaatataaaaatacttcctagacttagcattgcccattgcccatattcatttagatattaatgaatcattagatattaataaatctagacatatacatgtaatactacgaatataaacatacttcctagacttagcattacccattgcccatatttatttagatattaataaatcattagatattaatgaatctagacatatacattagacatatacatgagtttagatatatgatgtttagattcattaacatctatatagactttttagcattgccatattaatgaatcatgtacatacatgtgtttaaattcattaacatctttttagcattgccatattaatgaatcatgtacatacatgtgtttaaattcattaacatctatatgtacgtggacacaatgctaaaaagtcttacattgtaaaacaatgtaaaacggagggagacggagggaataccttaaaaaaaatacattggaatactacgaatataaacatacctctattattcactcctatgttttttttaacctctattattcactcctatgtattattcactcctatgtagtatcatattcactcctatgtttttttttaagtcctattcactcctatggtttttttttaagtcccatgttgtttttaaggacggaagacgtaacattcagtcctacttcaaggacggaggagatactggataacaacattactagcaacattatggaaacattttaaaaggcaggcaggtacaaacttcataaatacaaggaaacattttaaaagacaggcaagtacaaacttcagaaatacaagaagctatgaccgatattaatattagcaacacattgaagcatgcaaccactcgtttttattcatccatacatcggagtattggttattctgaacagtgtacggccactccaaagctggagctaaactgaacctcaaaaagggctcagtgatggccaccaccggggagcttctccttgatcttctccatcatacccttcttctcgtgcgtcggctgcgtcgtcggtgtatacgccgtcccgccggcgtcggtggttgtaccagcggcggcggtgtgtcccgtgccggcaccatatccgccggtcgccgcagtggccgtcggctgctgctggccgcccttgttgccgccggggagcttctccttgatcttctccttgattcccttcttcctcctccctcccatcccgtcgtcctcagacgactgcacgtcatatataatacattgatgacacaggaagatacgtagacataatctagttacggttaatttacagtgtgttgagaaacgttaccgagcttgagcttgaactgccggagcggcggaggatgccaccggtcttgtgctcctctctcgccggctggaactggccgcctgcgtgcggatacgcgccggtgccggcggtggcgccgtgtggcgcccctgtgccggtggttccgtatgccatggtgtcgggtgttgtggtggctccgtgtccagccatgtgcctggtgcccaagccaccggcgccgtggtgggctccggtggttccgtacccggctgtgtgcccggttcctagtccaccagctccgtgctgagctccggtgacgccggttgttccgtacccggcggtctgccccgcgggtaaaccggcgccggcgccgtggtggactccggtgccggtggtaccatgcccggcagtgtgcccaggcattaaaccaccggcgtcatggacgccagtgccggtagcgccgtacgccggctgaccggaaccaccatagcccgcggcgtcgtgggtgccggtgccggtggcgccgtatccggcctgccggccataacccccggcgtcggtggcgccgccgaacgcatgctgaggctgcgcaacgttgccggcggcgccgtaccctccggcgcctgcctcttgcgtcccggtgatgccgtggccggccgccaccgggttgccgtactcgtcgacgcgcgccgccgggtggccgtgctgctgtccctggaagtgcgccatcttctcagcgtacgacgtcgctcgagcccgactcgatcactgcgtgttgtgtgtgctcgcctgctcgagaggcgatgagttgatcaactgtttcagttggaaatgatcggtgtggtgggtgaagcgaggaggagaacgaggcaaagcgttggacttataggcgaggcgcgcgcggcgcgagcgcgacacgtcgagggggcacgtgtgagcggggtggatgcgcgacgcgtggagaacggtggggagccgacgcgtgcatgcgcggtgtgctgggatggggggtggagcggcatggaagccggtttgctttccacctggatgaggatgagtgcggacgtgggcttcggcggagattctgcgcgtcgggggtgtgcgtgggcgacgtcgagtagaacaggcgttctgccaggtggttaggttaggcatggatgcggctggtgacttgactcgactggaaacaaacagcctcggatatatatttcttttaaactgtcgaaaggtttggagttcaaatcttaacacaattctaataaataaacatagtctattttaaataaaatattaaaaatgataaacatttaaaatgtcataaatatagagaaaaaatagtagtaaactttatttttggtgttttgtactaattgagtttaaccataagttcggtctgcaataacacatctagaagattctacgactgaaacttaacccaaaatctattgtaagcggaatagtaaaatcgttttttgctaggtattgttttgtcaagaaattttcaagggaaaatcacatggatttttaaaaccaccctacacttggctattagaacaatataaagctcactaagaggataaagacgtacacaagtatcttagttagaaaatacaatataattgaattttgttttaaaatttctagatttaaaaagttacaagcatattaacaaggtacaatgtaattttatataaattacatcgtagcttaaaataacttacaacattctcattacactgtaatttgaaatgtggcttcaatttatttttctaataacgtcattaagctcatgtatacttataataccaaataggcatattgcatactttaatttgctggatcattttattacgtaactgtttcagctgggtctcacttattaaccagttgccagcctgattggccctgctctggttgctgcacgcacgccaggacatgacatggctctctatcagttgcagtctgtttgtgatcaaacgagaaaagcaaggatcttatacgtaaaatcaatggtgaaaattccgtctgattttaaagatgaaatctgttgaaagatatatagcaaaccagtaactgacatagtcccttggctcgtgagcttgtaactacatcgcatcccctagaagatagtatgctaatgggacgctatgaaattgcattgtcattcttagaaataaaatacacccgtccaaactcggataaaaatatatatttcttgctctgctaaaaaaagatcatggtaagaaatatggctctcatgaccgtgtaaaataaccaagtgttgaatatttcggaacggaggaaatatatatgttttgtggttagtctccatcttaaattaactatggggagaactgtgtaaaatataaggtaatctttatccatcaaacggtctcttggatatataggtcaaagataagttatgactccggttgagcctgtaatgaaacaggtcaaagataacttgggtggcctatcaatggtgggccaggctttacactatattttttccaaaaaaaaaatgatcaaacttaatgaaatttgacttagtacacaacaaaaacatctaaacctatgaaacggagggagtacagtggcatatgtacctagaaagttttatagatcatctctaaataaaaatggtgctgacagtagggtataatccatccaaaaaaaaagaaataattgtggggcatctttgctttgtgttgcgaagtttttttttcttgtaacaaggctgttttaaaaaatatattttttgaaaacgttggtactttttttagaacatgattttttttaattgtaattttgtttgttgacgtgcaatatatatgtacgcatatttttttattatcatctcatatgctccaatatgtttctaggaaatacatatggattggagcatacaaatcagttattcccagacactggatgtgattactaccaatcaaacactataacttcttatgtatccaattcaaccacaaaatggagcgcacttaattaatttgccaattagtccttcgctcgctttttagttgtaggtgcattttgctagacactcagaaattgttgaatagcacttcttgtcctttgaacagcaataggcaaagtccctctcttcctgatagcaaacattcaagctcgcatggctgaccacgtttttcagtcccatcggaatattgcttccgatcttccttatggtttgacctagagatggaaggaatcatatgtactatatgttttaaaactgaaaaagaaatgatgaaatgacatataaatcaccaaaaaaaggaatttagttttcttattacctcttatttgtgcaggaagagcggagcacaccacaagaaccaagcaaaacaacatgagtccttggtaggcaggcttcatacatttcaccattgcgaaatatatatgacgttactatgttttacctgtcttattgtgatctatgtagtgaatgttggtttgcgtgaacttgaggagccatggttcatatatatagaacaaatatggctgctatatatggaataaataaatgctagcttatctggaggattttaatcataatctaaaaggatctggaagattagcctgaattatgattaattgcctatttgatgacaataaattgttgctgtaaaatgaaatatcgtaaagcctaattttagctacatggacaaacttatcttctcggtcttgcccaaacgtctattgttgattaattccaccttaaaagagcgattttaaaaatatatcacccttattcttctgttttatgataatagattaatgtttatttttttttgtcaaatctactaacttgtccgaaagtctaattttagtttcactctaaaacatgtcaggctgtactatagatttcaccatcaaaaggttctaaatgtttcttacttaattgcatttttatgacaataaattagtgcctacttagcatcaaatctggtagattatcctaattaaaatatactttcaatagcatggctaaatctagcaggtgactctcccaacgtatgctaatagcaataggccccgttcactgtttccttgcggtgaattcacctattaggaggggatggttagaattaattctccatggggacataaatgagaggaggcatgtccccgttggtttcacggggggcggggattgttcttcattccacgtccccgctccccgcgaagacccgcgtaggggccgggtccaactttaatgtattttagttatcctgtgtgattatattgtttgtagtctttgataaatgataactttatgtttttatcatgtgaattagtagaaaatattagtagatgtatgctaatatattcatataaagtacgaatatatgttgtattgcatatataatttgacatgtgtatatttttttaagcaagggtgaaatcaccgcggggatttattccccgtgcggggatggggatggtaacaaagcttcccccgctgtgtttcgcggtgacggggatgtctcgcgggggcagggatggggatgcattccccgaggtgaattctccgttgccatctcttgcactactaaacatgcatgcgttttcaaattttcttttttgtttaattgctcggtttatggcacgatttcttcactgtacttatcagattttgttggtgtaaaccctaccttctttaaatattatgaatttaatttccactttgttgtacgtatgtcaaacatattcgagaggtgattgtagttgttttcttaggcgttcggttttctccgagattcaagctaggaatttcccacgtctctgggttgtcggtatgtggggtcaaaatagagttattgcttttgtcttatagttaaaaattttagcagtaaatctactttgtgttttctctactatattccattgaatttgatttgttctatagtaggtatgaaatcggttcagatagtttccatgtctattatatattttttggcatgtctattatattaattaattattaattttattgttatatagataacattgaaattgagattattatgtggatacaacacatatttataattctgtgtttttcttaaaaaaataaaaacctaaagagtctaattttcaatggtatattatatttaacacaatttagtatattcttaattttgtaagcacggtacaaggggttttcctgttcccatagatattcatgaccatatttgttccaatacatatttactcagtatctgtattcgataatattttgcttcatttccttttacgattctgattaaaaaaatgaaaataaaatgatagaggtagtttctgttaagaaaccagtctactctactgatcagcacatgagcagataaacacaaacttatgttccccaaagttctacatgtgctatacatgtcagacacttataagagacatataggagattacttcttcaataaggttgtcctcatcatcgtccatatggacatcttcaccatccttagtgttgacaaacatgtcatcatagttttcaatgtgagcttcaggctcagtggtgaagtatgactcatattggctcattttctcattagagctcaaccagatgcttgggaacatggcagttacgagaccaatgctcaatgcctccacatctatagcaattatcatgttttccccagatgttccacatgtaactttcttgcattcggcttttgcctttgggcttacccttcccttgccccttgaacatgatacttcccttacccttctatctcttctccctgtggccccatttatggtcacgtgagtcgccatcaacatcaacattggcttgtccttcagacattgccgtagacccagtgggtcgagcggaatgattgtttaaaataatctcattcggcctttttgcaactaaaaggactgaaataagctcagactactttgagttcttgtattgttgttgaagcaccatgcatgttgttggggtggtaggtggataactttttctcaatcatctcagtatcagtgatcttttggtcacataaacataaccaagcactgatccaatatagggcagagttatacgccactataaatttgtagtcttggaagcatagggtgattaggccatgttgtgcccatgggagcaaaattgacccttgatggtcgcagcgatccttcagggattgccataataccagtggatcttcctcggtcatatactcagacttcatctctgggtggagatggtggcacaagaatgcaattcctttgctttcttcgcctttgtaggatcctctgtgccagcttcgattagcacaatagtatgaccaagacccatggagtctagcttaatttcaacatccaatgcagtgaggtagttgctaccatccaacgcaagctcgatgaattacttctttgttctatctgacatgtcccatggcatcattttgtatttataacaggtaaataatatgtgcagggtcgatataaactggtcatgagtaatttttatgatcactagcatgtgtaatctttaggattaccacacagtttaccatagaaattaatttaagtaatccttaggattacagattgcgtgattaaatattatgaatcatgctaggaaattaattatataacattaaaataaaatgttacgaaagatcatgcaaacaatatagtaagcatgtaaacaaaacgaagagcatacatgggcacaaactccatgcatattgtgcaaactttaaaaaagaatagaaaccagtaaacacttctccactatgagcccacgagccttgacggcaaagttgaccttagtgacagcaaggccccatatgggtgatctccatagaaccaaaggacatccataacacttttagggtcgtgtagaaggtttgtttgcctccactatttgcgggcaacggcggtagagccatccattaagtttacataccgatgcttcaggaacctttcatcatctctagcattttaacgataatggtagcagagccgccatcatgtatcaactaatgctgagaggatgtatcatctcaagcctttggatggtaacggcggtagagccgccttcatgttactaggcattgctgagaggatgcatcatctctagcaattggacaataacagcgatagagccaccttcatgttatcatgtattgctgagagaatgtcagaggatggtacttcaggtgccatattgttcttctgctcatttcaactatagtagaaatattatttgcatattaagaacaagatgatcattaggcattggtttctcagctgtttacctgtttagcttggtggagactcgtgctggtaacattttaagaagccattctattctactgatcagcacaatagcagacaagcacagagttgtggaacacagaaaatatggatgaatgaaagctttatttcatcggattgcgtacaagttacatgaggagattaagtatgaaaatataattcaaaatgatgttttagagaagattgagtatgaagatataattcaaaattttatttcaaagaatatcaaaaggattatgtttttcagtagaacatgaggtcaggtcaaactattttagcattaatgttttatatgttcctaagaagaaacatatctaaaaattttatgcttttgttatgctccgttttcatatttttggggcccattttacgttttgcacatgggccccaaaatcatagatacggccctattcatctgtaacaagacgcatcacctctagtacatgtgaagcctagattctggtttctctcttcacctctccctaccttttctctcccctttggaccacctatatacccatggttgatgttagcttcctccggtactaccccatttgagctgccaccgtattctttgaaagccattaattatctggaatttactattaatttggtaaagcgtgattttctctttatatatactaccgggagtagctactcctgcatcatctgctatacgtgctttcaagccgatcgctattttcgtgggatacaaacttttgaatgcattatgcacgtcagttgtttgcattatctgcctgacggccgcatatatatatagagagagaaaatcctctatgtacccatgaaagttcacctaatcccttctatacccctgaattttgctcaatcccttacatacccctgaattttagtttggatcccttccatgccctttccgctagttgaccgttagttgactgttaaattcttttgaaaaagtccattttgccctttgctataaagaaacataataaattaatgaagtatattgttggaatgtaaaaatttattggatgagactattatatttatgagaatgtgatgcaccatattatttgtgacaaatttacttttacatatgatataaaaagttaatacttatttattagttattaaaagttcttttatgtagcatatgtgttttcatagtaatacaacatatttatttattactatcagaacacatatgctaaaaaaacttttaataactaataaataagtattatttttttatatcatatctaaaagtatatttgtcgcaaataataaggtgcataactatctcataaacataatagtctcatataacaaatttctatgcttcaacaatatactctattaatttatatgcttctttataccaaagggcaaaatggacttttttataagaatttaacggtcaactaacggtcagctagctgaaagggtatggaagggatccaaactaaaattcagagatatgtaagggattgagcaaaattcaggggtatagaagggattaggtgaactttcacattatgcccgttatgcccattttctaggttctgcattttcaagttctggaggagcagaacgtatccatgctggtattcaattacacaagcagaacttgatatggggaccagaacgaaaatgttctgctcttgtttctgctggagccttttgctctaatagtagattgaatcgtttttgaaggaacagaaactattccgtcacatattcataattataggaacagggagattagcttctgttgcatgcgtatacatatttctgttatgcagattagctgctgccatattattagcctgttttttcgtttgccggctagtatatatcttctgtcggccaggagcagaaaatcaattccaaaaagagcagaacatcagttagttagttaggagcagaaaatcaatttgaaaagagcagaacatcaacaattgcatgtgctgcccgtttatatacaacatatcaccaaacagtgctcactttcaaacgaaattaataataaaaatattggtttgagagcagaacatattctgcctccttataagtagatcgagtttgttttgaaagagcagaaggtattctgctttcttcttgccaaagcttcctataagtaaacggactttgttttttggagcagaagatatatattctgctttcttgtttctagaaacagagataatttcaggtacaaaattcaaatctctttctgctccctttctaaccgatgttctgctcctttggtagtttctgctgattttcaagttttggatcaaggagcagaacttaccgatgatgagatttaattagacgagcagaagttgaatatgtactacttatctaagtacgtacacagcagaaactatacccagcagaaactcggttatgcagaatatgtactacttatctaagtacgtatagatgacatacagtatgttagtaatcaaccgacagaacatgtactgccgtcaaaaacggatacggagaaaaaataggtggctgttctgctaatttttttatgttgatgttctgtcattctttttaattcatggtctgccattttttctgttggccggctaatatatatgttccaccggcacgagcagaagataatatgtcaggacgagcgggtgggaggaagaaactgcatccgagaagttggtttgcatgcagccgatgatttagcaactatctgaactaacaaactatttaattaaacaacacgggtattcatcgttattggatcctcgtcactccactaactgaatccgatccataataggagggagtaactaccctcggtagtaggaaataggtgtcctatctatctatctatctataatataatagatagatatagatagatagatatctataatagatagatagatagagagagagagagagatttgagctcggcattgacaattttaatgtggagaacatccaggacgagaatagtcacgtgcaaggcattgtcaacaaattagatgaaagtctgaaaccatgttactttgttgaaatgttaccgacaagagatacttgattaatcgattttcttttggccaagttccgagagaatatggttgtgcagcatatgaaatttggttcgccatatgtacaatatattgaatattgaatattgaatgctgcatcaagacacgggatgaatcatcacgattcttgagttacattgcatcaatatttttctgaaatgttcaacatctggtcctattttccccatataacagctggtaacgcacatcacgtatgaccattctggtatatatcatatatgtggttcacttgatttttttttatttcaatactagagtgccaatcttctttatgtggtctgaatgtgccatgaagaaaagtatgtcatgcatatctcattgaaaaaagataatgtggttcacttgaattttgatttcaatacaagagtgccccgagatccattatggcgagttgtagattcatgcatatctgtatagtatccttgaaaaaaaaaagtcactccgcagatgtgtgcagtttgtacattcaagcatgccattcagaaaatcattaaaaatgttcttctccaaaatgacattctggaaaatgatatcagttaaaaccaatgtaccagttaatttatattacaaaaacaatggatctccattcaccataatgagatttttacaaaatggtatgtctgttacatctccatactgacattataccaaaaaaatgcacatgaactaagattttttacacaatccaacttttctttctccaaatataacaaggtcagaaattagcatcactaatcactgatccggaatcaagaatcccagctcacttgctctgccatcttaatcagtcgctccagattcctgctcacgcagaaagtaggaacgcggccaccacatgcctcacctcatggccgcctcgacgcgtgccctcaccatcgcagccacctcgctgcttgccgtgccagtgctacatggtaaaaacgccagcctgctcctcctcccttctggcttgggagctcaaccgcgccagccgccaatcccgcaggtcctaggagccgagccccatgtctatgaagccattgcagagcgacaactggtgcagcggccatgaaagtggctgcctgatccggcgacgaggctcccgtcgacgttgacctcggctgttccttctacttcctcaccggcttcgtccgaccgtgggggatcgggagcagaagggcatttgagaactggagaggggtagagagatgattgaggaacaggggcgtccacactccacaatttccccatggagatgaaggggtcagtggatgaagggcattttgggaaggacacggtacaaagtgcaccatccatcagcaattccgcagcgcctaaagggaggaaagcaggcatggtacatcctattatcatcagtcccaagattcgtgcaggggaatggagggtgtagattgcgagtgcatgtgcactcgggtgcaaataatccaattcctatatatatatatatatatatatatatatatatatatatatatatagacataataatccaattgtgagtaataactaaaacactccccctcacaccctacccccacctagggatgaaaacggagcggatagtttccatccgctccggataaaaacggatacggatacctttcggatcggataattctcggatatttcatatacggatacgaatacgaatattttctcccggatacgaatacgaatatggtatcagggtttccgtcggatacggataataattcggatatccggtgaacagtgttattcggatatccgcaggacccatgagacataccccatttctttctaactctataaccttcaatatacctttatagattttaatagtagtttatctcttaacattagtccatactattaatattatttaaattttaaaaaatatttataaattatacctcattttatataaaatgagctaattatatatgttgatatttatttctattagaagttgagttggttttcgtgttccgagaaaaatttgtttccgtattcgtgtccgatcatattcgattcttattcgtattcaagataatccgtatttgtttccatattcgagctatccgtattcgttttcgtatccgataaaaaatatgaaaacgaatatggtatgagcattatccgtccgtatccgctcctttttcatccctacccccacccccacccccacccccctcctaccctgtgtccccagcagccacctaccccgcaacccaacctttccctgtagcaaacaattagtaacttttttactgtcaactttacctgatatatatattac

SEQ ID NO: 8069 - DNA, 33113 bp, Oryza sativa
taggcatatatgtatgtctagattcagtaacatccatatgaatatgggaaacgctagaatgacctacattattaaacagagggagtatcttttttttagaactacatggaatgtatctgaattcaatgtgtggacataccattgccattttttttgaagtcaatgtataaatatgcccttgcaagcactgtttcttcccatacttttacttttttaaatatacattggaaaaacgtgccttgcacgggcattattactagtaataggtaaagatataccaagtgcgaactgccaatactttttgctacgagaaaggagagggcataggtgtgttgtgttttcggtatattggtgggattgaattagcaccgccgctgggaaagaaccagggtatgatggagtaatgaatgcctgactctagctagtgacaagggtttacatgaaaacatctataaacttgaaaactattgcaaaaaatactcaaaagcttttaaaacgcacacatataagtgagaatttagataaccatataaaattgtaagaccaaactaaacttcgttttggagtcatgaaattaagtaattaacaaatggctaaaaacattgatcttcagtttttattttttcttacctattttgttaatattgtatctaataaatgaagtcaattttaattaatcttgtaattttgtaggtttactaataacactttgcagtgttcaaaatacataatctatatattagcgatatagaaatgttcagttttgagcttagaacatatccccctgatgagaaatctgcacaaagaagtgtaagaaacgtcaggaacacatgttgtatctgacatgaaagagcaacaaacaaaataataagaaaattatgtgattaactgctatatatcctcctggttatgcatgcttttagttctgttgcaaagagtgacgttgaacccccaccaaagaacaatctttccaatttccacaaatgacagcagcatttgcacttagacaatccaaccaaaccactcaaactcattctcaagcaatgcaactaaataaatgaaaatttaaaataccatattattttgccatggtttattaaatataaattagaaaaattctaaatcgttacgagtcattcatgttaaaatacattttcaatcatgtgctataaattaaataacatgatatggttagaggtaatggctagcacagcatgtgtatatatcagaagcccatgtatcagatgctaaaatgccatggcacatttaacaatgtcctcgataagcaaaatatgacttatagagaaaaccgtaattttggctcaaactgaagatcaagacagagagaacaataattttgctcaatctgaagaccaataactgcactgaaaggaaattctaccattataagtacgagaatcagtccaccatttgggtaattttgtttggcaaaatttgctacaggacacgtaaaaaacatgtaattagctgggattagctgggagacaccgcgaaaacgtgatatggctgatggacactacaaaaattgtgtaattggttttaggacactggtcgtattattttattatttctgggtcaaaagagatgagatattttcctaaatacccggattgccacttctctttcttcgttttctccttcgccgggaacgcgcgcggtgagggtgaggtcggcgaggtcggcgcgagcggggcggtggggtgagctaattacatattttttgtgtgtcttgtagcaaattttgccattttgttttactaattacattatgaggcaagtactaattgcaagcatattctcattttacccactattatcttgtaaaaagtcgaaaactgaaggcattcctaggcccctgacaagtcttgtaaatcaaatatgttaaagataaaatagcatgtttatcttctttctgcttttgccgatctcctatccaatcttcccgattctgttatacatcggttgagagattctggtatggatgtagctatatatgtacacatgttccgtgattaatcgatatcgcgttgagctatccctgctttcatggtatcagatactcccgatccaatcgcttccgctaaaccctaaaacctcatcgccgacggctctctctcctgccggcgcccatgtagtccgtcgacgacacggctcttaccgcggcggtcgcctccatcaccgacgccgccacctctgccatccggcaggtccttcggcccgacgactcggcctcacctgacgaccgtgccgccgccacggctctcatcgacgcgacttcggccgcgactgccaaggccgtccaagcggtgatttctgctctcgtcatcacgcctatcaacgacacggtggccacagcgtcaagttctaccttcccgacaacggtcaccgttgacgccgcggctcttcgcgccaccctcggacttcctccagccagcgcgaccacgcaaccgcccatcggcctcggctcttcttcaccggccgaccacgctagcctgttcgctgcactcagccttcaaccaccacagcacgaacgagaacgctaattagcgttcagtcgcgcgccccctcccccgcgcgactggacgcgtgtcgcgcgcggggaggagggtggaggacggcgcgtggaaattttttttttctggtggacggtttctttttttcttttttctgtttttttctttcctttttttggttttttctgtttttttcttttcgtatctttttcagttattttcgttttatacgtatacagactttgtatacgtctatacaaactttgtatacgtctatacaaactttgtatacttctatacaaagtttgtatacgggtatatacaaactttgtatacgcgtatacaaagtttatatatgtgtattttttatttttatacatacatgtaaataaaaacccaaaacttttgtatatgcatatacaacgtttgtatacgcgtatacaaagtttatatatatgtgtgtatttttttatttttatacatacatgtatataaaaaccaaaaatacacgtatacaaagtttgtatacgtgtatataaattttgtatacatcatatataaactttgtatacgtgtatatatatatatatatatatatatatatatatatatatataaacaattataatagtactagtattacaagtagtagtaataatgtactagtggtagtagtattagtagtagtagtagtattgtagcagtagttgttgtactaatggactaaggcaggcaggactgaccgcacgggtgcaggcccgcgcggttggtcgccgatcagccacaccctagcacgaacagcccgccggctccatgtccgggggcgctctgccaacctctgacactgtcgatgcccttcatgcccaggcggtgtctgttctcaatgtcaaggtgcttgtccccgtcgtcctcgaccttggcgccgcaaattaccaaatatgccctcaccgaccacgtcctctctgacgacgcttttcctcatcatgcgtcctgggctcggacggattgtgtcgtgctctcgtggctctatgggaccatcgccaccgacctcctggagaccatcattcagcctgatggtaacgcacgcctcgtctgtctctccctcgagcagatgttcctcggccactaggaacagcgcgccatcaacctcacggctgaatttcacacgttcgtccaaggtgacctcggcgtgaacgactactgttgacgtctcaaggctatggctgacactcgcggtgagctcggcgaccccgtcaccgaccagcaacttgtccttgcaatgatcggtggtttaaaccctaaatatgaaattctccaaactattattcctctgcagtgtcccttcccgatgttcgtcgaagcccggatcgagtaagctaattctcaccgagatcaacaagggcccctccaaccgctccaccaactcctccaccgccctcatgaattgcacgccacggggttcgggaacctaaatcaaggcggcggcaacacacaaggtggcggcggcaacaacaaaaatcgctgtcgacgcaacgggaacgggggcggcaccgccggcggcaatggcggcgccgctcagggcacatgtggccaaagcgtagggcaggctgcccctcagcctcgcgctggacaggcctggcccactcctcagcacccctgggtcggcacgattcaaatgtggctgggcggcccgatgctgcgtgctccagggattttgggccctcggcccacttctccttttgcgggcgtggcaatgtccggtgggcaagctgccctcccgcagccggtctcccaggccggcccttaccttccagccggcctcactcagcagcaacaacaactgcagccatcggcccaaccaacgtcctggtacggagcctccagcccaacacttgcttgggaccaacagactttggcaagtctgtttcaaaccgacaccctcacgacgcctgcctccaacggctggtacatggacaccggtgccacctcacacatgacatcggacaccggtatcctatcctctcacccaacctacctacgccactctgtcccacattatcgtcggcaacagttctcttttgcccatcattgctactagcagtctggcaatgcttcatttcttcacgctaatagaatgtttgttctcaataacagtcttgtttcacctaacattatcaaaaacctaatctctgtttgtcggtttgtcactgacaacaatctctccattgagtttgacaagtttggtttcactatgaaggatctacttaccaggaccgtgatcgccaggtgcaatagcttcggtgacttgtactcctttctggcgaacttcttcacctccattgccagttccttcgctgccactaccaccacactctggcatcgccggcttggacacattggtcacgacgccctcacccgttttgctcactccttggtcatctctcctcccaaatgcggctcctccaccgtatgccatgcgtgtcagctcggtcgccacatacgcctatcttttgctacttctttgtctagggctaaggccaattttgagttaattcattgtgatttgtggacctctccagttctcagtgtgtctggttttaaatactaccttgtcattcttgatgattgctctcattatgtttggacatttcctcttcgtttgaaatccgacacattcaccactctttcgcattttttttgcctatgtcaggacacagtttgctacacccattcgcaacatccaatgcgacaatggtcacgagtttgataactccgccgctcgatctttcttcctcaccaacggcgtcgccatgcgcatttcctgcccacacacctcgccccaaaagggtaaagctgagcgtactcatcgttctcttaataacattgtacgctcgcttctatttcaggctcacctccccggctcattatgggttgagtctcacccaaccaaaactttagcccaacacactccctacttcgcccttcacggtgtccacccctcatacacacatctttgcgtctttggttgtcgttaccccaacctatccgccaccgcaccccacaaactctcgccacattccaccaagtgtgtgttcttggataccctagcgaacgtaagagataccggtgtttcgatccgatcaccaacatggttattatctctcggcatgtggtgtttgatgaggatacatatccctttgccgaaatgactggtgacactgcttgtgctactgatcttgctttcctggaggattttacttctcctatacaggctccaattggctccaatcgctcggggaaggctgcctccacttctcttgggcccaccggcgcatgcatcgatcggccgacccctccctgcttgccgggctgggctgggcgcctctctcctgggccggcacctgcggcctcatctccgacggcccatggggtctctactttagggccagcttctccggctcggtctgcccacgatgatgccatcttggcccatgacggcgctcctcatgtccacgacggcgcttcctccctggctcatgacggcgcaccttccccagctcatgacggcgcgtccagtacgcgcttgctgcgtgccccgcttctctagccgtcgccactcgcggtaccgacgtgcgccagaagcgcccgcgccctagttacatggccaccggttacaggcttcggcatctctcccatcgacaacaaccacgccatggtgacaaggggcaaggctggcgtccgggttgccacttcacgcctgaacctccatgccgccactctctccctgatacctcgcacctaccatgctgcgctcgccgacaccaactggcgtgatgccatgcaagaggagtactcggcaccgatgtcaaattgcacttgggaccttgtgcctcttccaccgggcacaaacatcgccaccggcaagtggatctttcgtcacaagttcctcgccgatgggagtttggaccgctacaaggcgcggtgggtcctctgctgcttctctcagtgccccggcatcgtcttcgacgagacctttagccccatcatcaagccagctacagtctgcacagtgcttagcttggcagtctctcgtaactggcctatccatcagctcgatgtgaagaatgcttttctccatggcaccctcgcagagacagtgttatgcatgcagccatctgggtttgttgatcctgctcagcccaactctgtttgtcgcctgaacaagtctttgtatgggcttaagcaagctccttgcgcctggtacagtcggttcgccacttttctccgctccgttgggtttgttgaagccaaggcatatacttctctatttatttgtcgacgtggaggtgatgtggcctacctcttattatatgttgatgacattgttctcactgcttcgtcgacatcgctgcttcactggacaatctcttctcttcagtctgagttcagtatgaaggaccttggtgagctccatcactttctcggtgtttcagtctctcgccattccttcggcttgtttctcactcaacggcagtatggcttggagatattggagcgtgtaggtatgttcgactgcaaaccgtgtagcaactcggcctggtattcagtatgctgttcagcagatttgcctccacatgcatgatcctcgagagtctcatctcatagctctcaagcggattcttcgctatgttcgaggcaccctggatcttggtctccacattcgtcactcagcctcacatgatttggttgtctactctgacaccgactgggccagttgtcctgacactcgcaagttcacctcgggatatgctgtgtttttgggagataatcttgtttcttggtcctccaagcaccagactatggtttcctgttcgagtgcagaggctgagtatagagttgttgccaacgctgttgccgagacatgttggttgcgccagcttctccatgagcttcatgctcctccagtcaaggctactctggtctactgtgacaatgtcagcatagtttatctcttgactaacccggtgcaacgccagcgcacgaaacatgttgagattgatctacactttgttcgtgagaaggtcgccattggttccgttcgcgctcttaatgtgctcacacattatgctgacatcttcaccaagggtcttccaactccagtcttcacagagtttcggtccagcctaaacgtttgttcgaacgacgttcagtctgcgggggcgtgttagagataaaatagcatgtttatcttctttcggtaaccgcgcggttaccggccttaccgcggggtacggtaatagaaaaactgcagtaatctttttaaattcaaataaatttaaaaaataatttaaattttgataaattttacacggtttttcacggcgcggtaaccctggccctgacggtttgggaaaccctttttggcatgcatactggatgctcgaaatcggtggaaggctgcacaaaatttgtactgcccaaattagcagcgagcagagccaatgaaaatctgtaaatcccccacagtaataaaggaaatggaaatccccaaatcagctgcagcgagaggctctggcgccgtcctcgtcatctccacactactcgagtagtccatctgcacatgaacagcttggtggataggcagatcggacggtcgaacacaggtgatgaatgaacagtgtaacagttttactaatttgttgacaattagtaaaaatgtattcgattttcaacttttttgggttcaaatttcctgaaaacttggaatttcagtctaccgattctttttggactctgacatcttcatccttcctcagaagttagcaacaggcatgggattgcaacagtaattagtatagcttccttcactgttcttcgataaaaaaaaagaaaaaaggaaaaaggagtcgaggacgagcagagagcacagcatcagttttatttcatgactacacaacgaccggtctctggtttgcctaaagcagcgatcactccatcctagatttaaatcttattttagcttaaaaagtactatagtgcatgtttttttacctctttaatcacttgtatcttttaaatcatatattatttttaagatctatttgtatcattgtactccacttaaaatatgtgataaaacgagatccagattgaatatattaaaatattttattaatttaaaagtaatttatttaaattgtaaaagtaacttagctatgtaatagaagtaactctatatagaagtaattacattatgagtgagttccaataagaaactatgtggagtaaattcaaaagtgtagagaagattttcatgtaaatacatttatgaaagtaaatttaataaagcctgaaagtaatttacaaaaatcataaaagtaacttagtataaaatgaaagtaagttgttatgatattagaagtaaattcgtcgtaggaataaaaatataagtctatttagaaattaaatttaatcaacacaaattatgaaactgagtaaaaacaataataataaaagtaatcaactcaaagcattatgaaattatgagaagtaatttaatcaaatctaaaagtaatttgtatataagataaaagtaacttacatatattataaaagtaatttataacataaatgttttttttatcataatattatcatgtaagatcttgttataaagatttaattgcaacgaacacaatggtgtaatcggattatagatcggataagtaatttaagtgaaaattttataagaagaaaaaatatgcacaacctaatagaaaaactgcttacatgcatgtctgtaatgctactaatacttctcacgtaattgtccacgtcgctcgttaagtctaaatcgagatgcctctcgaaatagattttgcgtttattaagatactccctctgtttcacaatgtatgtcattctacatcaatatgaatgtgggaaatactagaatgatttacattgtgaaacggatgaagtagtagcgagagatgcatcaagcatcaatcatggaaggttgagtagctacgatcaggtgtttgtaggaaatactaatatcgtctcaattggctagccacagaacatagccctgcggcatgtagtggcagatggcgtcgccacggcttgccttgaggagctcgaagtaggcactgtcccaggtggtggtgttgacgtggcacacgtcgacggcagtggcgccgcccaggcccacgccggcgacggcgtggaggtcgaccctcagcgccaccgcgtcggctggccggtggcagtagtacacctcgtatggatatggcatagggtggcacgccaccacggcgtcgccgccgatccgggcgacgccgtcggccgctaccacgtacctgcggggctccctcccgtgcacgagcgtggtgaccgcgcgcggcgcgctggtgcccagcgccgaggcggcgaagtcgagcaccgcctcgcgggaggtggcgtggctcctcgccgccggcggccgtcagttcgccgcaggtgcggagggtgtcggcgacctgcgccgccttgtcggatccagggaggatgccgaacatggcgaggatggcgtccatggcgcggaggttggacggcacggcgtcggccttgtccttgtagatgatgaaccttggcgccgctgcagccacgccgtggtcgtcgtgcgccagcgtcagcttcgtgccttccggcaagacacagcatcccggccgcctttgtgtttttggcattctctaacttgaggatgccagccaaggctaatttcagctggctgcatatatatgcaaggggcggtcaagttacagaatgccaaaaaacacaaaaacgacaatgcaactcagccattgatttgtgtgatccttcaatttgcagtgatgatccaaaactaattctaatctgcttagtaactaattaatactagtctgtatgactgtatatgctgcccttttatagcataggagccatgaaaagcatgtgtcatctcggcaaagagaggtgcaaagtttgtgagtttcctactctctctgcatatgcatatgcactaatccctttgtttttgccctgataacctatacatctcattattgttcctttttttttcaggggaaagggataattactcattagcctcctcacagataaactgcgagataaaagtacacttattgtccggccaaaactgtgtgatcttgtcacaacggcccttatttgctaaatagtgactaatattattttgacttctaagacacttactgaagctaatatccctatttcccaccaagagagaatctatctccctgattaaaaacgccagctccgatttagcacctgttgcatcgcggaaaagatggatcatcgccaagcagtctgtctcaatcactattggcagcagggtccattgtagggcgagggcaagactatccctgcaggcaaggagttccgtttccaaagcactgctacagcgatcaacatgtccacaagcagcaaaaataacctctcctgtgcagttgcgcaacacagcgcctataccacccttgccgtcactctcctggaatgagccatcaacattcagcttcatgcttcctaggagcggcttcgaccatttgtcaggaacaggttcttgactccgtttgatgttgtgcgacttctttagaaccacatccacaacatgtttccccttctcaggacttgcttgggggtgttgcttgatctcagcaagggagaggacatagctttcaatgaaacgtttggacactagtattcctggggctggtttgccatgcactatttcattccgtgtgtgccagattcgccacagtaccattaaaagcataacctgttcctccggctgcgactgctccaataggtccaagatcactttcggatctccattgcgaatgttgctgagagggttaagcttcatatcaacagtcatcgcttcccagaattgccgggcatgtgggcagcgaaacaaagcgtgaacaacatattctgactccaccccacaaatggtgcagatgtctgaaacttcaagcttcctcttcttcttattttccaatgttggaaggctgttagtaatagctcgccaggcaaaaatcttcaccttttggggcgcattgcatttccaaagggcattccaggctctgctatttccattcccggacgaactcgagccttcatcaacctgtgccagagctattgccagatgataagcacttctgacagaaaatctccccagtctatccggatgccaagcaatgaagtcatcctccagccttgaagataaacgaatgtttaggatggcctctgcgtccatgggcaggaaatgctgcgagattttgtcagtatcccaggactcggactgatcaatcaggtctgaaacccatctcagtctgcaatttcttttagctgagatgggtcttcttgaaaagctccgcggaatccagggatccctccacaatctgactgatttaccgttgccaatgcgccatatgatgcccttcttcagtaattctaaaccatattcgatcgctctccagcctggagaggcattacctccaaaacttgtatcaatgagagaaccgttcgggtagtatttggccttcaaaattctagcacagagactgtctggtctgtccaacaatctccaggcttgtctagctagaagtgcctgattaaacagcctgaaatccctaaaccccatacctcccttcaacttccgagcaatcaaacagtcccaggatttccagtgcgttctcctcttccctttctctgctccccaccagaaattacgaaccagttttgtcaattcctcgtagaccgactccgggagcttgaagagtcccataacataaacaggcatggcctgtaggaccgctttaatcaaaatctccttccccccagttgacagaagtttctccccccacagcataattctcttccataatctctcctggaggctttggaattttcctttggtcattctaccctcaggcatcggaaagcccaaatatttatcttcaaaggagttacttatctgcagggtctgctttatctgattttggacagcagtaggagagctttgcccgaacatgatggagcatttgcaaggatttatcaattgcccagtgcaggaagcataagtttcgagaacttctttcatcactaccgcctgatcatttgccgctttaaagaacaacagcgtgtcatccgcaaacagtaaatgcgacacagcaggagcacgccggcatatctgaattgggttcatagctccctgatccactttctcttctagtaacaaggacagtccatcagccacaaaaaggaataggaagggcgaaagaggatcaccctgacgcagacctcgtgatggagcaaaggtgttcaacagggttccattaagtttaactgcatatctcaccgaggttatacatgccataatccatttaacccaacagtgagcgaaacccagtttaaccattgcttactccaaaaatttccagtctacacggtcatacgctttggacaagtccaacttgtatgcgcagtaagcattctcaggatttttattcctctgtatatggtggaagcattcgaatgctatcagggcattatctgttatcaatctaccagggacaaaggcactctggttctgtgacaccagatcatccaggattggtcttagtctgttcaccaaacacttagacactattttatagaccacattgcacaaactgataggtctgaaatcctttagttcctatggttgctcagttttcagtatcagaacaatggcagtctcattgacccccgaaggcatggtacccgaagagaaaaattcttgtacagctcgcacaatgtcgtcctttagtatagcccaattcctctgatagaaccgaccggggaatccatctggcccgggagcttttaacggaccaatttggaacagggcatttgcaatttcctcttcactaaaggttttgcatagtttctcattcatcgcatctgtgactttcggcttcatcaggctagtgactcacgaatgatcaatactggggtcggcagtgaacagcctttggaaatactcagttgccatacgttccaactcttttgtcgtactgtgaacagtaccgtcactatcccgtagctttgtaatcttattcttcttagctctccacactgctttgctgtgaaagaaacgtgtatttctatcaccttctttcagccaagcaattcgagatcgttgcagccatatcatctcctcacggtacagaagttcattcatttgatcggacacccgtcttatttccctattgtcggcattacttagaagaagttcagatagtttctttctatttttctcaatctcccggctgacattcctgaactttttcttactccatgtgcgaagatcagacatcatcctaaacagagcttgattaatgtcgcgcagatcctgcttaactccggaaacgccccaagattctgctataacttcagagattgcagggtctctttcccagtaaatttcataatggacacacttcacaggattcctgtgaaggtcttcagaagaaaatttgacaaggatggggcaatggtctgatctaggagaggacagatgaaacacctgtgctgtagagaacagtcccctccacccatcatctgcaagggcgtagtctaggcgcactttaacattgctgcggccttctctcctattatcataagtgtatggcacccccgagaaccccagatcatggagatcacatctctggaccacatccctaaaggcttgcatttgcagctcacttcgttgtttcagagagaagtgctcaaactgccaaagagtctcattaaaatcacccaccactaaccacgggggatccgaaacttgcttaactgaatttaacaacgcccacatacgatgtctattttccactctaggttccccgtacacaaaagtagcatgccagacaggagcattcacagataaacgaacatacgcgtcaatatatctctcattcatacttataatttccacatgaacagactcatgccagaataaagccagacccccactcatcccatcactgttaaccccagcaaaacccttcaaacccaatctattccgcagcctacgaaccttctcaatcttttgcctagtctcacttaaaaacacaatatgggaacctgcctccttcactaaggcacaaaggtcacgaactgtcgccgcgttccctataccgcgacagttccaagccaagcaactcattgctcctgacgggacccaatcacaggtcccgtcagtttaccagcggccccatggctggttgcctccatatcgtctgtgtcctcaccctctgcagccttcttgagtctcttcactgctctagctgccttgccgatatccccatgcatggaattgctgccacctgtgtattgttggtattccaacaatgcttgctgaaccctcccttttatctggagtcctgactggtctggcatcctcttcctattggcatcgctgatctcctcggatgacacttccccaaacgaggcttgctgttgaaggttcctcatggctggtatcatctcagaagcagaaatttcatcaccatcagtcttcttgggtgcttccttctcctattgttgctgggctagcttcccagcagggacaaccatcgatgtttcctgagttttgtcccccgtaacatccatcttcccagcctgttgagctaacatctcatcaattgcagtgtccccttccctttccttaaactcaaacccatcatgggcatcaactctgggcggtattgcttcctgcatctgaccatcttgtttgtgtctggaggacgatgaactagcacttcctgcccctctgaagaacaagttacgtgcaacacttgatgtttgggcagctttcactttactgatcttcttctcaaaaggtttaagggggggagcatcgtagctcagctgagaattggaaaggttgatcctcattggcagatcttctattgcaatctctgtcggaatgaccaataaaaccacagataaagcaaaagtgcggtacccgctcataacgtaaatcgaacctgcgaaggacctccttgccttggacagtcatccttatagctatctgtgatttcagaggacgcttgacagggagatcaacacgaataatgcggaagaagtcatgtttgttgcgtccatcatccctcacgtctacctcacgaactttgccgagtttgctcccaaacatcccacctcttacctttgtcatcaacaccagagggaggtcatatatgcgcacccagatcggaacaacatccaaaggaacattcgatgggcacgtaatgccatcaaaactcgctaccaggagtgcatctcctctgtgaatccaaggaccccctttaatgacaaaatcagtctccctctaccgagaaggttatgatgaacatgttgtcacgtagtgatttgtagctcatatctgctctcaacctccaagctctgcgcatgtcgtcaaacagggccacttggttcggagttctcagagaatagaacctcgccaagatcgtccacaggccagcagtctgcagttcatcatcctcaatattcaccgcaaccacatcctcctcatcctccaccagatctccttcagtgaacactgcaggacactgtgttgcatcaacttggttgttctctgcagatcccctcctcgcagccgttgtgtgttcctggccctgatcagatgtgcccgctgctccctcgatcatcttcagaggaatcctgtcgagaatcaccgcgtccgtctcattaccgctcatcagcttcgggtgggaaatcgtcccaatgacgatccctttatcacccccaccgacattggccgccatgagacttccgctagatccaacaaacaaagagacggggttgacaacgcctagccctatcgccggaaaaactttgaaccgcaccttcggccaccactgtgacttgtatttatactgcaatgccacagaattaggtctccaatacaactcgaacttcggataccaaaacagattcaatctcctcccccttctagaatttcgcaagggccacagatcccctggaacaatacggaaagcagagaacgaacctttcccatagatcaatccgcctaaagggaaagccttcaacttatctcctatacgagtatgatcaggccaccctaccagatcacgtttcaacacagggaggaaatcccccccagaacaacccacggcgggtaaaacccccggagacatcaggagcagatcagaggagatctccatccagacccatctcgccacgcgcgagagctctgccgccgcccggtcgcccgggtggcgcataaaccctaaccctaacatctcattattgttccttaacattactaacgctgatatatactgtaaaaaaacttcagcatgtacaaattgatgaaaaatgttcattcattttgaaaataatttacatgagctcttcctactattcttctgctatatattggctatttagttcaaccgcttctggatagataaacctgtgactcgggggtggagctagtgttatagcaatggtgtcacatgacaccaatggtctttgctataattttgacaatctaacgcttttagaaaacatatttgaaaagagaactatatcaaaaacttatttcaaaaataagccgtcacctcagtccaatggctctgtgccagcaatcatggcgctaaccctatatatctgttaagtgagagtatatgttcctatcgtacataaaccatcttgtaccgaagtggtgttggtcatccgtttttttaaaaccacaagtagacacgtggtttgatcacccggttcccatgttttttttgtaaatttttgcgctatttcccgtgagcgatgatcataaaggcaaaaaatacgtcgagggggagattcgaacctgggacttcgtgacatctcactaagcaagtgaaccactacaacacatgcaatgaaatgctcaaatttagcacacgctgtgtgcgcggatggcggagtttcggaaggttgccgatggcggtgcagatctggccgtggctgctgtgcacgaggaaggagggaggagtcggcggcgttaggatggaggtcgccatggtcatggcacttcgacggttggccatggcgggggcaactcacggtgtcactgccggtgtggcggtgtcccctgttcggatcgtggccgatgcatatggtgcaagagatgctgtcgcgacatgacgaggcgacatccctcacagttggcagcatgtagggaattttctgggcgttggtgttggctcatgctccactggtggataggcctccccctgctatctacagtaaaaaaaactttcactaattgaataatcaaaatttcaatatttggtccaagatatagcgaaatacccatgtatcaacttatggcatatccactcgtggatctatgaggctatggaatggtgtatataagggatcctttgtgcgataacgcatgaagcgaacgcaacctagttcaatctatatgtgattattgaattatttccattgttttgtctgtcttatttcggttttatcgtttaaattggcagagttcttatcaatcatgaaaattatctttatctgttgaacgcacaaatatttttgctagtccttaaaaaggtacaagggtatcatattttctattgcctttgtacttccagatactaagtatctcaaaaaaaatatatcttgatgtaccaaaatttgtttttagtgtattccaagtttccgcatcctaaagcaaaaccatacattatacatggaactccagaaccaccactaaagtatataaaaaaagtcgcatatatatatatatatatatatatatatatatatatatatatatatatatatatatatatatgtgcaacctctttaaaccaccatgtatagagcaaaactgaaatttactaggggtcattgtacaaaagcactaacaggtgtcattgtggaacaaataataataacatgaaagaacattgcaagaggattcaccattattatgatatttccttcctcacagggaatatgggaggccatatcatcataaagggcatgattgaaaacaagatttcatccttttctgtcacctcgtaaaccttgtgaagttgcctactcttaacatccaagtagagtgcacattcatctgttttcaagaacaaaaactcagcatcgtcccctacataatccatgtaaacaacacgactatccccgcccacacaatttatgtgcaaattagcgcacatcgaccgcaaacaaatggtatcaaccagagtccatccagtgctgccatgcttaagtagccaaatacgaagctgaggctccttcagatcggcgatataaaccccagaatcatcgctcgctcgtccgaacaaaacgtcgtggcttcgatcattataccacatcatcacaggtgggaactccaccccatctggaagctggatggtgtacaagctcgaggacttcaagtccaacacaagaacgctgctcgaagtggctgccaagtaggccttgtctcggaccacgacgaacccagctgattccggtggcaagccaggtagctgtgccgtcgccttggtatggacatgccatccgccgtcccggaatgcgtagaaccacgcggaagtagctccccttggggtgaacatcaccgataaccggtatagctggctgccgccatcctctccgaagtggaacccccacacattctcgtcgtcgaagccgagatcaggctcgacgtcatcgtcatcgtcatgtgttgaagagaacgggatggcgagtaggcctctctcaggatgctgcagcggtctgtgcaccgcgtatttgagctcgcgccgatcatgcctctccttgaagaggaggatgctaccgttcctgcactggtagatactggtcgtgtaaccctcgtaagcgaggctgaagttgccaccgcgaaggacgacggggtcgagctccggtggccgtgcaggcggcggcatcgggacgaagagcgggtgagcccgcggtatcttgaggctcgtgacgtagaagcccaggaggcggggcgggtggagctcgcggaatcgccggaggaaggaggggtcggaggcgacgcggagccagcgtctgcaggcgagcgcggcgcggacgagggtggtggggaaggcgaggcggagcaggatctcgccgacgaggtcatcgttctcgagtacggcggacacggcgggtgacgccgccggtggcggtggcgacagccgatcgccgtccacctcgatggcttgattcgtctgcgtcatggccacgtcgaattgaattgaattggcgatggtggggatgatggagagataaaacagcacgatgtgatcgatcgatggagggataagttaattaatccgagattgtacaactatatatatatccatatgggactccatagtgcccgggctccaagatataaaacacataaattctctcaaatttttaaaaatttacaaattgtaagtagatatctaggtatatgaatttgattcatacaaatacctaacaacaaaacaactcaaactcaactttatttcacaattcattattacatacctaacgaattatatgtttggatgttatataactagaatcaaaatctaacaaaaaaaattcagtttgaaagaagttaattgatcatatctaaacatttaaaaaaaattcatactcattcaaattgggtagatactcaatttgaattttgaaacccatactccatgtagcaccagttaatttacctatatatatatatatatatatatatatatatatatatatatatatatatatatatatatatatatacataaaacccaatgtgaatttgagtccttttctttcttgaaacgaaagtttgagaatcgtacgtgttaatcatacagatcaccgcagattaaagtaaaagcgcgagcgaggtggcaatgcaacagatcgatcgtagagatcaccgctataattctaaaccccaagtcccaatcgatttcttcttttatttttgcgaggaaaagtccaatccttttaaatcgtgtttcccttgttgtgtgtatttttccatttcttttcttttcttgaaagttgaaacaactctatttctttttccactgttttagttggttttcacccgggtttacattaccgctagtaaccacggtaaccggtcttgccgcggggtacgatatagaaaaactgcggtaacctccttaaattcaaataaatttaaaaaataatttaaattttcgataaattttgcacggtttttcgcggttaccgcggttaccgtgcttaccgccggggcgcggtaaccccgagcccgacggtttgggaaaccctggttttcacagttcactctaccatggacgtccgactgtgttactttatcttaactaattaaaagattcgtaattttcctttcttcacctaattttcgtccgtatgcacgaccgcgtcgctcccatcccatacgcgcaaatgcgcaaatctgcaattttccgttggtcaccccaacttttcatccgccatgtccgatgtagcgacagcctctgtccgttacagcttacaaagcacaaaaggatcaatcaaaatcccaatcggacaatcattagttattccaaacataagatcgacgctacaaaaattataaaggtggaagcacaaacacacaaacaaatcccaaccccccgcccccacccccacacacacacagaaaaaacaatttttgccttaacttgcagcagctcgtaatgtggcaaaatccagttgcggccgaatcaaatctagctgccgaggcaaagacatcactgatgtatcctctttctagccatctcgccattgatggaggaacaaaagcaatggtgctcaagtgaaagtgggaggaaaggaagaaaaaaaaaatcaatggatctaacccccgcgcctcctcctctgtggagacatcatgccatcctcgccgtcctccttgccaccgtggtcctcgatgatcgagtaaatcttgaggcggtggtgagatggtggtagtatctagcggcggcggcgacaagatggtggtggtgtctagcagcgggggaaacggtgtggggctcccctactctcaactcatcttctttccagtcgtcgccgccatcgtcatcgtccaccgcccgctcccgcgcccatgttagccatgacgtcgtccgttcaccgtcagccgccttgtccgctgtgttgtcgtcgtcgttcaccattagccagttcgtctgcccacgctcgcctgtgccatcgtcggtccgccgcctgcgctcgcgtgcgtccaccacctgcgctccgggcccaaccacggtgctcctccccgagcacactcgccaagctgtggcggaggaggacgacgatgccggcgggtggatgtacgacaaagcggctgacatgggcgcgtgcgggcggttgttgatgacgatggcagcgacagaccgacgacggcgcggctaacgcgggcgccggcgcaggcagtggcggactgacaacggcggtgccgggcggacggccgacgacgacgttactgactccaagagacggagtggcacgaaatgaaaaaaattcgtgctctaatggtatattctgaaagtagaccgaattgagtggcatatcctgaaagcagtgtgtattcgatagcatattctgaaaattcttgcagtagagggagggggagaggtggagacggaggtgcaagaggataaggagaactggagaagtgcgatatatttttttcctcatctcgtgctccactcagctccacatggccacgccacctgacgtcggttcggtgccgtttttctataaaaaccgtaaaaaccagatcttatatcccatatatctatataacggttaaaaaaaatctaaaaattcgtaatttccattcgtcacctctctttttcgtccgtaagtccaagagtccctacctagtcctcccccattcaagcaaaactgaacaaaaattgggagggcggataaaagttcaatacgaaagacagatgcatattcgatctggactaaaaaacagatgaaattaaccccataattacaaaaagatttcatggatctaacctggtggcggccctcactggtgaggctcttgggtgtcggggtgttgagggagctaggtaatcgataaagacaccgggaggtgattcccagcaacggcggctctcactggcggcgatgtcgaggaagcaggcggcggtggcaactttgtgaggcggccgccaaaactcagtcgcctccgcgacctcaagcctccccggctggcagatccgccacccacaaatttggtcgctgcccacgcgccttggccattgcagctgccatggggccatcgccgagagacaacgggatccaggcgccggtggcggatccacgcgagtatgaatgacgccttggagccggtggtcgatatggtctgcgacaactcgggtggaggagggagagacgcagagaaagactggatcgccgccgtccactttctcgtgtcgccggagattggatcggggagagtaggggagaaaggcgattagggttagggttttcggaccctcccctccaaccggcgatttcattggcacgggaccaatccgagccgtccatcagatcggacgggtcagatcggccccgcgtcggccgccaccgctatcgggccatgcggtccttgggccatggaagagaactgggtcgtgcgcccttcgccgcgctcagttcgccctgcgtcaggccatcgccagtaggatggcccgcttgctgtgcaattggctcgtgtgcttgcgctgaacgggccggtccaattttttgggctggttatgaaagtaatagaccaaaataagattttatttaattctgtcgatttaatttatttagtcttttatagaaattttctttggtattatttggagccattttaaaattgctgaaaaattatgaacgattacttgatcactcttattgtcatactagaccgcttaaaagatggctcagttaaactttatccaacacgacattacccggtgcaacgcatgggcattttggtagtatatactgaactagcaatgcaaatggcccatagtaacaacagggttaagaaattagatgcagctgtacctaagcagaaattgatgttgcaaactacttcctccgtttcacgttataaaactttctagtattgcccatattcatatagatgttaatgaatctagacatatatattcattcttgcatccaaagggactaactaaacttttattgagaaactaggaagatactccctccgaccggatgggatttcatagtacagcgaatctggacaggaagcatgttcggattcgttatactataaagtgtcccattcgatactaggttgttatatcatatgacggagggaatagtaatttccatcactttgcacccatttaccaaacatgctacactaggacttaaaagtcaaattctagtcttactattaattaatttcccatcaaaactttctatcctcttcatcacaaaacatgctagacttaaaaatcaaattctaatcttaccattaattaatttcccatcaaaactatcagcagccgcactactatttcccttatataaactcgcagtattctctaaacttgccaaacaggcccacggctgtaaatttggatttcaatatatggcaggtgcgattatatttcattaattaaggaatcatactcttgtgttgctgtaggtggcaaataaaaggggcattaattctccacataagaagggcacgaattagatggtttccttctatatatatgattattacctctattggattagcctaaacaaatctgtactagtactgtaataaaaaaaatccccacataaatacaggagtgcagtacatatgaaccccttctgctatgaaaccctgtggaagacggctggccttggcacagcgcatagcagccggcgttgagaaggggagcgaccgatcgtactgatcgatttgttaggcttttaggcataacgaagaagctagcaggtaagtatatgcctgcagacttgtcatctctattttgattcttcacattggtcctcttgttcttttccttgtattcatccatgtacacccgattcgagaatctgttttcatttttcaaaacaaatagtccatattactttactcaacttttaattaaattttactagcgctatacccttactttgccaagggattagaaggaaaaattacgagggttgagttttaaccatctggttttactggtgggatgagttttgggtggaaaacatgtgttttttttttgtcgaggtgcgtttctttacaacgaattacgatgtagtaggaggagggcgacttacactttttagagcaggtataataaggttgagtcagcaggctatacgttgttacacatcagcgaaatcctatgtggttgagggagaaaagaagaaagagaaaaaacggacgctagatctgttgccgggcgatagtgtgagaaacgaggctcttaccgctcgcttgtagctgatacgggtgatacctgacatatttggtgggcctgacatatctccactatccaatgtgcatgtatttatgtttttctccctatctaacacgctagagcacaggcaacacaaatagctacagggatggtggttagttttgatcatgccaattaatttggttgtgcatgcatgaattaaatgttttgtttatctccatttagctagcgaagcagctagctcatcgcgtgagctttctctcttgacggctatatcagacatggcgactgcctgcgcgactcacgcagccgctgccccccacccctagcacgagagcaagtgaacattagttgaagagatttagctgttgccactgagatggaggaaaatagatgataaggggaagaaagaaaccgttactaacatgcggggattatgataatgctataagcgttacatacgtgaaatccacactaatttgaacttaactaatatttttattgttttctttaaaataagaggattgctacagtccagcaggttgtaccgggcggtaaaacaaatctaaccgttgaatcgggatgggtaggatcgggagagaagatgagcgtcgggagagaaatttaaccggcgttcgagtcgtcgttcccggcggcggcggcggcgtcgaagtcgtcgttcccgacgggatagtccaggagacggcggtggttgatcctggcgatggcggagttgatgtccaggtggcggcggcgttgatggcatcgatccaggcggtggcgacccagatcgaagtcgcggtgtcagaggatgaagacggcggtggcagggcagaagcacggcagcggcgggggtgaggaagcacggcggcagcggggtggaagcacaacggtggcggggggtgtgaggcacggaagagggagacggcggcggggcggggcggcacggcccgatccatttgatctaggcttcccattgcgaagttacatttttgcccttccatctgagttttcaggtcggtattgtacaaggatagaattggtaccgagccgttggatctggccaggaatttggtaccacccggtaccggtaccgagcgctggacggtaaaaagactcttaaaataaactccaaatttactcaattttaaaataacctttaggcatgacattgataatgctacggttgtagagcatgtgaagaaaaccgatcttcagactgcaaataagtttctataagagctttttattgttcataattattataggatatttttttaaaaaaaatgttgataaactcgccacccaacatacggagtacaaacaagatgtgtttcataagattttgagaaaaccacataccgcacgtgtagcataggtaatttccgtctccctttatcacgtgagtgagtcgcgtcttctttccaactatcgatacgtcttctcaaaaaaaaaagaaaaaaaaagagggacatcactgagaaaaactacgccgacaccagaaaggctgtggcggcggcggctcatggctcctcttcggtcggtttggcaccgtcgcgctagcccctactggtaggctcgatacccttaccgcggcatttatgtgataggttctccgtgatcgccgccgacgccgacgccgacgctcgccggtgggctcgagatcgccaacttctcttctccctctctgccacggaatagccaagaatgaacagaatctgtccaactatagccagtctctgattaatttacagaaatttcgcatcgtttttgatttgtggctgacaccatcctattccccatgcgtgcagtattttgtttcatatatatatttttttctttttgaggataggcaaggagtaatgcctaacatatattctcattttcagtctgtttgcactaattttgctatttttatatttagtccatgcttcaatgctgagaatggtgagatcggatacttttttaaaaaaatctccattgctaaattaaaaagttcggtacatcttttttttttacttcgaggaagtttagcacatattaaattacatacgtattacatatgcaatttatgtaatctaggtctcgattttgttttcttggagatctgtgatgtcatctttaccatgggtgacaatggaactccgtggtatcgtgcggattcatccggatgtttttcatgcatgttacatatggctttagcactcacagttatgtttgtttcctttaaattagttattctttctgtaatcctattaacgtccatggacagactgaaattatctttttgactttaacacttttatatttttcttcgtcataaataatcagttgtaactttctaaagtttgttgttctatgatcaggagttcatggatcagccacttttggaccgtgcagcttcttcctcgtctaaggccacaagcagtagatcagctttcacagatgctggattctttagtattatcactttttcttggatggggccgttacttgatcttggaaggaggaaagcactagatcttgatgatgtgccaactttggatgataatgacagtgttcaaggcatcctccctaactttgaggcgaagctcgtctcagtttctggttcagggaagtacaccgatgttacaacaattaacttggtcaaagctcttgttcttacaacctggaaattaatcctcttcactgcagtttgtgccttactccgtactgtctcttcatatgttggtccatacctgattgagtactttgttgactacctgaatcgaagtccacagtccgctaaagaaggctacattttggtgttgagttttgttgttgcgcagttcatcgaaggcctctcatcaaggcatttgctcttcagatcgcaacaacttggtgtgcgggtacgctcagctcttgtcgccgtcatttaccaaaagggcctctccctctcaaatcagtccagagaaagcagttcaagtggagagatcatcaatgccgtgagccttgacgccgagcgtgtcgcggatttcaattggtccatacatgagctttggctgtttcctgtgcagattattctagcaatgctgatcctatactccactcttggtttggcagcatttgcagcccttgctgccactgttttgacaatgttagcaaatctacctatagggaggatccagcaaaattaccaagagaaaatgatggatgccaaggatgctagaatgagggctatgtctgagatgctgcggaacatgcgcattctcaagcttcaaggatgggaaatggtcttgtcgaagatcatggagttgaggaaggaggagatgcattggctaaagaaagatgtatacacctcagttatgcttatatctgtcttctttggagctcctgcttttgttgctatggtcacctttggaagttgtttgcttctaggcattccattagaaacagggaaagtattgtctgctctggcaacgtttaggcagctacaaggaccaatcaatagtatcccagacacagtctctgtgatcatccagacaaaagtatcacttgacaggatatgctcttttatgcacctcgaggaactatcgagcgatgttgtaactaaacttctaagaggtacaactgatgtatcgattgaggtgaggaacggtcagttctcttggaacacaccttctgaggttcctactctccgaaacttgaacttccgtattcgacaaggaatgagggttgctatctgtggaactgttggatctggaaaatcaagtttgttgtcatgcatactcggtgagataccaaggttatcaggagatgttcaaacatgtggtaggattgcctatgttagccaatcgccatggatacagagtgggacaattgaacataacatactttttgacacaaaactgcatagggaaaggtatgaaaaggtccttgaagcatgctgtcttaaaaaggacatggaaatattaccattaggtgatcagacaattataggagagagaggcattaacctaagtggcggacaaaagcaaaggatgcaaattgcacgtgctttgtatcaagatgcagatatctttctgtttgatgatcccttcagtgcggttgatgctcatactgggttgcacttgttcaaggtatttttcagaacaaatctttaaatcctttttctatatgtgtgtaatcatcattgaatgcttaaactaataacttattgttggtacttgagacttctaatactacaaaatatatttttacatcatatgatttcaacgacattttctcccagtcaatttagggttttttttaaccttcagttgtcagtgctagtgctgtttgaatagaacatgttggttttgttggatttttcatttcccaacttccaaaatcagtaatagcagtttatctcactgcatagtttattgtgtggacataaacctaatgtcttaatcagatcttttgtatgtttcagctaaacagtttttaggtagcttgttcttgaacaatatttagggttcaagagtatatctactgtatgaaagttattcatcacgaccttgtatttttcaggagtgcttgcttggactcttagcttcaaaaactgtagtgtatgttacccaccatgtcgaatttttgccatcagccaatgctatcatggtgagcttccaacaactatcaaatctacttatttattctactcgcaacaatcgttttaccatgtcaattcatttccctgttctaggtcatgaaagatggacaaattatacaagttgggaattacgctaaaatacttaattctggagaagagttcacaaaattagtattttcccataaggatgccatttctactctagaaagtttagaacactcaagtggcaatcccaaaagtagtcttattcctggtgacagtggaagtacgcttttcagataagcaaaaggatgataatcaaggagcagaagaagggattgttcaaaatggtcagttggtacaagaagaagagagggagaaagggcgggttgggatttccgtctattggaaatatattacaatggtatatggtggagcacttgtgccgcttattttgctcgctcagataatttttcaagttcttcaaattggaagcaatttttggatggcttgtgctgctccaatatccaaagatgtgaatcctccggtcaatagcttgaaaatggtacttgtatatgttgtgttagcttttgtgagctcgttattcatcttcataagatcccatcttcttgtcatggctggatgcaagactgcaatgatgctatttgataagatgcatcgatgcatattccgagcttcaatgtatttctttgactccactcctagcggtcgaatcttgaacagagtaagtaatttaccttcaccatctttattttaatgagaaaattgaagttatctccttggaatgccattagaatttttattcatattcaattaatcatgaaagttgaaacaaaattgcaggcttctagtgatcaaagcacagtggacaccagaatttttgacctgatgggatatgttctatttcctgctatcgaacttcttggaacaattattttaatgtcacgggtagcatggccagtcttcgtaatttttgtcccaattattgcagcatctctgtggtatcagatattctttttattatatatcttatgttcgataccaattgtggttccagtttataatttttaagtatgtagaaggaaaaatacattgattcatgactatattgacaatttttcacagattcaactgaaaattgaacatcagtgtttttcttttcacagatttaatttaaaatttaaagggatggcaaagcaattacagataatacaaaataaaatcattaagtaaatatatgatgtgatacattacttggcaaaaatattcccaatcaaattttcaggttgatcctagtgtatataggagtgtccttgtacatttccgatgttcttctgaacaatcaaattttgtcttaaaatatgctattgaacaataataattgttaccatatttcaaaactataattatgcattttctatgacattattggtttcaagacgactcatattttgtgtttgtttttaattaccacaattccttcccttcagcaatattacatagatggtgctagagagttgcagaggttgactggagtttgcagagctcctgtgatgcagcattttgctgaatcagtagctggatcaaatatcattagatgctttggcaaggaaatacagtttatcaatgccgtcagtcatttcatggataatttatctagaccaagtttatataatgctgcttcaatggaatggttgtgctttcgcttggacattctttcatcctttatcttcgcatttgccttgatacttctggtcaccttgccagctgctctaattgacccaagtaagtacggtgggctttaatttgattagtcagatcaaattagttcattattgtattaacatccgtgctaactctcatatttactacttcacagagacagctggtcttgcagtcacttatggattgagtctgaatatgttacaagggtgggctattgcagtgctctgtagtttggaaaatagaatgatatccgttgaaagaatttttcaatacatggctattccttctgaaccaccccttacaatatcaaaaagtagaccaaactgccggtggccgacaaatggtgaaattgagcttcgcaacctccatgtttgtctcttgaactctatgttgttatataagttcacttctaacaatgtcggagttatatcaattattgattagaactcccaaattttctattcgaaatattctctgagaaaaacaatatgttattaaattactcccttagggttgataatacttgtcattttagacaagagcacggtttccaaaaaaacaactttgaccattatttttcattataatatgtataaaagtgttaataaatatatgattttattaaagtactttgtaagactaatctatacatgtaatcaccatatttgaaagacaaatattttaaaaatgattcataatcaaagattctatacctcacccttgtctaaaacgacaagtattatcagcccggagggagtaatttatttcttcatgaagttattccataaaaattggcatgcaggtcttttttctagtagtgtagagttgcaatcctctttcataatatactattttgtatgacttcaacataccgctgtagaaataccctcccaaaactatattttctttcttaacatggaaaacatacaacacctaatgcataattttctggtgaactgtttttttcctctaaagtgctttgtatgtgatgtaggtaaggtatgcgacacagttgccttttgttttgaaaggcctaacttgcactttacccagaggattgaggaccggtatcgtcggaagaactggcaatggcaagtcaaccttgattcaagcactattccgcatcgtcgacccatgtattgggcaagtgttgatagatggccttgacatttgcaccattggactacatgatctacggacaagattgagcatcattcctcaagatcctgtgatgtttgaggggaccctacgaaataacattgaccctttggaggagtacagcgatgagcaaatctgggaggtaattcttattttaaatttactagtacctccatccctaaataacatatggaagacaaattactatagaaaatacatgacattcataccccaaattaaatgagggatggattgaagagagagggtagttagctttagaagcatacttattttggggacaaaacttgagtgttagaaatatacttatttagtaatggaggtagtataatttgtaatgcttcgtatgtgcacctatgttttttttaaaaaaaaatatgcataactcatatctgctattcgatgggcaaaagagttcacttgtgtatatatgttatccag

SEQ ID NO: 8070 - DNA, 55006 bp, Oryza sativa
  unsure (1)..(55006): unsure at all n locations
ggctcgccggcgccgttgggcccttccgaccagcgggcgagccaggaggcggcatgtggggtggcgacgcgtgggggcggcggcctagaatgacgaggggaggtagaggagttagggttagaactgcagcacgaatcttaaagcgatccgacggtccagaattcatatgatttgtgaggtgtttttctgtcaaatgccatctagacatcctttttaaaaggcgataatgaaagatttactactgtatgtgaatcaatatgtatctataacatatgagtaaatttttacttaccatttataaaagtggtaaatagttaaatactagtatgtcttacgatcagattattactgctcgatcgggtcagtcactttacatctaaagagaaaaaaaaggaaaaagataaaaacagagtcggtcactttctcggtcgggttctcgggtcaccgtctctccgcctctcccatcccgagcctctcgcaaaatccattctcccacgcccagatccaccgccccccgccttgcctcctccgcgtcgccgcgccagtgcgccccgcctcgccgccgccctcctcctcctcgtcgtcagggtaagccccccgcccgcctcctccgctccgagcttccccggtttccgctcgaggtggtttcgccggacctcttggttgccggtttctctggatggggatcccgatttagttagccatattctgcgttttgggggaaccgggacgtcgcaaatattgctcctggattggcacctgttcttcccttgtttgcgttgcgatttctttctactagtattattattctgtattactattggtctgcagaagaggcccttgctggggattttttttttatggaatatgacgatcgtaggcattgtgttcgtggctcaatttcaaattccgagtaggaattgggcgttttttgtatagtcggcaagtaaggtaatggcggtggcgaccattctgtctgaaattgaatacacagatgtgctagttagtttcatgagatgcaaacggcatggatttgtggtgctccttggcgcgctacccggatgttctagtttcatgccagtcatgccgatgctgctaaactactatgtgcaagtcaacatcgtatgtgcatctgtttttaagattatttttgttagccctaaaaggttcaatcctagggtggttgatgtaagcatattttggaagcacctgtctgttagcttatgggaatcattagtcattacactttttagaaatggaggcttgtgaagtatgtgagaaatataaagttggtacaggatagagatggtgccaaattccttatctagaaagatttggtgccaaatgcctaaagcaaggagctgtcaccatgtgtattaattttagcaacatctctcacaggattcacaaaagtgaatatttaaaaaaaccaaatttgcattttagttggagaatggcttcatcccttcacggcttcacctgatgaccagctttgaacctggtcttttacactcggtgaacaaaaaaaacttatcttttacacttcctttgatcattctcatgcccactaagcactgaaatgttggaacaccagttaccttatgccagaactgtcaattgctggactttttatttagtttcattccttttttctttgttgatgtaagtctcactgagtcactgactcaatgtcagtgctttttgcttgtacgaatacactggttaatgattataagacagattatcagatgtagtgttttcttgtgatttgtttgtcacgaatggaactcgttgcatgggagagtcctgcgttgagaaattactttcagttgccaaccaatcatatgaatgctagtgtttacctgtttcaccttgtgctgaacagaccaacatagatacttcgaactaccctaaggacttatttgcctgctctttagtttatttattgtttaactaccacactctcggtccaaagtagatggcatttgaatgtgaccacctttgtagctttttcttgaggatttcaatactttcatttgttgacaccagtatcagtttttatgtgctaattttttcttaatgtttcagtgttatgtttttcatcactataaagtccaataaagtgaagagtgactctgcatagccagatggctgtggacagagatatctttggtatctcaggtccgacatatctgaatcctgttaattggtacgtgctcctgttgtgattacagtgttacatgacatttcctggaaaattttgtgattcttgaattattatgtatgtactatgtagagatgctgcacttaatctacgtttttaatttttatgcacatgcatgcacagaactaaattctgttaaatgtcttaaggttttggttggttcttatcttttatttctatgatagataatattaggtctatttaggcatttattattacaaaagcttctcatgttaacaaacttgtcacagccatcatttgtattttttttgaagagggcattagtcataattggtatgtcaatagttaaagaaaaaaatggcatgtcttacaatatgatgcatgaaagtgtgcagacaatctttttggagtttcattcattgtggattgagcttcatatttatgtatgtagtgttgacaatgaagcatgaatttagggactagtaatcaccttgatcttcatcgatgatcagcaaaaccagctgcctgttggagctattgccacagagtgcacatatatgattattttgctaggagtacagatgtgatgaacagtttccgtagtgcattaaattggtggaagtaactttttccctcgtttatgaactctcaaaaggaactgtgagcataatcggagatctgtggctgcatgcttagttcaggctgtatatgttttggagagggaccggcaactaggtcgtcaatctgttgaagccttgggacctccttggtgggaattcttccattttgagttgatccgcaagcttgtcgatgatgctgacttgtctattttcggtgcaatatttgaattcaatcctccttcaagtaaagaatcttctgctgataatgcaccgagatttgttattgccttcagaggcactataactgagaaggaaaccatctcaagggatatcgcccttgacctccaccttgtccaaaatggtctccatcggacctcaagatttacaattgcaatgcaagctgtccaaaacgtcgcctcggttttccctggctcaaacatctggctagctgggcactcactgggcgcaggtatggccatccttactggaagaaacatggttaaaaagggtgtgcttttggaaagctatctcttcaacccaccttttgttgccgccccaatcgagaggataagtgatgagagagtgaagcatggtttccgcattgcaagaagtgtaattactgctggattagccattgcaatgaaaggaaaaggcgaggggagcagccagaggtctgttgcagaagattctttccacattttgtcatcatggacgccatatctgtttgtcaatccaggagaccatatctgttcagagtacatcggctacttccagcatcggaagaacatggaggatctcggtgctggatttatcgagaagctcgcaacccaaaattccataggagatctgttttacaaggcattaggatgggaatcggaaccactgcaccttcttccatctgcagacttaattgtcaacgtaagcccttcaccggacttcaaatatgctcatggcatcagccagtggtggcagcctgagctgaacttgcagtgcagtaaatatcggtactctgtaggtgcatgacattggaaaaaatgtcttaggagacccttcttacactttcgtttattcattgtggttcgttccactctattgtagctgtcaatatgctgtaatagatgtttcttgaacctctgattctgttgacatgaaaaaaacttgtaatttcgtggagcaacgatctgtcagtctttacacatatgttcgtgttcatgtagctcttcgttatttgatcattttctggtgttgggtgagcatacctctctcttatgctcataaattgtttttttttcctacttggtttgaaccatattaactgttttaaatatataatgtcattaatgtagaactcgcggctaagcttttctttaaaagccaaagctacttttgaattttaaagttgatttttaagaataatcctaagtagattttttacatggtctgataacaatcatgaaaaaagggtaggcaattgaagtggcgaagagaatctactatagttaattctaaattcaaaatcagtgcagcttctaacagtatattggaaatctccttataggaagcttcatgaaatattatccctatatttcctttgctttccaagagaaagaaaattaaagaagtggaaggggtcggagcttcttatatttggtattcggggaggatgggagaagtaggttcgagatggtttttttaagagtaaattttagaaaactgcaactttagtgacaaaactatcagtttgctgtaacattagcgacatgtttaagtttgttgcaataatagcgtgagaaattatcataaaactataacttttacattatatgctactacagtacatataggtgacaactgtagcagcatataacgtaaaagttgcagttttttgataattttccacgctattgttgtagtaaactaaaatataccgctaatgttacagcaaactaatagtttgtcactaaagttatagttttctaaaatttactcttttttttaatggatcttgttaaaaatgcagaagggagaaaagggaaaaaagaagggagaaaaagaataatatggaaaaaaaaagttgttaaaaatgacgaaaaatagggaaaatagaaaaaacacatgagattttttttctggggggatcggaaaagcatatggaaaatttgggaaaaacaggaataacaggggtaaaaaaaaaggaaaactacggtgaaaaaaaaaggtgggctggtctgcctgggctatgccaaacggaccttgcaggcacggtccacacgccgacgtgccgtgtttgggccaactgtggtgaagtcgtgcctgggctggcatgcctttgtgcggtccatttggtcacctatactcgacctacaaagagcaatgcttgagccaagcccccacgcgcgatgcgcgcatgctccgcgttggagaccccctccacaattctcgcatgagtttggtgtggtacccactagcatgcattaattgctataaagcaagcctcacagtgagccacgtcaccatgttatttcagtcattggatcaacattgtgccacaaagatcaaccgttagaggaataagttcacttgaggtccctcgatttttcgccgagttcgaaattcatcccttgagcgcaaaaccagatacaacgcatccctcaacttacaaaaccgtgcaaataaggtcctagacagtattgtatccggttttggctgatgtggccgcatacgtggctcctttgactaggtcattgtcccacatggcattgacgtagcgcttatgtggtaatttgatcccaaaaaataaataaaaccatgggacccacatgtcagctacacaggaaataaaaattggtggggccccacatgtcatcctcacttcttcctcttctctctatcccctctctcctttctcttctttctcatccttcctcctcccttcttccagcaacacgccgccgctgggaacctgcctccgccgcgagcgcgtcccgggcgtggtcctcctcgagctccgcgaggcgtgttgccggcgccggcggagcaaagtagtcatcagggagctctcgcttgcctccgcgaagccctcgcctcgcgccgccgccaccacggcatcgtcgtccgtgtcctccgcctcgtcgctacgggggaggaggaggaggagggtggggggtggtgtgcgcggcggtgtcgttgggggaggaggagggtggcgggggtgcagccgctgatggaggcgctgccaccggtggcgagagcggcagcggcggcggcggcgtggtacgaggtcaggctgcgacggtgctcggggacaaatttcagttagtgggatccaaactgaggataattaggcattgaatcctttatttgatcatttacatcaaaattcaaatcagatcgacaagaacaatcagacaaggattcaggattttgctttacctcccgtaggagaggcgccgggaaatttctctgccaaggaaaaagagatcgaattatatacatagacaaactataaaattgatctataactaggtactactatataaagggaaatgtaaaaggtttactaaccatagtcacccaaaaagaagaacaaagcgaaaaaatttttgaagaaaaacagagacgaagaaacaaatcggagtgagttggttgtactgactgttgcacttgctcagggcggagaagttgccgccgcaggcggcagggagggcggcgacacgggtgtagttgatcttgatgccgaagtccaggccgagcgcgccgcagaggcaggcgacggcggccgggctacccagcgtgctcttcacgccggcacagcagtccttggccggtctcgccttggggctccccggcgtgatgtacgtcaggcaccccgccagcgccgtgatcgtctacccgcagtctgacgacggcccgcagctccggccgccgctccctcctctcccatctcccgtctgccgccgcgcacagctcctctggcatcagcggcccggctgtcgccccctgcgcttctccccgccggctggcctccccgatcgatttttgtcgtgccccgcccttctccccgccgaccggcagccgccgcgcttctccctctcggcgcgcctagagagaggagaggggaagagaggggagatgggtagagaggaggaagaagagaacgggtgagaatgacatgtgggccccaccatttttttattaatttgtgtgtgaaacgggtcccacggggtttattgtttttaccgaatcgaattgccacgtaagcgccacgtcgatgccacgtcaaatggagaccgagtcaaattagccacttaggcgtcacgtcagccaaaaccgtcttccaaactgccgagggacttcatctgcactggttttgataattgagagacccgttgtatctggttttctagttgaaggacgaaaattggatccgttgacaagttaaggcacctcagatgaacttattccaccgttagatcttcatttcactaccaggcctatatatgaaggaaaaagtacaccaaaggtccctcaacttgtcaacaggatacaaaaacatccttaaacagcaaaaccagatatacggggtccttttaactatacaaaaccaatcaccagaggtccttcggcggttttgatcccggttttgatctacgtggcggctgagtcagcgtgggacccacgtgggccccatatgtcagtatctcttttccctcctctcccttttctgctgtttctctctcacacacactcttctctcctacggccgacgatgcagcacgggagaaggggagggcggcggcgggcgaacacggtggcgggctcgccctccccgatctcactctccggcatggggaaggggtggcgcaggcggcggaccggcgggagaccagcggcaggcggtcgtggatgcggcgctcacgcggggctggctggccgcgcggtcgtggttggcggcgggtgaggtgttggcggcgagcgcacccgggaatcgatggggcagaggcggccgcggtcgtggcccgcgagtccaggcagctgcgttcgttgtgggggattggattcggtcgtcagctgcgttcgttgctttgatggaaccaaggccacgcgattccgttctgatcgacttgttccatttcatctactgtctcaatcagttcagttgttgaggcgcatttgatttttgatttgggtcgaaaatttgatggctcaatctgatctgagttttgggatgaatggatggatgcgtgcagagcaacggaggacagggagaggaggagatggtgagccaggggagcgcgggagggggagtggcggcctcctccggggtcgtcgtcaacatcaccaccgggcccatgacggagacggaggacgacatggccgtcggcgaggaggaggaggtggtggcggcgtcggcggagacggaggagcacgtgcagcgaatcctcctcgccatcgacgccttcactcgccaggtccacctctctccattcattaatttcgctatttgtcattctgaatttttcatcgatcgatgagattgcaatgccaatgcaggtgtcggagatgctggaggcggggcatgcgctgttcaagaacctcgccgccgacttcgaggaccgcctctgctcgtaagaccaccatccatagccatggccatggacacacacacccgctaataaaataattggtttggttggttgcttgatgacgagcagcataatcaatcgatgcaatctggtttgtttgtgaatttggcgtgtacaggatccacaaggagaggagagggtggagaggtgggaggacgagatccgggagctgcgcgcccatgacgccgccaatgagcaggcacgctccctccgccgccaccgctctcgtctgccgacgtcgcaccgttccagcccgtcgacgccgcaccgctctcgcccgccgacgccgcctctccgcaaccgtgctcgcccgccaccgtcgccgcttcgcctgctctggccaccattctggtgcggcgacggctccttccccagcggcgacggtgcccggttgaagaggtgccccttgggccgccctgcgccgtcgcctccggccggcttgcctagtcgccagaagataacagtagagtgagagagagaggagatagggagagggtgatgacgtggccagctgatatgtggggcccatgtggtcccacgctgactcagccgccacgtagatcaaaaccgggatcaaaaccgtcgaagagcccctgttaaccggttttatatagttaagggacccagcatatctggttttgtggttcaaggatgatttttatcccgttgccaagttgagggaccttcggtgtactttttccatatatgaaaacaaggcccaattggatgtttcagtccagtcgaaccccatcatcttcccgtcggccttctgccatgaattgggaaagacaccatagttaattcaatttactcttttgataagtcttttgcaattcctcatgcaaaccatgctaatcgtctccatcatggtttgtttcctcttcaacaattgtaaaccagaaactgccattatctggtgtcatgataaatctcattgattctctttataactctcaattcctcctatataagtgtgcaacactgcccgttttcctgcaccgtctacactgagtcactgagccaatttgattccctcacttgcataagcctctcacaagtcgaagccgctttcctatgcgacaacagccggctgatttagccaacatttggtctccacctatgggaagagcacaagatacgaaggcttctgcgtgttcatgaacaacattaggttccctttccgtttgatttactccacattcatttttgtaatataagtgctcttttctttttgttgtttccagcaagcttagagcaagtgcatataccgatccactgattgggcgatgaatgatcaagccataacagggtcagggtagtaatccaatcaaattacacattacttcatttttgtaattgttactctctctctctctctctaggatagtcgtcttttaaattttgctcatgtgcaacatggtgatttaatacagaatgaccatttaagcttctgcaacactttatgaacgtaaggaaattttataacaatgagcgtgctaattgtaatttacatgggtccattgacaacaaatatttgagtgagatctcccaaatttcttgaaattctcatgaagttttgctattttttaaggctcaattccatattaatttcatatttctttgttcctattgagaaaatctcagaaaactcaatatgtacagtagtacaaactttggcttgggttgtagttttacatgtgagttaatcgtttttgcagaagttcatccttaattagtatatagaggtgctgatgtgtaaaaaaaatattaatccttctaggttgcctttgcttttttatttttctttccccaaagtgtcatccaacaatctagctatgattgtttcccaaactaggaaggaagcccgcacagatgcgcgggcaacttatatataaaagattgttaaaaaaagttgtatttcactatattaattataagaaccgcttatttattatttataaaaataatgctaaagaaatcccatctcgccatattgattaattataaggaccgtagatcaccttataattatatgaaaataaatatctagaccacaaattttgatatactaaatgacaatagtatctttcattttcaaacagaaataactatgtcccagatatatgtatactcgcctgtcaccactatttattatcgttgtattataagttgtgtgcctttttaatagatgggattacatccatccaagaaaacaaacttaatatgtcattaatacaacaaaaagatcatctgtacttcatacctaattgttcatgcctcacttgtgtttaaatatatgtataaatattttgaagtattgctcctaccaattcatgggataaaacatttaacattagatataaatgcccctctaatgggtgaagccgacagtagccaccaaggctttcttctcttatgccttgaaacatgtgtcctttatcaacatagccgtgctcctcaaaatcagtgtggagcataattttaacgcttaattcattatcagctaaagaattgcatcgataagtaggctagttgaactttattgcgaatagtagcctctcaccagggtcacctttactcagtcatatgcatgcccccgccatttctacagaagcagagtatactacgttatccatgcttagcgcccttcaagggatgacacatagataagatggaagtgaatttttttttagttttgagtccatttatgaaatagagtgacacttgtttatggcgttaattggtccactaaattttatcatatataattatctcttctgaaaatatgtagagttgatcttgagaagtaattgttcatgaacatatgaatatgagttttgatatttttttttcattattgatctaattcatctatgcatgttcgtggggtaatatataatggaacaatatatgttatcatgtttatttgtgctgattgttaagacaatttataataacatgaagattgatagaatgtggtttcatttaatatttttttattcaaaagatagttaacatatttatcaattttctatagaaaaaagtgggttgtaaatgaatataatatccactatcagtacgttcttaaaaagaatggagtaattgttaagattatttagataagaaagacataaaaagggttagaatattgttccatgtgataactttttaatcagaattgctatatatatgtcatgaatttcactttgggccatattttattacgaaagtcttattttagactacccttaaaccaatatttttattttggacagggtacgtattaatgatctcggttatgttggcttctaatgatcaattaactgtcacagttatatgtaataccatatttttgatgtatgatgtagatggatagaagcgttgaggttggtccaaagaatcacagtggtaaaaatatgttatgcaaagtaaaagtattggttaaaggttggtacaaagcaaaatatcagtaatagaaaggtgccttaaagtgaaatttaattttaatgttgagattcgtgctatagcatttagcgatgtggtagaatgtggagagatgtaaaaagtgacactaactgcgttcttaagagcaagtttaatagtatagccaactactagctttaattcatctatcgccaatctaatagctcattcatacaatagttacatactacactattaatacctagtcacacctgtcatagacacactgtgtcttggagtccgtactacagctggctataaatctgtagcctgctgctcttctctctcctgatttatctccttaaaatatatttgcagctggcttatagcatgctattgtacctgctctaactgagctattgctactactccaacctctactactaccagtacatgaccagtagaaacgttagatgctaggcatccacgcgactgtcaaagtgcagaaagagaggggtaataattagcaaaatctcaatgtgcatttacatttataatttataattatagagtactacacagtaattagggtgtattttatattatactggagtgtaattttaatcattcgtttttttcaaaatttaaatattgttttgtatttttaaccaagttaattttgtttaagtttacatcatcatattaataaattatgttgcattttgtttggtcgtaaccatagtgatctccttttaattgtactatgaaatctgactgttttagcgttcgttttatgtcagaagaaatatacggtctcttttttattaaaatatagttaacatagaataccctagcaaataaactggagagaaaggagccacaacagagggtagactgacctctaatttaaggattaggaaaacatggtcaatagtttttcttatgtacgtatatatgcatgttttttttccctctcctgtacgtgcatatatacatacatatattttctccagatgaatagcatatatttatttttctctcttacaaatacacattagattaggagagagggattaattattttaatatgatttgatctaatctaatctaatggttcaaaataataattcacttgtacatgcgaaaatcaattgttatatatttatttttccctcttgcaaataaggatgagattaggagatggattaattactttaatctgatatgatctaatctaatataatggttaaaaataataattcacccgtacatgcgtaaatcaatggttcgatgtttagcttttatttttttagaatattttggattttattgatcttaagttataagtttaattctaaattaaattatgaccatttaacttaccatgtttgtgttaaatttctagctataaaatagggtgtagagagaaggaggagatatatatgggctgcacgtacatttataacctttttttgcacggtacgtcactacgtacaaagggaaagagttacgtgtgggaggagagggaggtggatgtggaaagatattttagataaatctgccggtttgaaataatgggtccaccgatttaaatgaaaacagatggccaatggccagatgttttgttttttttcttagaatttctaagaatttctattattatttattagaatgccatgtgacagcttaggagcgtttgtaggatgccacgtggcggtttgagagcgtttgtaggaagtttggctttggagcgtttgtatgatgccacgtggcggtttgagagcgtttgtaggaagtttaatggacttttagtatataatagatagatagtcaattatcactcctgatgaaccatccagagactaaaaataattaagatgatgtgtgatgaaccatctggagactaaaaataattaatgtgatgtgataccataagagaatagagaacaaacattattaactatacttaacgaggatgtgctttataaatacatttaggatttatgggattacacgcgaaagtgattaattactaacggtaattaatgagcgataattaattaatcaccgcgagcgtgatttcaagccaaatcgtaagcaaccggcttgatgaccgctggcgcgaggcccgggttaacgccaactttgagcacgagcttgaggtcgtcgtgttggtcctccagcgcgtccctgaggaaggccaccatgaggccaccgatggtcctcctggccacctccttggtgtccccgaggttcctcatgcacatgcagttgttgatggcgtacggcacgccgtcgtccagcatgtccaggtggccgttgtcccgcagcacaaagtggtatcgcggcggcgcgcactcgtcgtagaactcgcaatggttcacgcccgccggcgcgcatggcgggccgccgacgtgcctcgggcctaggccggtgccgatttttttgtgtttttagaccgtagagatggaaaaggggtatagatgtcggtggtaatactttcaacacatatgtgccgatacctatttaatattttatagtaatgcgatgaccatcaccgtcaggggcggagctagagaaatatgagggggttcctaagagcaagttcaataagctagtttagccgacgataaaactgccacatcggatttgtcaatgagctggacacgagagagcatgagtcggggattaaattatcaccggctacacacacatcccaacgcaagtgcagcaacactaggctagctttgactggggcatgcaattgtggggtccacgcgagctggtgtgatgtaggaatggcgagacgaaacgacagcaacaagattaaaaaattggatgaggaagctagctaaagattaaaaaattggataatagtccatgtaaacctgcttattgtatacattagctcttagcaatgtctatgctgatgtggtcatttttgcagccattagcgggcgacactattgaccttgctctaactttctttatgtaaaatactgacatgcatagttctagaacgatattatactaaatagttacgtacccagtacatataagcatcatctgtctaattgaaggcaatatacaacaagaaagtgcatggaaaaaatttaaaaaatgcgtaccataaaaccatgccggattgaattttccatctttgttggaaataactgatatgggaagtacaagatcacgaggttggcaagacccattctctaagtactttctttttaccttgtctctttggttgggatgataatcatcaatttcttttcttaagcctggatgatattcgatcgtctcttggcatcatctagtcgaagggatgaactcttcacattgttggtacaatccattacttttcttttaagaaatttctccatagaaaccttttagagatcaaataaaaattttcaagctttatattgatacaacaaattaaatatgaaagttgagagaaagcgctcacgtactctaaggctgcgttcgttaggggtagttcccaacacctcctcctcatctttcgcgcgcatgcttttcaaactgctaaacggtgtgtttttttcaaaaaagtttatatatgaaagttcatttaaaaaatcatattaatccatttttaaaaaaaattagctaaaacttaattaatcacgtgctaaacgctgcttcgttttgtgttccagagagtgagggttcaaccctcactcccgaacagagcttaagtgttggttaacggctgtgatttttcatagaagcacaatcacttgcaaccgttctactccggtaatcccctccgttgactgcaaacaacaaacaataacctaatcattggtagacttgcaaaattaaaagaagggagcggcagggtgcaaccacgcaagacttaccggccggccggcgttggagacttggagttgggctgcttctgcttcactcactgcttgggctggtcggcaacagcaaggcgccaaggctgtaagggcaggctggcagggcagggcagccaccaaccgggcagggctcaggctaggcagctggccgccggtgtctggctcgggcacgccggcacggccggattggcgcagtgctgtgccgcagtgggctgggcagaacgggaagacggcgtcacatccatagaacgagaggtgagaaacaatagcgatttttgatttttggaagaggaaacgtcgaactcgaaacggtgccgccctggcgccttgattcccgtcgccgcccagccctacctctgccgcgcgctatcgatctatgggaaacacgagcgaattctcgtatcctcctctcagttgggcctggtagagttatagttttgggccagagttttggatctttggggggaggggggttccctggtttggactggggactgtctatatggtggagaatataggggtaataagctatttagaattttgggccgggttcttgagcacccccctggcccattgggctccgccccaccgtcaccggcatccccgggtggagggaccatggcttgaaggtcaagcgacgagggccagcctggagaggtcgggcttgacgccggggaggttgaggacgctgccgaggacgtaggcgaggccctgccgctcgtcggcggcccagcatgcaaccttcctggtggcatcgttcaagtcgagcgcgatgccgtagagctacggcatgacggcgatgaagccgtgggaggcgacatgcgacaggaggccctcgtacctaggggcggatccacccattgggcagggttggacggccgacccagctacggcccgcaccgccccaccccccaccctccttggctctatcaacattgggcccaaaatgagcagccgaagcgctagtgaccagtctaaccgccgatcgcataagccgcacgcgagcgacgcctcatttctttcgacctggatcggcgccacaccatcaattcgccttcgcggcttcccccttcagccttcaccgagacaccgagtcgaccaagcgccgacgcagcgacgccagcatgccggtaggtgctagccctatagggagtaggcgcgctcccgcgcactagccgaaacggtcccgtcgcggcgccgcaacgccgctcactccattcctcctggctcggtggctcatgcaggatgtagtcctactgttctggctgcctggttgacagccctaatcactaatcaattgattacttccatcaagtctgaacggtgaaccacttggctttatgagttgtctaatatttgcaaattaaggccctgtttggaagattagcccagagctaatgttgggagctcatgtttagtcatgaattggtaggctcaacattagcctagggtggtatgtttggatcgataggctaattcaaggctaaaaggtggagagagagtagaaagagaggagagagaaggagagagagagctgctttttgatggtccccacacaaaattagccccattagcaccccttggaggggctaatgttttgaggggggctaattcacattagctcaaaattagcccacctgtttggatccttgagggctaaacattagcccatggaaccaaacagggcttaacacgtcaactattatcttttgttgtataatgaatcatatatgacacagattattaatttattttaaaatgtttttgtttcccttaatttattggttacactatatttctatgtgattatagtataaatatgatatttagtgtgtttagctattcttatgaaacgaccatctccgctagagatacaagtgggtagtcccgttacccgtataaaaacctgtttactagttcatttcttacatggtagtgcaaaatttagaataaaaaatgaactagaagtgagataaacgggctaaaaaaatctgcttgtccgtccgcttgtatccatagattctccgtcctatctttattttaatcctgcttccgccactgctcgtaccagctgttcaccatgttgcagccgtggaggaagatggcgaccgggtaggtcccggcgttggcgggggccaccaccatgagcggcttggggcaccaagccttgggcacgctcgggagcacgctgtggtcgacgtgtttggcctccacgcggtgcggcgccgcatggaacaccgccaccatgccgagcgcacagccgatgtgccatgtatgatatattgatatgaggtatgtatcttcttcttctttttctgttagtgtggtgattggtgaacagggtttgcaatctcgaaattaggtttttggcgccggggggaggggtggttgtggggggtgttggtcttgaaagaaccaaaattttagaaatttcttggccgaaattatttgaaaatttgaaatttttttaatgaatttaaataaactttgactaaattcaaaaaagaaaaagaaccaaaaatttcggatgagatttgtgcttgccggtggggggcaagaaacaaaattttaataactggtggtgaatgttgagacgaggaacaggaggcgtagctgcatgctaacctctatttaaatatactgcagcgacgcgcgacagtaccatttgcggtgtgaccgcactatttctttatgagaaattttattacgttaacgaggtatgttatagaattgagatgtggaacaatacgaaccattgattagagaggaataaaattatcataaacaatataatggcttccgtatcaatcgtccagcaggttaaatgcacaagagatttgtaggagtgattgccatgcactgatgcatgcacttcctgaaacaccgcggcactgcatattggctactcagtgaggcggttgacgacagcggtctccggcgatcgaggagaggacaattgtatattgcgatcttggccgatttagatggatagcaacagcatttggcgatctgcataattagatcgatgctagtactatactctaccatctattcgcgctcgtcatctgaaacttggccatctgaaatatcaattaattaacgtcagaataagaaagggcaaaagatcgacaagaatcaattaggagcaagcttagcaagcatcacatgtacctccgtcaatgctaatgcttggatgattcgggtggatcttggtggcacgcctcagcgcagccttcaattcgttcacctcctcctcgctggcgccttcacaatccaacgagacattgacctcctggagcgatggcaagctccccagtcccaagtcgagaccatcgtcgccggcaccggcgacggcgatcgcctcccgcacggagaaccgggagcgaagcgttctgagcctcggcattgctcctcgccggaacaccgccggcccaacgaatccccacaacccacagcacaccaggcacgcgaacgagccagctgatccaatcaccaacaccaccccgcggattccgagctcctcgtggtccacctgcagctgcagatcgcggagagcaggcagcctcccgagggtctcaacgtcggcctgccggatctccctcacggcgatggatagcgagcggaggtttgggacatgcgacggattcgtcatccacgccggcagcgacgagaaccagcagatcttctctgtatccagtgcgacgagatgccgaggggcgacccaggcgtccaaaccacccatgttctttcgaacattgttcatgcagacgtcgatggagagacgctggatcttctgcaacttgtgtaggagacccaccagtttgtcgttccatccgtcccagaagatgatgcacagcaccctcagctccgttaggttgcccagctcttctagaatgcccacagtagcacaatcgatcaacacatatgctagatgttcaagccttgttaggcttccaatcccatctggcaccctcgcaaacccgtcgaagcatagggacgtcaaatgtctgagcttcacaatattcagtggcaagtcacaaatagggtttgccctcaggtccaaagtttgtagaaactgtatgtttcctatttcttctggggcctcccgaatatctgtgtcacgtagtcctagatacctcaagtgaaataaattcccaacatacttaaggctgtaaccttgtgaaagatcacaaccttgtaaatccagtacacgtaaaactcagaagctcctaaggacaggtactagatcagtggcagatggaaagacaagagctgtccttgcttgctgcaagctccgagttgctgaagtcatagcatgatcttcattgccattttggagggacaacctccgaatcgtgtatgacagagatccttgatccctaccatttaatatagtaacaaagttttcctcacttgacaatgagcagataagatcgaggaccatatcgtgtacgcgacactcagataccatgtcagtatacatatcatatatgggttggatcatatttctatttacaaggtcattgaagtaactctctccgagttcaaataggctcctcccttgtttcccacactggataaagccttcagctacccacatccatatcaaacgatctttttcgattttgtaatcttccggaaacacacttaaatataataagtaagttctcaaatggggtggcagatcataatagctaaatgacaagatctttctcatattcttaacatccagactattctcgagaccagtaccaaccgagttgtacaccttgtaccactccatcttatttcttgctttacaagccagcagactagccattgtaatgatagctaatggaacacctgcacatttctttagtattctctcggatacttcagccaactcctcatcaggatatttttccgtgtcttcacagttaccaaatattcttccatatagtaatcgtcgagagttatttaaagaaagatgtttcaacttgtaaacaccaccagctttttcagcaacctcagaaatacgtgttgttgtaatgattttgtatccaacatcattatcaggcaaagcacatttaatcattttccatattgagatatcccatatgtcatccataacaatgaaatacctgcatatagattaagtccttaattaggaaaaaaactaatgaaattagaacgggaagttcaaatactggggccaggtagattagcaagttcgtaggcaaaactagtctagctattgtgaatctttgccaaaacagagataaattattcactcaagaaaagaagatttggacatagctatttaattccgactcaataacgatgtaaaaaggcttataagcagttgtagtttttttttatttaacccggacatgatgaacattctcaacaattaacagtatgtagactgctaattagtacttcctccgtttcacaatgtaagtcattctaacattttccacattcatattggtgttaatgaatctagataaatatatatgtctagattcattaatatcaatatgaatatgagaaatgctagaatgacttacattgtgaaacggaggaagtattacgaaatggatggcatactagcaaattattagttgctgagaaaaaacatcatatatatgtacagattggtggaaggaatgtgcttccatatataccttttctgttgaaggaattctctgagttcattgatgagctgcacctcatccaaatccaatggtttttcattgagatctttatatttctccttgtcaagttgataaatgatgtccatgaacaatttcttcaagtcaggagtttgagacactgatacgaaagcacaacaatcgaacagtgatctaatcttttcatatactacattagcgagagttgtttttcccaatccccccgaatccaacaatggaaaccaccttgcctgctcgctgcatggacactccattctcttccgtcagaatattgatcagctcatctctcgtctcaccgatgccaacaagctctttctcatccgtgtaccgcgtgaataaacgagggtcaattgtagcagtcttatcaccaccaccagcaccaatgttgatctcatacctgcggcgacgctcgtgaacctcgacgacgcggctcttgatgtccatgatctcagaggcgatcccatggcgagccttggccttcctgaataggccgacacttctatcgattagcttgctgatgccccgtggtttggcctcaccgtccccgttgtcgttgccgatgtcgcgcacgacgaacgcgtcgatggtgtcctcgatgtcgaaggagagctctctgagatccctggcccagatcttgtcctggggatcaagctggtcggccggcgtggcggagaccttggcgagggcgccctgcatgctctcgagctcggattggaggaacctgatctccccctttaccgccttctgcagattgtactcgccgacgagcagatcacctagcttggcgatgacgcttggcagtgcacccgtcgccaactccatggatcaagatcttgtcctcctccctgggtggatactggatggtactgacaaagaagataagctcggagaggatgagactcactcgtcacccggtggatcgatcgtgggtgaatcgcctagtccagtcccctgtcgtcgctgactggatcgatagggcgacgctctcgattgattcgaagtttcccaactcgatcgatcgccctgcgctcgaacaggaggaagagctcgatgaggttagacggcagtttgaacttttgttcttagacttttcgatttagatgagataatgattagaaatgaaagatatcgttgctgttgggtcgctatagtcctacttggaagattccgagtaggtaaagttgacctgctccatacatgtgcttctgttctgacttgtgaccatgtctgcgttgaaattcgagttgcttcgccttcatcaaaagaacaattcagctgcaagtgagtttcaagtatgttttccaaatcttcttttccatatttcttgcccggctgcattgaccatccaacttggtcgttgggtcacagatcatgctttggcctcccatgcttgtcttttcctttggctcctagcgtaacaaagcgtaacaagtctggattttctacattttacccctttttaaaatcttattttgcaaatagatctctagaaaatacttattttagcaatggaccatttttctccaactagagttgttagcgccaaggttcaatgtcttagcatcaagcactggcaccaacaccgtcgccttctgtggcagctaaatcactgacgttaagggagtcggtgtcaaaaaaactgaaacataagtacctatttgtagaatattttttaaaaaaggattaaaatataaatatattttactacaacatgcccttagcgcaagtctcttttgcggtaatggtctattgtaagaaaaagtatttacatttcaacctttttcataaaatttgttctataaataggttattggttctagtttctttggcgcggatctcacctagatcacttgcgctaagaaaaagatatatttgtttgtctaagtgtatatttataaaaggaataaggctgcatccgttcctccttgttcccaacctctactccctccttttccatatgcacgcttcctaaactgctaaacggtgtaatttttgaaaagttttctataggaaagttactttaaaaaatcatactaacctatttttaaagttttttttagctaatacttaatttatcatgcactaatccatcgctccgttttccatggggagggttcccaaccctcaccaaagaacacagcctaagtcaacataaccccccaacctattaccaggtgattacttaaccccctcacctaataaaccagctatttaaccccctaatcttgttgatacagtttaattaataccatacagtggttttgcactctggttttgccccgctggcgggacacgctcgaccagcctggcacagtggatcgacaggcgtgtgggggatggggtgaataaaaatatgagcggttctctcctcgttctccttggaacctcctctctctctctctctcctaggcgaacaacctgctgatgacagggagtagatccatttgattggattgcagggtgaggtaaaggtgagtctccacaacctgtttctatgttttttttcccaatcaggttatctcttcaaggattagggctaattctacaaggtcttttagtggtgggttatgtattttttctgtgaaattttgatagtgctatgttgtaggcagtaaaattctcatcactctctgtgaatttctcggtaattttatcgtcttgatgattttaggatttagggcttatgaacacaaaaattagctcatacgttggtaccaaaggacacataaatttgctctatgggtgtaagatcttgctttggtttttttaagactaaccgaggctagaagcctcagataatatatagcgtatgatcttgctagttgttgtcatttaatatcatcaagagttaggattatttttgtttcttatttttgcaagaatggatccatcggattttcttccggtcaggtttcactatggtggggaatttatgttttctagggggcaattgcattatgtgacagagcgtaccgcattgtcatacatagagctcgacaagatatctttacctgagattataggtttcctcggtgaccacatgctagttagtgatttattacacttgcattggctatatcctgaaaagcagttgtcagatgggctaaggtttttgcttgatgacagtgcttgcatagaaatggaaaatcatacgtctaataatggtcaggttgcagacatttatattgagcatgtagcaactgatgaggggcaagatgataattagattgctgactggggctatggcattgcagaagctgatgatgaagcaaaatcagaatcaaaggcagagctacttcctactattgttctatgtaaagataaaaagaagggaagattgaaaccaagaagagcaacatctcaaattctagagaagcctgaagattcaggttcagatgcactagtgcctgaagatatagatgacctgaaaataagatagttcagactctgattataggcagcctatagagcaagatagctctggagatgatgaagaagctgaacaacttaggaaatttgcaaagaaaatcaagagaaacattagggcaaggaagctaggagttcatagtagccaggctgtagagatacttgatgatgcactggtgcctgaaaatatcaacttagaagatgatggcagtctgtattataactcaagtgatgactactcctatgaggagaatagtgaaggagaaacaattagatggaagagcactaataataggtttaacaaaaaaggcatcatttcctgtgttctctcttagcatggcatttagatcaagtaggcagttaaagaaggcactagtgaagtacgggctgacaacacacagacatattctattcccaaaggatgaaagggacaaggttagggcaacctgctattgaccaggatgtaaatggctaatatatgtgtcaaagacaagtaggtctaaatggttccaagtggccacttttaataatgagcattgttgtccacctaggagagataacaagctagtcacatccaggatcatcatgggagggctgggaattctcgaaatggaaaaattcacatctacgcttaggctacgatggttgtggctgtttgatacaagcagaccttgggagctgatggagatgccttgcaatatgcgagatgtacaactcttccaggcatgcacaaaaatcacagtaggagatggcaaaaaaaactcttttttggaaagacaattggttaccaggtttgtgcccgaaagatcttgctcccaacctcttcaaattggcaaaaataaagaataggaaggtggaaacataaatgatagacaacacctggctacattcttttagacagatcactaatatagaaaccatccatgaattagtgcaattgggatccctcctcaatcaaataactctttctgatcaacatcatgatgaaatatcttggacaagaaatgcctcatgaatcttctcggttaaaagcgcctgccgcttccaattcatgggttcggtgattgatcatattttcaacctaaattggaaggctcattcttcatcaaaaggctcttacagcagaaaacctgctaattagacactgggaatgcgactggatctgtactttatgcagagaagcttttgaagatacagaccatctgttttgccaatgcaacttcatcaagcaggtatgggcaagaattgccgctgaaaaagggattattcccaatcctaacatttccaccactaacagtggatgtgttctctagggtccactggccttaaaagccaaaccaggtcaaggatcggaatcctgttaaagacatggtggcatgtttggttgcaacaaaacggaaaaaaaaatcaattcccaagccccaagtctacaaagaacaatatcactcatcctcgacgacatacaggagcaggatatggttttcaaacctccatgaagggagaaagtcctgtactcattgctagagttggttgttttaagaatattttgtaatctcaactttgtaaacttggctttctaatctcctaaatatatctggctccttgctagagttggttgttttaagaatattttgtaatctcaactttgtaaacttggctttctaatctcctaaatatatccggcaaatcttttgccgctttcacttcaaaaaaaaacatccaggatcatagtaaataaatattttgatgttatcaaggataatccgacatggaaagtggaacatattaagaagtcagttctaaaggacatgcttgttgatgtgcccatttcaaagtgcaagcgggccaaagccttagtgctacaagaagcattggataaaactaggggagagtctcaagagtgtatgattatcaattggagttgttaaggagcaaccctgggagtattgtagttgtgacccttaatccagatatacttgacaagaaagtatttgagaggttttatgtatgctttgatgcttgcagaaaagggtttcttgctggttgtaggagagtaattgggctagatggttgtttcttcaagggtgcttgtaatggcgagctaatatgtgctattggaagagatgctaataattagatgtatcccattgcatgggcatcagtggagaaagaaatatatgattcatggtattggtttcttgggtagctaaaaaagatctcaatataaatgatggaggtgaaggatgggtgataatttctgaccagtaaaaggtatgctttttaactatttatcttttaacaaaatgtgcaatgggtcctaagttgtaataaatattttgaattacctgtcttgtagggactcataaaggcagtggctgagcttatcactagagtagaacataggatgtgtgcaaggcaaatatatgcaaactggagaaaaaaggacactgaccagaagcttcagaaaaaaatctaaaactgtgcaaagtcatcttgtagggagcttttcaactataatagagcaaagctagcacaagacacccctcaaggagccaaggacatgatgaccaccacacctgagcattggagcagggcattcttccagctagtgtcaaattgtgactccgctgataacaacatgtgtgagtctttcaacaactctattatggattcaaggttctttctagttatctctatgaatgaagccataagattcaaggttttttcaacattagctctctttgaccatgtcctgtacatattttttttctgaggctcagccctcaactctgctctatcaatatgtaaggcaaaacctcttcccttttgaaagttcaagtgctattaatttggttttggtgattaatgataaatccaattatatgagactaatttttttataagcattctttgcctagtgtcatgtggatatgaaagtgaagtttgtgataggtgattcccggacttcatatgagttgaaatagaaatgttaattgttcgtggacctaaatcacaaggatgaaatgcattgacctaaatcacatctttctctctatgcacatattgatatattcatatataatattttcatgtgattgacatatggatttgagactaatgttttgttgagccatatcttgtttagtctcttcacattgagaatatggagatgatgaaggtatgcttctaccttaatgtctacatatgataaataccttctattcttgtatagggtaagctcacgatgttttatctctagttatgcatactttttcttcacacacaaaaaaattgtatgcatacatttaggggggtaaatcctataccttagttatgcatgtattttgtcacatcctgattttcgtcttaggatttataaattatttaataaattattattagaatttatattaaatgttcattaatttacaagtgaagttaattgtggaaaataaaatttcctaaatataaagcatggatgtatttaatttttattaaattctccatggttaattatactctctggaattttctcggattttttggagctcaactcttaattttaatcatacaaagaacaattcagtaattatccacatattaaattaatcattaaatggtctgattataattttgttaagtactttgagtgtccaagtattttcaggatttttcttgaaattatttgagcattggaagtatttttaacaattcaaagatcatttcagtgattaatttaattggaaaagtaattaaaattcaccttttccttttcgggccgaattagggaaagtcctctcactctcggcctagtctcctctcagcttgcagtcctttccctctctttcccgaagtctgctttgtgtccctcctttaatcagtccttggaagtagaagcccagccgaaagtctagtttgcttccctgggcactgttcatcttcaagcttggacagaagcctgagccagccgtcctgtgcctggaatcgaattcgtttttgagtttatctctccaactaaccctcggtttttccggctcaaatcctctcggttggagtccgatctcttcaatccaagcctataaatagcatcccctagtcgccctctttcgtttgccccatctcccgagctctctcgtgcctcgtagtgccgccgccgcgccacccaaaccgccgccgtcgccggccggcgaacagccgcctcgcgccgtcgttttagccgtcgccgccgcctcctcacgccgccgtcgggtgcgcgtggaagaggggaagctccgccgcccttcgccgtcgccaccggtcgccggagagccgccgccgccgtccaccgaaccgccgccgccgcacaagctcgtcgccggtcgccatccgtggtcgttcgtcgcattggttagtaccggtgagatcgcgttgttctcctctacgcgtaggtgccctccaaaagtccggccgagtcccctagcgccggcgaggtcgtcgccgatgacgagtcgacattgatgacgtcagcatgacgtcataaccttttctttttagtttttttaatagatgcaaatagtttaaaacttcggaaattcataactaattcatcgtagctccgattcgagtggttcaagttgctaagtttttctaaaatcaagatctacatgttaaaaatatccacatgtactgtttatgattgtttttgtactgttttgttgattttgttcatttgctttagtttccgtcgttccggaggagagcgttttcgttgaggaaggttcggaagtgtttgcggaagctcaaggcaagtcacccagatcccaaacaaccctttgaacatgttgaacccgtttaaagctaatgatttatttcaacttatgcattattttcgaatgtcatcgggtgatgagcctttcccaattaaataatggccgaacatgactttattttcctatgggttataatttgattagcttggaccttatatattggattggttcagctaaatgccatatgtatgtttgcttagtcatgcttaaacattagctaattaaaggggattaaatataaatcatattatattattattaattacggttatatttaatggtagctcacgatggttaatcgtgttatgttatgtaaattaattggtaattaaaactggattaaggtgggttgtgagcacatggttttgaaggtcgtgctcatgacaattaaggaccggttcgcgagctactgttgtgaaacatttaccgtgccaaccacaagccagtgtgagcaacggctttaccttttgtatagcatgattcattacggggcaccagactgtgaagcggcgagaagtccatgggggtcgctggggagtccattgcctttggttttgagggggagattatgatccaggaacggtgcactgtggtgagttgtgttgtgcgaggggtattgtcacagttcctttccgaggtaccgtggtggtgctaaggcgcatggtgacatgttgtgggattgcgtcttgtgggtacagtggtacacctctgatcaaagtaaaactattcgaatagccgtgtccgcggttatgggtgagttgagcaatgtttttcgtgattagtcccacattactcattaatgttaataatgtgataattaatttgactcctggtttggaatggataattcctggtttggaggtttgatctgtacgaccggggttggctgttcaggtttggttgggcctgtgcagcattggggtgctgttcagtgtcgattaaaattgatgattaattactctactgatttacttctaaatgtttgcttaatgctgctttcgcaaatgaacctatattatgccatcctttggtatccttgtgcatttgcatatttgctgtgtggcttgttgagtatgtcatatgctcattcttgcaataatcatcaaacctcagttgaagaaaaaggatccagaaggagaagatgtttggcttatactccagttgagctgcctgtgggagtggagctgaagccatcgctagaccgttaattccgctgctattttccttttcttttgtaagtatgtaacattattattatgatggatttgtatattaaattgtcagtttgtgtacctcggctgattcctggacgaggattttatgcacaaattagtttggaaattactagtgaatttctgggcgtgacatatttgatccaagtttttcacttgcatttaattgggatctttacatttgagtacatgacacttgtgatattggttaatactcatccacttccttttatatgcgcgattggttgatcaacatgtagaggttgacaaccagatcattgagaccaataatttcattgagttgaatgagaaacattggtcccaaggattgaaaaggtgttgatgctcaatcgatatcattacagctaaaatactaagaatgacagtggagatattgaagatgcggaatacgaagtggctattatggcaagacgatcttcaaatgattgatgctcggtcgcgatggaccatgtgacagtgaagggcaagcaaggggcttggcgccgaagagccaaatccggtggtgaatggcgagtgacagctttgtcatgatggaccgtgcgagaccatttgaagctacaagtaaccgcatcaattatttgaagaatatatggtgaaacggttttggcgttgctgttccttaagacaaaggaatgaagatgaaaagaaggcattccaattggtataattctcttcctatataaatttgagtatagtaatatcgtactatcaagagggatgcagcgtcgatgtgtttgtgtatgtttcggtgctcaaagtgaccaatcatagtgctaccttgagagacactcaagctttaacatatcctttgagtggttttaactttgtttttggttgagttaggtagtcctctaagtgagcttttcatagagttcaagatcatcaaaaacggactcccgagcgaaaacttatggtcgttttatcctgtgcttttcggaaattctgaaaatggctgcgaaactgagataggcttctgttgattttttgcacttgtccgaaaatgcattttggaaattccgaaaattacagtcttggcctccaacggctagttttgagaggcttgggtatgtaaactcttccgccctttaagtggctgctgttctggggcaatattagacacatctaaagccaaatagctttttcccatttccctacctttgtggtgcctctttgtaagagggatttgagaaggggagagagttggattgagagagtgagaagttaagagctagcgagtttcactccatactttgagcacttgagttcatagcaaacaaatcttcagttgtgttagttactcttggggactaaggtctcctaaacggctaggtgttgccagtgagcgcccaagattgtggtgtgcctcgaaaagtttgcgaaggctttgatttcgcctctgtaagggaagaaatcaattgtgaaatcaaggagtgcatttgcacaacctcgtgaggaaagggttaaaataaacctagcctttgtggcccctcaacggagatgtaggatccgtggatctgaacttcgagaaacatatcaatgtgtctcctttcttgctttgcttattcttgtcatctctcatattgtgcttgagtttttttttatccaatcacttgtattcttaattaatatagttgatgaccttatatcttgcttcaatctcttgtttgtcaccttttgattcatatacattttatttgtttgagctacaagttcatagctagtgtgttgtttcgttatccgctgaattttcggttgaaactgaaactttcaatcccataccagaagttccgagttgaaccggaagttctcatcattctaatatattatgaagttgtgataatttttttaggaacgcctgttcacacctcccaggcgatatcaaggtccttttacctttccttaaaaaaagacgttgtattcatgcatattttgtgacagtgcattttcagaatcatgtgttccacgataactctgaatgctgaatataatgagttttatagctagacacggttattaacaaagtaggtagaattaaatagtggaagattgtgattggttgagaagtgaaggtagggaaattgaatggtggagggttgtgattggttgagaaggatatgttggtgaagatgttattatatttaggaacaaattatagaggctaaaagtttttatattttaggacggagggacgagggagtactgacttttgtaattctcttgtaggggtgaccaaaagagattcataatatgcagccacatcggacgtacacaaaatataactaaacttttttactgcagagcttataatatgcagtctctttggacagaggagtatgatttttttcttaaaaaaaatcatagctgccaaacaccaccttattacagagtcacttattaggtatacacgcatgcaccgctcagttattagtaatgaaacaaagcatatccagagaccaccttattacagagtcccaattcccttatggggagtcatccttaccaaaaaaaaaaaaagaaatatcgtggctgcatggaaaatagaaccttcatttcaggatttgcagcatcggcaggtttggcaatgttttttttctttttgaggtttggcaatgatttttagagtgaccatataagctgctactgacatcgtaacagttaaagcgaaatgtgccagcttcgaagccttgatagatttggctcggatggctgcagctatcctgcagaaacaaaaatacatgacaaaataaattagtctttccattacgctctagtaacatctacaccttcatagctctgcactaataaaaattatttagggaaattaaatgacacaattgaaagagcatcgatctcccaagataaattatcaaattaatagtaggcccatttcaactggagatagccaagaaacgagatatccccaaaaaaaaagtaaattttgtacatgagtctagacaactataatatccagattaatatacaaaaaatattttatttagatgcaaaagggtatgtaacctagttgttgcaatgaactgagttataccccaaggtactgagttccccatagtaacgaatttcaaattagattatttgaaagaccaaattctcatttttttaaaaaaaattaaaaaaaacatttagaacggatttacggatggagtactgaggaagcacaatacaataacatatatagaaaagcatggagagcgtgtccaaggttttacaattaactactttatacttactcggcattacgggattccacacaatgtgggcacttcgtggttgtactggacgagtaagtttgcttggcccctccaaacggatttgcaaatgcaaccttcccgtgattgcaatcaacagaggatgtcgcagtttttgcgcaggtcattttatcacttgaataagggcatattttgctgttaaagtaccttgcagcctgcatgagaaaggttcagagatcagaacatgaattcgatatatatatatatatatatatatatatatattataccgaattcaaatgttcaatataaaacttgtagaagagaaaatattgttggtccctagtccaatgtaaaactctgataataaaagatatcctagtgtagaattcacaagaagaaatattattttcccataaatgtatacgaggtattgtttgacatgccactgttccatataaaacatactccctccatccgtgattgcagtggcgaaactaggatttgaatactgtcacgccctgaagttcttctccctagcaaaaatttaattaataaattgtcgcaagaaattatttgtttaaaggcaagagagaatttttcttggaatcggcatgtggaatttttcttggattctacatgtcaaaatatgctaacaggaattttagtggaattttcagagccttggaaataattttagtggaatcccaagaagttggaggatatacctatagtacaagagtatcctgaggtgttcccagaagacctcactacaatgccaccgaagagagaaatcgagttccagattgatctggcacccggaactgctccaatctacaagaggccgtacagaatggcagctaatgagctagcaaaagtcaaaaagcaggttgacgaacagctgcagaaagggtacatccgaccgagtacttcaccttggggtgctccggttatctttgtggaaaagaaagacaagaccaagaggatgtgcgttgattatcgcgcccttaatgaggtcacaatcaagaacaaatatccgttgccaagaattgatgatctgtttgatcagctaaaaggagctaaggtgttttccaatatagacctgcgatcaggctatcatcagttgagaattcgggaagaggatattcccaagacagccttcgccactcggtcttgctctcttttcccccacactagagttgaagtccttctcagttgaagatgtcacaaagaagttggtttcgtcgctaccgtcaaggatgcctgtggaatggagtcgcccactgtagaagtcaagtcttcaggcttagctcgtttttttcctcttttttccgctgcatttgtaatcttttatatttttgtaagacgtggatctgtatgtcaataattgtcgtttgtgtaccctggctggtcctggacaggggtttaatacacattcagcttagaaattcttagttggtatcagagccgaccttgaccgtaggacaagccaactggaaaccctaagagtcctcttaaaccttttcatttgcacatgccttttgcacttggatttgtttcggtataattttggggtttgctcttttgatttgtgggaaaaatcttgatcgctatttaatcgtatttctcggctagaggcagtctagggttctagcaaaactttatttggaatttatttggccttcagtcgggaatttgttaggtgatatgcactaagtcgtgtctagattcgatgggcatttttatgtgtatattatagctacgcatctattttgtgcattaatttatcgtttagtcagttgcattagtatctttgtctgggttcatgaaaaatgttccacgcataaaaatcatcatgctcggcgagttatttgagtcatttgttgctttatttaatttggttttgagcatgtgttggttcctatccctctgtcctctttagatgtcagacctgttctctgatcgcaagcgctgctccaagcttcagagtcgccgcctttatccttaacattttcttagttttggctgcttgctagtttctgtgtttaggtttgttgcttgtgggttagtcggcggtcgatatcatgtgttagtggtatgactgccttaattaggagttgtttgctttctttttagttttttaatcaagattaaattaattgcacttaaatctataagaaagattagtttccaagccatctgttttcttcctttctcttatttctacctatcctcgtccagatggtgaagacagggaatgatccccgtgcctccaatgacgctaggggcagcgaagagcagaccgatggagctcatatcagtggtgcatctgacagcagttcatctccaccgcccgagaacccaacggtcactcagatgatgacaatgatgatacaacagatgcagcaacattaccatcagatgttgcagcaggcgcagcagaaccagcagtctggtcctccatcatcacacctgtccaaactgttagactttcatcatatccagccacccactttctcaagcaccaccaacccaatgtaggccaacgactggctccgtgcgattgagaagaagctgaaccttctgcaatgcaatgaccaagagaaggttgcttttgctacacatcagttgcaaggtcccgcttctgcttggtgggataactacgtggtgacccgtccagattcaacggaggttacttgggcagagttttgtcaaagcttcaggaaggcacaaattcctgaggggattatggcacaaaagaaaagagagttccgcgcactgcatcaagaaaccaggatagttacagagtacttgcatgagttcaaccgccttgcgcgctacgctcctaaggatgtgcgcaccgatgccgagaagcaggagaagtttttgtttggtctcgatgataaattgaccaaccagctgatctccggagtctatgatgactttgagaagctcgtggacaaggctatccgtcaggaagagcaacgcaacaaaatggaccgaaatagaaaggtagctcagatcagctttcctcaggggaacaattagaagcctcgcttcatgacgggacagctaggtgagccttccaccctgatcatccgtcagcaccatccttaccacccgagtaacttcaacaacgactacaacggtggcagtcacaacaacagtaagcagcataaccacaactcgacttcacccccattaatggcaccagctcagtcagatccgccagctatgtcagctcagtcagaacagctcaagaaggagtctgcaggaaagccaagaccctgcttcaactgtggcaagcacggccactttgctggcaagtgtccgaagctaaagcgcgttggacctaggttcgtccaggcccgcgtcaatcatgcgtctgcagagaaagcacaggcatcaccagaggtcgtgctgggcacgtttccggtgaactcatatccagcaacagttctctttgattctggtgcctcgcattcttttatatccaagagatttgctggggcacatggattatcggtagtggaacttaaaatactgatgcaggttcatacccctggaaatgacatgaggacagcacactactgcccctcagtgactatagagatcaagaggtcacggtttctatccaacctcatccttctcgaatccaaagacctagatgtcattctcggaatggattggttgaccagacacaagggagtgatcgactgcgcaagtcgcactatcaccctaagcaacgacaaaggggagaagatcaccttccgttctccagtgtcacagaagtccgtagcgagtctgaatcaggctgttattgaggatcagacagaaatagcggaaaaaaatcccaagaagttggaggatatacctatagtacaagagtatcctgaggtgttcccagaaggcctcactacaatgccaccgaagagagaaatcgagttccagattgatctggcacccggaactgctccaatctacaagaggccgtacagaatggcagctaatgagctagcagaagtcaaaaagcaggttgacgaacagctgcagaaagggtacatccgaccgagtacttcaccttggggtgctccggttatctttgtggaaaagaaagacaagaccaagaggatgtgcgttgattatcgcgcccttaatgaggtcacaatcaagaacaaatatccgttgccaagaattgatgatctgtttgatcagctaaaaggagctaaggtgttttccaatatagacctgcgatcaggctatcatcagttgagaattcgggaagaggatattcccaagacagccttcgccactcggtcttgctctcttttcccccacaccagagttgaagtccttctcagttgaagatgtcacaaagaagttggtttcgtcgctaccgtcatggatgcctatcgaatggagtcgcccactgcagaagtcaagtcttcaggcttagctcgtttttttcttcttttttccgctgcatttgtaatcttttatatttttgtaaaacgtggatctgtatgtcaacaattgtcgtttgtgtaccctggctggtcctggacaggggtttaatacacattcagcttagaaattctggttcgtgaatatctgggcgtgacaattacgagggggaactaaattgacaagtgatcataattatattttttcttaaaactaggaaggtagcccgcgcacatgcgcgtgcaccttatttaatgtgcatgaaattttgttagggatgtccatgtgtgggtgtttctctatctaaataaaaattgaacttatttaatgtgatttgaatgctggttataattttcttatgattacccttgcagcacataaattctaaactaaaattacttgagactgtacacttcataatttataagaaaatattatgtcgaaacaatagatgtagttcctatgagaaaattttggtcattttgacttctcgcatagatatcttacccccaaacatttgctcaaaaagtcatttttttgctagatagtatttgaagttttacatattttcattccattagctttgctagaagtttgaatgtttctgtttagaatgggttttcaaaccaattttttttttaaaaaagataatttttgttaaattttgattcttttcatgtacattttttaaagaaatttggagaattccactctatgaagcatatttgaaatgatttgatttctgcaatttgggttaaaaacataagtgggttgagcctacaacctgacatggggtaaagtcatctcttctgaattatctcacttcaattgagtaagaaatattaaaatagaggtcatgtaataaatacacattattatgttgtctataaaaaattaacgctagatggggtacaaattatgacgtaaaacacgatatcatttaaagttttcctctaatttattggtgacttcatagatcatatagataatttagactctatgatcatcttaagattatttatttatcttctaaattgatcattgattgataaaaaagcaccaaggtcatattatataggtaagtagcccccatatacatgttgagagaaattaataaatttgatagaaagtgttagggtctaacaggatataagtaatgggtcaaccagctttattaaaaattaaggtgggatattctgattttcaatgacgaattttagtatcttttttaatttattgttggcctcaagatggatgtgggtctagaatataatttttatgttagcatttaaatatagacaatatgaatattaatgtattgatttcactaaaaatataatagttcgaacagatcataagttgaatatatgatttgaaaagttataaatattttatttatattgttcctataagtgctagtaagagagagaaggacagggacagtgggatacatggctagacctaatatgtggaggttaatttgtggtttttcctccataaagattaatttaattttaattatcataatataaaaataagagaaaaggaacatcacaccgcacggggacgggaagggagggaggaggatgttttttcttaaaaaaatgattgatctaatgacctaaaataatgtgttggatgtttaagtcgaaaacaatggtcggatgttttgtttttaacttaagagagaccagtagtggtttagaaatatttataggatgtttaatgtatttaacattgcaggggccgagagtgaggaaataaggtttgtgagtttttttaaataaaaatctaataacaacctaaatgatatgtccatcgatttaagtcaaaatggtgttttgttcttaattttttatgattttctctaatttataatttaggagtgtcactgtgtggtttataagatggttaatgggctttaacgccgcataggagcgcggagggaggtttgggatatatttttttagaaaaagataaatctaataacctaaaataatgtatatagatggtcgaatgtttttttaaggttttctctaatttaagagtgctatatactcatcccgtcccataaaacctgaacttaaaataggatgtggcatatgcgagaacagcgaatttggacatgtgtttagaaatatttatatgatgttgattgaactatttatttattaggtgagaatataggaagttggctagatctagtaggttgatgggctttttaggcccataaaaaggtatttaatttaaattatatggggatttaaaaaaaggagaggaacggttggttggaggaatcgcacgtacgtgcgcgcggaggctcacgtccggacggagttatttttcttgtgaagatagatctaaatatgaaaattaatgggcccaccaatttaaataaaaatcaatggtcagattttactaattttttagagtgacacatggggacttaagagcatttataggataccacatggcagccttagagcgtttgtaggaagtttaatggacttttagtatataatagatagattatatgcaaatttcaatgttttctttaggtaatgatgcatcgtattaacatgaaaaacatattacaacaaaaaacataggcaggaagttatactgcatatacttatttatttatgaaatttagcatgataagaatgttgagcaaatatatcataagcggtgaaaatatcgaccgagataaaagtctagataaataggctttcatctatatcgattttgataaaatgattaacaaactatctatcttgcaagtattaaggaatatttagaaatttgagatggtagccatctaacgacatgattatgattatgagatattaataaaatgtagtattatacaaggaaaaggaaaaaaagaatggcatggcttgtgcttcttttggttagtgactaattaatcctacacgataaacataagaagctggaaattcagcatggcacacgatgtgatgctgttagctaagctgtgcatgcatcggcagaatcctatgacttgctctgactttgagtcactgacatgggccaactggatagagggcacacatatcagtgacacaagttagagaaaagtaagttagaggatctctatttggttgggttgtagtttaaggctgcgttcggtataggaagttcccaacccctcttcctcgttttctgcgcgcgcacttttcaaactattaaatggtgtgtttttttgcaaaaagtttctacacgaaagttgcttaaaaaaatcatatagatctattttttaaaaaaattagttaatacttaattaatcgcgcattaaatgctgctccgttttatatgccaggagtgaggttcccaaccctcactcccgaacacagcctaagagccttattggttgcctatattttctaataagccaaaacggcttattaagaaaactgtttaataaaaccaaaaagatgtggtggtttaggcttcagaatctataggctgtttaaccaagcccttcttgcccgtcaagcttggcgtcttatagaattccctgatatcctctatgcaagagttctgaaggcgaagtatttcccccaaggatccctaattgatactaccttcagttgcaacattttcccgacttggcgtgctattgttcgtgggctggagttattgaaaaaagggatcatatggagagttggtaatgggaagtctatctgcgtgtggagagatccctggattccacgtgatcactcaagaagacctatttctttgagaggtaattgttggctaaaatgggtgtctgatttgatagaccaagatggctcttggaatattacagagatcaatagatgcttccttggtatagacgctgagatcatcccaactatctgtctgtctcctcatttggaagaagattttttggcttggcacccagataagacaggccggttctcagtgcggagtgcctacagccttgcttgtaagctggcaaacactgaagattcgtcaagctcatctgtagtgggtacacacaaagcctgggactcaatctgaaagtgtaagatgccacagaagataaaggtctttgcctgaaaagctgcctcaaactgtttaccaaccattgtcaacaaaaaggtacgaaatttggagtcgacagatacctgaatcatttgtaatcaggagaagggggatactgctcacgccctctgcaggtgcccacacgcgaggaacttgctgtcagccatgttcaatgcaggcaacatctctcttgatgtggaaaaatctcgtttcggtaatgagtggctatttgacatgctggagcaactccctgcccatgagcacgagatgttcttaatgacgctatggcggaattggcatgttcgcaatgaaatcacccatgataaagcagcccctccgctggaagtttcgaaaagatttgttgaaagttacatagcccgcttttccagatcaaggaatcaccgctgaaagatgtggaaaaagggaagtctgtagcgagtttgtctgtcactggcagggtaagagacagagcttctgatgatcatcgagttccgaatcccgtattgcattaggtgaaacctcaggttggttggatgaaactcaatgttgatggatcctttgatgctgccctatgtaagggaggaattggtatggttttacgggatagcagtgggaatacaatcttcgcgtcctgtaaaccgctgaacagatgcacaggtgctctcgaatcagaactgcgtgcctgtgtagaaggtctgaatctagttctccattggaccctgctcccaattctagttgaaacagattgcatgtctgtagtgcaactgttaaatgatggggaaagggatcggtcggaattggctaacattgttcatgaggctaaacgcttgctagccgggactaggagaattctagtcagtaagatccatagaagccagaatagtgttagtcacctgttagctaacagggccaaagttgactctgtctctggggtttggttggaaggaagttgtaattttatcttacgtttagtgcgtgaggacattttaagagagtaatatatttcttctttccccgcaaaaaaaaaaagaaatacaagttaatttatatataaagcttttatatatttgttcgtagcaaggtaaaagccaatgctataaagaaatttacgttgaaaataagttgaaatcaactttaaattcaagttttaaaattcaaactttagcttttgctttgtgttattaggccaaccgatgaggctctaagcagttgtgttgggggaggctaggcctcctcccgccccctggcttcatcccttcgtgattgacaagtgcacaagcaaaacgaaagaaatatagtagtccctctaccccaatttgaccgtccactaagattttgaggttttttctaaatgaccatcatacaataagtgggagtaaatgggaatcgctgaatgcgctgcacgcatgcaaccgtatgcatgtaactagccaagattaatttctgatggtgtaactaggtatgaaaatggttcataaagtttcctatttcctgagaggtttttgaaacggaaagtgtcagtcagaattttatcggaaatttttagaaatggaaatgaattcagattttttttttcaaaatcggaaatgaatacggtgaggctactatcggtcgaaaaccggaatcggtcagaaactttccggagataaatttgaaaacttttcgaaaacagaaactttttatatatagcttattagcttcagccttctctactctatatatgtttagatttctacataatattgagatggttagttgaatgtagataattttttagtacggtgctttagatacgtgtccaccccctacagtagcaggctcaccatgagcttctcactaggctcccgcgccgctcccttcctgtctcccaagggtgtgacctgaggaattcccgcgctcacaccgtgatctccgccggagattcgccggcgacagggagcgccgccgcgtcgccctagaatcgtcagtccatcgcctgacatactcttcagtattcctattccttttcatatgacttaaaaatcgatcttatgtttactacaccatctaataacaataaaaatactaattaaaaaagcgcaaggagtatcatttaagagcgggttgtttcatgtgtggttgccaccacttccacgtcgctaacagacttattaattgtaaaagtaaggtactctgttcatcgtactccgtacagagtagcatcaatgatagaaacttcaccttttttttaatgtttgataaaatgggatgcgtcacctacggatggaccaacggattgttggtcgttggtatagcaatatcaatattattatggctcttagttgactcaactgacaagtctacgcctgctcttactatttaagaagcttccaatgcgctaacgcagcccagcgatctgcgcgtcacaactcacaaagccggggtagcttgaggtagtggtgccctggattctaaggtataccttgctatacactgatccttatgtaagttcgtctgtaatatatacacgtaactggtaaaatttgtccgtgcaattgcactagctagtttctaatattatttcatttcaagcaaattagttacttgctccggcctaaatatagcggcctaatttgatatacaaaggcagcaatattttaaaacgaaaaaaagtgcgtgatacatatataatataatttcttgatattgtttgttttttcacgtgccctactgcacatttatacctgcgaatatgccccctttagcacattctcaaaagttggaagccaacaggaaatctttggtgtcgctaaaattcttaaattctaggtgtgtttagttcgcaaaaagaatttttttagttgtcacatcggatgtttgactggatgttggaaggagttttcggacacgaatgaaaaaactaatttcataactcgcctgaaaaccgcgagacaaatcttttgagcctaattaagccgacattagcacatgtgggtcactgtggtacttatggctaatcatggattaattaggctcaaaagattcgtctcgtgatttccatgcaaagtgtgtgattagtttttatttttatctatatttaatgctccatacatatatccaaagattcgaggtgacgtttttgggaaaaaaaaattgaaaactaaaccatgcctctttaaaaaagttgtgtcaaaacctgcgcaattttagatactagtatttaactgtgattggtggcgtccatgcctcctgcaatatacttgccatgaatgtccacgaggatattttatattactccctccgatttcatattaattgacgttttagataaggttgaagtcaaactttataactttgaccatcaataattttaaaaatatttagtttaaaggaactagaacaatatatataaatttgtctttcaaaacaccataataaaagtaaacatatatttatttattatatatattataatagaaaaataaaggtcaaagatatattttgtagaccgtgttcttgtccaaaacgttaattaaaatgaaaccggagggagtatataaaaaagaatagaatccattccagagttttagcactccagaaattttggaagttcgattgtgaaatgccaaaactgtcatcaatttaaagctgccagaaaaagggtaggtgatatcaatatattgtcgtgccaaaaatatataaaaatatatggttgccctgattcctgtgtgaagcaacattttcactgcactgctccaaacacgccgaaggaggaatcaattcaccatgatccactctagctaggacccgtaaaaaatggacagtttggtcagcaggctactccctccatcctagtttaatcatcccctaactaaaggcgctaagaacaataacagcaaaatattcatcattcttaaaattaatcctctcatggattaagtgttccatcgcttcgtgtcttatggattgctaatggtttaaatataatataaattaatcttgtttggttgcaagtaacacattccaatgatacacatttagtactcttaatttgcacaaataaacgaagatgatgattattttgaaaaggccttaaaaatattaggggatgattaaaatgggatgaaggcagtagtatttcagagcttgcttctccatgtgaacattttgtcaagaatgagaatcatcggtaattcaattcccgtaagggctaatacgtgaaacggattccaacatatattagagttagggctccagggtgagctaggtatggagagggccagaggggacgctagggagagaaaaaaagagagtcaggagggcttttgtgctcagatggttcgggcttctaaattactgttttatattatgataactagctgggtggtccacgcaattgcgcggctagccaaaaaaatcatttttttaagtatgattttacttaaaatttattaaatagctatctcattgttaagactttgaaagaccaaaccttatcatcctcgtgtttctaattatatagttttaaaaatcacaccaattgctaccccttatgtcatcttctttatttgcttgctcgatctatcactatttctattcattcatcttggaacatttaaaaattagattttatagtttttagagtttattgtcacgttgggtttcgtttttataatttctagatgtcccgtcaaacgttgccattatactcctatacagcctgtccactatctcttctcttttattgtcattgagattttaaaaatcgaactgtgacgccccacacttttatctttagtgataaaagtgtgagaacatagattattatttaacaaccattattttgccaaataataatccaccatcagagatcgcaacagagaaatagttagaactacctttaattcatccctaggagcattaaggtcatctctactccatctagagtacactcataacattgaatagagtttgtagcaactccccgtagactcccatccaggagatagtcgtgaatcacgatttaatttagcactgcgcaggcttgtatcactgtacccatagctactcttaacatgtttgactgtcgcacttcactagatgcggcaccatgctaagagtacagaacttttcccctacttcaacttactacactccacgtttgtgttgagcctatcagccctccacaccaccgcgctactatatgcgcctggaatgcacttcatcggcattcatggggtttatatcatctcccatcctactactacgtacccatgtggagtataataaacttgataaggtaccaggtccagcccgtcttaagacgaatctatggtcgacacggtatatacggttctttgatacgagtgagggggtgattagtccttatatttatacaccgtatgtagggagagccctgacctgccatcatcatcaatcatctcatccctgagctccccctacccaccatactagtatcctgatgatctccatcatcatcggcttgtcaatcatatcatcatcgttcatttcattatattctagaaaatactttttgatgcaatactaggagaaatatttttatgaaatagatttttaagttgaaatagaattatcatctaccaacatgatcaaaagagagacttgcctgagtttctgtagccggtactatcaaatgacccaatttctgactctagccttttccctgcattttattgtatacattgattttcaattaactttcaaacttgaagaatataattggcttatctatctatattacagtgcacctaaaattctagcctgatgtacaatttctagcattccattaatttgtattgagtatatatattagttacttgatttaaactagacttgatttacagatttattgacagagttttgctaagcttaatgttagtgtagacaactagtgtgcactaagcaatttaacccttattcctgctctcctcacttatgtctctctctctctctctctctctctctcgcacatacaacaagctgcatctagttactcatccccttcttccattttcttggctgttgctgctgctaatggctttcttcttccccaactctgctcctcccttccatctacagcaccacccatggcgctgccaccccggcgcccacggaggtcgacgccagccaccaccactacacaccccaagctagctcactgcaaatccccttttctccccctcccgatttctcctcttcctcccatggtccaagccctaccaacagcgtctgctttctctctctgtgtgtgtccctctctctctctcatgctaccaaatggatgtgatgccactaatagtgatgtgaaagtgcaggaaaatagtgcctcgtgccatggctgctctatgaggtggcaagaatggcaagatttgaggggctcacctttgtctaagggacaagttcctccatggttgtgctcccgtgttcgtcctcgccaatgtgttggtctcttctcctccttgatagatcatctccttgtctagccaatttttcttctccccttcctagccgacatagagatggtatgagtatttggctgagaactaatttggctactaactattgggattgagggattggttcttgaaatggattgggcagaatcttgcattccgctgatttgtggattttgggactttggctattccctcctcgctccctattgctctcctcctcccctgatctgctcactcctcaccaagtgcttggggctcatatgcatgcatcagtgagcaaatgggcatggctgtagccatgctttgactgcttgactgagaggtgatgaggttgtgctactacctttgtggccttgtgtgagtcctcctatgtgcagctatgtgattggtggaaaattagtactgctggtgaattgaggtccctttggtgaggttacttctttatatgagatgtgtgacttcttagtgttaattagccggagccggatgacgaacccaacttaagggaggggtgccagacggtattagccgatctaggtatctcggtgaatggttgaatatacaccacttcgtgtatgggtctgacggcaatatttatttacatattaccttttgtgcataaaagggtcaagctatgcatgtcctgtgcaaccgtatattcaaatatatgatgtattgtattattagtgtaagtgtatgtatatgctgactgtttacagtggcgtttgtttgtactatatttccaattatcactattatattgtggttgtatattggacattgtttgtttgtttaacttcgacgaatgtgaatttcataaattttgagtggcttattcttatttccaacaattttgctagttaactaattaattagtgatatatgccacttaatttttaatttttaaaatagcttaaatttccgggtaacataattatagtttgggtttatttttactttccaaaagtcccgccaaaccatcagcggttttgccattgtactcctctacggctcgctcgctgcctcccttctttattgccttctttattgtcattgagatttaaaatagaacatgattatcattggttttttttactttttagaatttctaaatctttaaaaattggacttgtagttttattttttataatttttagaagtctcatcaaacgatgccactatgcccctctgcagcccgtccgccgcctactctttattgtcattgtgattctaaaaatcgaacataactatcattacaattcattttttattttctagaagtcccgtcaaccgtcggaggctctgcaactatactcttatacaccccgctcgttgcttctcctttttattgtcattgagattttaaaaatcgaaaatgattatcaatgtggttttctttctttatactttctagaagtcccggcaaccgctttacttgtttacttcacggcatacctgatgtccctccttttaatcgtcattaggattctatttggtgttttattaataatttttatatgccgtattaaccaccaccaactctactactttatagccatgttacttaatttatttcgtcatgtgttttagatggtcttttctttcaatagtctttatttttatcacaaattttagttatttataaattttattcctaatataaatcttttttttctaatttcagaatttattttttctaaaaaattagttaatattgtattgtgttcttttaatgtttttattttttattttgaattttatttgtttcaaaattgtattcctacttgaactctgttttaaattttctaattttggatattattatatttttattcgaaattttaattaatcttgtattgggttcttatatggatttttctttcaatattgcttctttttaattacgaatttcagctaactacttgaactcttctttattttcttttgctaatttcatatttatttttatttttattccgaattttaattaatctcgtattgggttattagatggactcttcttttaatattccttatttttaattccgaatttcagctatttttaaattgtattcctacttggactctcgtttccttttctaatttggattttattttatttttatttcaaattttgattaatctcgtattgggttcttatatggaaacttcttccaatattgcttatttttaattccgaatttcagctatttttaaattgtatttctacttagactctcctttccttttctaatttgtgattttattttacttttatttataattttgattaatctcgtattgagtttttatatggaaacttctttcaatattgcttatttttaattccgaaattcagttatttttagattgtatttctacctggactctccttttcttttttttttctccgattaatgtgggaatttctaacccccacagcgaacgtggtgcctcctttcaaagctattttaataatataatagatagatagatagattaccgtatttctaaatacaccaatatttattatctatttctttatttgacccataatttagaagcccatcaactcctcaaccaaatatatgagtgcaaagttaaaagggagacaatttgtaatttgcatagtgtatccttgaattaattttcttatattatatggttatgcgaaataaaatgtgtgattttagatatttgttattgatttttgtcgataccaatgcattttcgttcatattgttctgtttttggtttccgatattattatactgtttttattttcgaatttaccgttttcgtttccaagaaaacaattgggatgttttcggacctttttcatcccaggtaagtggtcaaggcgcgcgattgtacgtccattacacgcactcggtaattccagatgcaaaattgatttaccgctagtttccaatttccaacgatgcaggtaagatccacagcaacgccatgaacacgcaggtcgacgtcgagaatgtggacgtggtcatcaagcctagaatggtacctgcccatcagggttggcagactagcctctgcgactgcttcggagacggctgcgaatcatgtatgcaaagctacgactgactggatttttctggtttggtggtacaatgcaatgttttttccgtttcatggcttaatttctcgacctgttggcagtttgtttgagtgcttggttcccttggttgtcgatttcctgcatcggtgaaatcgtcgatcaaggcttcacaggtaggggtcatctcctctcccatagccccatccaaagtgctttgctttggaccggttaccgataaaacagaagagcgtttggattcagatataaaattaaagaaaccatcaaactgaatttagatcgaattaatatccgctgatcaggtggttaattaattatcggtattcagtttcaaaattttgcattttcacgcttattattatatccggttacagatatgtatgtgaagattttttacatttgcttaccgatatgcatgttttctctcttgtcaatttccttttggtctcctcaccaattagagtggtgctgtatctgcttcatctacctcattgccgcttatttcggcgtgtggtgggcgtacgcggggtggtaccgcggaaagctcagggcgcagtatggcttgccggaatcgcccctgccggactgcctcacccatgtcttctgccactggtgcgcgctggctcaggagcacagggagctcgccgcccgtggatacaacgtgctgaatggaacttactccctccgtttcaaaatatttgacaccgttaactttttagcacatgtttaaccgttcgtcttatttaaaaaagtttgtgaaatatgtaaaactatatgtgtacatgaaagtatatttaacaatgaatcaaatgatatgaaaagaataaataattacttaaattttttgaataagctaaatgatcaaacacatactaaaaagttancggtgtcaaatatttaaaagggagtagtatactccctgctatatatgcatgtgccgctttagacgacactgccaaggcgatgcaaaccccaagatctaacggcgttttctttggcgattggcatatgcaggttgggacggccggccgcaggtggctgcagtaccgcctccgtcgcgtagtgcgcccgcagtccaggctccgatgaggcgatgaaccaggagcaaataaatagctcgctccgtccaccgaacgaagccataagataagtggcccagtgcgagctgtctatctaccaaaattataacaaaattataatagaaaaaatgatacctcgtgatatttttataaagactgtaaaattacttatctatatatctatatccaacagctgtgtaaagaagccaggcatctgaataatatttgacatcgccctagtttgataaactaggaagagaagaaaagcccgtccacataagcaggcatatgtttctcaaactttttattatatatcttaaatatgtgagatgtatatctatgtgtcttctttaagaataatattattctactttaaatttgttgtatttttttttctcactataagtttataagttttagattgctctaaacgttggttatggttttattgcaagtatccacgcagtggtggatcgaagaattttcttgaaactccgcaaagctaaaaatagataacaaatgtacacaatttcatactacttcaaaaaacatttactatgaacgtgattgtgattttttaagcatttgctttgctggtttgcttaagtacggtaattaagtacttcctactgttgtatgtggctggatggtaaataatcacataaatcaagtcctaatctactgctgtgtgcgttgaagcccgggcagctgcccatgtggctccgccattgtatccatggaacaaattctaaactaaaattgttaaaactacagaatcccaagactatggaatcttgaatttatgtaaaaatatcgtgttgcaataattctgttagttattgtgaaattatgaaactatagatgttcttttgaattttttagcatgcttctagaattcaagcttctaattccgcttcagagtgcctcgccagcatattctacgacagaaagtttgacgggtgtcaattggaaattccacattagctagggaccggattttccagccggcagcacggagaaggcactgatgatcctaggtcattggtgcaactataacctttgaggtgcacacgatgcaaaaaaaaaaaaaaaaattgaggcacacacgacgcaaaaaaaaaaaagagaagaggctcgattcggtcgaatccgatgctttgagtcactccccgttgccccagattacaaatcgaaaaaaaaaacaaacttctgtacatgctaaactttctgtacaagcttaatcacatttttttaaaaagaaaaataaactgttgcacatgctaaatcacaaattcaaccaaaaacagaacctctcgtcatcaaacggataggtgacgtgacatggaaagggaaggggagcatggcaaggtacccagatctagcggtcattgagctcgagacagcgccctcacgtcaccccaacgtaggggaagggggtgccctacatgttgtacatgctgtacatggcaaggtacccggatcttattgatggcccccgcagcagacccgtaccagtggcaatatccgcttccccttccccatccccttccccttctctacctcctccctacccctcaccgcctccggcgaacaccgcgccacggtgccagtggcctgcacggagggtaagtgcgcttggggtgggggggggg

SEQ ID NO: 8071 - DNA, 30090 bp, Oryza sativa
caaaacacaaaaatacgattccaattcacgcatctaacccccggatgtataatatttcttttagaataaaaaaattattaaagcacaaaatgataaaccaactactgacacttcaatttatctccttatagacaaatgtgttccatattatcatccaaataaacatacttcacaatatgaataaatgttataattaaaccaatacatatagttttcaccattcagcatctgtaaggcataatatttttttatggcatctcaggattatgacccgggttattttgcgcacaatatttttccctttttggtaaattagaaaacaaccccccccttcccataaatgtttgacacggttgaatttttaaacatgtttgaccgttcgttttattcaaaaacttatgtaatatgtgtaaaactacatgtatacataaaagtatattaatcaataaatcgtatgataaaaaaagaattaaccaccatttaacttattttattaacacgaacggtcaaccatttttcacaaagagaaggacgacaaacatttggtgatggaggtggtacactcctcggatgagaattacaccaccccatgtgtgtcaccatgagtccggtgggcatccgcctcagtagcctctgtatccgtgtctacgtgcgtacagtcctcgccgaccgctcgtccatgcgctgtcctcgccatgcgtgttgtgcgagccgcgagagagaaaagagcgagagagatagataatagagagagaggaagaagagtatggcaggcgggtcctgcattttttaattaaaaaaacgctaactggattgccacgtgtgcgccacgttggacaaaacctctctgaattggttcgaggggggtaattcgtccggtttgcatagttggggggtgaagaatgtccgtttttatggttcatggggtaattcggacgaccgcgatagttcgggggatagggggtggggggttattcatactttttccatttatttttaacggcagtcttttgtctatttggcaccttgttaggatcgttcaaaaacttgtcacgtcacaattcgagatttcgatagcaaaggacacatgtacgtttttttagaagccttataaaaaattgttataaataacacaataagatggtgaatatattagtagtagcatttttgtctatggtgaagttctggagtagtgctttctgaaagataaacacatttgcaaacacatcatcgcctatgcgtcagcattgcaattttcttagtcagtacacacgtaaatgcaaaccaatgagcaaatgtaataatatatgaatgttccattgcacattccgaatacacaactgatcatgttgcaacaagttaccaagaaagaatatttaaatttaagccaaaaatttagtttcggtgatatatttggcccctctttcatctacatagtttaatactctgatcccttggtgtattctgatacaagtttcgaaaataacgatgaattgtcttccagaagttttgctggcgagtcatcctctgcgattttacctgtttacaacaacatggaattaaaacgggagaaccaagctattaaccgttggctactaattaaacacaaagcacatgactaaccattgtccagaagaatgaccttctcactatcaagaacagatgcgatcctatgtgctattgtaatcactgtgcattcgaaaaattgttgcttcagggttttctgaatcaaattgtcagttattggatccactgaagaagttgcttcatccaaaaccaagatctttcgcttctttagaactacccttcccaaacaaacaagctggcgctgacctgcactccagttgttgccattttctgtaactatatttcatattaaaatatcagttatgacttatgagtttgacactgtggagcaatgcattatagctttctgatatagatataaaacctgcagagtcaagcttgagctcattctttctaacttcatcgccaagatgacaagagttcaatgcctggataacacaacaaatataagttatgcattagtttgacaggtgcacattgaagaattaaaatgtcagtaaattaaaattaaaagacctcccaaatttgttcatcgctgtactcctccaaagggtcaatgttatttcgtagggtcccctcaaacatcacaggatcttgtggaatgatactcaatcttgtccgtaggtcgtgtagtccaatggtgcagatatcaaggccgtctatcaacacttgcccaatagatggctcgacaatacggaatagcgcttgaatcaaggttgacttgccactgccagttcttccaacgatgccggtcttcaaccctccgggtaaagtgcaagtaaggcctttcaaaacaaaaggcaattgtgttgcataccttacctgcatcacatacaaagcacttagaggaaaaaataacacttcaccagaaatttctgcattaggtgttgtatgttttccatgttaagaaagaagatatagtgttgtgagggtatttccacagtggtatgctggaagtcgtacaaaatagtatattatgaaagaggattgcaactctacagtactagaaaaaaaatctgcatgccaatttttgtggaataacttcgatataaaattaatttaataacacactgtttttctcagaaaatattatgaatagaaatgttgagagttctaatcaataattgacatagctccgacattgttagaagtgaacttatataacaacatagagttcaagagacaaacatggaggttgcgaagctcaatttcaccatttgtcggccactggcagtttggtctactttttgatattgtaaggagttgttcagaaggaataaacatgtattgaaaaattctttcaacggatatcattctattttccaaactacagagcactgcaatagcccacccttgcaacatgttcagacttaatccataagtgactgcaagaccagctgtctctgtgagaatacaataaaaataaaaataatagttagcaaggatggtaatacacataaagaactaatttgatcggaccaatcaaattaaagcccactgtacttacttgggtcaattagagcagctggcaaggtgaccagaagtaccaaggcaaatgcgaagataaaggatgaaagaatgtccaagcgaaagcacaaccattccattgaagcagaattatataaacttggtctagataaattatccatgaaatgactgacataattgataaactgtctttccttgccaaagcatctaataatatttgatccagctactgattcagcaaaatgttgcatcagcggagctctgcaaactccagtcaacctctgcaactccctagcaccatctatgtaatattgctgaagggaaggaattatggtgattaaaaataaaaacaaaacatgagtcgtattgaaaccaataatgccataggacatagttataattttgaaatatgattacaattattattggttaatagcatattttaagactaaaagtttgattgttcagaagaacatcggaaatgcacaagttctcctatatacagtagcatcaacctagaaattttattgggaacatttttgccaagaaaagaatcacatcatatatgtacctcatgtttttattatgtattatatttaattgctttgccatgcctttaaatttcaaattaaatctgtgaaaagaaaaaaacactgattttcaattttcaattgaatctgtgaaaaattgtcaataatgtcatgaattaatgtatttttccttccacatacttaaaaattataaactggaaccaaaaaatggcatccaacataaaatatataataaaaagaatacctgataccacagagatgctgcaataattgggacaaaaattacgaagactggccatgctacccgtgacattaaaataattgttccaagaagttcgataacaggaaatagaacatatcccatcaggtcaaaaatgctggtatccactgtgctttgatcactagaagcctacaattttgtttcaactttcatgattaattgaatatgaataaaaattctaatggtattccaaggagataacttcaattttctcattaaaataaagatggtgaaggtaaattacttactctgttcaagattcgaccgctaggagtggagtcaaagaaagacattgaagcctggaatatgcatcgatgcatcttatcaaatagcatcattgcagtcttacatccagccatgacaagaagatgggatcttatgaaaatgaataacgagctcacaaaagctaacgcaacatatacaagtaccattttcaagctattgactggaggattcacatctttggatattggagcagcccaagccatccaaaaattgcttccaatttgaagaacttgaaaaattatctgagcgagcaaaataagcggcacaagtgctccaccatatgccattgtaatatatttccaatagacagaaatcccaacccgccctttctccctttcttcttcttgtaccaactgaccattttgaacaatcccttctgctccttcattttcatccttttgcttatcttgtctgaaaagcatacttccactgtcaccaggaataagactactttcgggattgccacttgagtgttctaaactttctagagtagaaatgtcatccttatgggaaaatactaattttgtgaactcttctccagaattaagtatttcagcgtaattcccaacttgtattatttgtccatctttcatgacctggaacaacgaaatgaattgacaaggtaaaacgattgttgcgagtagaataaataagtagatttgatagttgttggaagctcaccatgatagcatcggctgatggcaaaaattcgacatggtgggtaacatacactacagtttttgaagctaagagtccaagtaagcactcctgaaaaatacaaggtcgtgttgaataactttcatacagtagatatactcttgaaccctgaatattgttcaagaacaggctacctaaaaactgtttagctgaaacatacaaaagatctgattaagacattaggtttctgtccacacaataaactatgcaaagagataaactgctattacttattttggaagttgggaaatgaaaaatcaaacaaaacaaacatgttctattcgtctaaggatttgataacggcactagcactgacaactgaagaaggttaaaaaaaaaccccctaaattgactgggagaaaatggcgttgaaatcatatgatgtaaatatatattttgtagtattagaagtcttaagtaccaacaataagttattagtttaagcattcagtgatgatttacacacatatagaaataggatttaaagatttgttttgaaaaataccttgaacaagtgcaacccagtatgagcatcaacagcactgaagggatcatcaaacagaaagatatctgcatcttgatacaaagcacgtgcaatttgtatcctttgcttttgtccgccacttaggttaatgcctctctctcctataattgtctgatcacctaatggtaatatttccaagtcctttttaagacagcatgcttcaaggaccttttcatacctttccctatgcagttttgtgccaaaaagtatgttatgttcaattgtcccactctgtatccatggcgattggctaacataggcaatcctaccacatgtttgaacatctcctgataacctcggtatctcaccgagtatgcatgacaacaaacttgattttccagatccaacagttccacagatagcaaccctcattccttgtcgaatacggaagttcaaatttcggagagtaggaacctcagaagatgtgttccaagagaactgaccgttcctcacctcaatcgatacatcagttgtacctcttggaagtttagttacaacatcgctcgatagttcctcgaggtgcataaaagagcatatcctgtcaagtgatacttttgtctggatgatcacagagactgtgtctgggatactattgattggtccttgtagctgcctaaacgttgctagagcagacaatactttccctgtttctaatggaatgcctagaagcaaacaagttccaaaggtgaccatagcaataaaagcaggagctccaaagaagacagatataagcatagctgaggtgtatacatctttctttagccaatgcatctcctccttcctcaactccatgatcttcgacaagaagaccatttcccatccttgaagcttgagaatgcgcatgttccgcagcatctcagacatagccctcattctagcatccttggcatccatcattttctcttggtaattttgctggatcctccctataggtagatttgctaacattgtcaaaacagtggcagcaagggctgcaaatgctgccaaaccaagagtggagtataggatcagcattgctagaataacctgcacaggaaacaaccaaagctcatgcatggacgaattgaaacccgcgacacgcaccgcatcaacgctcacggcattgatgatctctccacttgaaatgctttccctggactgatttgagagggagagacccttttggtaaatgatggcgacaagagctgagcgcacccgcacaccaagttgttgcgatctgaagagcaaatgccttgatgagaggcctttgatgaactgcgcaacaacaaaactcaacaccaaaatgtagccttctttagcggtccgtggacttcgattcaggtaatcaacaaagtactcaatcaggtatggaccaacatatgaagagacagtacggagtaaggcacaaactgcagtgaagaggattaatttccaggttgtaagaacaagagctttgaccagcttaattgttgtaacaccggtgtacttccctgaaccagaaactgagatgagcttcgcctcaaagttagggaggatgccttgaacactgtcattatcatccaaagttggcacatcatcaagatctagtgctttcctccttccaagatcaagtaacggccccatccaagaaaaagtgataacactaaagaatccagcatctgtgaaagctgctctactgcctgtggccttagacgaggaagaagctgcacggtccaatagtggctgatccatgataaactaataactcctgaacatagaacaacaaactttagcaagttacaactgattatttatgagaaagaaaagtataaaagtgttaacgtaaaaatgataatttaagtctgttcatggacattaataggattacagaaagtatagctaatttaaaggaaacaaacataactgtgagtgttaaagccatatgttgcatgaaaaacatccggatgaatccgcacgataccacagaattccattgtcacacatggtcaagatgatatcacaaatctccaagtaaacaaaatcgagacctagattacataaatagcatatgtaatatgtatgtaatctaatatgtgctaaacttcctagaagtaaaaaaaaaagaggatgtaccgaacttttaaatttagcaattgagtttttttttaaaagtatccgatctcaccatgcccatctcagcattgaagcacagacttaataaaaatagcaaaattagtgcaacagactgaaaatgagaatatatattacgcattactccttgcatacctcaaaaagaaagaaaaaaaaagcacgcatgtggaataggatggtgtcagccacaaatcgaaatctgtgcgaaatttttgtaaattaaccagatactggctattcggtgggagagatggaggagaagagaagttggcgatctcgagccctccggcaaagaggcggtggtggcggcggcgatcacggagagcctataaatgaatgcggcggtgagggtcttgagcccaccagcggggctagcgcaacggtgccgagccgaccgaagaggagcacggacgtgccgctggtggctggggcaagccgccgccgccgctgccgccacggccatccgggtgtctgcgtggtttttctcagtgatcagaagttggaaagaagccgcgtctcactgaaaaatttgataatttaacgcttttttccgttgcccaaattaatttaattgacgtttgtaaagatcgccgccacggccatccgggtgtctgcgtggtttttctcggtgatcagaagttggaaagaagccacgtctcactgaaaaatttgataatttaacgcttttttccgttgcccaaattttaaggagtgttaaattatcaaatatctccgtctcgctcgactcacgtgaccaaaggagacggaaattacctatgcttgcggtacgtgggttttttctaatttctcaaaatcttataaaacacatttgtttgttatagatttgggtggcgagtttattaacgacttaaaagtaattcctatcacaattatgaaaaaaaagctgttatagaacttatttgcaaatctgaaccccggttttcttcacagttcacacgctgtacgaccgtagcattatcaatgtcatgcctaaaggttattttaaaattgagtaaatttggagtttatttcaaacaaaacaataaaaatgttagttaagttcaaattagtgcggattacggatttcacatatgtaacgcttgaaaccaatatcataatccccgcttgttagtaacggttcccttcttccccttaccatctattttcctccatgtcataggcaactaactaaatatcttcaacgaatgttcacttgctctcgttctaggggtgggggtgggtgggcatgagttgcgcaggcagccgccctcctattcaaccggcggtgatttggagaactggtccggtatttcacgaggctcaaaatagtttgtaaggggtaaaaaacaatattaaaattcggggattcgtgaattaagagcaggtttattagtgtagtaagctaccagcgatagtatttgtccgtgtctgatatagccatcaagagagaagctcatgcgatgaactagctgtttcgctagctaaatggaaataaacaaacatttaattcatgcatgcacaaccaaattggcatgatcaaaactaaccaccatccttgtagctatgtgtgttgcctgtgctctagcgtgttagatagggagaaaaacagaaatacatgcaaactagatcgtggagatatgtcggaggcccaccaaatacgtaggtatcacccatatcagctgcaagcgagcagtagaggctcgtttcttacactatcgcccggtgacagatctagcgtccgctttttctctttcttcttttctccctcacccacataggatttcgctaatgtggaataacgtatagcctactgactcaaccttattatatatacctgctctaagaagtgtaagtcgccatcttcctcctcgtacatcgtaattcgttgtaaagaaaccacctcaacaaaaacaaacacgtgtgtttccatccaaaactcatcccaccagtaaaaccagatggatgaaactcaagccttgcaaattttccttctaatccctttgcaaagtaagggtatagcgctagtaaaatttagaagttgagttaagtaatatggactattttttttgaaaaatgaaataaaattaagatcgttctcgaatcgggtatacatggatgaatacaaaggaaaagaaaaaaaaggaccaatgtgaagaatcaaaatagagatgacaaagtctgcaggcatatacttacctgctagcttcttcgttatgcctaaaagcctaacaaatcgatcagaagatcggccgctccccttctcaacgccggctgctgcctgctatgcgccgtgccaaggccagccgtcttccacggggtttcgtagcagaaggggttcatatgtactgcactcctgtatttgtgtggggatttttttattacagtacaaagtacagatttgtttaggctaatccaatagaggtaataatcatatagaaggaaaccattgtattcgtacccttcttatgtggagaattaatgccccttttatttgacacctacagctacacaaaagtatgattagtcaattaatgaaatataatcgtacctgccatatattgaaatccaaatttacagccgtgggcctatttggcaagtttagagaatattgcgagtttatagaagggaaatagtagtgtggctgcattcggcatgtttggcgatggagaggactgatagttttgagaggaaattaattaatagtaagattagaatttgatttttaagtctagcatgttttgcgatgaagaggatggaaagttttgatgggaaattgattaatactaagactagaatttgactttcaaatcctagtatagcatgtttggtacaagtggtgcgaagtgatggaaattactactccgtcccataatataacaaactagtaccgaataggacactttatagtataacgaatccggacatgcttcctgtccagattcgttgtactatgaagtgtcacatctggtcggagggagtatcttcctagtttctctataaaagtttggttagtcccttcggatacaagaatgaatatatatgtctagattcatcaacatctatatgaacgtagatccaatcccacaaccgaaaaaaagtacaatttcctataaagcgaaaaacaaaaaaaatccataaaaaataaaaaaaatctagaaaacatctagaaaggatttatatttgtcgttttagtagtccatatatatctcttctctatctctaatctaactaaaaaatgcgcggaaagataaaaacggtttaaaaaaacacgtgaggaaaaaatatcagaaaaaagcacaaaagaaaacacgctagaaaaaaaggttttcgtagtaaaaaaaacacgcgagaaaaaaatatttccatcgtctgtaaaaaagcaaaataaaaagcatacgaggaaaaaattgtcagaaaaaaaggctaaattgatggacgcttggttggttaggatcatcgatttttttttcatctcctaggcttttgtttcatcatctattctcctgtattggagaccctgcacacctctgtagtcaattatcatactattttttgtgaagtatagctactattcttgataacatattatatggaaataatattagaaaataaacatattgtaattgttatttagaaaagagtgcacagtggctctattttgtgtagacttgaccatgcgagtcagtgtaggatttgattggttgtaagaatgagattaaaataatatttaagattatatgcatgttgtcacatgaataatccaattattttaggtaaaccaaacatcggtaaggttgccatcatcgaggttgggccattacatttaagatgttctaattttctaattttctgattgtcatcaatatggttatgtatgaaaaagtatattatcattaggttttttcatccgttgcaaccacaggtatgtttgctagtatatataaagaaactcagtcggacgtccatggtagagtgaaatgtggaaatcaactaaaacaggggagaaagaaatagagttggtttcaactttcaagaaaagaaaagaaatagaaaaatacacacaacaagggaaagacgagttaaaagaactgggacttttcctcacaaaaataaaagaagaaatcgattgggacttaggggtttagagttagcagtgatctctacgatcgatctgttgcattgccacctcgctcgtgctcttactttaatctgttgcattaacacgattgattctcaaactttggtttcaagaaagaaaaggactcaaattcacattgggttctatatataggccttgtttagttaattagttccctaatttttttttctaaaaaacatcacatcgaatatttagacacatgcatggagcactaaatatagattaaaataaaactaattgcacagttaggggggaaatcgcgagatgaatcttttgagcctaattagtccatattagccataagtgctacagtaacccatatgtgctaatgacagattaattaggctcaaatgattcgtctcgcggtttccaggcgagttatgaaattagtattgtcattcgtgtccgaaaaccccttccgacatccggtcaagcatccgatgtgacacccaaaaattttcttttcgcgaactaaacagacccataatttgtcacgcccagaaattcactagtaatttccgaactaatttgcgcataaaattcttgtccaggaatcaaccgaggtacacaaactgacaatttaatatacatattcatcaaaagaactaaagcgataaatacttactgaagaggcacttagtcctcacaacgaagaaatctgcagcggaaaaataaaaataaaatctggcaaagcttcggctccactcccacagcagctcaactggggtataagctaagcatcttctccttctggatcatttttcttcaactgagatttgattgattattgcaaggtgagtacatggaatactccgcaagccacacagcaaatatgcaagtgcacacggataccaaaggatggcataatataggctcatttgcaaaagcagcatttagcaaacatttaggagtagtaaataagtagagtaattaatcatcaatattaatcaacactgaatagcacacccatgctgcaggcccaaccaaacctgaacaaccaaccccggtcgtacagatcaaacctctaaaccaggaatttaccattccaaaccaggagtcaaattaattatcacattattatcattaatgagtagtgtgggactaatcacgaaaaacattgctcaacccacccataaccgcgggcatggctattcaaatagttttactctggccagaggtgtacaaatttacccacaagacataactccacaatatgtcaccatatcaccatgtgcccatgctgaacatgccaccatttgtgtagttgtgacaagacccctcgcatagctcaactcaaagcagcgcacctttcctggatcataatcaccccctctacaaccagaggcgtggactccccagcgacccccacggacttctcgccgcttcacagtctagcgccccacaatgagccttgctatacaaagtgtccagccgttgcccattctggcttgtgattagtacggttaatgtctcacaacagtagcttgcgaaccggtccttaattgtcatgagcatgaccttcaaaaccatgtgctcacaacccaccattatcaagttttaattatcaattatttatcacaacacgattaaccatcgtgagctaccataaagtatccatcattaagtaatagtgaaacattaatcatcccaatagtatgctagtgtttctaagcatgactaagcaattattctaatatatagtcgaaccaatatataaagtccaactagtcaaattataacccaaggtatcaaagaatagggtaatcaatgcaaattggccataacaaatgaataggttcacaccacccggtgacatttaaaaataaatgcatagttgaaataaatagagaatttaaatataggagcaacatgctcaaatgattgtgtttaggatctgtgtgacttgccttgcaataatcggtcttcaattagtcttcttgaacacttctgacgcactcacgaaccttcacaacgacggaaatgacaagctaacatttataacggagaaaaaactaataaaaaccaaataaacagtactaaaaagtaaacaaacatgtagatcatgattttagatgaatttagagacttgaacggcctcattccgacttcatatgaattagttatgaattttacaaaattaattccaattaaacctattaaagaaaacactattccaaattgattaaacaatttacaaacgatttatactgagattaaagattaaaacatcctccgaaaattattggaactaatttagtggatgatatatagtaaaaagaactaatatgccattgaaaagggataacatgatttatattgactttggatggctgagattaatcttgaccgagtcgaccaagatcggatggtttggattgatctggcaagctggcctcacgagataccgactcaacgagtcaattctacgtgacacgggatcaccgaaatgattaaccgaaaccggcggctctgaacggctctaaactaaaggacgactcaacatggacgaacgaacgaagcacggggaacacctcgttcgaacgaacgagcaaacgactcaacaatggttgcggctaaaccgatgagctagacacgattcacggtaaaaccctggtacgacaaacgataggccggtagaaacctagggatgcacctacggctttgcaactcggctaacggactacgggaagcaaacaaaccacgatgacgatgacgtgggatagaggcggcgttgcacaatttggagcaacgactaagcagcgacagtgacacggtttagcagcggcacgactgcgtcaacgacttggcaaggcgcggcagcagcaacgactcaacaatgacttagcaagatggctaccgagctacggcaacgcggcagcgacacaacgcagcagcaagtggctcggtcgctgcggtagcgggacgacatcgacttttggcacgcacgagcagcagctacacagctgtggcagggagcggtacaacggcggctaggcggctagcgcagcggcaatgctaagccaacagctaagcgcggcacggcggcggctactcaacgacacaaacaagagattaaaacctaaactgagggaacacagatagaaacctcaccaaaccaaagcgatcggagagggagagacggcgatgactacccggcggcaacacacggagacgacgatgacgctagacatacagcggattagattagattggattaataccctaggaaaaaaacctaaatcggtgaacggcatgggagcggtggttgcaggcgaaccacggcacaataatgcaaacgagggcaccgggagaaagagaaggcgacggcgattcttaccaacacttatgcgacgacgaacagtgaaggagatggccggcgacggactccaaagggcggcgaggttcgggtccacggcagcgacgattttccggcgacgagcagcggcaacggatggatggacgggcttctccccggctgcgacgctgtgggtggcgacggcaaagcttggcgacgacggaaggagcagtagggcctcgccggagatcaaaacgcgacggcgaacttcgggttgacggcgacgatggagctccggtgggtttcggctacggggaaggggtggacggggtggagcttgaccttgcggagccgagagaggcgacggcgtaggtcgtcgacggctgaggcggctgctaggggcggctggagcggctgccggcggtggacggagaagacgaacgcggcgacggcgctacaagcgacggcggagagagggagaggtggcggccgaaagaggagagggagggaactctatttatagccatgggagagagatatcgatcctacaacgagagaatcgaagccgggattttctagagtttggtttggagagataaactcgaaaacgaatccaaattcgcatcgaattcaaagggataaaaccggatttttgggggaagagatagaggaggataagggggatattttgcctcaactaattttggaaatacacgagagaggaggccggagttggagggggaaggcggcggcaatggcggcatcgggctctgtctccggccggctggaggttaggggcgactactgtagcagagggaaggaaaacagactttcagctgggcttcttttactcagcccgattgaaggagggacatgaaatggacttcggagaagggatagaaccagccgaaaggaagagagaatggaccgagaactaaaagtgaacttttctagtttcggcccggaaaggaaaagggtgtttttttattactttcccaattaaattaatcactgaaatgatctctaaattgttaaaaatacttccggtgctctaataattccaagaaaaattattaaaatacttgaacactataagtatttaaaaaaattataagaagaccatttaatgattaatttaatatgcgaatcattgctgaactgctctttgtattattaaaattagtaattgagctctgaaaaattcgagaaaattgcagagcgtatatttaattatggagaatttaataaaaattaaatgcagccatgatttatatttaggaaattttatttctcacatttaacttcacttgtaaattaatgaacatttaacataaattctaataataatttattaaataatttataaatcataaaacaaaaatcaggatgtgacataattgtacaatctcggattaattaattaatttagggatttgctagacaactgccggctagacaatcaaaaaaaaactcaaaagcttttaaaacgcacaatataagtaagaagataaccatataaaattgtaagaccaaactaaacttagtttcggagtcattaaattaacaaattaaatggctaaaaactttgttcttgagtttttatttttttttcttaactattttgttaatattatatctaataattgaagtcgattttaattaatcttgtaattttgtaggtttactaataacactttagcagtgttcaaaatacataatctatatattagctatacagaaatgtccggttttgagcttagaacatatccccctgatgagaaatgtgtaagaaacatcaggaatacatgttgtatctgacatgaaagagcaacaaagaaaataaaaagaaaaatatgtgattatctgctatatatcctcctggttatgcatggttttagttctgttccaaagagtgatgttgaacccccaccaaagaacaatcttcccaattcccacaaatgacagcagcattcgtacttagacatccaaccaaaccactcaaactcattctcaagcaatgcaactaaataaatgaaaatttaaaataccatattattttgccatggtttattaaatataaattagaaaaattctaaaccgttacgagtcattcatgttaaaatgcattttcaatcgtgtgctataaattactccctccatctacaaaagttagacatatttcacatttgagtttttccaaataaattgtttctatttgtagtctttattcacttaaggctttatttagttccaaactttttcatcaaacttttaacttttccattatatcaaaactttcctactcacatcaacttctaacttttttattcaaactttcaattttaatcaaacttctaattttggtgcggaactaaagcccaagaatctcagttactacctgttagctcggtacgacaccatttaagaatctcatcagacatctgcagcattttaatttgttgggggtgctaatgagctttcaagatggaagaaaaattgaaggggaaaaaaaagaacgcatctggcatactggatgctcaaaatcggtggaaggctgcacaacgtttgtactgcccaaattagcagcgagcagagccaatgaaaatctgtaaatcccccacagtaataaaggacatggaaatccccaaatcagctgcagcgagaggctctggcgccgtcctcgtcatctccacactactcctcgagtagtccatctgcacatgaacagcttggtggataggcagatcggacggtcgtccacgggtgatgaacgaacagtgtaacagttttactaatttgttgacaattagtaaaaatctattcgattttcaacttttttgggttcaaatttcctgaaaacttagaatttcagtctgccgattcttttaggactctgacatcttcatccttcctcagaagttagcaacaggcatgggattgcaacagtaattagaatagcttccttcactgttcttcgaaaaaaaaaagaaaaagaaaaaaaggagtcgaggacgagaagagagcacaccatcagttttattttattaagatagcagcgagagatgcatcaagcatcaatcatgaaaggtagagtagctacgatcaggtgtttgtaggaaatactctcaattggctagccacagaacatagccctgcggcatgtagtggcagatggcgtcgccacggcttgccttgaggagctcgaagtacgcactgtcccaggtggtggtgttgacgtggcacacggcgacggcagtggcgccgcccaggcccacgtcggcgacggcgtggaggtcgaccctcagcgccaccgcgtcggctggccggtggcagtagtacacctcgtatagatatggcatagggtggcacgccaccacggcgtcgccgccgatccgggcgacgccgtcggccgctaccacgtacctgcggggctccctcccgtgcacgagcgtggtgaccgcgcgcggcgcgctggtgcccagcgccgaggcggcgaagtcgagcaccgcctcgcgggaggtggcgcagcaggcgcgtggctcctcgccgccgccgccggcggccgtcagctcgctgcaggcgcggagggtgtcggcgacctgcgccgccttgtcggatccagggaggatgccgaacatggcgaggatggcgtccatggcgcggaggtcgaacggcacggcgtcgcccttgtccttgtagatgaaccttggcgccgccgcggccacgccgtggtcgccgtgcggcagcgccagcttcgtgccttccggcaagacggcgccaggatgcaacttcttcattaagaagagcatcccgcgctggatatgtatgcctgcagctgcatgaattcaaatatatattccatgaaaggttcgctgaaatgagtacaaaatctacctatatgttcttacctggatgagccagagaagacaaggcagccggtggagtaggaggcgcaacactacgtggattccagtcgactgggtaagcagcatcagtgaattgggccttgttaccatcttgttaacacaacagagtgatgggatcaatttgattgcattgctagtcaatgaaaatagcacatgcatatagcataaaacgactataatatatactacttactagaatgttgagcaaagatgcccggtgctttaggaggtgcaacactacgtggactccattttaccgagtaagcagaatcagtgaattcggccttctcaccatcttgtgaattatgtaataacagaattaattacagggtcaattttgtttatggtttaattaactactagtactagagaataccaatccaattgatgtagcataaaacagtacttacttggagaagcagggaaggtggctggttgtttaggaggcccatcagcacgtggactccacttgactgggtaagcagcatcaatgaagggagcattgccatcttgtcgatcatgtaacagaattaggggtgaatataattggactaaattactagtactagtaaatgggattaaaaacccactatgtataatattcgaggtagaacaaccctgcaatacttagagcatctccaatagcttctccaaatcgaactctccaaacacccatatagccaactctccatctgatttagctagtcaaactagatgctctctccaacagactctctattaatcctctccaaaataacaatggacccacacgtcagcctctactcctcttcttcttttctctcccccttccttctttcccctttcttttcttcccattcccttccctgatgccgacggcggccgcgcgtggtggctcgatgatgcggggaggcgggaggcgagacaatgtcgacctcccctcgagctgccagatctacaagggggcggcggcggagctcggcggcgacgtctcgcgacaatgaccttgacgacgacctggggagacgacgaccttgacgatgctcggggcggagctcggcggcagtggcggcgacggctcgcgacgacgacctcgacgacaacccggggcgacgatgacctcgacgatgctcggggcggagctcggcggcggcggcggtgacggctcgcgacgacgacgacccggggcgacgacaacccggggcgacgacgacctcgacgatgctcggggcggagctcggcggcggcggcggtgacggctcgcgacgacgacgacccggggcgacgacgacctcgacgacgacccagggcgacgacaacctcgacgacgacccggggcgacgacgacctcgacgatgctcggggcggagctcagcggcagtggcggcaacggctcgcgacggatctagaggagggcgacggcgagggcggcggctcgcgatgacctcgacggtggctccctaccgccgccgctgctcgccatcgatttttggcaagcggcggtggtagggatttcagcggcaaagggggagagagagcgagcggatgcaaagaaagagaatagggaataggtggggcccacagatggctagtgagtttggctggccaaatttggctactgaggggaaggatttggccagccaaatggcttggcaagttgaatagagaggctattggagtactttttttttcaagaattgacaaaatttaacttggagagtcttttgaagaggctattggagttgctcttactcggtagatgatgagcaacgaccagcgatggcgtggacggatcctgatctggtttccacttcgccgggtatgcagcatcagcgaattgcccttctccatcttgttatgtcacagaaacacgggttacttaaatgaattgctactgaaaacgacaaatacagcgtagaaatgacaatcaaacattctcactcggcttttctcaagaaaaagaaaattcttactcgtcggcagagtaggagaagccatcttgttattttgtaacagattaatggagtcaatttaattgatgtactacactgaaatgcagatatatagcacttaaacgacgcctgtctgatgatacttactcagttgatcaacacagttattacttaattactagaaaatcggcgtgcttattggcatgcttgcttaagttagcccgtaattttgtgtgtgtggagtatttgtatactgcttaattagaggttatttagaacgtgagaatttttaaagcaaataatccggtacttaaaaagttctatcagcatcatacctttaaagtacccttttagtgtgtttttagatttttttttgtggaatactgaggaaaaaacactgcatcatactaatatacgctaacaaattgatgaaggttgtatattagatgaatagaaaagtgtgttttatgaatatttcatctcacttttataaattcaaaagttttgcctataagctgttaaaaccatataattagaaggaaaatatgttcatgatgtttacacttgctactaattgttttatcttttctagaaatataagataaaaacaaagccaagttatatgtttccaaatctaacctaacgcaaattgtacttatttggattatttctcaatgacttttccaaagcaataaattggtataataagaaaaaatattgcatttttatattttgatttctttatactgcacattcctttttatatatttttattatttatttttttttcttttaaaataatattatataggatgctgataacatggcctatgtacttgccttgattttcactttaatctacagtaaccgtatctgttgttgaggaaatatgaatcataaaaatgacatcaatattgaacgtcgattattattaatttttccaatgtatcacaagttcccaacatataaatatgactaaatatgctaatagctttgtggctgagttttttttttaaactcatggatagctggtactgcagctggttcaggcgttcagttgcacatgcgtgtgagtgcgaatatgcagccggctcaaccggtcagcccgcattctcttgtgtatttgtgcacgcactgccatgggccaaggaccaaaggcggtaagcccattgggctcatttcatggactctgactaggatgccacgctagctatatataggtgcaaaaagttgttgaaaacaaaacttgcactattgacataataagtactgtgattaaatcatatatatttttttataataactctaagatataataattagattaaacggttaagaagtttgtttgtaataagcttttggtacgcgtacgtgccgagtgtttacacgagcggagtaataataataataataataataagcagcacctgctggagtatcatgtccgtggccgacgaacgacacctgcaggttggtgatcttgttgttcgtcctcgccgcctgcgagctgtcgtcgacgtaccggccggcctccttctccaactccgatgtcatcttcgtcgtcgggaagcgggccaagagactgcgcggggcccgggccgtcgccgcgtgcgcgcggcagcagccggcggagagcgccgccgccagcaagagacaggggaggaaggacgacgacgacgacgacgccgccgccgcccggaggctgaagcggcggcgagctgcggcgcactcgttgcccttgcccaccatggtctcgccaccaccagcttcctctagctaaacacacgtactgtgatcaactctttggaaacgaaattgaaggaaagaaagctagctagctaaacgcttgctgctgctgctgctgcgtttggagcgcgcggctatttataggaccgtgagcggcgagccaggcagccagagatcgatcgatcgagccagctacacattatattacacacacgcgtgttgcgtatacgtgcatgcttgcgcagttgcactgcttccgccttgtgaggcagctgatcaggtgagggactcggtcggtctctggttctggctgggtacgtctcgccgtgcaacagagctgcaccgtacgcacttacatatcctcatgcgtgcacgcgtacacgttttcatgctctctacctagctatgttgccatacaaaagtgacgcgacctgcatgtcagtaattaatgatatatatcaagtgagcgacgacaaatgggtttttgaaactgaaaatccagaaaccacatgttatgtcaggctatatatatacataaacgacaaattcccaaccgctatgctatatatacgtgtactcaaatactttatttaattttattactagccttttaaccaagtcagtcattattactgccatgtgtatatatatgcaacacattttgtgctcctattgtactttctcatctcacatctttatatgaatgaagggaaatggtagtttttaggtgactgagatttggtgttcacctgctccctacccattggattgaaatccaacgtttagagaattgtcttcaaccacttctcggcgatggcaacagtgatgaagagatcctcgccgatccctttatctttctcatcgccagagacatccgattgcggtacatgacctacggattagagttagggttttggggctagggttgggggaagccgtggggttttgggaagaaaggagcggtttctcccaggattagggagatggccttctggggtggcctgatcgacgatgagcggcgaggcggcggaggcgctgctggagacgcggagttagaggcacgcaggtgggtagggttggtggcaggggtgagggatgtcatggggtttggaggatgtggtcatcggcagtgaacccgatagcaccacgccgccgccagaagattagagaggaagagagaggtggccggtctagagggggctcgccggcaccgttgatggcttctggctagctagtgagccatggggcgaagtgcggtggcagtggaggcctcagtgctcagtaagaaagcaaggcgtggcgatttgtcctgagtctcatgtgcgtgcatgcgaactagaaaagagaagaatcgttaagggagagataatgagtatgcacaaatcttgatgcgatcctagtcgtccaaaaaagtgactgaaatttttcggatttttcatcagttacattaaagctagacaagaccttatataaatatgttataaagtatacttgtagcatatcttatgtgttactatgatattggattttcccctgtaactcacctgtttatgttttactgggatatatatatgtaatatgctacagtagacatgccctgtagttatgacctcactttatgttgccatacaaaaatgactcgacatgcatgtgaactaatcaagtgagctacaaatggtatttgaaaactgtccatcaagaaaccacatgttatgtcatgctatatctatacatctatgacaaattcccaaccgctacacatttctaaagcaacaaaatgctatatatacgtactcaaatactttacttatttttgttagtaatcttttttaaccaagatagtaactttcttcaattcaaaaattgaaaatcagattggggaaagctgtatataatactctcctaccgctttactctagtactctcctaccgcttgtacactataatagtgaagcgcagcagcagagaagtagccagtattaatgatactactcaaatgtaaatataaaaattatagggactcaattagaaaagtacaaacccaaaaattaaaatcatataaaaatggaatgctctcgaccggtaggttccgtttttgcacacagatctttaatccggcacatcaattttttttcaccaagatatatgagatatcacgatatagattgaaaccgagaggagtgtccctgggatctcggactcaaaccgatgccgaaaggagtggtgtgttttattttccgtttttaaggaggaatccactagaacggataccctcatctcaattgggcggtaagccccatctcaatcgggcatggcggccgtcacaggctagaagtcactgatgtgaagagttatctcaatcgggaaaatggccgtcacggatgattctatctcaatcgggccctaagtaaagcccgtcaccgatagctttgacccagacgaccagtcaaactatagcctgtcacagatgaactatctcaatcgggccacaactagcgcctgtcacagatgaccctgatctgtgacgggcattacctatagcccgtcacagatgagtcatctgtgacgggcattaacccgtcacagatgagtcatatgtgacgggcgttaactatagcctaagttaatgcccgtcacagatgagtataattaaaaaataaataaattttattttttggctagccctcactcgtgtgcacccacgcgagaagttcaaacttaatgttaaagttctttaaagattggcttccgaaaaagtagttgtaacatgttggtatgagtattctattaatcctattatgccctaggccaggatgtcaaattggggttattaaatgatttcaaatggaaaagtcaccaaaaccaaagttgtagaactcatcgaggtgcaaaatttttattttgatcatttctccatttgactctatttaaacaatttgaaatttgaaattcaaagtttgaaaagttcaaatagaattttagatcagcgaacgacttcaactgaaaaagtcatcaataacaaagttgtataactcatcaaaatatataacttttattttggtcatttttctatataacattttttgaaccgtttgaatttgaatttgaaaatatgacaacttcaaacaacattttcaaatactaaatgatatcaactgaaaaagtcatcaaaaacaaagttaaataactcatcaagatctacaacttttattttggtcatttcttcatatgacaaagtgataataacattgttcacaaaattgacatatctcttatctggttttataaactataacacatatatgtaaaatttgtgaataatattactaacattttatcggatgaagaaataacaaaaataaaagttttagatcttgatgagttattcaactttgttgttgatgacattttcaattgaaatcatttagtatttgaaaaatgttgtttgaagttgtcatatttttaaattcaaattcaaactattcaaaaaaaaatgttatattgaaaaatgaccaaactaaaagttgtaaatcttgataagttatacaactttgttgttgacatttttttcatttgaaatcatttactacccgtaaagttattctgacttataaaatgaattattatactgcactaaattattttgctatagtcaacttacaaatataaacatttcatatgaaaaatggaaaaatagtcatcggtgaggggatttagttaatgcccgatagagattaagtatattggccgtcactgatgagtcatctgtgacgggcctaattgttatctcaaacgggcctcaagttggtgcacgtcacggatgatggtcatctgtgacgggccacaacttgaggcccgtttgagatatggaatgttatctcaaacgggtctaaagttggtgcccgttacagatgatggtcatctgtgacgggccgcaactttaggcccgtttgagatatggaatgttatctcaatcgggcctaaactacggcccgtcactgataggtgtcatccgtgacgggctttagttttatactcatctaacatgtctgtgcaaccatatctcaattgggtacttttcggcccggttgagatgacttccttgtgacggcccgctatttctaagcatattagagcccgtcacagatagaaggatctgtactagtgatcggatatagagtcggactttttttttcgtttctgagagagagtcgaacttttttttttattttttcgctatttattttgttttgaggaatgaaggaaacacctcttttttacatagtagagattaagtagtagagaatcgggctgatttttttttgattttttttcgcccttttttaccagagttggattcatttttcttttcgtttattttcgccctttttctggatcggacatatttagtttttcttttctttttccggttttttcgcccggtttttagatcggacagattttttttttcttttttcgcccggtttttttacgtttggtttttcttttcttttccggtttttcacccggtttttttatcggaccgatttgtttttttttcttttttttttagtttttttcggacgatggaagcaccttttattttttaagtagtagagacagacatagagatctctacttaaaaacaggaaattcccgtcctccgtaaaaaaaagaaaaaaatgtccgactcaaaaaaggtaaaaaaagagaaagaaaaaaaagtccgacttaacgagcgaaaaaaagcttccatcgtcagtaaaaaaaaagaaaaaaaacatctcttgtccgactcccgtagaaaaaggaaaaaaatctcctagtaaaaaaacaaaaaagttcgtttggttttctttggcaccggtatttttttctgttttttctttgcacgcaaaagagtttttttatgcagcgcacacgctaagccttttggttgtttgtcccctttttttaacccgatctgttcaccgcgcgtctcccagacgcttttagtttttttcgtcaatcttttttgtcaccggttttttctcccgtgagctttttgtttttctcatctgattttataatcccatctgttcgctgcacgcctcccgaggtgaaccctagcgctgtgcagttgccatatcgatcgtgtgttttctcctccaatttgattgcaaaaatcgattccccaatcctctctcatcattgtctccatgattttcccttcgattcagctttaattgccggatttaatctctattttacacttgcctctctcatcattttctccataattttcccttcgattcggctttaattgttggatttaatctctgttttacagttgccgatgatgacggcgatcttccccagtcatttttatcctgagttttacgctctgattttggggaaaacggaaagagtagatcgagtggataaaaaccctcgaccaattttggctgatctagaaagattcggctagatttgatggggcgatttgattcggcaaatgtacgggcacggacacaggattatcttcgggaggttgaagatggtagtcatattcgggaagttgaagatggtagggtcgaagagaagcagatcaaatggagggaggtagcgcactagcatagggctgaaaaggaaggaaggctttcgaccgaaaacccaggaaatattttcattaatttttttaattataattatagcgatcccaatgttatgatttttattaactttttcaatcatagtgtatagtgatcccaatattttaatttattactcagctcttaatataacactgaaaaaagtcgttacccgttgcaacgcacgggcatcttttctatatattgagaactcataaactttatcattatttgagaaacaggtaggagtagatgatttatgcaattcgctgcactgattgttttcaaagatctagcatagcagaaattgttagattactgaatgaactttggaagccatagtaaaaaaaagtgacttaacaaaggagacaatagttcattagcccagttaatttattttcaacagcagacttttgtatgttggtagcttgttaggatcgttcaaaaacatgtgacctcacaattttagatttccatagcaaagcacgggtacttgactagtcttataaaaaaaattgatgcgtctatgaatcttatataacctatattagtagcattcttgtctatggtgaacttctggatatagatgcaagcggggcgggcaagcggccttttttgtcccgcttatcccacttttagtttttttgtttttctgaattgtgtacaattatgcgaaaaatagactagcaagtgggtttttatatgggtagcggaactacccacttgcatccgtacttctggagtaatgctttctcaaacataaacatctctgcaaacacatcatcggctatgcatccagggatttccgaacaacattgcaatttcttagttccattgcacattccgaatacacaactgatcatgttgcaacaggttaccaagaaagtatatttaaattcaagccgaaaatttagtctcggtgatagacttggcccctctttcatctactaatcatggtttaatactctgatcccttggtgtattctgatacaagtttcgaaaataacgataaattgtcttccagaagttttgctggcgagtcagcctctgcgattttacctgtttacaataacatggaattagaacgggagaaccaagctattaactgttggctactaagtaaaccttaggcacataactaaccattgtccataagaatgaccttctcactatcaagaactgatgtgatccgatgtgctatggtaatcaccgtgcattcggagaattgttgcttcagggttttctgaatcaaattgtcagttattggatccactgaagaagttgcttcatccaaaaccaagatctttcgcttctttagaaccacccttcccaaacaaacaagctgacgctgacctgcactccagttgctgccattttctgtaactgcatttcatattaaagtataagttatgagtttgacatcgtggagcaatgcattatagctttctgatatagatatgaaacctgtagagtcaagcttgagatcactctttctaacttcatcaccaagatgacaagagtccaatgcctggataacatatatacacaagtgaactcttttgcccatcgaatagcagatatgagttatgcatatttttttttaaaaaaaacataggtgcacatacgaagcattacaaattatactacctccattactaaataagtatatttctaacactcaagttttgtccccaaaataagtatgattttaaagctaactaccctctctcttcaatccatccctcatttaatttggggtatgaatgtcatgtattttctatagaaatttgtctcccatatgttatttagggatgaaggtactagtaaatttaaaataagaat

SEQ ID NO: 8072 - DNA, 19362 bp, Oryza sativa
ccccccccccctaagagcaggtacaatagcaggctataagctagctataaatatattttaaagagataaaataggagagagaagagcaacgggctacagatctataaccagctgcagcacggactttaaaacgtaatgtgtgtatgataggtgggaccaggaattaatagtataataagcactattgtatgaattgactattaaattggctatagatgaattggagcttgtagttggctatcctattaaacttgctctaaacaccccctaagcacaatgaatatgcagtcagcaaaatgggaagtacgaggagaaagctaccagttcattaaaaacgcgaacattatgctgtaggatttttagtattatacaactaacattataaaactaaccatggtgagccacaatttcatttggaagatttgaaacatacaaacagctttatgaaattaaatcaaatagtagtagtactttttcaacactattcgccttatccttacaggtttaaattaacctatacaaaagagaaccgcgtattcagattaagcaagacgagatgggagatatctcccagtccaattatgttaacaacagtcacaagtaattataatccctcccctagcaagctaggattgagattctcagcagtcactgtaccgtgcatttgtcactgacatatgggcctgatgatctatgggcccacatgtcactgataaaggcgcggtgcagtcgactgcagaggatcctgatccagcagtgtcgatcctgatccagcaagctgacactgcctggttttgctcccggcgccgtattgatcaaaagtcagatgataattacaggcaataaccactaccttttgacaattgcaaagctacatgaggcatgtacagattctgcacaagatcagcaggtcaaatgaaatgcctctcctgctgtaagcctgtaaagtacacatatgtagtattatttcaaaaacgtgctatacatttagtccctttaaatctatctcttttctttgtcagaaatctctttaaacatcgattgaacatgtgcaatcaacatgctaaaactttgctacaaaatagtttcttacttcttagcttaaagccattggttctgaacatgataccaaacattcagaattgcctaaacaacaaaggttacagagttattgcacaaggaatatgcagacagcaacaccgggaattatgaggaaggtaccagttcatcgaaaacgtggaaattatgctataaaattcttgagaatttactacatgttgggcgccgtgtgctaaaccacccaagtacagtcagtcgatcaggttaacacaaagagagcagaatagcagacaaagatagcatcaggtaatatatattcttgatgcatagtacattaatcttcgacctcatcttaaaagacagagatacataacataagcagattctagcagtgagagatctacaagacaaattcaggaccatacttgcaaggcaccagacaaatgcgccttcgaggatcactgatcttgatcatgatcattcctaagttgtgggaaggtgggaggccagagcatcatgaatggaaatatgtcaaaatatctataagcctctggtgacatctcaaacactttgtttaccgtcctgttcatgatatgtatgtggaagatcacacggtctacccgcaagaacacctcagcattgtcctccaccctatggagcgcaaccagagcatcccctgattcccaattgggctctgcaaactgaccaaacgattcgcccaagcagatgttatcaaccagctcccagttgccaccaccgatgtcggaatcggaggcgcggaaccaaacatgaatctgaaaccccttcagatggatgagatataagccggaatcgcctgcgcgtagcagctcaatgtttcccatccggtgtagctgctgcacaccatctggcaatctgaacaagaatagcctcatggatgccaaattcaacccaagaacatgccccttccctcccaacagatagagattgccattgacaagcacatcacgccttatgctcctttcccagctttcctgaatctctatagttgccgattcacggacactgttcagatccgaaatttcagcccttacagaaactgccttggccaacatctcctgatctttgcgtagaaattccacgaaagtgtaggacggatcgtcgctgccgacatctgggaagaggagcatacacgaggcatgcagaatctgccccggctggcgagggagttcgtagaccagcgggagagccggtgggtggcgggcggggtgcatcgggctgatgatgctgacccgtggcccatcgggagggaactccgcggcgaggacgcggccgttgcggcagctcaggatgacgggcgcgtcggggccggagccggaggagccgggcgccaggcggaggcgggcgccgcggagcgcggcggcgagctccggcggctggggcagcggcacgaacgccgggacctcgtcctggaagcgcgccctggccgtgtggtagaagccgaggaggcgcggcgggtggcgcgcgcggaagcggcggaggaaggccgggtcggaggcgaggcggagccagcgggtggagacgagggcggcgcggacgagggtggtggggaggccgaggcggagcaggatctcgcggaggaggtcgtcgttggcgagcaccgacgagatcgccgcggccgcggctggctccggtggctgcgtccccttgtcttccatggcgttcccgcgaagcgcagctgagagggagaaggggaagcggtcgtctggtccagcttgtgacgagtcaatttccacgcggatttttgacttttggctgactttattactccttgatggaagtattaactaattataaattttgaaaaaatggatttatttgatattttttagaaaaaagcttttccatttttaaaaaaaactgcttagcagtttagaaaacatgtccttttttcctaattaaaatagtctcggattgtaggtcggagttgataacaagaaacctatatatcgaattgtaggtcggagttgaagtttagaactcggccttttttttcatgccaagtggttttagttgtgttctaaacattttgatatgcaaaccatctgtttaaaaatcaaaatgttttaggggctatcctcatttaaatgttgaaatagtcatatcacccatcttatgttgtttggagaatgagatgggttttgcacctactgttgtgtactctctctgttttatattattacaaatcacatgacatttttcctaattaacgaagtctctctttggtccatatattagatgaatacccttgatacaaccgaattttcgctgggttgtttgtaagtaagctaggtaaactatattaaatatttgattgagtttataaaaaaacatttagcaacatctactacaacaaattattttattaaattcaatatttatatattttaataattgcataggtaactaatcaatgtttagtcattgcagtgcttgtcacggtctcacagaccaaagtacatgcgcatttgatatgctagcttcgagggtgtgtttagtttcacgttaaaattgaaagtttgactaaaattgaaagtttaaagaaaaaagttgaaagtttatttgtagaaaagtcttgatgcgatgaaaaaattaaaaatttgaagaaaaagttacgccgcaagagtctatcgatgggctgtcacttgacccactcgaattctcatcaccaaactgcacaagagctcacagtgagccagcccccacattcattcaaatcgctcggcaccgacaccgacaccttacagtgaaaacgtaacaaacaccgctagaagcctagaacgatgcgatgtatgtaaccgcaaaattcgccgcggtgaaaccgaaattccaaattctgaatgcaaatcaaatcgctccatcccatttcgaatctactacaacaaatcaatataatcccaagtacgtacgtgcgtgcacatgccaacgcaacaggtatatatatatatgcgcatgcagcatatggttgagctagctacagcgagaggccggagaggaaggagacgccggtggccggcagccacgacgcgccggagatgaagcgcgccaccgtgaaccgctccgcctcggcgctgtcgttgatgacgcggtggcccggccacgccacgcgcccggcgaccccggccccggggccgtagttcatgtactccccgtagtagagcgtgtcgagcgcgaacgtcgcgttccacgccagccacccctccggcggcacgtgcccgccgatgtacgacatcatcaccaccaccctcgagtacagcttccacggcctccccaggtacgtcggcgccaatggcgccgccacggccggcgccgtcgacggcggcggcggcgaggggacgacgcggcaggcgtggatgacgaggccggtggattggccgggatcgcggcggttctgggcggtgacggtgttcttctggccggggagaggggagcgggaccagaggttgcagcgctggaggacggcggcggcgttgccgaagacgaagtcgacggtgccgtagacgtcgcagtcgcggtagaagtggcggttggagtgggcgtagagggtgtcctggtagccgatgatgctgcaccggtagacggcggcgcggtcggcgctcacgcgcagcgccaccgcctggtgcctctccggccccgcccagttctccaccgtcatgtccctcatcatgaacccgctccccgacgccgctgccacaaatttcacacaaattaattaagctgctttcttatactagtacgagattactaatttgcaacaaattcttgtcaaatttcagcagtgctcgcgacgtgccatgtcgcgccataccgctgcctgcctgcaggctatccgatttctggttcagttaagtgattaagtcccccacccactacactacgccatgttaccgcaatgacgcaaacacagcaagaatgcaggtcgagtagtccatttctaccgtttcttttcaggaaatttaccagcttttatacccagtcatctacagcagctattagtacgtgcctaatactacgagctaatcctactcgaagtggtcttcattgcggaacagtagaagcgttaggagattgcagaagtaacagcaggaataacgatcgatcaattgcccagcaaaaaaatatataaaagaaagaatccaccaatttaatagaactaatgaccgcaaaataaattggatggttccatcatcagacattcacaacaggctggagtagatcattattgtgattagtgaagtttcttctgttgttggcatagtgttgtagtatttaacttcggtagcaatgaattaattgtgttttcctgtaagctcattgcaacccgtcactgctcatatcactaaaataattgcaatttaataacttgcctctagctagtttttactactaccttcttgcgttgagcgcaaaagtaaaattagtttatttagacaaactaggaaatcgtccctatttgtaacacttaatttcttgtgcaaaatcagcataggtctatctatggtgaagacaggggatgcaatgtcagttgaaaagtaaaaagtgaaaaaaatatacttttataaaatataattgtttttaattattactccctccattctaaaatataaggcacaaccactcttaatccaaagaccaagaaatagttattatcatcttgtagtttgaatcatcctaataaatataatgcatgcatctaataggattagataagatgagagtacagaatttaaaaagtaataatttaatggagaagatgtcatagttaattgtatgcttgcatatatgccttatattatcgaacatataagaaaagtggttgtgccttatggaatggagggagcaacagcgttcttttctaaacttatgtgatatgaaaacagtacaaaagaaaaatgcactaatggtagcaatgaaaagtttagtttcagagaacgtgatagatcaaaattgtttcttcttgacaccataacattatcttttttaaaaaaaaaatgttcgatgaaatgacaatggagtgagtaaatcgtggcgacaaatgacataccgaaggtggcggtgtggaacgtggtgaagttgtcggcgacgctgcggccggcggacacgacagtgacgcccttgccgtcgccgacgaacaccaggttcgtcttcttcctccccaccttcacgttctcgtcgtaccgcccggccttcacgtgtatcaccgtccgccgcccgctgcgctccggcgccgccttcaccgcgtccgagatcgtccggtgcgtccccgtcccgtccttcgccaccaccatgtccgcgctctccaccaatggcgccgcggggaccagcagcagcctccggtccctcgccgacagccacctcgggaagaggcttcttcttcttcttctccctctcttcctctgcttcttgctcttcccgccgccgttccggacggggacgccggcgaggccgtccttgttgctggttgccatggccgccgacgcggcctccgcgtacattgtgaggcagtcgcggaccatggcgcgggcggcggcaaggtggggcgcggcgtccgcgccgtgggggatgccggcctcattgaggctgtcggcgcaggtgtcgtggttggtgagcgcggcggagagccacgtgaccgcgtcgtcgtgggcggcactgggctcaccggcgccggcaaggaggtcgagggagtcctcgagcagctccgcgcagtcgtcgcgcgcggcggcggcgaggggcgaggaggaggaggagcccgccgagaacggcgttgtcatcacagcggaggccggcgcgacggcggcgcccgacagggcctcgagcgccttccccacgtgcaccgccgtcgcgttgagcgcaatgcggagccggtggtggcgcgccgccacagcctccgcctccagcgccgaggccgggaaggcgtgcgcgccggagagcggcagcaagaagcaggggaggaagacgaggaggaggatgaggcggcgagcgacggcgtggcccatggcgagccgagctagctagctatggaagctggaagaagtcgacgaggtgctggactaccagcgatggcggcgcggccatttatagggcgattgggggtggcgagaatgatgggacgcgcgcgggcggcgagctgggaagcttttgcgtctcgcggaaagcgcggcatgtaccgatggtttgcctgccatcgccggagaacgatgggctcgctcagctccggcggcggccgcgtccgcttggtttgttcgccgatccatgggcgcggcacgagacgagagccgcgtgggctgggctaccacagcagcacacatgcagatgcactgctcgtttggcccccaccccacctggctggcgcgcccaccgcgcggcattgcgcttgcgcgtgtgcgcgcgctagctagcgcgcagtgcgtcagtgagacgctgcgtggtctcgcgacgggtacaaatcctgctctgtgtgcacgtacaaaccacggctcacagatcactgatatgtgtcacttgctcttgggcgcatattttcggtctatattactactcatggagtagtagtagagtagtgcacctctcaactaccgtctcacacgaagcttacgaaatgagataaaactaaaaagatgatgtggctagtgaactaacgttattaggtgcatgagtaacatggaaatcaagagattatatcataagtaatgttatttgaccaacaacatctataaaactaagatgtttaaataaaaatagttgcatattattgtagtttgtttaatgataaatatagtaacatcaattttatatgattgaccttttaatattttttttctattaatagtcatagttaaaaaaatgacttgacaatattttaaaaatgcttacattctgtgacggagtgagtactatggatatataaactacttactatattacggtagtttttattcaccgtgtattatctatggtagttttatttaccatgtattatcttagaaacaacactgaattttagtttggatctaattttcttatgaaagttaaggctcctttcgaataaaagaattttggaggattacatttctatcgaaataaattcctatatgatgctttagaatgaaggtattgaattccttctaaattccttataattgtctcaaatcataggtttttttttgcaaaattggttatatatcatcaaaagttcactttttttttctttttatagcatcgaaagatactaaatagcacctaaagctcaccacgttcccatttttaacactttcgttaattttcaatcgtttttcgtccgccttgattactattgactcagccacacacacaatatgatgtttctacccctgattgtcatgcattctacttgtgagaggtagttaggaattcatattcctctcttcttaagaaaaaaaaagtgcgctcacaactcgtatacattcatccatataatatatacacgaacatcttacctttatatgaacaccttgcaaagatcggacatattctttttatctttacacgccttattaacgtacactaaaaatgtgaataagtgaaccctgcatagccatacatgtttataaaagaaaacaaaatagaaaggcacgaggagaacagtgggacagccaaacgtgacggtgatttcacttgaaaaagaaaaataaaatactgtgtgccgatttagacaatgcaaatgcattattccaggctatatatatagctagttagctctgtcgtcgatgcttcttctttttttgtcatttacaattttgctgcacatttggatgtgattttcgtattgtattgtacacgtatatatgggctcacgaagagatagctaaagggaatcgtgtgacattggcacaatggcacatgtgacgagcgcagatggagctctcgcctcgtggaaagaaacaaaaaaagtcgcggcaccgatgggcgatcgatcggtggctgggcgagtcgtctcgtgcgatcgtgtgcggttggtttggttttgctggctgcctcgccacaccggcacaccgcccgtccatcataccacgctctggctgacgcgctgcttgtttgccgtgccgtgtgccggctgcatatcctctcgatcgccctagtacatgccgcacactccattttcagctacctttttttttatgataatggatcttattaggactaactgcaaaacacgtgaccatggaataataacgtgggttcaataaatggaaagctagcaagcttgaaaaacaaaggaaatatatatattttgtagtactaagaaatttgatctacagtaatattgttttatttcatactccctccatcctataatataagagattttaggtggatgtgatccacctaaaatctcttatattttgggacgagtatctcctatcattcaattcatcttgtgacaacttttttctctttacctttctctatattgttgccgccacattaaattgcttctcttgatctcaagcgtattttccgatcataaaagaccgagagatgatcttgatgttattactttgaagttgcacaaaccccaagccccgaattctcgattgggattcacagatccgatttgttttttagaatcgcttggttttcttgaaaccaatggcggaggcatcgtctgggcaggcgaaaactccattaaaattttatattagtgagtaaattggtgatgaaatttctataacaaatactagttatatttatccggttttaaaaaattttctagctccgccattgcttgaaaccaccctgacccaatttgtgaattccaattgattttagttagttttcatacatagttaacaaaaaaaaaggtcaccggttctatggtttgtatcggctttcgcgctgttttggtaaaacctaccatgatcggttttcagttttcacctcgatctcctccgggcaaaccgcgacatttgaaagaactttctcctttacgaaatgcccaaaataaatacaacaagtaaataaaaatggaattcgaaccgttagcgtacgctacacccggccccacgcgtcagtgaaacccaacagtctcctgaaatcaacccgccacaaaggcccaaagcccacgccgagaaccccgccgctcgcattcgcattcgcatctcccccgcttcctctcctccgccgccccaaaaccctagcggcgagcgagcgagcgagccatccatcacccatggcccgcaagcgccgcgcgccgacgcccccgcccccgccgccgccgcctcccgaggccgagtcctccgcggattcaagcggcgaggaggaggaggaggaggaggaggaggaggaggagagggagtctcccgtcgccccaccgccccagaagcccagcggccgcggcgccgcctcgtcggatgaggaggaggaggaggaggaggactccgacactgacacctacgcccaaggtttccagcttcggaaggttggcggcggcgacgaggaaggggaggaggtggaaggcgactcgtcggagtcggagccggagccggagcccgtcaagaaggagtcggcgaagaaggccaaagccgaggccaagaagaagagggccgcgcctgagcccgcgccgtcgggcaaggccaagaaggccaagccggagaagtcgtcgtcggcggcggcgcctgagcccgctccctcctcgggcaagtccaagaaggcagccaaggctgaggctgcgaaagcggctgccgctgagccggctccttctaccggcaaggtgagcaagtacaatttggcgccggagccctcgccgtcaagcaagtctgggaaggccctatcgcgatggacgacggatgacgaggtcaagattcttgaggtcctcgtggcccatttcaagagccacggcactcagcttaaagttgaggggatcatcgctgctgtcggcgatagcctcgagaggaagagcatcaagtattcggacatgtatgagaaggtgcggaggctcaagcagcggtacgaggccactgccaagaaagttgaacacggcggcgacctaccagctaaagaggatgacctgcggatgtatcagctatcgtcggaaatctggggaaagaacgcaaaggatgctggcaattcgtcaaagaacaagaaggggcaagctaagaaagataaggtgagtggagattcaaaggaagccgccaaggaagataaggtggatgaagccgccattgctgtgaatgaaaagggtggtactctggcagagaataagaaggggaaaaccaacaagcagaaaacaggtatggaaacaaaggttggatcatctaaggaggctgctcttgctgctagtccaaccaagggtaagaagaagggaagccacaaagacaaattggatgaagaagcaaagagtggcacggcaaaggtgacctccacaattgccactgatgatgatgatggaactttgggtgggagtaagagggagaaggctggcaaagaggaattggatggggacacacatatcgtcatgccaaaggaggccaccacaactgccgctagcgatgatggtactttggttgggagtaagaaggggaaggctgacaatgggaaattggatggcgacacacacagtgttatgccaaaggaggccaccgctggcacccaaaatggtggcatcctaacaggaggggaaaatcacaaagaaaaagtagataaagatgctaatgtaccaagcatacggagggagtatgctgaattgcagagtttgtatcccaaccttgcttcctttgtgaacggaattgaggcccagcatccatgtggatcaaccttcaagagagcttttgagttcattagtgatgataaggcttgcaccctggaatccaagatcaagaagcagaagatagcggaagtgagaatgcagctccgtctagcagacacgaagaaggaagtagccaatgctttgttaggattgctggactaaaacattgcggtgctgacatcctttttgtgcggtatacattcttcttacttgcgttattatgttcccatttgtatattaaagttctgttatagctaaatgcatttaaagtgtttttgttgcttctaaaatttgagtgtgacttctgaactaattattgaaacaaccctgttcttatgtggtcagtttagtgtgaaacatgtgcaattaaggaaagtgtagccaatgaaagatttagccatatttgacacgtacaaaccatctaaatatttgattggtttgtatatcaagctaacttacactttgtaggtgttgagagggtgagtttgtcatacgtagcaacataagggagtgatttgaatatatcatctgttggattctactattcttgattggttgtaaattaaactgtacctacactttgtaaggattgagaggtaggagtagtgaacaagggaacactatgaataaagcatctcttgcattctactcctgaaatagttagctttaccttattcaaacgcacagttgttgctttgctaggttgtcattgtaatgttttgtacctactatactctactcaccgtgaatagtcattttttggggatggttttcctttgcagaactgagttataatgctttttttttaccacaactgatatatgcaatgtttactggtagtttgtccatatgaatcttgtgctgcaaaaggcagcatagtttattttcaagttctttgtagttttgtttgttaattgtagcttaggttgatataaatagcttaatgtttgaagttatgctttatatttttcaaagtaaattattgtgtgatgtccattgctctagtgaatttagggtttctcttgaagaattttgttggctgctccaactgctcccaataatgccactaaaagaacagttgcatttttacaagccacctgctagtactgacatggtattggatgtgacatttcctagtacaacaaatctgtcaggagcttatccagatttgttgtattagggaatgtctcgtccaatactaggttggttttttgtgggacggagggaactaccttgtcttgtatagatgacctgattttgttgactgacctcatcaactccactaaagaacaacagttgcattctgttcaagctacctgctagtactgacatgggaatttgagtagctaccttgtttgtctagatgaccatcctaattatgtactacctcattttcaaaatgtgtgacgccgttgacttttcatacaacgtttgaccattcgtcttattcaaaaatttaacataaatatgtaaaagtataagttaagattacattttatttgatgataaaacaagttacaataaaataaatgatatttatataacttttttgaataagatgaatggtcaaacgttatgcaaaaagtcaacggtgtcatacattttgaaatggagggagtatatgccaccacacttgtcagtttggtcaagcacagaggattctatgctaagcctgcatttatttcagctgaatttggagccttgatacgtgaatattgatttgtttatgtgagcctgtgaggctcgctcagggatacatgattttttctgagtctctttaaccaagtcacagtagcaactcaggaagttgttcatctagagttaacatacaaatgaaatcaatggtcaatccaaaatccatatatgaatatcatatttaatctttaatttggattttgttgagccttgtggggctgttggcatgaagattataagttggcaccattttagttagttcactgcttaaaggctgagccaatacaaggtagcttagtgtaacagccgtacataacttttctcaatatctcaaatctgctttatttgttttcaaactacaatgatgagcatatgagtgcattgctaagactttgatttgtctgtgcctggacaaaacatttcttttcgttgcttcaattttcttcttgcatccttagtagtactaatttatattgcttcattatccatacacttattctgttcactgttcacaagcagatggttgtattgaagattcaagttgcagaagatttttggcttgtggagctaagggatatgacgtgacgagttgagctactgggttttctgtctctggttctcgagagctattctgtgaacggttgtttatgtgattagatggtagtatccctttaatctatgagttagcaatggagctgatgacagtttaattaactcctgtatctatgatggcatttggctttaattaggaggtgtgcctaattaagggggttctataactttgggatatgcgtgatgctgatattgacccgaaatcccgtaatcctgcttattttgttgcccggtttattcgacctgcaaccgtttcgttttgttgtaatgctccaacatgatctcagtctcgtacaattctgtgcaactaagtcatgcttattcatgaagtgaaaaatatttcatttcattacagagagtgaagaatttcagtttccggatgcatgatttgcacgctacgactacgatcatcttgatcaacctgtacggttctccaaatttgattcggcaatcgacttgcaatgcagatagctctgaaccatcatccctcatttatctctttagggttaagtcttatttacccccttcaactatcatgaaagtaaaaaataccctcatcaactctaatactagataaatagctttggccgatgtccaaagtgtgagcttggtgttgtcttgcttgtttaggcggtgcctccaacgatgtcgcgatcgccatggagtcggagttgctaggtcgctgggcggcaagctcggcaacgatgacacgtgccttgtaatatcaaacttgtatgccacttcttcagcatctcaacatcgacgttcgctcttggattccgccgttgtttctttggtagtttggctagtgttgtttggtgcttcgtgtgttgtgtggttgtaccagttgcggtggaggaacttggcgagtctctacttgtcgagaggttgttttatttttctgtaacccgtctgggtttttactccagcgagaggttgttttatttttccgtaacccgtctgggtttttactcatgtttaattgaaatataattgatagttgtcctgccggtttagtttcaaggacgtgactagacagacagtggtagctgatttgtctaaatcaactaccactctatctaagaaggacacaatccacttatactttaaatacaattttctcttaaactactcatccgatctatgatccgattgcactgttgtattcgtaacaattaaatctttataacaagatcttacatgattatattttcatgaaaaattataaattacttttatcatatatctaaattacttttagatttcactaaattacttcttagacatataaaagtaaattcaataaagtctagaagtaatttacatatattatagaagtaacttataaaaaaaagtaactttaatgaatgccttttttcatcgtacgagaagtcatatttttatccctacaacgaatttagttactttcattttgttttaagttacttttataatataatatatgtaaattacttttagactttattgagtttacttttatatgtttaagaagtaatttagttaaatctaaaagtaacttctatatatgataaatgtaacttacgtatataataaaagtaatttacaaatataaatattttttcatcataatataatcatgtaagatcttgttgtgaagatttaattgtaacaaacataatggtgtaatcggattgtagatcggataagtaatttgagagaaaattttgtttgaagaggaaaaatgacatgcatgtctattaaaaaaatgcatgcatgtagtacgatgtagtaaactccacgtcttctccatattcaggtatcaccggttaacgcaaaaatgagaggcctctccgaatagattttacgtttcaaaaactattcgatccggatagagaaaccccccttcctcccatttaccggcggttttgggctaattatagagattaatctcctaatgaggactgaggagacgggcccagcctgtcacgtgaggagcacacgatggagttagctactgcatgtagaggccatgtcactctgtaattggcccaaaatggttcaagagattagtttaatagtatagccaactatcagctctaaatcatttatagtcaacctaatagtcattcatataagagcacccgcaatggtaaagtaatgtgctctctataaaacatgtacatctcagcaatatactcgattaatagtaaaccaccttaatagtatgtctacattggtatttatagctctctcatgcattgcctcgtttttctctatagactatctctaagttagtagatagctttgctctctctcttcatttaatacctttcaagtaggaaaatatgctgacatggatttcttgtagagagtatatagataaccattgtgggtgccctaatagttaattacaaatatatactatatcattaataactggtcccatatatcatatacacatagtgttctagagttcgtgctgcagctggctacaaatctatagcccctgtcggctattttttttttcatcctctgcgaaccgtctcaccggaaggaagctcagcgccatgctcaccggaaagaagcagtcgtgccgtccggtgcctcctgcaccctagtgttagggatttgggctctagaggatggggaatttgagggaaagagagacgagaggagggaattatttaattttttgctatgtcatccgtcggagtgtcatgtgagataactctggaacaaaactggctataaatgggaatgagggggttgtgtgtccggactgaatagttatggtgaaaatgctcgatcggtcgactgggggaggggggaaattggttgtttcccctcccccacgcgcgcgccccgctggacccacccacttgtccctacacttgtttcacaaaagatgtttcacctagtgtacttataatgtctcactatgtatagatctaatgttgcagtgaattaaaatattcttttgcaacaaatcacccacatattttagaaaccctttattaagggaattcgtttcatttttttgttccacccaaaatatttcatctagtgtactcataatgtttcactatgtatagatccaatgttgcagtgaactgaaatattcttttacaacaaatcacccatatattttggaaactctctattacgggaattcgtttcattttttgttccacaaaaaatgtttcgccttatataatgtttcactatgtatggatcaaatgttgcagttaactgaaacattctttcgctatttgctgaaacctgtttttatataaggcgaaacaacgcccgatttaaacgattgaaacattttcgatctacttagtgaaataattccgatatacctggtggaacatcgtgcaacatttaaaaaatatcaataataagctaaacttttttcgtcggaatatatccatgggtggttttgttttgaagatttaattgcaacaaacttaatggtgcaatcggatcatgatttggataaataattttaaagaaaaattagtttaaagtggttttgcacatatgggtggcgctgatgtcagcgcccgctttttggagatttgtatcgggcgaccgatccctagtcatcccctagttacggggtgtgacttgtttggaattagagttgaggaggctaaatcatattttcgttatagttggaggggggggggggtcaatcggacttgagccttatttctttatgcttagctctctgttaatattcaaatttcgatggatttaagtttgagtgtattcttcaaccgtttttgttatagacgtcgaattatttttttagcctgattagtcgaatttatggctggttgatctacatcaagatttttcttttgcagggaaaatagactttattaaatcacacgggacctattacaatcgtttttgataaattatgagttctcaatatttcaaaagcccatctcagcacaaatcttgacaaacaaagctagaagggactattactcagatttgagtgggtttgagtacaattctgctttgcggttatcgaaagggacaattacttatttgactctattttagagtctaaatatcaatttggccctacttcttttaatttgcttatttgactccgcatttgtaaaacgaagttaccgtttggtcctatttccatttcgctgttaggatttcatttagaaaaaaaagaaacaaaaattcaaatcatattcaaactgaccaaaaatacgcttgaggactctaccctatccattcaatccctaaattttattactacttcagaaacaggcacatgatttatgcaatttgctacactgattgtttttgaaagatctaacctaacagaaattattaggacaagctatatgcgagatatattgatggaatgatgggtcataaaccggagaacttaattactgaactttggaagccatagtcaacgtgggcccatatttgaagtgactttaaaaaggagacaacagtgcattaccccagttaatttattttggaaaaaatacaaattaccccccgaactatcgcgcctgtccgaattacccccatgaaccacaaaaccggacattcttcacccccaactatgcaaaccggacgaattaccctcctcgaaccaattcagagcggttttgtccaacgtggcgcacatgtggcaatccggtcagcctttttttaataaaaaattgtaggacccacctgtcatactcttctttcccctctctctttattctctcactctctctcgctcttttctctctcgccgctcacgcagcgcgcacgtgaggacggtcggcgaggacggcgcggggacgggcggtcggcatgggcggtcggcgacggaggaggcatcgagcgcggcggtgacaaggcgaggcagcggtggaggcagcgagcgcggggaggcaagcggcggggtagggcagtggaggaggcgagcggcggcgggagctcgcgctgctcaaggcgaggcgaggcggcggtggaggcagcgagcgcggggaggctagcggcggggcagagtgatggggcaaggcagtggaggaggcaaaaggcggcgggagctcgcgttgctcgaggcgaggtggcggtggaggaggaggcgagtggcggcggggtgtggcgaaggaggcagcggcagcggtggaggtagcgagcgcggagatgggacc

SEQ ID NO: 8073 - DNA, 62935 bp, Oryza sativa
aaatgctagaatgacctacattatgaaacggagggagtacattccatgttcaaccttaaatgataataggagtatattgtttacacatattgcaatggctaaggtcagacactaaacccacacaaaccttacattgtctggagaatttctaaacttccggtacttgagctatgagaaattcataactttaattagctcacagcaaattaaaacattgaacaatatttagatgcttgtcgaagttcagattctaaattcagatgctcctacatcataaggacaagtcagaaactaatatgccaaatgctcagaaaataatatatgaaatgttcaatcactaatctggcaaatgttagacatctatggttcacacatattgcaaggacaaagactccaaatatagaaaatgaatagcatgtttgaggtatatataaagaatttgtcatcagcatgacagaaaattacagcatttttttttgtttttttggaggacacaacatgagatgtgattggaaatttttttgctcctaggaaatttgtaacaaaaaaaaggaaagtgttccacatttctaaaggctgtcaggaattattaactcagtacataaccaatagttcacagggaagaatagaaacaatacattaattacactacacaggatgccatataatgcaaggacaatttcagaatgttgtcaaccaagttcttgagcaatgcaagcccaagttcagaccatgtaaaactaaattcaaattcacatataaagttgtatggcacacaaagactataaagcctcctaattttggttggagcaacagcaaacatggttgggtagagttcagcgaatataaattcaataggaacttaacagtagattataaggaaaatgacatgtaactctttgaattgagattgagcagagagaaccatcagcatacataagtaaaatgcaaatttcagataattcacaaatagtcaatagtgttgtggtatgcatgtggcaaacaagaacattcaggtagataattttgggatttcatatgtgtacaagcatatgaatgtcaaatattattctgacagggaattatgtgtaagtaatggcgtccttcaaacctgcaatcgtgattaacttgctccacttaagtcatgtgcatcaccttccctgatgccatcctccaaatctacaaccccgattaactcgcttcattgaagtcatgtgcatcacattgcctaattccatcctccaagcatgtggtcagagatgccaccaggcttatatgaaggttgcctcctctcacaaagaaggaaaaaaggaccgcctcttagcagcatgtgacaatggctaggataatcccggatcaatgccaatataaagatgaaattatgcatgttgtagcagtgctagacttctggagcatcatggaatgtgttttggtcgtgtgcccctgggtagaggttggggctatagcacatacttgtgcctcaaaataaaatatcttatttttctttaataaaagttcatctgtttggagaatatatttgtccttggatctacccaaaacaaaatttgaagcgttaggacaaaatcaccaaaattttatcaattcaccggcagctgctagctaggagcacataaggcttgttaatgaaaaagtaaacactcaaattcctagcccagaaaaaggaagaagttattcctattcagaatcagagttgttccatgcccccttgcatacactaagctgagtttctttaatatgtttatactacgcaaatatatgtatgtaccttatctgaccagtgaccaataaccatagtaaaaattagtaaaaacttaaagcaaagaaataatcctgcatatatgaatattacctttttgttgtgcctatggagtatattaattcatatatatcaaccaaatgccaatcaatgataaataacagaacaaaatctccttgacccttctcatagagcatcttaaagccaaaagccatcatctgacaagggcctataaaaaatgccttccatcctgttcacccatccccagcatatccgtataagcttgtattacgacaattttatagtatccctagctaaagaaatcaaatggtggaatgcagtatcacttgaacaattctcaaacctgtacaatataatttctctataaagtaatctggaagagacgcagcatggcaactacaagtctacaatgttagtctgaatggagcaacaccagtcaccttgataggatatagcctgcaatgatgcacatatggattgataagaaccgaatcacaccattaagaggagagatttaatatatgtgcatacccttcagctgaataagaatccacacagaagactaatggggattcagaagagtcaatttgagtcaatggggtctcactcgatctcaccagcagaagaaattttgacgcacggctggaagtacctacggcagactatgcccctcgtaacggcggcaagaccggaggcgcgacggaaagctggaccaccggagaacgacggagcagtggcgctggcggaaggctggaccaccggtcggcgacggggctgtggcgccaacggaaccctggaccagcaggtccaattgtggtggcgagcggcacggaggcggggcggtggagggagtcaccggcgtcgtcggcgaagacgggagcggcatcggtgacgacaggagcagcggaagcggcgacaggaggcaggagccgatgcggcagcggtggatggaggcaccgcgcggaaggggaagaggcggcgacgagagtattttacctccatgccattaagaaagttgaaggttacctatatgccaaaaaaaaattttgagtcacctatataccatgacacaaactttcgtttacctatctgccattccatccatcttttgttagataataagctctgacatgtgggacccacgtatgaaaatgactaaattgcccctgaagcattttcatctctgctcctctcccgagcaatttcaccctagcctagccgccgcctttatagccgccgccggtcgtcgccggcgccggcacgccgccgccgctgcctcgcctcgtctcgcgtcacctcgccagatccggcggcgcgcctaggccggctcccccaggccggctcggtgccgcaggagtacctcggcaactgcctccgcccttgcttgacatggccggcctgctcggcgccggcggcgtggtgacggcggcggcgggcatcggcgccgccatcagggggctcgacaacggcgttctggacggtgccgatgggtggttccagaagatcgtgtcgctgatgccgcaccggccgatgtccatcgccggctcgcgcggtacgccgtgtacgacaccgacttcgggctgggccggccgatgaaggtggagctcctgtccatcgacaagacgcccggcacggtgtccatggcggaggcgcgcgacggcagggtcggcatctagatcggcgtggcgctgccggagtccgacatggcgcggttcagctcatgcttcgccgacggactgaagcagctgtgaggacgaacagcttgttgcatttattgctttcttgctgctacatattgttgcagagttcagagtttgttcagtttgggtgtgattctgtaatgctagctgttgcttgaatgttgatcctataaccaagtattatttctgctttttctttttttttttgcattttcttacttatgcacgcattttttttccttatctttttacgaattttccttattttttcatatgttcatatttatttatgattttttaaaatttatttacgaatttttttcttatttattcccagttttctatttatttccataattttaaaattatttactaatttttccatatttatttcttgttttaactttattttcaattttttagaatgtttactttatttcattttccttcaacctacatttcagcctttatgcggtgtgtgagccgatttctctttcaaatgttcaatgtttcattcaaagtggctgaaatagagcaagggcaaaataaacctttaaacctccattagtctccgttagtgctgattccatccaaagtggcgcataggtaaacgaaagtttgtgtcatagtatacaggtgactcaaaacttttttgtggcacacacgtaacctctaactttcttaatggcacaggggtaaaagactccggcgatgaaggcggagaaaattgtgtggtggaggttggagaaaaaggacagcatgccactccatatggtgggtttcgacaaaatgccacccaatatattgcaaaggataaaatgccactcaataggttatctttaggatattttaccactttgaggaggtttaagacaaatatgcccctactttggagagagagagaggaagggagagagagccggagagaggagtcgaacggcagcggccgtggtcgtcggcggcgggcagcgacgagggaagaacgagcaccgtccgtgctcccgctagcagcgacgaggagagaaagaagacgccgataagcgcacaggggtggcaccggagggggtgagcgcatgcgcgggcagcgctgcagagccctccacgtcatcgtcgtcgcctcctcctccctcccgtcggcgttgcccttctccccgatcgccgccgccgtcttcctcccaatgaccacggccacaggcagcgacgagggaagaacaagcaccatctgtgctcccgctagcggcgacgaggagaggaagaagacgccggtaagcgcgcgggggtggcaccggagggggtgagcgtacgcgcgggcagcgctggagaaccctccgcgtcatcgtcgtcgcctcctcctccctcccatcggcgttgccctcctcccccatcatcgccgccatcttcctcccccatcacagtcgtcgtcttcctccctctccgccgccgtcttcctccccctgtccacctgtcgcagcccacccccgtgcgctcgccacccgccgccggcgagcattagcgtcgtccgggtcaaccttccgctcctccctcttcctctctatccacggccaggggtattttggtcttaaaatctctcaaagtggcaaaatatcctaaaagtaacctattgagtggtattttatcctttacaatgtattggatagcattttatctaaacccaccgaatggagtggcatattgtactttttctcgtggaggttgggaggaaatcatgcgattttgtttatgtattcgagtcatggtatccacagtgtgggcaaggcgatggtgggaggtgggacagattttgtttctgtatccgagtcatggtatccccagtgtgggcaaggcgatggtgggaggtgggaccgtgggagggccgtgggacgctggggatggagtatagttgatttggcctataggatcggagtggtgaactcctggattggagtggtgaactccttctttttatattagtatagataaaaattcaaggtgtttttgccgaaaaatttcataagtcacccccaaatggaaatagcgctagggttttttttcgcatggtctttttttcaacttcccaatggcgcacggttttttttactccgcctccagatcgctcccaatattttttctcagatcgatcgcatccgtagcacccaaattttatgtccgattcccaccccgatagctccctcccaaatatatacctaacctaattaaaaaaatttcgtccgcaacatcataagtccaacaaacaacaaatcatccagagtgcgcatcaaataacacacaaagttttaatccagtttatgttagatcccaaatataagaatagaagaacagcaaacggagataaaaaaaacaaatcgaacagaaatcgagcagatttttccatagccgcctctgctgccaccgcctcccatggccaaaaccggtgaaggggcgcggagtggccgccggcagtggcttgccgagctgcgctgccgacgcccgccaccaccgtcgtttcagccgagggagggaagcgagagggggcagagggagccgccgccgctgtcgccggatctgtcctccgcagccgccaccaccactggatccacccatggccgccgcgaggccgccaccgccgctagatctgccgcaggagggaggcgagagggggcggagggagccaccgccgccactgccggatccacctcctcccgccgacgccgccaccgccaccgccaccgccgccggatataccgcgggagggaggtgacaaggggttgagggagccgccgccgccgccggattcgtgccggaaggagagcgccgccggtggaggaaggggggagtggccgaggggaagcggcgctgctggtgggtcccctcccagtcgccgcgccgtgccggtgagacaggaggaagagggggagatggagcggtggcgccggtcaccggtggagggagggggagggggagcggcggcgctggtgggaggaaggttggggagaggcgctgccgccgacgttgttttgagtgagagagagatggggaagaggaaatggttttagggttagggtttgggctgctgagtatttgtatagatcgggatcaatcaggaccgtccatcagatcggatggctacggcttctcccgcgtcgggccgggcgccgttcccaggccgcccacactattgggccacatgtacgctccgcacaaataagtttactttatgtcgctcaagttgtccccgaattgttcccaggccgcccgcactattgggccacctcatggaccgcatgtacactccgcacggaataagttcactttaggtcccttcagttgaactttttttatttcaatatgtaaaactaaaccttaatcatctaatatttttatatttgttataattttagtttttcgttgcaacgcacgggtatttttatagtatatacagaaatcagaaatgcatgtactggtacaaactcttcctaggttgcaaatttgctcgactatatatgaattcttgtagccgcactgttagctagcgctaaggccatgattgagatagctaaacacgttggattgatggataatctattttttttatgatatctatttaagggataaacgaataaattaactacaacaaagttgaaaagatgctttagaaaagtattacaataaaaattatattataaaaattttgcacgaaacaaaccatctaagagcttggaagcatgcaaacaaaaacctagaatccagaatcatgaaagaacagggcctaaaagctaaagctaccaacttggggtctctcagccttgaaacataagaatgtacttgctctgagagtttgattgaagaatcacagatctctgatgccatcaaatagtactgctagacttctcttagaaaacaaaaaagaaacactgtgtgctagattagcctgttgtttggatctaccttaattttaattttaattgtcagggagataaaaaaaagaaagagaaaaggaactgtgcacgctgcacacgggcaatcagggagggagggaggtttgggatgtttttctgaatgattaatctaatgacctaaaataatgggttggatgtttaagttaaaaccaatgataatatgttttgttttcctatcatcatttttaggatttcgtctgatttaagagaacaacgtaacatagcgtttatagaatgtataatgaacttttaaaaccgcatgctgcacggaggaggaagtgagggaaggaggtttaggattttttttttaaaaaaaaatagatctaacgacctaaaataatgtctcaattgatttaaaataatgtgtccatcaatttgagtcaaaactgattgttggatgttttgtttttgtccataattaagaacatcatgtagcggattagaagcgtttatacgatgtttaatggacttttagcatacgatgtttaatggacttttagcactgcatgggggtagagggaggggaggtttgggattttttttttggaaaaaaatagatataccaacctaaaataatgtgtccatcgatttaagtcacaattttgtggatgtttttattaagaacttaccagattcttctctaatttaataatgttatgtagtggcttagaagcatatataagatgttaaatggactttaacatcatacacgggcggagggagggagagatgtttgggttgttttcttttattaaaggaaataactaacgacctaaaataagaaactgatagtcgaatactttgtttttcttagattttctagtattttatctaattcagtatcaccacgtagtgagttagaaaacattcttaaaatgacatagggagagccgctagacatagtagatagaggtctatttatgggttttttgcccataaaaataattttaatttgtcatgaagataataaaacagatgaagtaatgcaaggaaagttcgggatggggtttccggttttttttttacaaaatagatattactgtctaaatggttgaaaatcgatggtcgatttaatttattaaagtgtcatttagcgaattaaaagtgtttgtagaatagcacttaacgagtcaaattttattatatgctagcaaattgcccgtacgatgctatggaaagaattaaatcaatgcaacaataacattcggaaacaataacattcggaggaatcaaagtcctgctttaattagctattacatcagtaacaacccgcggcccccaaatcccgtcgccctcctcacaatcgactccctcaccccgattcaccactggtctcctcctctccgctgcacaatcctccctctgtcaatcgcccctcccaccccttgccctcttccaccgccgactgtcacgtcgctgccgtcgtgttatcccgccgccggtactgtagatccccgatccgttgcccgcctccactcagctgtcgccacctccacatccgggaagacatcgtcaccaccgcctccgtccgcgctgaccccatgctgtccatacccacacaccgccggtccagtgcatgggcaatgcttacagcgtagccctatactcctatattaatcacagtagggtaggtagtacaaacaaggtgcatatcagaaagcgctgaccccacgctgtccacaccgacacaccgctggtccagtgcatgggcagtgcttacaacgtagccctatactcctatattcatcacagtagggtaggtagtacaaacaagtgcatattagaaagtgattttgcacttcaaaaatatctatttgtgatatattatatagtgtaaatcaagtttaacatatatgagtcagtggcggatgtaggattttataaataggggcacgataaactaatctatttataaaacaataaattatctaagtgttataaaatattatctctaaagaaatgtaaaaaatccaatacatcataaaaaaactagactagaaataaactaaatcttattttttatatgtagatttcattgtaactagacggtaccccgcgcgttgccgcgggtgcgaacatagccatatatggacatagatgttatattcaattttatttgcaaccacttatccaatcaaatgtgcaaacatcacatagatgggcaaacatgctaaacttgattaatttattttatatgtataactgacttcacaagtcccagagatgatatgaagggaactcattttacatgacaaaaaggcaagatatatatgaaaggatatattttttttaatgggcatcaaagtgcctaatatcaagcacagaggtaacatggaaaagaatcaaagataaaactcttacattccatgatacttaaggtctccagaatcatgaattaacttggaacagggaattacagcttcaattgttggtgccctaaccattaaaatttcctttctgaaccgctgcagtttaagaaaagaacaaaaataaactcataatggtgggtattggagcaaagaaagtattaatctctcctgtagttcctcaaagcagtgcttgattatgtcaaacattacagtttcacttccagtcaacacagagccaaagaaaatacctaagaatattgcaaggtacagctatgttacatgcaagccatgtcatgccactttgctgggtcctctgaaagcagttcaagtgttaattcatatgtaaagattagtatctattttagtttttctctttatacctatagattagtatatatgttataatatcagtaattcacacctaaattatattagtatctatgatatgttctaatttacacctaaagattatactacctccatcccaaaatgtttgacgccgttgacttttttaaaaatgtttgaccgttcgtcttattaaaaaaatttaagtaattgttaattctttttctatcatttgatttattgttaaatatacttttatgtatacatatagttttacacatattacaaaagtttttgaataaaacgaacggtcaaacatgtttaaaaaagtcaacggtgtcaaacatttagggaaggagggagtagttatgtaaattaccaaaaagggaaaaatattgtgcgcagaaaaacccgggacataaatctgagatgccataaaaaaaatatatgccattacagtcgctgaatgttgcagaactacataatctggtagaaatagaacaataagttagatagtggagtcatgtttcatttgactgataactatgcaatacattttgagctataaggagaataagatagatgctgctagcagttcagtagtacctcattgggcttctatcactctattttagttcaaaagaaatagtacatgcagttggctgctacgaagccttgatgtgacaaacaaaataatttcatatttctagtatgaagatatcagtagtttagcaacagaatgtaaggataattagtacacgtgcttgaagagaccacgaaattgcagcatgtcattcttgccgaattcctgcgtttcacctcccatgcagctgcagagaccaagacagtttgctcatgagtgaaattaaggtgcaaaagataagtagaataaaccttcagtgtttgaactggattgcacaagcagtggaattaatcctaacacatagatatgcatgtttccatatagagaggtggaaagcaagtcgactaaactgcacatatggctgtgttctgaacataacctgggtataagaagcatcacttcagctgcataaaggaggcaggggcggagctaccattattcctgggtattcccaggaatacccaactttttttatcacaaaacaagtatacttctagtatatacacatgtacacatattagtgcacctaaatcctcaattcttcaatccaaacacagcccaaccggcctcttgcgacgcctccaccaacccgacccattccgtcatgacccatcagacatcagttgacccacttatccaccacccttctagacggccccctcttgctctctctccgtgacccatccctccctggctcggctcccctcgcgccgctccccatttccaaaccctaggcggcggcgcggcgaggcggcaaccggcagcgggagctggaccgtgctatcgcggagggggaggccattgccgtggcgagcggtggccgacgcccgccactccgccaatctcgggcggtcaggccggttgggtggccggtggccacgaggggcagggccagcgcctcagcgcttagacgggaatacccaactttgaaatcctggctccgctactgaaaggaggaagatgcacatgtttttttaatttgatgttgttgccccgattaatcaaaaagaaactgaaatagcaatcccacaccatttgctagacccatgcaaacagatggacttgctttctatgcataagaatgttgtggagaacaaaaatgtctgcatactgaatctataactattatttttacttttatatgtagatagtacttaccttggaggtaaaccaaagaagttcaattctataggtagaaagcactggcaacatagctgaataaattttaagaccgcatatatgtgaaccataaaagtaagcacaaaatagaaggacatctgagcaagcattttttcctgtcaatccaatctaagtgctgttttggcacaacatatctaccagaagtgtttcttcagtggaataaacctatttatcaattcataagagcacagctgaatgtagcacctgtactatagcatcagaaagttgaaagcatgaggctacgagactgtatggatagaagtaaaataaagtaaaactaaaagttatagttagatcaaactaccttcgtcaaccaaaacaaagccacgagtcttgcactgcaaactcaccagccaatcaatacttgcagatcacatttagcagagattaagtgatagaaaataaacacaaattaaatcactgtgaaaaataaaggcataaaggatggcacaaactcaacctgaaccctaggagcaactacgacggtgcgaaatcaggcaacggcgtggcagccgaggtagacatctaacgtggggaaagtttataggacaaaacaatagggtttattaagcgaatggcaacacgggtgaataaatttgagcgctgcatagatggaaactatggaagtaagctcaaacataaaaatatatctgaccaagtaacttctttgttgccaagtcagtctaagtgctattttggtaggtttctatgaaaagggccaaaatatggtctaacattgttaatgttatgataggacactctgcatagatatcgattgaagaacacatctcaacaacatatggatttagaatataagaacacgtgaatataactctgatggggtgacatacatataaatggtaggcaattgctattatatggactgatagagaggattttgacattggactcataaatcccttccataggaatgtgccatcgccgcccatatatactctttgcttgtctgatgcacactgcagacatttttataactataaatatacataaaaggctagtgaattaccttcagtcacacttgtccattgtactttgtgatacggaccaatcactgtagtaaacattcactaaatcagttaattaattaacatgtaaagcaagacataatggctatgcacattccaactggagcatgtgtatctgaggaaaaggtaatcaacaaacagaacatacatatgtgatcttagtgtttgtgcttaaaaaaataactgcaggtatcaacaaaatatgtcattctaacattgaaagttcataagcatattgtaggtaaaacatatgtaacctcatatctttagacttgatttacctcatatctttagacttgatttaccaacaccatagaaaaatagaaaaataaagtacaggctgccgctagtcatgcaaagttgatatgaaaaagagaagtgagaaaaaggattgcaaggagaactgaacaattaatttgaggaatccaatcagcaggaacacccacgtgaattttcacgttttggttaccacgtgcttatgggcggtcgatgcaccataaatcttgcaaaaccaagcctgcgaggaatgcagggaggagataaaacaacggctacagttaacactgtgacccgcaagaagacaccggcatccgcacctagcacgatgggaagcaacgatggtgatcactggccctgcacggagacagcgacggctggccctgaaagcctgagaagaaggcagcgactccggatccagccccgcgaggtcgaggggagtggaggtgctgaagagatgccggaggagcgacgcgagatggtcaccgggggcgtagaagaagctcacccggccagccgcggcggtcaagaatggcggtggacggcagtggcgttggccgcgacgaagcaggaaccctagcaggcggcggcgaagaagaataggtagcgcggaaggggatcgacagggaaaccaaaggagaaactaatcgcgacctcatgggagggtagaagcagaagaggagacggatcgttgacgcgtggcagatcagacaagaggggacggatagttgacgcgtggcagatcacacaagaggggacggatcgttgacgcgtggcagatcagacgaagtagacacgctgactagctgttggctgaacagtagtatagtaaaacagtaccatgggcaaaacttgtaggcaaaaactataaggtttatatgatgtataggcatgtactccctccgttcctaattgatcatcatattatatggatacaccaaaatttcaaatatgaataaagaattcatggtttaagttgaaagtttttaaatttaagttgaaaattttcaaatttgagttgaaagttttaaaattttgacttgaaagtttaaaaatccgagttgaaagttttaaattttaagttgattttttttaaataattgaaatttaagttgaaagtttttaaattttagttaaaagttttcaaatcttaacttgaaagtttgcaaatatgagttgaaagtttcaaattagtgttgaaagttttcaatttggaatatgaagtttctaactttgggtaatcgaaagacttaaattatatttgaaaagttacaaaaaaaacaacattgattatgcctaattatccgggaaaagaaaacaaatccagaactaaccaagctagtccaaatgctaatcgcttttttttgtatcggttttttccatagcaccgctcgtgcgttacactaacgacacatgtccgtgcgcgccagtaactcatctcgcgcgtacgcgctaattagtcttctcgcatttactcggataacaaactcgatgcatgtaccatcccattatttcctagccaatagcaaatcaaaacattgcatgatggttataaatactttgtgcaaatcaaaacattgtataatggttataaatacttgtgtgcatggatatcaatgtacatttatcgaatgcacaaataacgaatagacttaatgaatgaatacaaatatgatgatcatttggaaatattctaaaaaaatatatgatgatcaattaggaatggagggagtaactagtaaatagtgaatgtcataactcactcgaacaatatatatagtgcattatgattattggattcataacaagtgttgatcactagttcatccaaaaaaaaatatgactatatcgtttaatattattaacttttatagcattctagataatgtttagcaaaagtatctttctcttaaaaaaactagtcaaataccttttataaatataatatcattaacaaagataatagttattgtttcctcatgtaaaaacatagataatatatattatggagcacacacacatgagctagttgctactccctccgttcctaaatataagggattttagttggatgtaacgtatcctagtacagcaaatctggacaggctttatgtctagattcattgtactagaatgtgtcacatctaaccaaaatctcttatatttagagacggagggagtagtattcatgtgcaagtaatagtgctggttgtagtaatattattatcaaaaataaaaaagaatgagaaaacaagaagaagatgaaacaacagaagaatagaatataaggttaaagtttttagtttcacaccatttactacaaagaacaattttaataatattagtatattatcgattaatgtgagtatataccataccatgaatgtgagcaaccaccctcatgtgtttgcgctagtgactaacctcctctttttcttacttctttcgaagttctttgaacatatttaggtaataatgttttgttttgaataaaaaagaaacaattcaactagattattttttagagagaatccatcgtgtgccgctgactttgtccctgttctataatataccactgagtttgttaagttctacagtatgtcattgtattttgcttaaattctataatataccatcaccgtccatttaaattccattagtacttaattttgtcctaatgatcgaaatatccctaggaaaaaaatttccaaaatttggccgaaaattccgaaatatcatattataaacgagacagagaagttgcccatctcaaactttgtaagttttactatctgtatgataaaattgtataatgctaactgaggccaactagatgacaatggtatattatagaagttaagtaaaatgtgatgccatattagaacttgagaaacccaacgacatattgtagagcaaggacaaaatcagtgacacacaatgaattgtctctgttttttatagttgttcggttaactacctatctactatgatgcggcaattttagaaaaaagttaaatcttatactataagtccatatcttacacattaaattacatacacttataatataattttcaaaatataaaataccctattctcattttataggagaaatatggaaaatgatttattatctatttaattatgagaaaaatattagttcaaattaacatatatgtagaaaataaaaaacaatatgaaagaattatggaaatacctactaatgtagtcatcatatatcatgcaatgagaaaagaagaccatagtcgaatgctttattattgagcaaaaatgatggtattatttttatcatcttttagaggaatctatctaaccataattaattagcccgtgtgagtagaagtctgtatcgtcatgcatcaatatatcatgagattattagttatagctaagtacaccgacccaaccatacttagcatatcacaagactatcgggtaatggacaattatctttaattgtgctagagaaaaaagtactccttccatcccataaaaaaccaacctagaactggatgtgacacatcctagtaaaataaatctagacatgcatatgttcagatttattgtactagaatatgccacaccagttctagattcattttttgtgggacaaagggagtaaattacagtccatactacgtattcttaaaaattcttaaaagcttcatataatgttattctttaaccattctttatatttacacaatagctaactttacatttcaatttggaccaccttattctatccatctccaagtccggtgactcagcaattactccgcacattaactatctctctctctctccattttctttttccctccgatagttggataaccgatagatctagcaaggagcctagatatagttccttcgctctttgttaggtcagctcctacctcccaaagtccatgtaagcccgacatccccgacctcaacagcaaccataacaatagtgtgcatcacgataggagaggagaaaaagatttgtcggttactaaagggtaaggctgcgcatgtaaaggcaaagaggaggaacgatggtggctcatggagaaagagcggtgatggcggtgcagttagtggttgctggtggtatgaagaatttgttgtcgacacaatcacttaattttttcttaagtattgatgatacatgggtcaccagttatataaagaaatagtcctagctagttttaaaataataaaaatattgactgaattgaccattgtttcacaatggaccaggtcatggttagtcttttcaatttaggccatatatctttgcaattatttgcaacatggaccaggctgagagagttgggctggctgctaagatgacttttctactccagccatgtaattaacatcacgataagctcgagcgagcctcgatcatcacgcaaaccagaaaggggatcggcggcgctggtgaagttaggagaggaggcggtggccaggagcacaggacagtacagcttagagaaagattagagccacatacatttgggaggagttaatggattgattcatgcttgctttctcggttattttcccagcctccacctccagtggctgttggcgccgctgccggaccgggacaggtaacgggattacgattttcatttgggcagaagcaacggatgatatgattaacaggatgttatgcaggctgtagatcgatggtggaagcgcacgaagtagaagacattgccacttaattcgcagcgtggccttattcagttcatgatgcagctcacactagcattacaagaagatcaacgccattgccagtatgcctggcattacctgccggctgccgccatgcttcggagtggatggttcaccgcgcccgacagcgcgtcggcgagggtgtgaggctggataatggattggctaatagggattggtacttgccgtccaccactcacgctgttggcacaatctcctccggcgttgtcgacgtcggccttgagcccgccctacgagagccacttcatctctctactaagtaaacgcgatgttggagccgcgctggcagtgaaaaacctagattgctatacctggtccaagcaatgttaagtgaaaagtttggtatagacatggttcattatgcaacttgggtaatagttccttctttttcataatgtaacttactataccatagtgcaatttactctaaaaatattgagaaaagggcgggtatcgcgtaaaagaaaaagaaaaatctaagtctcctccgctccttgtgccgccgccaagacgaacaggggagggccgggcggcgagacgagcagagcagcggaggggaggggatcctggtgagcatccgcgtgccctttctgattcatctctctctctctcccaccccaccgggactggaatttgcttgcgttcgtgaaccctactagcttctcttctagatctggaagaagctcttttcctcctccttaatttgatagccttaaacctctcttaattcaagtaataacagtttgtttcttcacccaaacccccatgtcccaagttggatccgccgctgatatgagtttgtggctttcttcagtatagatgaaagttctcaaatatttacctgcaggggatcttaagtttgttgttcagttgagtctaggcagagtagctccgaccatggtttttctgccatcatgatcaactaagattcggttcttaaatagtatattttagaatcaaccaaaatacagtttttgcttatccttcttatatacttgatctcgtacgtttccaacgtgcacttagatatttgatctctcaagttctgaacaattaatctgcaagggggaaatgacttaactttttatcacttttctctacatgtttataattaaagctgccacaatatgaatgctccatatgtaaatgaatctgctgagtccttcttaattggtcataaggatatatttacaaaatatgtccactcatagttttttcagtgtacatgtatgagggaataacatattgagatgcttatgctgagggaagaagtgctatttttttttaaaaaaaatcgtacatgagtcatggctgtacctgacttgatgtgtgtatgatcggttttagcattaatattcaagcaaattagtgcataggtcaagttgattttttcctctataatgatagtttgtggcatttctggtgttcttgtgtgagttgtgttgttgagatgattgacaatttggtacttcctccgtttcatattataagactttctagcattgcccacattcatatatatgttaatgaatctagacatatattaatgaatctagacatatatgtgtgcctagattcattgacatctatatgaatgtgggcaatgctaaaaagtcttataacctgaaacggaggtagtactacattgaagtttatggtgatcttgtggcctgctgttcgagaagctgaaaaataaagtttgcatcacgtaccatgagattatttaacgagatggtcacattttcattgcatcaatgatttgtttatgtgttgcagtcatggaaattaatactggtgatataaggggctatgcttatgttccctctcgcaaggccgccgggtcgccattatgccgacgccacgctccgcagggggcagtggcggctctcccaccacctccgcgccgcagccgcagccacaagcggtggtggtgcgcccgacgtgttcgatgcagtgcctgccctggacgaccgcatgcggtgcagcgcgctgctcagggagcgcgcagtgggaggggaccactacgggtgcacctccctcctccggtggatgctggcccggggacttcgccccaacaggctggcgctcgctgcggcggtcaaatcgtcgtccgcgctccccgactgccgcggcggcgcggcgctcgggaggtgcctccacgggctcgctgtcaaggtcgggtacgcggatggcgcggtggtggcaaaggcggtcatggacatgtacgggaggatcgggtctctcgcggacgcccacacggtgtttgatgagatgagctgctccgacgcggtatgtaggaacatcctgatcactgcctcctcccgtgctggactttacaacgatgtgttccatttgttccgtgcaatgcttgctagtggtgtagatgagagcatgccaactgcagtcacggtcgctgtcgtccttccggtgtgcgcaaagttgagggtgctgagggctggaaggagtatccacggctatgtcatcaagactggtttggagtttgacactctgtctggaaatgctttggtatcaatgtacgcaaaatgtggtgggagcatagctatggatgatgcgcatctagcattttctacaatttgttgcaaggatgtggtttcatggaactcaatcattgcgggatattctgagaatgggttgtttgaagaagcacttgcactgtttggtcagatgatctcagaggaatgccttccaaactattcaacattggctaatgttcttcccttctgttcacttgtggagtatgggaggcactatgggaaagaaattcatggttttgtggtccgacatggtttagaaatggatatatctgttagcaatgcgctgatggcacattattccaaggtttgtgaaatgagggctgtagaatcaatatttagaagttcaaaaatgggagatatcgttacatggaacactgtcattgcgggatatgtgatgaatcggtatccctcaagggcattgaaactgtttcaggggcttttgtttgccggaatggctcctgattctgtttctcttatcagcctacttactgcttgtgcccaagtaggcaatctcagagtgggcatcagggttcatggttatatttttcgacatcctgaacttcttcaagaaacatcattaatgaatgctcttgtcagcttttacagccagtgtgacaggtttgatgctgcttttcgatcttttatcactattcagaacaaagactcagtatcctggaacgcaattctctctgcttgtgcaaacagtgaacaccatattgaacagttctttagactccttggtgaaatgtggcatgacgtaactcagtgggactctgtcacgatcttgaatattatccgcatgagtacgttctgtgggattaagatggttcaagaatctcatggatattccttgcgagtcggttatactggtgattcttcagttgcgaatgctattctagacgcatatgcaaagtgtggctacctgcatgatgcagaaacactcttcagaagccttgcaggacggaacattgttactggcaatacaatgatttcttgctacctaaaaaataattgtgtggaggatgctgagatgaccttcaaccatatggctgagaaagatttaactacatggaatctgatgagccggttgtatgcacagaacgatttgtgtgatcaagctttttgcttgttccatcagttgcaatctgaaggactaaaccctgatactataagcattacaaatattctttcggcttgcatccatctgagctcagtgcaacttgtgaaacaatgccatggttacatgcttagagcatccctagaagatattcatctagaaggagcacttcttgatgcatactctaagtgtgggaacatagccaatgcatacaacctctttcaagttagcctgcataaggaccttgtcatattcacagccatgataggagcttatgcaatgcatggaatggcagaaaaggcggtagaactattctccaaaatgcttacacttgacattaagccagaccatgtagttctgactgctcttctgtcagcctgcagtcatgcagggcttgtcgatgctggaattaagattttcaagtccatcagagagatctatggagttgaaccaacagaagagcactgtgcatgcatggttgaccttcttgcccgttctgggcgtctccaagatgcatacagttttgcgttggatatgcctcctcatgtggtcaatgccaatgcatggggctccttgctaggggcatgcaaggtccatggagaggtcaaaattggtcagcttgcagctgatcgcttgttctccatggaggctgaggacatcgggaactatgtgatcatgtcaaacatctttgcggctgatgataaatgggaaagtgttgagcatgtcaggaaactgatgaaatccaaggatatgaaaaaacctgcaggatgcagctggattgaggttgagaagacacggcatttgtttgtagccagtgatgttcagcaccaagataggttttctatctacgatgtgttgggaagtttgtatcagcaaatcagaggtacacagggagggacagaacatttagttgtgacttatgagctgtgacataaaacactcagtaaattacttggtgttctggccccgtcattgttttgggttgccaaagatctccatggaactgagtgacctttccatcacatcttccgtggtgagcttggaatctcattatttggtttgattctgttttaaccttcttgtcactgttgttcttgatgttttggtgtaacactttttctcacttatgcttgccattgtgcagagtaataagtaacagctactgatgtttttcttggaatacttacactacatatcacttgcagggattgcaatctcatatctttccaatttttttcaggacaacaaatggagacatctgcttacaaccgtgaaccggttggagtgtctttgtcagctcaaaaaaagattggttcctggcgatgcattgttcttcctgaggtaagcaatgctaagcgtgtcatttggaggcgaagcaaaatcccctccacccacaaaccgtgcgaagaaagtatttttcgctccccggaatccgctgtgacccatgagcggttgatggatttcaggggaacagctgacgcagcacagacgtccgaagctagcaaggcatcctcgtcctcacgtacgtccgatctgcccccttccacgccgtggttccgggagctgtgggtcaacgccgacaaatagttgcagccgtcgcctaaggtatgtcaaatcgagagaggagattggacgctgtggcgctgtgttctgtgtggttggtggtgcttcttgggtcatttgcaaacacctcctctaagatagcctgtctgcaaacaccactttcttaatcgagaaggtggtacttcttgattctaattgatgaatcaagaaagatggagtctagtatatacaaaatgtggtcatttgcaaagcagacagagaaaagggttgaagatctatattcagatgtgaaaaaggtaagattatacttcctctgattccatgcataagtcatctttgaattcctaactcatttccaaatataagtcataacttgaggcaccttttactctcattttttttccttctttgtcctttatgaatacatgttaccactcgtgaacatgtccccactgtgtataaatgaagggcaacgagctgatttcatcactttcttaatccttgtgcacaagtataaaaaaccatttgtatttggaatcagagtctcagaggaagtatatattatcatttgttttgacattcatgtgaacatagatctaaggcagaaatgttgtatttcttctgggtacggctgctgctcagtctgaactacttattagctttatagttggtggttaatttacatgtgcctgacaggaggttgctgttggtagccatccttactttttttaaataaaacaaatgttccagatgagatataatttttggagacaccagggtaaagagaactgtgggaaattctagaataatatacccaaaaataaaatcccttttgtttcttgaaaacacaggactacgcttcattttattaagaagaagaaatatgtacaaacgagggatccaaaaggacccctcaatacccccaaaaaaaacgtcacaaaaggtgttgcttgactaaaatcccttatgagaaagctaataagtgaaatataaaatagtattggccaagtggagtactttcacgttcgtctttcctatatccaattcagcactccactggaaattctgtgtgcccctacttcacttcagcttggtagtttcccccacctttccaggaaatctgggatagaatactttatgcccaatcattccaactaactatttcatcctgtcttagcgtagcttttggcacaaaattagctgatgcttattcctcagataatattcctctgaaaacatgaaaacattccatctaactatttcagatggtcataatccttttgtatttctttggcaagccgttttgtactaaaacctgccctaatgtgcttgtgtgagtccttttggactcttttccttcttattaatataatgatgtgcagctctcctgtgtgttcgagaaaaaaaaacttgaaaacattgttgggtttgaccaatgattaaggactgccacgatcatcaactgctacagtttaactagttaagaggttccgagatactccctccatacccataaaggaagtcgtttaggacgcgacacggtctccaaaacacaactttgacttcttgtttctataaaaatatttattaaaaagtgatatatgtatacttttatgaaagtatttttcaagacaaatatattcatataatttttacattttcaaactcaacaacttgagagttatttatgatttatattcccaaggtttgacttaaatattgtcctaaacgacttcctttatgagtacggagggagtatgtaattgccaatttgccaagtgctattgctctgtgaagtgttctgaaatgttcaacacctcaacattcaaagtctctacatatttctatatgtactggcatggtagttttcattcatactatggaagctaaatagaactgtgtggcatctgcagataacagtgtcctattgcttgcatatgagagtagtaaataatttgattttgttgcgaaatacatgtgcttgacatgtatgcttgctgttaggttgatatcacccttatacaatgttccagataagataattgttcgatgcaccacattagaatttttttcctggcaacttcttttatgatatagcaaaataaaagtattaaaagtaaataaaatgctttattcatcaaagaacttgaaaatattcatatggatttgagtagggaagtgttatgatgatctccaacattcctgcagatattaaaatttctaaatttatattgtttctttttctttgtgcaattttctccaactacttagcagctaatcatgccttatctatgttttcgttaaagcagtgaacagaacatatgagcataatctgaacagttacttcagtgttaagggatgcttttgggcatgtgtttaacagtactgatttcattccatttcatttttataggcgaagatgaacttgatgaaggaatctaaacattcagtagatccagaagctcccttgctcatagcatagacccttgaattttattgaatagttagtttatgaaactttcgttactgaatatatgccagggtgtgcccccaagaatcacgtatttttggaatttgaaatgaaatagtaccaaacaaatttggagagtgatgaacttttttctttagtgactaatgttttatatttttgtcaagtgccatgtttcgtgctaactttcctaaactttacatatctctagacgtgagagaatgttcaaataactgatcatcaccgtaaggcggcaaagccgcggcaagttttctacttcttccgacccaaaatattgctagtagtatatatgtggttgttttttaagaaagaccctacgtttccctgttttagagcgctatccttataagcggaattttcgcttcttgggattgtatttctgtcaaagacgagtagttttccggataaaacacaccggtgccttagtcggttcgagggtatatgcatattcagtgtaaatgtgaggagttttttttttgcaaaaatactaccacgcgtcttttccttcgcggatgtacacggccgtgcttaggctaacccacgaaacccacttataagctaaaataagccgcaagtccgtttattttgatctataagtgggttcgcggctgacccacttacaccccttgcgtgctaaaacagcgcaatgaccagttgaatggcgtgttgccgattcctctcacccgatcgagtcatgctccagagcaatacaaacgtggcagcatctcaagacgccaaaaaattttaaaaaaaaagaaaggagaaaaaaaaaacgtggcagcatcccgaggcgcccaaaaaaataaaataaagagaaaaatggtagctttagtggtttattaattcatgattacatgtgaaactttgataatatatcgtatattaatatatttatattgttttattgaactgtataatagtacaccagtatcgactgtactagaacactatattccaagtaggtgtgggtattcggtctgaccgaaaatttcagtctcggtatttggtctttatgttagttcgtctttaaaaagtgaagaccgaatttcaacacaaaaatatcagtcctgaccgaaattcagtaacattttcatatatgcaaagaaataattgaaattttcaacacaaaaatcacaaaaaaaatcgcaaacacgtatgagaagactcttattaggttacatgcctgaataagtagagatgtgaaaattagagtttaatcctattgaacttagtggattataggttgtattttgacaatttttttaaatttggccttttcagttaaccaatgagactaaccggatttaccatacaaaattcagtcttttattacttaggactaaattggtctcggtctttcagttcagtctttttctactaacccctaattccaagagccaaacctcagtctttttggtttgttttttttttctcacccctaattccaagagccaaaccgggatggcctcccgaatggaattgacaaacttggatcagacggcggaagcttagcaaaaatttacaaatgcttgaaataagcataacaaataggcaaattttgctacaggacatcgcaactttgtggttttgactgtaggacaccgcacgaagtcacttttgggaaagaatactctcaaaagttgaatatttgctggtggacatcgcacccattaaaataatattttttggttgaggagacagaaatcacgtgaaagtaatgaatgcccttgggccacatgtcggatccctcctcctcgattctgagctcacgcgacaagtccaaccaccgtggcgatggatttctccggcggcgccggcgcgacgttgctggagatgtaccagaacgcgtggctgctgctgctgctggtctgccggtgccacccggacgcgtgccccaccctcgtcgctacccccagtatggcagaggccttccgagcccacctcattgcggatggctgttgacacgggttttggctcgtgtcctaaatataaatataatttgttaaattataaactaatatattatcttaaatatagtgcgtacaaaatatatataataataaataagaattttattgggagacagatggtgaagtaatttaaataaatagcggccacgaaataaatggccatgaaataaaatataattcacttatattggacaaaaataatttttggcttaaaataggaatgcatatacgcgttccacataaatatagcgtgaacaaatatttttcatgcgcttttcgtcggaccggcgaacgctaatacttagctttctcgtcgtatccgcatacgaaatttggcctaaaacatatggccatgaagtgggattttctcactacctcgaaatagtcacaccccgaatattttcagaaaaggcgtactcaccatataaaatagcatacaaaaattaaaatgtaagccaaaatagatgtttagctggctagtgaaaaaattatactctaaatagtcgtgacttaaaataaaaatgcatgttacatgcgcgccaaattaaagggggtcgcgtttgacattatccaatatttttatctcgatgtctagatgttggcttgagaaagccaccgtgataatatgcatgtcaagacgcgatgcgtgtcgtataaaataaatttacggcagtgacagtccgctcgatagaaaatgatgcactagaatatatacgtgtgcctctttaaaaaaaagagaaaagactcatatccaaagtgtttataaaagtaaataaataaataaattgaggcgcccaattaaatgggagtatatgcagtcaaaatataggacatacagaatagtcatgcatgcaaaaaaaataaaatttgaaatcaagaaagagacacgcatgtatttacaaacaactgaaatttaaagaaaaaaaatcagtcaagtccaaagggcccacacgtcagtgaaagcaaagagacaagtggtcaagcccataacctacccacgatcaccactaatcatgcatgcatgcagcaaataccagcacattcgtcccgtcaaactgaacgggcccacatatcagccaaagggatgtgcatgcagtcaagccattgcccacaaccaccccacgatctctgcgcgcgcgcgggatcctgttcaaaatcacataaagcaaattaaccccctttaatcctcctcgataaatagaggatcagggctagaggcaaaggggagttcgctggggagaggttccaagaaggttggtgtgagggctggctaaggcgaaaggctgctgtgctgaatcgctgctattacctccgtcccatattacttatctttttgagtttttgtttgtcaatgtttgatcattcgtcttattcaaaaaattttggaattattatttattttgtttgtcaatggctttattatcaaaaatactttacatatgacttatctttttttatatttgcactaatttttcaaataaaacgaatggtcaaacgttgcaaataaaaagtcaaaaacgtcacctattatgggacagagggagtagttcgctactgcaaagcaattgccgccgtgctagtttctcgctctgctgtgccggaagaataagaggtgttccaaggtgggaatcatgatcctccttcgttcttaggctcggccattgtgtacgagtcgaggaatctctcaattctccttcctctgctcgtgttaatgtatttttttgctgtctttcggttcggccaatgagtacgaactagggaattatgttcttgacatgttcctaggcttggccatcatgagtacaagccaaaggaatttttcctctttgttgtgtccttcgtctcagccaacgcgtatgagacaaggaagttcgtttcatttgatggcttttaacatgatttcacactttctcctatggtccggccagatgaatacggacctaggagtggtttccatgcatattcttttcatgtcatcctaccataccctctgatttggtcccgttagcagatacaagcctaggcgagattctcgctctcaggttcggtcctctacgagccgatacaaatcacagatacaaacataaattttgcataattcaccataagttaaataagcacttgcttcggtcacgcttcatagcttcaagccgtgctagtagtgatacaggcatagtgataaacaaaattaattgagcatattaattagcacacatatttgctagttttgaacatatgttcagccatatttctctaacaagaattaaaataaaatggcgtttattttctttcccgtcatcaatggcatcggcgatggggctagccggcgtccacgcgctcccgttccacccacggagtacagcttcccagccggcgtcgagctccatcgtgctcccctgcgctcggaggcggaggggcgcggtctggtggtgtggtgttgggcacgccaccagcggaggagcgccgctgtggatgtggccaaggtaggccgcgcgcgctcagcggcggggcgccgccgctgagcgggtcgctcgtgctccaggcgccgccatcgagcaggctgatgtcgcccaagggagaagcgagaaaagaggaagagagaggaagagataaggggtaatttagtcaacatgaaaacattaatttaatggatggagtgtgagtgtctcctgagaaataaccacatttacaaagcgtgttcctccaaaagtgacttcgcgtggtgccctacagctaaaaccacaaagtcgcaaatgtctggtagcaaaatttgcccaacaaataaaattcttttgctcgagactatacaacgatttgtcaggtctatcggtttctggaattgtagggacaaaccaaaatgatatcaggatgcttcgccaagttcagagtacatctttgaaccaaagatgaattgatgattagttactttaatcattggcatttggtaccccgtcaaggaataaaagactacacaacgaaaaatacaaggggaacaataaatacctctgccattgaaaagaaaagggttagcattgtgtgctttctaaaatacaagttaagttgattaaagattacatgtacaattctgtaattacagcatcgtgatgacttgacagcagcaacatggttgtgttgatttacatcttccaactccctctgcacagacctgaattaagttgcaaatggcaatccattaaaactagtcactttggcgggaaagaatataatagcacaggtgtaacacaggtcagctatatggtcagtttgcaacaaaaaaaaaagtacccaatgcagaaacgttagcaacaacgtatataagtttgtgtccttgggtatataattactatatataagctcataattattattccttatataattactatatacaaggaataaagggcaatttgttcctgaacataccaagccgtgctggcaaactggtcgcgacaaaattcccagaacaaaacagctagcctgtttcactgactcctttactccctcgagcaaaaattaaaaatattgatttgaagcaggttttatatttctgggccatctattattctgtgcagggtaatttctacttttagcgtggcagaaattttattgataaatctcatgcacatacaaagataatgaattcatattaatcatacccagcagcagagaagcaaatacatacacctatatagcatgagtattatggtatattataaggaaattttggtttggtgacaccaaaagattaccgtctttgttttataccactgattcacatgagcactttaataccatccaaagatcactcatgttcctcttaacatcattccatccaaataccattccatccaaggctaagctcgcaacagccataaaacgatttcggcactacaatttggcctggctaatccagacagatcaatttaagtgtgaaagctggtatcggacctctcaagacaaacctttaccaaaaaaagatctggtaaccggagaactttgtaatgaagactaagtttgaagagaaagatattagattggggggtctatggtaatcggagaactttgtaacgaagacagagtttgaagagaaagatatcagcttggggggtctaaagtgtgtgcccaactctgaccaccctcatgttttgtctgtctccactctacattgttgcagccaaccctagggagaggatgaggtggtgcagagacatggcaggatgcttaacatgatggcaaaggtgaatgggtggtgctggcaattaagagggaagagatgaggacacgtatccaacacagtcttcactggcaacaccaagatcaaggacctctgcactgacaagctttgacaagcttttcacctcgctgcagccatgaaaagtaggcatcccgcatgaagacccaccaccaagcacaccatcgccattactccgactaatgagtaatgtgtggtatgttcatcgcctcactgtgcatagagatcgagcagctccagaaactcaagctttctagcacacagtggcactgcacattgctaacaatgagtaatgtgtggtatgtttgtgtttcaatgtccatctgcactgaagataggagggaaagccaagatgccaatgaatgttatttcatctaacataattgcttttggtaaaaagaaggcttggatggaatggtattaaggagcaatagggatcttttgatgatatcaatgtcggtgggtttagtggaacaaaacaagatgggtaatcttagactgtcaccaaaccaaattacgcaacagttccatacctatccccaaggcactctagcaaactcatttgagaatctgccatgactttgctgaaatctgatgatttccttgaggctcacttgtacaatgataaactttgcagaggaaaattcctgtagtgacaaccaatcatgatttcagtcaccagcaagccaaccagaaaaggcatatttggtcatagtatcacctatagacagaaagtttgattatacttcatgaccaaaaggaacagaaacagcaaagtgtccctccaaccagtgaactggataacgtttgaggccaggaatgcaacagacacagaaaaaaaattgagatgttgataaatggtaattacctggagaagtacacataacacatggcaaccaatcgttcagccttccagcgcatatctctgaatctacaacaaagaaaggaacataccgttatatcgattttattagaccgaatatgagcacataatagcagcactatcattatcaaacctgttgacacaatagcattaaattaaatgaggtacaagcaaaaggaaagattttcacggaaataaataaactcctaacaaggcttgtatctggacaggtcacaggtgtctggttgctgcccctaagtttgccctattaatagataccatattaataaaatatgagataggacactaatttatgagaatcttgctagtttcagcagaagtgagccaaatgcatacaatctgattaaaattgcaaaagatctagcaaccataactgggccaccattggcttcaaatgtattaagtagcaaatcatacaggttatcaagtaaaactaagtttgtggtggctaaatgtccacgacaaaagtcttaactattaacatgaatagaagactccaaaaagtgatgattgcccaactgaaaatccatggtcaataatttatttacagttccctggaaataatgaggtaagacaattttgacctatttgtgatggataatgccaatttctgtactccattatcgtgtgcttaaagatatattagagttatcatgaaaatcggagtgaactgttgcatcatttatgacttgttcagaaaacatccccgttgttaaatttcggcccattgttaaatttcggccaattgtcatgctgtttagttccaactttatttcgtaccagattactgtaaagtggaaactcgctgatagcatggacttggtaacacatgccccttagtgggttggagctcggacacagacccagtaaaactctaaagggctgtttggtttgaggaatggccgaatgagattgtcaattgaccacttgatcctaaataagtttggtttgcggaatgaaatgtggtcatcatatatactaagtgggaaaaatgaggaatactagtcattgaaccaaatttgaggaacgatcttacgatggaccgaattctgatcaaaccaaacaacccataataacatggactatcttgtcttagctttgcatatttgaacctatagttacttataaaaaaaaagtgattgaccttgataaatcaaaaaccacataactagtttaaaaaaatctgcatccatatggcaaagtgccactcaaactgattatcttaggctcaacaaccaagataaagcaactagtttatttgtgaagacaacatgattcgtgctttgtaaatttcttaaagcccagagccagcattgaacgagtccatgcataatagcaactagttcatactttcatccagacataacccatgatagttaaatccagaattcctacatttagaaatgtaaatgctggttaaacatccactaaacttccagtgtagagaatgaaaccaccaccagacacatgggccacgagaaatgcataaaatatggctgtggtggtacaatataagactaagtaaaccagataattaacaaggtatgaccagggatcggaatcccggcgataaccagcacagttaccgctccagagccaccagctagtatccaacgtacaggccagaataattcaattttaaattataaatcatacgaactgtatatattcttgcaacatcatttgtaacagagaagtgtaacaaccgaaaaggagagacgcattcaataggggaaatctaaaaagagccttgttgcttgtttctgcagctcgaggcagtctagtcaatgtcacctgccatcatagatcggaatcccaacagtaaccagctggtaaccgttcaggatctgctggctagcaggtatctggcataccagccagaataaaacaaaattttaatacaaactgtatattttcttgcagtgacatgtgtaagtacatttgaattatatgatagagtaggaaaaaaataggcacattcaacgaggaaaataggaaataaaatatgaaactcccatcactcgtcactgcagctcaagcccttttcaatcaacgcctcttgccgtcatacggttagatacaaccgatgtcttggttatacatatatttcacaaaaagaatatagactgttggatttgatacaaaccatttcactacaaaagattgcattttgaccattttggtcaaattgtgatgcattgatgtattttatgtgccaaccggttttggaattcaaatatttggactcaaacatgtcccataactggagggaccagtattttcttttcgaaaccggtattcaaaatgttatgttagatgaaacaggtatcttggttatatatattgtgcaaaaggaatatggaatattgtagtattaaatatgcatgtcactacagttttaattttgacagtttcaatctaattgtgatgtattaacgtatcttatatgacaaatctatgaaaattacacattacacatgccaattaaattgaattcaaaatacgactgccagtctttaggattcaaaaccttggatatgacaactggggaaaaaaggactacctcaagcatattttcctcgataaagcaattcaaccctgtgcttgtgatatctgcaccattgtgctgcaagatcctgagctttccttcctgatgcaaatgtgtgagtgcatgaattagcaaagcaaatatatgttgtgtactgttgattgatctaatttgctatttaccttggtcccataaacaagaccacctccaggggaaggatgaaagcatgcaacgtttacttcatcttcagcactaggaagaactcttaccagctccatgtccgatactctatagacctaacgtgatgaataggaataatgagattaaggcttcattcataagtaagaactgagcttgtaagtggcacagaaaccggagcaagcaattaacacatgattaattaataactaaatattataaatttgaaaaaagggttcatttgaatttttaaagaaacttttatataaaaacattttgcaaaaaatacaccgtatagcagtttgggaagcgtgctaacggaaaatgaggaagttgaagtttagaacagggcctaaatcatattgttagtcatacagaaacaaaaggacactaggagttacaaactataataagaaaattgttcagactgaaatatttaaaataagcagcaaaaacagaatttccagtattttcactgatatgcttatgcataatctaactatatgtacctccaagatagtatatacaggaattccagtttccccatccatcacaatgctcctaagcatagagttatgacgacgaccatatgccaatagtatgtgctctgaagtgggtgagaactgcagaaaaacaagtgctcaccaaattaactgatgaagaaagttgttgaatttcatatcaatatttctcaagtttaggtcaaaaatgcaaaagccagtcaactttataatgctgctactggacaatgcttgagacacaagccacaagttcgacagcaattatctgaggtatataatatgtttctgctcccagtagaagggtggcagcagagatgcctgcttatcttttgcagcactaaaaaaccaacaaacacacaaacaaatgagatgttaacctggatggaagttaagcaatgagctgcccttatcgctcttgatgtaagaactttgccaaacctgtaaggaaaatacattcacaatttcaaaataactagaacgtttacaaatgagaaacctagcaaaagagcatactatgtaacaagactgttgagaaaattacgttgcctcctcaagagagtaaactcggagctcataaataactcggtgagaagggagagggtgacgagttggtgatgttccggcccctgcagaatcatactgcacaggcaattggctaccacggtcgccttcagtttgaggcagcaaacaggcaacacatgctaccagaaatcgtccacaaggggaaaaatgggcacccatttcactgcaataattattaactttagagtaagcaaagaagggtcaacaatccactgcacagtttgtcaaaaataaaatacgcacttcatgtcaaacatctaaaagatactccctccgtctaacaatgtttttccacagcaccccatgcgctcaaaccaaggaagtacaaaatctaagaaaaatttaacgagaaaaaaacatgcatagcaaaatgcaaccattttacccatttcaaagcatttaatgagtgaaaacattgtaataaccacattcttggttttcttaatggacaaacattgtgaaacagaacagtaagtttttgttgttgctgcacaccataacttatccacttatgtacatattcaggcaaagcaatacaggaaacaacagaaaggaaataaaagtttgtgttgtgcaggaaaaatgtgaatacaagaaaaccaaaagtacaatgaagcacctgcagagaacggcatgagaaattgtcaaccggcatgcctcgggttccaatgtaacacatggatccttgatatcatgccgccatattctaagcttcactgtgcaaggtaattcagcagctccagcagcaagcagtgaggtagtaagttcagatccaacacctaatgatgcagcatgaacctcagcttcatcaatttgggggcctagaagtgaactcccaaccccacgtaatgagcccacaacatgacgacgagaagcatgatgtcgatttgatcctctagaactgccgacatcaatcggaatagatggagaagcacctgcaagttcaattacacagtttaatcagtctcagcagtgccagtaccacaagaaggtaggcctccagtacaaaggcatcatcatttggaaggtgcagggtgcaaacctgtatgattttgggccatgaaccagccctgcaaaaagggaagctcccagctacgcgagtcactgaagagatcatgatgatgatttccaccctctgaatttcttaggatcatgtgaacatctaatccactagaagtggtaaacgaattcattggcataccatgacggccatcatgttctgaaggctgagatgttgctggaatcggcacgctgttgctcagggagggcatttgcacatcatctctagcagtagaactctcatgattactagtggagctactgcccagtaatctggagctaggttgccccctgtcaatctgcatttcaactccacttaaaccagatgcagaagcatgagaagtagatggttctccagggcacacatccataggcgtgacaagttggtcaggctgttgattttcaacatctgatgccaatggattttgagctaaagatgatggtctctgatgcacattggttgaactactaaccaagtcattgcgaatcagacataaacttccatcatccctgaggtatgcaggccaaagcaagcaaggtgatgatgaattagcctcatgatgtggacagtttctggaattaatatttgcaaaaaacacagccgagggatagtttgaatagcccgaagaggttgcaagggtcaatggtgagtccgcagaatcaagattattaacctgaaattgaatatctgcataagatcaatcggtacatgaaattatgcaaagaaagcaaaaaatgcagaaaacagtactacctccgtcccagaatgagttttagggttggacatgggtattaagaaagcaggtggaattaaatgtgggaaggttgtgattggttgagaagagaatgtaggtagagaagttgttatattttgggactgagggagtatattatttctacctctgcagtaagaagatatggagcaccatgggggtgaaaatggacagctcttagtgagcggcgggttcttaatataatggttggagcagcagcctcatctcttttattgtagttccatatgtacagctggcacaatacattgcattgagcactatatgttatttgatcattgttcataaaacaagcacagaaagacttcctttttttttcaaatttaacactataatctcactttgtgacctgatgcaactgccagaatctccccccttgcatgaaatgctattgatgcaattggccgatctatcaaataagagaacatcactgaaaaggttagtattcagatttcacccatggaaggagacatactcattaggatctgcttagatatattacggaagtcctgagatccaatacagtctgaggttttagcgtcccaaagacggacttcctgatccaaactaccgctagcaaggatatcaggaagtaatggatggtatctaacctgaaatagaacagaagaaactcaaaataataagtggcaaataagactgcaaaaacagcatttatgcatttttatgtaaaacatatataaaatgctccctatggactaagctgccaagtggtggataaggatatgggtacaaacatgacatgctgatataaggcctgatggttagtaaaaatatcagtacttgagttgtttatttaaaggtcattgtgacttaaccccaagtcattttggtttatcagcaccccctgtaaatcattgtaccatccaaaagtgcaactatatcccctacaacagtgccccccaaccccccaatctatcttccccttattgcgctacgggtggtaatggtaaattagtaggacccatgtggcgtgcaacacatgatgatagcagaacagctgattgtgacgatttgatgaaatatcccccaacaaattggtcaagtgaatcgtgaaattacaggcaacagtgagggacagggttattacagactgaaacgactttgagggtgccaataaaccaaaattacttgtaggaaggtaggtaacaaaagcagtgacttgtagcagggacagggtaagatttatcctttatctataagagcttgtagcacacattctggaacatgatgacagtgttcataatcataccacccaaggcgtgcgccgatgtccactcagcactttcaaacatttcccagtttgatagtcaattattttaacagtatgatcaccactgctcaaaagagatggagttagtccacatgccttcactttaatccttatattccgcaaataataaacttactgtgtagatgcaagtgttttcccatctgggctgaatgcagctgcgatagtagacctggggggtggcaaaagaggacaatatttggcagaccagtgatgcagggactgtgattctgccctgtatacagaaaaggtttcattccagggaaaagttaggtataagagtgagagtacaaaactatgtaactcaacagttaaaatagacaatgaagaatagttcatagggtttataaatatttaccaaagaaatattaggtgtaaaatcgaaagtacaatatatgtaactcaatcattactacagacatgacaaattgtgcttaaaccatcctggtaaagtaagaccccgtaccatgaatatatatcatgtttagcatctgtagctgcatatcttagttcattggaatcagcatcatttcctggagatttgctccaaagttttttagcttggtgttttgttcgaggggaaatctctcgctgagctaatagatcgaagatgttcctgacaataatgggcaaaccaaaggttatatatttaacaagtgatctcatattataatgccattagaaaacaggttactgaaaatgtttttatattatccagaagatgacccctcatgcagtttatttttggagggggccatggggataccacaatggctcaatggtggcattaacactgatggtgctactctatcagggagttgcatttgccattaagctattcccgcagtacttaagtattatgataacaacaatgtgttggtcaaaggagcttttgcaaattacattcaagatgaatgttaccctgaaattggttaggcataatgctaatgttatagtccaataggccataacattatcaaaatactaatgctaattcatgtggtattgaccttttgacatttctaccagtggagacgacacttaatccaacacagctgacctctaggtgaagtggtgtaacagtatgcagaatatattcccatagctttggtccattttctggaacaaatatgtgaggttcttttcacaaatgttgttttaaaagggctttgtatgctaacaaatactgtaccaagagtagaagaagataaataaggccagggtgctaatcaaacttaataagtcacaagagggtttgcagatataattccacctttactgtgtcaaatattgcacatggatgcaatattggttccaaacacagaatcaaaagaaagaatacattttatcaattgaattgtaacagttagtttctcataggattgtaccaacttctctagcagaaaactaaatgatgatgttaagtagacaattacctttgcctagatcttgcagatgttgcttgatatctagaatacgatgcttgtgcagaagcatgctttgaaccttctgcccaatgttcagccatttcaggccttcaatatatatatgcacctaaaaattaattgaaccaaccagatacaacaagatgtaaaatgttaatgaaattgtatgatatataacagaagttaagtaagaagtttttagaacaattcttcagaaaaacactgacacaaacatcccaaaatccaacatatgaaaatcagaaaatgcagtatactccaattaaaaattagaaaacagcacatcaagagtgactggacacgaacaacctaccatttgatagattccctatggtaaccagtgtgtggtagatataacttgccacagatgcttagattatcatttgaccttaggtcacctcgcacaatgttcttctgtttgagatattcacaaaattgtactacagaacatccagctccagcagcagtgctgccaaaggcaaacaaggtgcacacatgcacaatagcgagatgcagcaaagaaaatgcatctcaaattatccaaagcacggtgcactatgcaagtcatgctctactagcagccaggcgctaaggcaccaaagaacatttctcatcaaaagactgcttagaatataaaaccaagcccaactagaaacggttgcttcaaactaccaagttttagtgagtctgctagatagtaagaaaatcatatttatgacataatattgccaattttgataaaaataaaagtgacatggcatgctatatatattcaacggtttagttatttctagtaggttaaaagagctaaggtttcatctcattagattttattttggtgaactgtgcactcgttggaaatactctctgcacatgatatttcagggatggatcacatctttttgtgctttgagctgtaggcaattatggacctagcatattaagtgtaaattttgcaaacaggcttgtacagcagtgtgcatattcattaagatgggtttttcattgaaaaatttgaaaacttgtcatcaaacacttgctctttaagtttattctgcatatgttgtgtgtttcagggatgcttgccattgccaacagatttcataacacatttgatgtcctgctcttgtgagttaagaatgcatgggaacaatgcaaacaaaaagaatttcaattcttacttttggacaagtacaatttattcattggtaaaaacatggagagcaagtcagtccaaggaaggcctacattctgagctcacatcctatgccaaaaatgcataaagcaaggatagatcaacagctcagcaatgaatcattaagggtgtgtttggttgcttgcattttcctagcctggctcatctctctcatcctggttgagtctagcctggatgaagagatacacatgcaactgtttggttgtttgcatcagtttagcccggttgggatgagattttgtttggttgagtgcatgagagatgcggtttggaaaagattttgtttggttggttggatagatttgagtctagttacctcttcatttagttgggtgaggttacctacaaaaatttcaaatctagacaataggtataaacaatttttcacatacaaagaataatattggcatcaaaaatcacccggcattctctgcaccaaaagtgaaatttcttgagttctcaaaaaataaaaagtcaacaaaacttcctccaccatttgatagcaaagcgctggaaaaaaaaaagaaaaaaaaagagagagaagcgtttgtcctcctccttgttgtcgaggagatgagttcttgcctcatcgccgccagccgttcccagctcctctgtcgccggccagtaccatgctcctcgctggcctctcatcctgatctgacatgcgcgctcctctgctcttctctcagtagaaaatagaacagagaaaacaaaaaaaaaaaccctcaatctcatcgttgacttgcttcatcggcgctcccagctgctcaacgccaccatggtcaccggatctggtggcctggcggtcggagaaggcagttgtggcgacagaaaagagaggcagcgcatcgacgcgatggagatggcaagggatgtaatagcggcagtagcttctccactggggtcggccgagggagctcgaggtcagctgccagtccaccaccggagaagacgccaaacgagcggtgaccgcaggggatttggtggcggcagcggcaagggagagaggggaagaggagagcaattgagaatgggaagatgaaaatgagagggaggaggtgagcggatgctagacccctgccacgcacgtgcacgcactgatgcaacgcttgcacccgcgctgcatccaccttgcatcgagtgagccaggctgaggagcgaagaagaaatcggccgtttctctcgggcctggctaacctacttttgcatgaactcagccaggctccaaagggcatgcagttaaccaaacaagcggacgcgtctgcatctcccatgcgagccagggtagatccaggcaaccaaagagcccctaagactaccaatatggttcatatctgatatgcacatgaaaggaaaattgatacagtaatacaatatgctaaaacaaccagaccgatgaaaacaaaaaagttagatgcattgccacacaccaaaaaactaccgtatagattcctataggggtgaaagagtctagcggcgaaccaccaagatcaaacccctacagttagttaacatcatatgccaactgccaacatgccaaaaatacccagcttacaagtcaaaacagctccacaagaacccaatcaccatgtaacccgatctcgcctcgccttctacctcgagcttgtccgcttggggctggcggatgcatctaggaggctaggatcataggaaattcaggaaccctccgcacgcccaaaacagaacatatctgccacgaaccctacggacggattgcatcctagcatcgaacaaatccgggggaccaatccaatctaatccaatccaacagcgcactccgacaacgaatcgcacgggatcccaaaacaagtattccatttctcagcggggcacacgcggcggaaccaaacaatcagaagctagggcttaccacgacgaggggatgcctggaaaccgggcggatctggttgcccggcggtgcggagaggcaggggggacgaggggcgggagaccgaggccgcggcaagggaggggggcgcgggggaacggaaggggtcggttctgcggtcgccggcgaaagacgccggggagcgggcggcggcggcggcggcggcgaggtgggggtgggggggtgggggggggaggaggggatggggtgggggcaatcgggtgcttttgccctcgtctctttttctcgttgcgcttaggacgctttggtgggagggcgtcaagagcgagtcgagccgagaaaggggagacgacgcggctccaccgtggaaggggcgatacgatagcgcgtcctttcccaccgttggatggtgggcatcaacggctctcttttttttctttttcgatctcatatggggagtatattttagagaacgctaaccatattgtgataataaaatatctatatcgggcttttttccattaactcgcttacacttgtgactccctctctcttggacccccttacctttctcccacactcacacaggagggcggcggcgtcccaaccttcgtctccatcgacattgtttctctggtctgccgtcgttgccgccaagaaaccccgagcgccattgctcccgcttcgtcggcattgacatcgtttctcccacctgccaccgctgggcgggaatcctcgagccttgtcgcccctgcttcgtcgccagcgatgtcgtttcttcagccttgtcctccgctagtggcaaagttgtttcagagctctttagtttggcctacccctcctctgccatcactacaggataggaagaagacaatgtattttttatgggtggtatattttgcgaattttttaatgtttcagccaatgtatcttgatgtttttttttgtgttggattaaatgttgcagtgggattttttatagtgtttcaatttgtctctgattcttgtggatttgttgatgtttcagtaattgaagcttgatgtttcatattcaatccatggttcaaccgtatttcatataaaatatgtgttaagatagtggtggaatattcttccacaagtactggaaatagagggctgaaatagcgccctctgtatgtttttctatatttctacaacaaaaatgattttacatgagtgtaagaccagtgaaactgatattttcctcctcatagataaaaattcaattagtaatcaataatatttgctttctatactatgagcacacttataaagacagatatagtagatacgaattctctaaagctttggcttttttctcgtgacatcctatgtatgcatgtgatagatatcctctaacatcaaatattatcaaatattatgtctcatcctcgtcatcctctagtttttaaaggctatagctatgatggtagcatcggcaagttaaaacgaactacaaggaggtaaatcgtggatttgtatccttgtagacttgaggatttgttttcatgattatcggcctgtagcctgatcatcagttactatattattaacgtggttgttcatcaattactatattactaatgtggttgttttagcatactatatacttactttatgttaatatagtaccatgcaccgcgtggtatttttgaacaagtagctagtagctcgtaaaagggacgaggtacatgctctaagatcaaaagggatggagagtataatggcaagtcattagaccacatttgcgcaaaagaagtatggcaaaatgtgctgggtcctttaaccctatattagacatgctcaaatgtggagttaagctcaacttagggatcaggtggaaataaaaactcccaaacccgatgttgggacaatagaagaagctttttctcatgtgcaccatatatctcgctctcggtcacaaacactaccttgaacatccacaacaacataggaatcatgaacttttgtgtcatcaggccaaggaattcttcacagcacgaacatcacaggaatcatacatgttcacctcagcgccatggcactccctttccctagaatgtctacctgcccacttcccttcacttccatcatgtcttctacatgaaaacgaccgtccatctcatgcaggtggttgcagttaatacacaaatcatggagaagaaaagcgttgctacaacataataggaatttagaagttgtttgtcaaattctattggtccaacctttagagggtagcggagtaatcccatatggaaccgaaagggtcaccatgttggatcaaagacgcaataagaaaccaattcaaatgtgacaattgaacattgtgaagatccagcttttttaatatataatgattaaatttggatgaagggagtttgaatatagtcacctccttctaaggctacgttcggaacaattgcctaacttgactctaatgttttccatacacacgctatccaaacggttaaacaatgcattttttaaaagtaatatttatagaaaagtgcttaaaaaaccatattaattgattttttaagtttattaagctaatacttaattaattatgcgttaatggatcgtttcgatttatgtgctagtacgaaaggttgccagccttagcttagggtgtgtttggatggagggatttgggtggataggacatggcggcccattatttgtgggtgtttggttggtgggcggaagtgggatagggcggcccggaggggaatattccctctagatgccggatggtggtatctggccgatttggccggatggagccgcccgagcgctcgggtgagcggggcgagcgacgacgtgggtcgtgtcacccttctcaccatgcgaaacagcgatgtgggtaagcggcgatggcagcgggatgaaggaggcggcggtggcagcgacccggtgcacggcggcggcaacggaataaggatgaggggacggcagcggcaagcccaaaggcggctgcaacgggaggaggaaaggagacgacgacgacgatgacgaccggtggggggacggagacgacgacgacgaccggaggagacggggacgactgtgacgaccggtggggacggagacgacggcgacgactagatttggaggatacggggcagcggccggtggggaaggagacggggtggcggccggtgtagaaggaaacgacggcgacaaccggatctggaggagaggtgagacgagcgtggcggagaccggtggggaaggaggtggggcggaggccagcggtcgagaaggcggggcggcggccgtcgagaggagcagggcggcggccgttgagaggagcgggcgaggcggcggccggcgtgcaagaaggtgaggcggcggccggcgtgaagagcaagaaggaccaactttttttctttttttctcctttttccccttttatttctctttagattttttattttgcagtacattgataatttttagtttggtgaatttgaaggggtatactcaccacctctaatgatgaggtgattgtaaccactcatccatcctactccttctaaccaaacaaaaaaatggatcaccaaatccatcttcatccctggaaccaaacaaaagactggattgccatattcactctaccaaacaaaaaactggctcgtcatatcccatccaaccttgactgtgaaccaaacacaccctaagcctaaatacttatacaaatttagttctagttttctccttctaaatattatacaaatttattttgccaaaaagtctcagctgtccattaattggatgagtggctcacatcactcgcagtatttacctccggacgaagaagaaatcgccgccaccctctccaaaaaccctagctttcctccccctcgaaaccccaccacaccactgcaacgcgtgcgagcggcggcgagaggaaggaggagaccgatggggcggccgtacgcggtgaaggggcggaagaagaagcggaagctcgacgacggcggggcctcccgcgagcccccggtcgacgaagaggcggcggaggagctgccgccgccggagggggtggaggaggaggaggggaaggaggaggacgtggcggcggcggcggcggccggggaggttgctgatgggctacccgtcgtgccacggccggtggacgggaagcggcggcccggcgcgatcttcgtgctcgagagggcctgcctcgaggtcggcaaagtcggcaaggtatggggcgaagcttcgccaacaaatttattacacctttttcttgcgcttttttttcgaccaatccgtttctggctttggatgtacagtttggatagttggattagttctgttcttatgcttatcttgataaatttgtttgcgctagaagataattcagctgtatactttgttaacgagttagctgtattgtatctgaacatatcattctgtatacctgatgattgaggagcttaatgctacacgaatgatacttttgacaattctttgttagctatattgtatctgaacatatcagtctgtagctctgatgattgaagagcttaagctgcacgaatgatatttttgacgattcttttgactctttgtgtagactatgcaaatcctgaactcggatgaccatgctaattatttgaggaagcaaaacaggaatccagctgattacaggcctgatatcattcaccaggtatttcgaatttcttgtatttccggagctcccagggattaatggcacatgattaaagcctgtcctctctcacatctgtacaacccctgtttgaaactgaacgaaagcagacatccaattttctgtttgaaatcattccgtaccacatcattatctgtgttctattttggcttcccctattgaggatatatacattccatggcatttacctcctcacttttgggggctaaccacagaatggcccctctggtaaaggatactacctccgtcccaaaaagaatgttattctggctatgcatctagacatactcttatcaggtgcatagttagaaatgcattctttttgggacagaagtagtagctgatttctgtagttggtgctgtgcacataacaccagaatgaagtcattcttgaaagagcctcgtggtgattttacaaagaacatctaagtgattaatgaaaaagaaattgttcaagccagtcattcatttctctcatttgttttatacctgctttctcaaagccaacataatttgtattcttaatattttgcaggctcttcttgcaatatttgatagcccactaactaaagctgggaggttacaagctgtttatgttaggactgaaaagggagtattgtttgaaatcaagccttacgtccgcatgccacgtacattcaaacgtttttgcggtttaatgtgtaagttaataatggctgtaattgcacatatattgtgtttttagtgttttctgtgaactgtgctgatgaagtatttctacaatattgcagcacaattattgcagaagttgagcattacagcagttggaaagcgggagaagcttcttaatgtcattaaaaatccagtcacccgctatctaccagttggagcaaagaagattggtaagaatccatattcttttagtggtagtgttaatcttaggtataagtaaatccagagttccttaaactagctagagtaacatcctaaaatcatctttggttagactaggattaaatttggatgacagaaaccaaaattttgagaactgaatgtcatgacatacaattttccagaacctcgtttactagttttgtgtagagaatttctactcatttttttcctatgagaatcacaacataaagtagtatttgtaaaatatacctgcaaagatgcacttttagctaggtcaaatagtataattcgtgacccaatgaacatttagtagcacatttttcttgatcagggcatcaggtaatggtccactgttggttgttgctaattcatgagtttttttatacttaggtctttcatatagtgctgagaagtcagtcaatttgtttgactatgttgccaaatccagtgacgatgtaccccttgtgtttgtggtgagttaagctatgccgtcgagttgatttattttttgttccattctttcttcctggtccatctcttatagtctgcacatgatttcaggtaggtgctatggctcatggaaagattgacaacgaatactcagatgattacatacaaagtaagttaccttcaattaaaattagagttagagcaaacagtttgcaggatcatggtgatatcatctatttgctgcattcttttgttattgtctactccctccgtttcatattgtaagactttctagcattgcccatattcatatagatgttaatgaatctagacacatatatatgcctggattcattaacatctatatgaatgcgaacaacgctagaaagtcttacattgtgaaacggaggaagtagctgttaaaaatattattacataaaggtttcaagcaagttgcatttatcatatgctcgctcatttgtaagacaggtttacaatctagctctgtaacacaaatgccctgttgcctttcctgagatgcctggaatgttgcgtgcatttactgtctcaaagatgttttctttagttcgtaaaaaaatgtttttcctttgtgacttatgtaaatatagacagtctcagatttttttttccttttacttgtgttgatatccattgtcttcagatggtttcgtttgactcgtgttgatattctgcacattgttcttgcagtttgcaattaccctctcagtgctgcctgctgtttgaatcgaatatgcagtgctctcgagcagaagtggaacatccagtgaaaggaaattttgaaaacgaacactgaaaaacattatgtgaaattgttgtgtactcgctagctaatgcaattttgcggtctcctcccatgctgagtgtgtactgtattctgattgtggagacttgaaaactccggtggtaatagtgttaaagttcaatgtttgtcgcaacaatatgttacatcttgaggcatactgttgcttatgattaccaccagccttgagctaggttggttgaaaaccgaactgcaacgtttgtcctttgccccaaaattttacgctgagctgagatttacccgcattaacaggaccatttcactcccgagatctcatgacaagcggttttttcgtttgattccttggttttatttatacttctactcaacgcttggtccatatatatatagtatcacagaaaattttaagatagtgggacagttcaatcatgaatcagatcttctaaaataacacaggaaccataccagtcaatgcctgcgagaatagaaaaatggttacggttgcataaaagcaaatgctttagctcttcatgttcagtccagcatgatagaagaagacattgcaatctctagagctgtttggttcttacccaatcttaataataccaaaaaaaaaagttggcaatccaattaatttgttgccaaataattggcattccctttcaaaaaaaaaaaaggtggcattgccaaaatattggtaagcaaattgaaatgtagtgtgaacacatttccaagtggaattttggcagcaaaccaaacaaccctcaccaaacattttcatcaggtttacattgacaatgatccaaacattgttctcaggatttggcaatgccaacactttaaacaggtttacattgacaatgatccaaacaagcttctcaggtgctaggttttgctgaaattaccaagcagaaagaacactcgatgcaactacagtctacattacaagtacaggtaaaaaagtggatgatccttgttatattcacaaaatgttccacggtaatgagttcaacggccaaactcgttatttcatttagtgactacgatacatacttacaaccgggcacaattcgagtaactcgatcagttattcagaacttctttaacttcacagcaagcttatcaaggtgaaagtccatgatctccgagatggtctccaagaatgtctcctcactagttcctggaaggatggcatcctctgcttcctctatgatggcctcgatttcagattcttttttgactgtttgcctgcataagatgctgccgatgtcataaggcgttaggcctctctctgcccccttcttcaaaagcattgtgctgatgcgcagaactcgggcacactggggagatagcgcccacccgtggaacttgagaagcgcaatgtctttgtcagcatctagtgatccaatgtatgctgcggtttctggaccgaagggttcgcgggcttggggccagtagagccactcaaaggtacaatcttcaaactgcaaaggggaaaaggtaaagactcgtaaactggtacagaaaaattgattgaactaagcaagatagcatacaaggaattaacttgtacaaaaataatgccagctaacaatgattcaaatcaaatgaatattaaggacacacggccttgtttactggatcagtgccgaaattgtcacattaacatagacaaaaacattgagaaaatacgaggatattactgacattgtttaaacttccaacaacactaaataattactagggatctctaattactatgctaaggacaaaaatagcagtttaagtttaccaattcaagcgagtgaacataaatacaattgtttcacatgatagcaatgatcaaataccttctctggcaggcagtacccatgatcaattggaatcaacttcaagtgatcttctccatcttggcacactaatatgttcccagcatgacgatcagcatttgccaacctaatatccagtatggcaatcttctgaacctctttaactgggaaagctcgagggcccatatcctcacaactgccattgttatctacaaacagctgcaatgatccaaccttattagatcccttccccatatggaaacaacggaccaacgctgtgggtggtacaccagaaaatccaggaacatcacacgatttacatccataaactggatggtcaagaatatatgctgcaacctcccttaatgcaccttcccctactcgcgttccccttttcaacccctcaccatcagttgacaaaggaaggcccctgggattattctttgccattggttcctcatcaataggcttgaatactgcaacattgctttcacctgaagagtccttcatgaaatagactccccctgaaccctctgttgacatcacgggaaggtacccgttttctataccagaaattgttgagtagatcatttccatcacagcaggagacaatttcacctttccattagcaatgattggctcaactggagcaggtttacccttagctggtttcgcaaggttcaaagcatctgtttggaggttatcattgtctttgggagtaacaactgtaacaacagtttccttatcaccctgctgtgtctgaacctttgctggcctgcggatgaacaagtggataactgcagcacccttcttgctaatatctgcaatcaattggttatcctcaagctcttcaccgtcaaacacaagcctttggtccttgagactcccaagttgctgtccactctcagctgagagcttgtccttgagatacccaacattgcagcaactctccacctggaactgaaatttcttcccattggcagtctcaatgcttatcgcacggaggtcagccaaccgcacgacaagatgaagcacatttccatcggtaagtccataatccctgacatgggagttgtttagtgacagctcatgcccactgaacaccagccgctgcttggtagtgacaaagcccttgaactgctggatgcggagcttgaccgaggcaacagagtctgagtgcaggacacgcattggcatgggtgccacccctggcatggcaagaaaaatgacaatagaatccagctgctgcaaccggggctcgccatggggcgcaaaacaaaactggtccagcagggggctcagtgtggctataccggctgacgacatctttgctgatctcaagcaacacagccaaggcagccaaagctactgatgcaacaagcacaagtgcacagccaccagcactagagaagcagctatttgcactatgaattagtggatgtgacccattgatgaaaaaacaaaccctagggtctcctatcaacaaggaaaccctaggggccaccgcttgacaccaatgcgcctataatcccttcttggcccccaatgcgttcaaccctgcacattcaagagaaacaaatcatcaaaccctaggtgagcaatcgtggtactcaaagcagcaatttcagcaaaccacatagcaacaatctgagcatttcgcacccgaaccgaaggaatcgtgcagaggcggcaggatcgtctctgctactactccaatggcgcagcagcacagcatctgtagaagttcaaaaaaaaaaaaagaagaaaaaaatataaatcgagtaggaactcgagttcggccaggggattcgaacagcacaagcaacagagagacccctcaccggaattgatataaacagattggatccgaggaggcgcgaagacgaagcctcccagcctcccttctccgtctccgcctccgcctccgcctcggcctccgacgggccgcgaacccccgcgagattccgcttccgaagtcgcgcagtctacgatcgatcgccattgccaacacgcgttagaaacacaaacccgaatccaaaaaatcgcaccacttcctcatcgatcctacccatcaataacacaggaaccaaatcgctcccgcgggagggagaaatcgcggaaagtgaatcggagaacgaatggatcatcttaccacgacggcggaggcgcggattggcggtggccggagccgatcaactgctccgcccttcggaagagagagagagagagagagagagaattgttgaaaagaaaaagaatgggtgagggtttaattgggcgaggtggtgtgggtttagcttagcgtggtgccgtggtgggagtgggattttaacttaagtaggatttggatttggatttggagttggaaggcggtggctttggcttcgggttgccggcttcgtggggaacacgttggaaaggagtcggttactgtttagaataagtaactccggtaattaattataattattaattaattaattgtctgtttgtttccagtaatgaatgacttacaaaaaaagaaacccggggttgcaacttgcaagtcaggccaacggtgagctggggccattaggtcctactgtatttcgaatttgaaattttatgagcttttataggctgactatttctgctagttaaacttatttaagtttgacaaaatttatagaaaaatttagtaatatttttaatacaaaacaaacatattttatattaaatattagttttaataaagctaatttcatgttttagatgctgttaaatttttctatatttaaataggaaaataatcaaaataacttataatatgaaaaataagagagtagttgacattagacattgctcgtttcaaaatcgctagtagatcttttctgaaaataacaaatactttagaagtttttgtaaaacacgaaccctgctatatgtacaacttctacattcgatcggtgtacaatcgaaacggcaaagcagcacagtacatgatggcgtgaggcttcatgtgacgtatagcatgttgctgatgccgcgtacgtcgttgtccaaaagtcggacgctccggtcgtttgtatattattttcggtaaaacactttaatatgaaaatggaggaagtaaactcgggtatgctccaacgctcttgacggtggtactctataacatgcgcttgtgaaaagtgaaaacccaagttgggttctaattctagataaatagaaaaggaaatataagaattgcgttataagggaacatgaagttttttccgattggtaataattgaatagtttcctatgaaaatggtaaaaaaaatcttgtgaaacttcggagttacaaatgatacatccaaaggtgtcatattataagcctataaattatgtagatcgaaatgtttacaatgcaaccattgcacaatgatccccaaacaaggattatataccaagaaaacaaatattacaacgattgatttctaagcctgtgttcgagaggtgaggcccacacacgcaaaacagagcgacgcattttcttatgattaattaagtatttaatattttttttaaaaaatggattgatatgattttttaaagcaactttcatatacaaatcttttacaaaaacacacagtttaacagtttgaaaaatatgcgtgcggaatacgtgggaggtgagttgggaaatgtgggggaagaacacagcctaattcttctttgctagcgcttgaagaaagtacataaattaaatgggagaaatttgtaattgattaggaagaaaaagtaggtgaagaatttgaatggtgaaagattgtgattagttgataatggaatatatgtggtgaaattattatattttagaataaattttaaatgctaaaagttgatatattttaagacactaaagtaacaagcaagttcgcagaaaggatcttgaaacaacaacgacaagcagtcaagctgctgccaatgccatggatgttcctgggctcctgtgaagaattctagaaaatactctatccatcccaatatataacaattttggactgccaatgccatgaatttgaagaatgatatgtccagattcgtaatagtaggcaaatccgatactaggctacctccttcggtttgtcacaaaataagttatcttttaataatcattacatcgaagtttatgaaggtaagagataaatggattgggagtaaacaaaaggagaaataattttattgagatttgataaagtgaaggtattttagtttttgtattggtacgtgtgagatgaatgaagaataaacttattttagggttggaagtataaacttagggttggaagtatgtttatagtttaagtcttggcgtaaatattgaagacgaccgactagttgaaatcgtggatacgagttacgaccggcacagatcgatcagcatgaatcgacaccgaaggtttggtttggccagtgcaacctgtaacgttatgtactagtgctttcctgccgtaataaaaattttcttgattcctactggaaatataccacaaaattccggcattctagagcagcagtaattacattccacgtcacacacaccaagctgtgggtgaaagagaaaggcaatgtgaaattaacatctatctgccatccttatcacagccaaaagaatcatatccctggagtctgcggataactacagatgatgatgatggaaatgaaatagcttcaacatactgtaacaacatcccaagtcatgcccacagcgagcaaaagatttatacaccacaggtagttctctctctctcttcctctcttcacattcacaggttcctctctacaaaatcccagatcctctcttccatatagatccggtcccctaaccggcgcggcatgtgcctctcgtcggggaagaggaggatatcgtagggcttcccctccgccatcagcgagttgatgagcctcgccgtgtgcctgaaatgcacgttctcgtctatcataccgtggatcagcagcagcctccctcggaggttcttcacatgatgcatgatcgacccgtatctgtaagcgtcgcgctgctccgagggcagacccatgtacttctcggtatagaaagtgtcatacccatcccatgctgtcaccggagcgccagaaactgcacaactgaacgtgtcgggaaatctcgcgaggcacattgccgagagaaagccaccatagctccagccgtagagacctatatgtccgggttttgctaggcctttctttattagccactcggcacctgctaactgatcttcagcatcgacacgaccgatgttgtatttgagctgtccctcaaactgcaaaccgcgtcttgcggttcctcgattgtccatctgccaggagacagtcagtcattcagtgttacaaacaacttgtattgccatggctcatgagcccaatgataaatgtagtgacaaatgcggaaatatataggcatatgattatactccataatgagcaatcaacaaatgcggaaatatataggcatatagcagccagcataaatttatcatatatgaataattctaagcaaaaaaaaaaactcatgtaaatatatgattatagaaacatccgttccaaaacattttgcttccacttcaaaattcccaccttaaaactttagattatttttgctcaagaagcaatatggttagtcatgatggattgtatcatcaatcttaccacttgccatagtcgctagggatagggggtagtataattgtttgcttgcaactgacagacattactacaataaaaaatattggctgctggattgtattgggcttttcaacccacacgtcacttaggataattacatggggcttttttggacacttgtaatgttttgctaattcctaatgacaggaaggttacaggcgccaatattttccagacatagttgtggacgcaggaacccttattagcttagtggagtggtgctaatatttctgactcaacgcaaattttatgcttgaatgcactattgcattatctgaggttgagtccatgttaactctcaaaatgacatactgatgtgctttggaaaaattaatggatgagatgccatgcattgcacagcataccttgttaaacaaaaagaaattaaatggtgctatcttggccataagtttatttaaaatcatttttagtttagaattttacccatgcaatgcattgcacagcataccttaagattggtgacattatggaccaaagtgaaaacagaaaaaaaaaatcctcaatcggaatctatcttgttaaacaaagagcaaagaaaaaaaaatagaggaaagaatagttaccttccaaactaatatacccttactacgcaggaactgagctctcatgtcaactgtacttatccatgagtcacttacaagctggacactgggaccgccataaacgttaacgagtgttttgtatgggggtggtccatattttttctcatcagggagataaagagttccatataaagcagtcccatcctttccttcaatctgtactatctctggagacagctgctgaaactttttaagcggctgaacagtcagaggctgctcatatagaggcattatcacacttccatcaagcaaagagcatagcaggatcacaggtggagattttattgagtcatacacatcaataaacctcagcaactgatggtcaagaattactgaatgacgtcctgtgccatgagtcaacctcttggggacttgcaagggaaggctccaatccggaaataggttggtggagtaaagatttgtctccaatggcccatccaatgtgcctgtaaaatatataactccagaactctcattgacaccagcaatttggtcgatcatccaatcaccttgtgtgaggggccccaagcacacaccattcttgtcatgaagatacaggtgtctaaatcctgtcttctcactggcccaaataaatccacctggatgtttactattcactcctttatccagaggagtaaaacaatcgtgcaatgttatccacgtatcatgctcttcctctagtatgacctcccttttacctgaagcgatgtcaaacttaagtagcttaagttttgagtgagttctattgagaacttgaacagcaatagcactattatgcatccagtttactctagcaagatattcttcatcaccatggatactatttggttctccacataggagatccatccaagttatttctcctccatgggaagaaacaactccaaggcgcactttgacattagcagcccctgcaaaggggtaagcatgatcttcttgagcatctggaccaaccgaacttttaccctggtgcataattctatacagtgggatttcagatgagtcaacttcagtaaatgcaaggtgtttgctatcaggagaccaccagaatcccatcttcctttccatctcttcctacaatgggagatacaaaatattaggcagcagccatcaaaacaaattccataccaatcctaatggatcaacatgtgcacctgtgcaatatactcagcaagtccgtggatctgggaaaaaaagaaacaagtacaaatgttagattctgaagttgcagtaacaacacatgatgtatgatcttgcatactttatttaatccccggtatatatttctgttgatcatgcaactactaatgcacaactcagcatgttttgaatgttagaagaatactgatagcataatatacatgctacatgggtaagctaataaaaactatgagatattattggtaaaggggaacataaagttcttttagcaggcaagtttatcctagaagcttatttgagccatagcactaatggcggcagttaactagaacaccctctaaagtttggttaaaagactaacttataaaacttgtagtctttataaacaccgccagcctcctgcaatagtttcggctgctgtgtgtctttggaaggtaaatatcccactgtttggactttggctatggattaagcttactttggttcaaccaaaaaacaatccctaccaagaggtagaaagaaatatttgaactataacacattgaatatattgttgacaaaaaaaatcaatatattgcttagttccaatgatagtcatgttgggttacatgctagttccaatgatagtcatgttgggttacatgccaagaataaagctaataaacttctagaaagtcaacatgaaacttttctttgcaacctgctcaacaagacttggtatgataacaaacaacacaatgcacacatattcctattaaaatgtgagtatcattaacagaactccaaagaagtaccttcccactttcgcttgcaccataggtcaactgggtagtttgcccatcagagaaccccactgtatgcaactcatcatcccgcacatacgcaatcatgctcccatctggagacagatgtgggtcaatgatgggggatgtggctgaactttgcagcttgagtacaggttcagcaccagacaaatcctggaagtaaacctatggaaatagaaaagatatatttccatgaaactcatgatatttagcatccttgaaaatttacaaaggttatctgaaacatcaaaaactaccagaaaaagaatatccatgatacgctgacaacacaaaactaaccatagatgacaataatcaacacaacagaggagttttatttctttgaatcagtagcgagatcactatttaggaacatgtcagctacctaatccaccaatacaagatgcagcactataccaagaatgcaggaagtgcgatctcaagcacagacctgcaggcactgataaactcaacttcatagccatcactaacgactacagagcaaatatggctcatcccgcgacatccaaaccagaaccataataatggtcacccaacactgccccacaaaaccaataccagccttccattaattcaacactcgaaacggaaattaatgagcctaagcctatccatgtgcagttgctgatagcaaaatcagaatgtcaacctcataccaaatccttaatccgagaaagtggtccaatacacaaggataaaagtataaaactaccgaatttgattagggcaatgcgtatcatctaatactaagttactaactcaactgaattggtaataatataaatcaaggaagaactaaatgggggaaagggtttgcggtttgagagatacgaaccccagaggggagcggcacgacaatgccggcgcgggaggcgggggtgccggggaggcgggcgcgccactcgtagcgcgtgacgccgaggccgcgctcccgtgcgcgctcgcggcggaggcgctcctcggcggagaggttcccctcctcgaggccgccgccgtcggggggcccgaagaggagctcctggcgccgctgcgcggggtcgaaggcgtacacattccggtgaagcgtgccgtcggggctgtacaggaaggccacccggcggtcgtcggggctgaagctaagcgccacgggcgccccgtagcccgggagcgggtgctgcacgatgtccaggagctccacgctcggggcggcggcgcaaccccccgcccccgccgccgcgccgtccccgtccccgctgctgccggcgccgacgaaggcgtcggcgagcggcatccgggcgagctcctcctcctcctcctcccccgcgtcgaaccgcggcttcttgcggttgttccc

SEQ ID NO: 8074 - DNA, 76846 bp, Oryza sativa
  unsure (1)..(76846): unsure at all n locations
gctatggcattgcagaagctgatgatgaagcaaaatcagaatcaaaggcagagctacttcctactattgttctatgtaaagataaaaagaagggaagattgaaaccaagaagagcaacatctcaaattctagagaagcctgaagattcaggttcagatgcactagtgcctgaagatatagatgacctgaaaataagatagttcagactctgattataggcagcctatagagcaagatagctctggagatgatgaagaagctgaacaacttaggaaatttgcaaagaaaatcaagagaaacattagggcaaggaagctaggagttcatagtagccaggctgtagagatacttgatgatgcactggtgcctgaaaatatcaacttagaagatgatggcagtgtgtattataactcaagtgatgactactcctatgaggagaatagtgaaggagaaacaattagatggaagagcactaataataggtttaacaaaaaaggcatcatttcctgtgttctctcttagcatggcatttagatcaagtaggcagttaaagaaggcactagtgaagtacgggctgacaacacacagacatattctattcccaaaggatgaaagggacaaggttagggcaacctgctattgaccaggatgtaaatggctaatatatgtgtcaaagacaagtaggtctaaatggttccaagtggccacttttaataatgagcattgttgtccacctaggagagataacaagctagtcacatccaggatcatcatgggagggctgggaattctcgaaatggaaaaattcacatctacgcttaggctacgatggttgtggctgtttgatacaagcagaccttgggagctgatggagatgccttgcaatatgcgagatgtacaactcttccaggcatgcacaaaaatcacagtaggagatggcaaaaaaaactcttttttggaaagacaattggttaccaggtttgtgcccgaaagatcttgctcccaacctcttcaaattggcaaaaataaagaataggaaggtggaaacataaatgatagacaacacctggctacattcttttagacagatcactaatatagaaaccatccatgaattagtgcaattgggatccctcctcaatcaaataactctttctgatcaacatcatgatgaaatatcttggacaagaaatgcctcatgaatcttctcggttaaaagcgcctgccgcttccaattcatgggttcggtgattgatcatattttcaacctaaattggaaggctcattcttcatcaaaaggctcttacagcagaaaacctgctaattagacactgggaatgcgactggatctgtactttatgcagagaagcttttgaagatacagaccatctgttttgccaatgcaacttcatcaagcaggtatgggcaagaattgccgctgaaaaagggattattcccaatcctaacatttccaccactaacagtggatgtgttctctagggtccactggccttaaaagccaaaccaggtcaaggatcggaatcctgttaaagacatggtggcatgtttggttgcaacaaaacggaaaaaaaaatcaattcccaagccccaagtctacaaagaacaatatcactcatcctcgacgacatacaggagcaggatatggttttcaaacctccatgaagggagaaagtcctgtactcattgctagagttggttgttttaagaatattttgtaatctcaactttgtaaacttggctttctaatctcctaaatatatctggctccttgctagagttggttgttttaagaatattttgtaatctcaactttgtaaacttggctttctaatctcctaaatatatccggcaaatcttttgccgctttcacttcaaaaaaaaacatccaggatcatagtaaataaatattttgatgttatcaaggataatccgacatggaaagtggaacatattaagaagtcagttctaaaggacatgcttgttgatgtgcccatttcaaagtgcaagcgggccaaagccttagtgctacaagaagcattggataaaactaggggagagtctcaagagtgtatgattatcaattggagttgttaaggagcaaccctgggagtattgtagttgtgacccttaatccagatatacttgacaagaaagtatttgagaggttttatgtatgctttgatgcttgcagaaaagggtttcttgctggttgtaggagagtaattgggctagatggttgtttcttcaagggtgcttgtaatggcgagctaatatgtgctattggaagagatgctaataattagatgtatcccattgcatgggcatcagtggagaaagaaatatatgattcatggtattggtttcttgggtagctaaaaaagatctcaatataaatgatggaggtgaaggatgggtgataatttctgaccagtaaaaggtatgctttttaactatttatcttttaacaaaatgtgcaatgggtcctaagttgtaataaatattttgaattacctgtcttgtagggactcataaaggcagtggctgagcttatcactagagtagaacataggatgtgtgcaaggcaaatatatgcaaactggagaaaaaaggacactgaccagaagcttcagaaaaaaatctaaaactgtgcaaagtcatcttgtagggagcttttcaactataatagagcaaagctagcacaagacacccctcaaggagccaaggacatgatgaccaccacacctgagcattggagcagggcattcttccagctagtgtcaaattgtgactccgctgataacaacatgtgtgagtctttcaacaactctattatggattcaaggttctttctagttatctctatgaatgaagccataagattcaaggttttttcaacattagctctctttgaccatgtcctgtacatattttttttctgaggctcagccctcaactctgctctatcaatatgtaaggcaaaacctcttcccttttgaaagttcaagtgctattaatttggttttggtgattaatgataaatccaattatatgagactaatttttttataagcattctttgcctagtgtcatgtggatatgaaagtgaagtttgtgataggtgattcccggacttcatatgagttgaaatagaaatgttaattgttcgtggacctaaatcacaaggatgaaatgcattgacctaaatcacatctttctctctatgcacatattgatatattcatatataatattttcatgtgattgacatatggatttgagactaatgttttgttgagccatatcttgtttagtctcttcacattgagaatatggagatgatgaaggtatgcttctaccttaatgtctacatatgataaataccttctattcttgtatagggtaagctcacgatgttttatctctagttatgcatactttttcttcacacacaaaaaaattgtatgcatacatttaggggggtaaatcctataccttagttatgcatgtattttgtcacatcctgattttcgtcttaggatttataaattatttaataaattattattagaatttatattaaatgttcattaatttacaagtgaagttaattgtggaaaataaaatttcctaaatataaagcatggatgtatttaatttttattaaattctccatggttaattatactctctggaattttctcggattttttggagctcaactcttaattttaatcatacaaagaacaattcagtaattatccacatattaaattaatcattaaatggtctgattataattttgttaagtactttgagtgtccaagtattttcaggatttttcttgaaattatttgagcattggaagtatttttaacaattcaaagatcatttcagtgattaatttaattggaaaagtaattaaaattcaccttttccttttcgggccgaattagggaaagtcctctcactctcggcctagtctcctctcagcttgcagtcctttccctctctttcccgaagtctgctttgtgtccctcctttaatcagtccttggaagtagaagcccagccgaaagtctagtttgcttccctgggcactgttcatcttcaagcttggacagaagcctgagccagccgtcctgtgcctggaatcgaattcgtttttgagtttatctctccaactaaccctcggtttttccggctcaaatcctctcggttggagtccgatctcttcaatccaagcctataaatagcatcccctagtcgccctctttcgtttgccccatctcccgagctctctcgtgcctcgtagtgccgccgccgcgccacccaaaccgccgccgtcgccggccggcgaacagccgcctcgcgccgtcgttttagccgtcgccgccgcctcctcacgccgccgtcgggtgcgcgtggaagaggggaagctccgccgcccttcgccgtcgccaccggtcgccggagagccgccgccgccgtccaccgaaccgccgccgccgcacaagctcgtcgccggtcgccatccgtggtcgttcgtcgcattggttagtaccggtgagatcgcgttgttctcctctacgcgtaggtgccctccaaaagtccggccgagtcccctagcgccggcgaggtcgtccccgatgacgagtcgacattgatgacgtcagcatgacgtcatagccttttctttttagtttttttaatagatgcaaatagtttaaaacttcggaaattcataactaattcatcgtagctccgattcgagtggttcaagttgctaagtttttctaaaatcaagatctacatgttaaaaatatccacatgtactgtttatgattgtttttgtactgttttgttgattttgttcatttgctttagtttccgtcgttccggaggagagcgttttcgttgaggaaggttctgaagtgtttgcggaagctcaaggcaagtcacccagatcccaaacaaccctttgaacatgttgaacccgtttaaagctaatgatttatttcaacttatgcattattttcgaatgtcatcgggtgatgagcctttcccaattaaataatggccgaacatgactttattttcctatgggttataatttgattagcttggaccttatatattggattggttcagctaaatgccatatgtatgtttgcttagtcatgcttaaacattagctaattaaaggggattaaatataaatcatattatattattattaattacggttatatttaatggtagctcacgatggttaatcgtgttatgttatgtaaattaattggtaattaaaactggattaaggtgggttgtgagcacatggttttgaaggtcgtgctcatgacaattaaggaccggttcgcgagctactgttgtgaaacatttaccgtgccaaccacaagccagtgtgagcaacggctttaccttttgtatagcatgattcattacggggcaccagactgtgaagcggcgagaagtccatgggggtcgctggggagtccattgcctttggttttgagggggagattatgatccaggaacggtgcactgtggtgagttgtgttgtgcgaggggtattgtcacagttcctttccgaggtaccgtggtggtgctaaggcgcatggtgacatgttgtgggattgcgtcttgtgggtacagtggtacacctctgatcaaagtaaaactattcgaatagccgtgtccgcggttatgggtgagttgagcaatgtttttcgtgattagtcccacattactcattaatgttaataatgtgataattaatttgactcctggtttggaatggataattcctggtttggaggtttgatctgtacgaccggggttggctgttcaggtttggttgggcctgtgcagcattggggtgctgttcagtgtcgattaaaattgatgattaattactctactgatttacttctaaatgtttgcttaatgctgctttcgcaaatgaacctatattatgccatcctttggtatccttgtgcatttgcatatttgctgtgtggcttgttgagtatgtcatatgctcattcttgcaataatcatcaaacctcagttgaagaaaaaggatccagaaggagaagatgtttggcttatactccagttgagctgcctgtgggagtggagctgaagccatcgctagaccgttaattccgctgctattttccttttcttttgtaagtatgtaacattattattatgatggatttgtatattaaattgtcagtttgtgtacctcggctgattcctggacgaggattttatgcacaaattagtttggaaattactagtgaatttctgggcgtgacatatttgatccaagtttttcacttgcatttaattgggatctttacatttgagtacatgacacttgtgatattggttaatactcatccacttccttttatatgcgcgattggttgatcaacatgtagaggttgacaaccagatcattgagaccaataatttcattgagttgaatgagaaacattggtcccaaggattgaaaaggtgttgatgctcaatcgatatcattacagctaaaatactaagaatgacagtggagatattgaagatgcggaatacgaagtggctattatggcaagacgatcttcaaatgattgatgctcggtcgcgatggaccatgtgacagtgaagggcaagcaaggggcttggcgccgaagagccaaatccggtggtgaatggcgagtgacagctttgtcatgatggaccgtgcgagaccatttgaagctacaagtaaccgcatcaattatttgaagaatatatggtgaaacggttttggcgttgctgttccttaagacaaaggaatgaagatgaaaagaaggcattccaattggtataattctcttcctatataaatttgagtatagtaatatcgtactatcaagagggatgcagcgtcgatgtgtttgtgtatgtttcggtgctcaaagtgaccaatcatagtgctaccttgagagacactcaagctttaacatatcctttgagtggttttaactttgtttttggttgagttaggtagtcctctaagtgagcttttcatagagttcaagatcatcaaaaacggactcccgagcgaaaacttatggtcgttttatcctgtgcttttcggaaattctgaaaatggctgcgaaactgagataggcttctgttgattttttgcacttgtccgaaaatgcattttggaaattccgaaaattacagtcttggcctccaacggctagttttgagaggcttgggtatgtaaactcttccgccctttaagtggctgctgttctggggcaatattagacacatgtaaagccaaatagctttttcccatttccctacctttgtggtgcctctttgtaagagggatttgagaaggggagagagttggattgagagagtgagaagttaagagctagcgagtttcactccatactttgagcacttgagttcatagcaaacaaatcttcagttgtgttagttactcttggggactaaggtctcctaaacggctaggtgttgccagtgagcgcccaagattgtggtgtgcctcgaaaagtttgcgaaggctttgatttcgcctctgtaagggaagaaatcaattgtgaaatcaaggagtgcatttgcacaacctcgtgaggaaagggttaaaataaacctagcctttgtggcccctcaacggagatgtaggatccgtggatctgaacttcgagaaacatatcaatgtgtctcctttcttgctttgcttattcttgtcatctctcatattgtgcttgagtttttttttatccaatcacttgtattcttaattaatatagttgatgaccttatatcttgcttcaatctcttgtttgtcaccttttgattcatatacattttatttgtttgagctacaagttcatagctagtgtgttgtttcgttatccgctgaattttcggttgaaactgaaactttcaatcccataccagaagttccgagttgaaccggaagttctcatcattctaatatattatgaagttgtgataatttttttaggaacgcctgttcacacctcccaggcgatatcaaggtccttttacctttccttaaaaaaagacgttgtattcatgcatattttgtgacagtgcattttcagaatcatgtgttccacgataactctgaatgctgaatataatgagttttatagctagacacggttattaacaaagtaggtagaattaaatagtggaagattgtgattggttgagaagtgaaggtagggaaattgaatggtggagggttgtgattggttgagaaggatatgttggtgaagatgttattatatttaggaacaaattatagaggctaaaagtttttatattttaggacggagggacgagggagtactgacttttgtaattctcttgtaggggtgaccaaaagagattcataatatgcagccacatcggacgtacacaaaatataactaaacttttttactgcagagcttataatatgcagtctctttggacagaggagtatgatttttttcttaaaaaaaatcatagctgccaaacaccaccttattacagagtcacttattaggtatacacgcatgcaccgctcagttattagtaatgaaacaaagcatatccagagaccaccttattacagagtcccaattcccttatggggagtcatccttaccaaaaaaaaaaaaagaaatatcgtggctgcatggaaaatagaaccttcatttcaggatttgcagcatcggcaggtttggcaatgttttttttctttttgaggtttggcaatgatttttagagtgaccatataagctgctactgacatcgtaacagttaaagcgaaatgtgccagcttcgaagccttgatagatttggctcggatggctgcagctatcctgcagaaacaaaaatacatgacaaaataaattagtctttccattacgctctagtaacatctacaccttcatagctctgcactaataaaaattatttagggaaattaaatgacacaattgaaagagcatcgatctcccaagataaattatcaaattaatagtaggcccatttcaactggagatagccaagaaacgagatatccccaaaaaaaaagtaaattttgtacatgagtctagacaactataatatccagattaatatacaaaaaatattttatttagatgcaaaagggtatgtaacctagttgttgcaatgaactgagttataccccaaggtactgagttccccatagtaacgaatttcaaattagattatttgaaagaccaaattctcatttttttaaaaaaaattaaaaaaaacatttagaacggatttacggatggagtactgaggaagcacaatacaataacatatatagaaaagcatggagagcgtgtccaaggttttacaattaactactttatacttactcggcattacgggattccacacaatgtgggcacttcgtggttgtactggacgagtaagtttgcttggcccctccaaacggatttgcaaatgcaaccttcccgtgattgcaatcaacagaggatgtcgcagtttttgcgcaggtcattttatcacttgaataagggcatattttgctgttaaagtaccttgcagcctgcatgagaaaggttcagagatcagaacatgaattcggtataatattatatatatatatatatatatatatatatatatatatatatatatatatatatatatatatatatatatattataccgaattcaaatgttcaatataaaacttgtagaagagaaaatattgttggtccctagtccaatgtaaaactctgataataaaagatatcctagtgtagaattcacaagaagaaatattattttcccataaatgtatacgaggtattgtttgacatgccactgttccatataaaacatactccctccatccgtgattgcagtggcgaaactaggatttgaatactgtcacgccctgaagttcttctccctagcaaaaatttaattaataaattgtcgcaagaaattatttgtttaaaggcaagagagaatttttcttggaatcggcatgtggaatttttcttggattctacatgtcaaaatatgctaacaggaattttagtggaattttcagagccttggaaataattttagtggaatcccaagaagttggaggatatacctatagtacaagagtatcctgaggtgttcccagaagacctcactacaatgccaccgaagagagaaatcgagttccagattgatctggcacccggaactgctccaatctacaagaggccgtacagaatggcagctaatgagctagcaaaagtcaaaaagcaggttgacgaacagctgcagaaagggtacatccgaccgagtacttcaccttggggtgctccggttatctttgtggaaaagaaagacaagaccaagaggatgtgcgttgattatcgcgcccttaatgaggtcacaatcaagaacaaatatccgttgccaagaattgatgatctgtttgatcagctaaaaggagctaaggtgttttccaatatagacctgcgatcaggctatcatcagttgagaattcgggaagaggatattcccaagacagccttcgccactcggtcttgctctcttttcccccacactagagttgaagtccttctcagttgaagatgtcacaaagaagttggtttcgtcgctaccgtcaaggatgcctgtggaatggagtcgcccactgtagaagtcaagtcttcaggcttagctcgtttttttcctcttttttccgctgcatttgtaatcttttatatttttgtaagacgtggatctgtatgtcaataattgtcgtttgtgtaccctggctggtcctggacaggggtttaatacacattcagcttagaaattcttagttggtatcagagccgaccttgaccgtaggacaagccaactggaaaccctaagagtcctcttaaaccttttcatttgcacatgccttttgcacttggatttgtttcggtataattttggggtttgctcttttgatttgtgggaaaaatcttgatcgctatttaatcgtatttctcggctagaggcagtctagggttctagcaaaactttatttggaatttatttggccttcagtcgggaatttgttaggtgatatgcactaagtcgtgtctagattcgatgggcatttttatgtgtatattatagctacgcatctattttgtgcattaatttatcgtttagtcagttgcattagtatctttgtctgggttcatgaaaaatgttccacgcataaaaatcatcatgctcggcgagttatttgagtcatttgttgctttatttaatttggttttgagcatgtgttggttcctatccctctgtcctctttagatgtcagacctgttctctgatcgcaagcgctgctccaagcttcagagtcgccgcctttatccttaacattttcttagttttggctgcttgctagtttctgtgtttaggtttgttgcttgtgggttagtcggcggtcgatatcatgtgttagtggtatgactgccttaattaggagttgtttgctttctttttagttttttaatcaagattaaattaattgcacttaaatctataagaaagattagtttccaagccatctgttttcttcctttctcttatttctacctatcctcgtccagatggtgaagacagggaatgatccccgtgcctccaatgacgctaggggcagcgaagagcagaccgatggagctcatatcagtggtgcatctgacagcagttcatctccaccgcccgagaacccaacggtcactcagatgatgacaatgatgatacaacagatgcagcaacattaccatcagatgttgcagcaggcgcagcagaaccagcagtctggtcctccatcatcacacctgtccaaactgttagactttcatcatatccagccacccactttctcaagcaccaccaacccaatgtaggccaacgactggctccgtgcgattgagaagaagctgaaccttctgcaatgcaatgaccaagagaaggttgcttttgctacacatcagttgcaaggtcccgcttctgcttggtgggataactacgtggtgacccgtccagattcaacggaggttacttgggcagagttttgtcaaagcttcaggaaggcacaaattcctgaggggattatggcacaaaagaaaagagagttccgcgcactgcatcaagaaaccaggatagttacagagtacttgcatgagttcaaccgccttgcgcgctacgctcctaaggatgtgcgcaccgatgccgagaagcaggagaagtttttgtttggtctcgatgataaattgaccaaccagctgatctccggagtctatgatgactttgagaagctcgtggacaaggctatccgtcaggaagagcaacgcaacaaaatggaccgaaatagaaaggtagctcagatcagctttcctcaggggaacaattagaagcctcgcttcatgacgggacagctaggtgagccttccaccctgatcatccgtcagcaccatccttaccacccgagtaacttcaacaacgactacaacggtggcagtcacaacaacagtaagcagcataaccacaactcgacttcacccccattaatggcaccagctcagtcagatccgccagctatgtcagctcagtcagaacagctcaagaaggagtctgcaggaaagccaagaccctgcttcaactgtggcaagcacggccactttgctggcaagtgtccgaagctaaagcgcgttggacctaggttcgtccaggcccgcgtcaatcatgcgtctgcagagaaagcacaggcatcaccagaggtcgtgctgggcacgtttccggtgaactcatatccagcaacagttctctttgattctggtgcctcgcattcttttatatccaagagatttgctggggcacatggattatcggtagtggaacttaaaatactgatgcaggttcatacccctggaaatgacatgaggacagcacactactgcccctcagtgactatagagatcaagaggtcacggtttctatccaacctcatccttctcgaatccaaagacctagatgtcattctcggaatggattggttgaccagacacaagggagtgatcgactgcgcaagtcgcactatcaccctaagcaacgacaaaggggagaagatcaccttccgttctccagtgtcacagaagtccgtagcgagtctgaatcaggctgttattgaggatcagacagaaatagcggaaaaaaatcccaagaagttggaggatatacctatagtacaagagtatcctgaggtgttcccagaaggcctcactacaatgccaccgaagagagaaatcgagttccagattgatctggcacccggaactgctccaatctacaagaggccgtacagaatggcagctaatgagctagcagaagtcaaaaagcaggttgacgaacagctgcagaaagggtacatccgaccgagtacttcaccttggggtgctccggttatctttgtggaaaagaaagacaagaccaagaggatgtgcgttgattatcgcgcccttaatgaggtcacaatcaagaacaaatatccgttgccaagaattgatgatctgtttgatcagctaaaaggagctaaggtgttttccaatatagacctgcgatcaggctatcatcagttgagaattcgggaagaggatattcccaagacagccttcgccactcggtcttgctctcttttcccccacaccagagttgaagtccttctcagttgaagatgtcacaaagaagttggtttcgtcgctaccgtcatggatgcctatcgaatggagtcgcccactgcagaagtcaagtcttcaggcttagctcgtttttttcttcttttttccgctgcatttgtaatcttttatatttttgtaaaacgtggatctgtatgtcaacaattgtcgtttgtgtaccctggctggtcctggacaggggtttaatacacattcagcttagaaattctggttcgtgaatatctgggcgtgacaattacgagggggaactaaattgacaagtgatcataattatattttttcttaaaactaggaaggtagcccgcgcacatgcgcgtgcaccttatttaatgtgcatgaaattttgttagggatgtccatgtgtgggtgtttctctatctaaataaaaattgaacttatttaatgtgatttgaatgctggttataattttcttatgattacccttgcagcacataaattctaaactaaaattacttgagactgtacacttcataatttataagaaaatattatgtcgaaacaatagatgtagttcctatgagaaaattttggtcattttgacttctcgcatagatatcttacccccaaacatttgctcaaaaagtcatttttttgctagatagtatttgaagttttacatattttcattccatctagctttgctagaagtttgaatgtttctgtttagaatgggttttcaaaccaattttttttttaaaaaagataatttttgttaaattttgattcttttcatgtacattttttaaagaaatttggagaattccactctatgaagcatatttgaaatgatttgatttctgcaatttgggttaaaaacataagtgggttgagcctacaacctgacatggggtaaagtcatctcttctgaattatctcacttcaattgagtaagaaatattaaaatagaggtcatgtaataaatacacattattatgttgtctataaaaaattaacgctagatggggtacaaattatgacgtaaaacacgatatcatttaaagttttcctctaatttattggtgacttcatagatcatatagataatttagactctatgatcatcttaagattatttatttatcttctaaattgatcattgattgataaaaaagcaccaaggtcatattatataggtaagtagcccccatatacatgttgagagaaattaataaatttgatagaaagtgttagggtctaacaggatataagtaatgggtcaaccagctttattaaaaattaaggtgggatattctgattttcaatgacgaattttagtatcttttttaatttattgttggcctcaagatggatgtgggtctagaatataatttttatgttagcatttaaatatagacaatatgaatattaatgtattgatttcactaaaaatataatagttcgaacagatcataagttgaatatatgatttgaaaagttataaatattttatttatattgttcctataagtgctagtaagagagagaaggacagggacagtgggatacatggctagacctaatatgtggaggttaatttgtggtttttcctccataaagattaatttaattttaattatcataatataaaaataagagaaaaggaacatcacaccgcacggggacgggaagggagggaggaggatgttttttcttaaaaaaatgattgatctaatgacctaaaataatgtgttggatgtttaagtcgaaaacaatggtcggatgttttgtttttaacttaagagagaccagtagtggtttagaaatatttataggatgtttaatgtatttaacattgcaggggccgagagtgaggaaataaggtttgtgagtttttttaaataaaaatctaataacaacctaaatgatatgtccatcgatttaagtcaaaatggtgttttgttcttaattttttatgattttctctaatttataatttaggagtgtcactgtgtggtttataagatggttaatgggctttaacgccgcataggagcgcggagggaggtttgggatatatttttttagaaaaagataaatctaataacctaaaataatgtatatagatggtcgaatgtttttttaaggttttctctaatttaagagtgctatatactcatcccgtcccataaaacctgaacttaaaataggatgtggcatatgcgagaacagcgaatttggacatgtgtttagaaatatttatatgatgttgattgaactatttatttattaggtgagaatataggaagttggctagatctagtaggttgatgggctttttaggcccataaaaaggtatttaatttaaattatatggggatttaaaaaaaggagaggaacggttggttggaggaatcgcacgtacgtgcgcgcggaggctcacgtccggacggagttatttttcttgtgaagatagatctaaatatgaaaattaatgggcccaccaatttaaataaaaatcaatggtcagattttactaattttttagagtgacacatggggacttaagagcatttataggataccacatggcagccttagagcgtttgtaggaagtttaatggacttttagtatataatagatagattatatgcaaatttcaatgttttctttaggtaatgatgcatcgtattaacatgaaaaacatattacaacaaaaaacataggcaggaagttatactgcatatacttatttatttatgaaatttagcatgataagaatgttgagcaaatatatcataagcggtgaaaatatcgaccgagataaaagtctagataaataggctttcatctatatcgattttgataaaatgattaacaaactatctatcttgcaagtattaaggaatatttagaaatttgagatggtagccatctaacgacatgattatgattatgagatattaataaaatgtagtattatacaaggaaaaggaaaaaaagaatggcatggcttgtgcttcttttggttagtgactaattaatcctacacgataaacataagaagctggaaattcagcatggcacacgatgtgatgctgttagctaagctgtgcatgcatcggcagaatcctatgacttgctctgactttgagtcactgacatgggccaactggatagagggcacacatatcagtgacacaagttagagaaaagtaagttagaggatctctatttggttgggttgtagtttaaggctgcgttcggtataggaagttcccaacccctcttcctcgttttctgcgcgcgcacttttcaaactattaaatggtgtgtttttttgcaaaaagtttctacacgaaagttgcttaaaaaaatcatatagatctattttttaaaaaaattagttaatacttaattaatcgcgcattaaatgctgctccgttttatatgccaggagtgaggttcccaaccctcactcccgaacacagcctaagagccttattggttgcctatattttctaataagccaaaacggcttattaagaaaactgtttaataaaaccaaaaagatgtggtggtttaggcttcagaatctataggctgtttaaccaagcccttcttgcccgtcaagcttggcgtcttatagaattccctgatatcctctatgcaagagttctgaaggcgaagtatttcccccaaggatccctaattgatactaccttcagttgcaacattttcccgacttggcgtgctattgttcgtgggctggagttattgaaaaaagggatcatatggagagttggtaatgggaagtctatctgcgtgtggagagatccctggattccacgtgatcactcaagaagacctatttctttgagaggtaattgttggctaaaatgggtgtctgatttgatagaccaagatggctcttggaatattacagagatcaatagatgcttccttggtatagacgctgagatcatcccaactatctgtctgtctcctcatttggaagaagattttttggcttggcacccagataagacaggccggttctcagtgcggagtgcctacagccttgcttgtaagctggcaaacactgaagattcgtcaagctcatctgtagtgggtacacacaaagcctgggactcaatctgaaagtgtaagatgccacagaagataaaggtctttgcctgaaaagctgcctcaaactgtttaccaaccattgtcaacaaaaaggtacgaaatttggagtcgacagatacctgaatcatttgtaatcaggagaagggggatactgctcacgccctctgcaggtgcccacacgcgaggaacttgctgtcagccatgttcaatgcaggcaacatctctcttgatgtggaaaaatctcgtttcggtaatgagtggctatttgacatgctggagcaactccctgcccatgagcacgagatgttcttaatgacgctatggcggaattggcatgttcgcaatgaaatcacccatgataaagcagcccctccgctggaagtttcgaaaagatttgttgaaagttacatagccacgcttttccagatcaaggaatcaccgctgaaagatgtggaaaaagggaagtctgtagcgagtttgtctgtcactggcagggtaagagacagagcttctgatgatcatcgagttccgaatcccgtattgcattaggtgaaacctcaggttggttggatgaaactcaatgttgatggatcctttgatgctgccctatgtaagggaggaattggtatggttttacgggatagcagtgggaatacaatcttcgcgtcctgtaaaccgctgaacagatgcacaggtgctctcgaatcagaactgcgtgcctgtgtagaaggtctgaatctagttctccattggaccctgctcccaattctagttgaaacagattgcatgtctgtagtgcaactgttaaatgatggggaaagggatcggtcggaattggctaacattgttcatgaggctaaacgcttgctagccgggactaggagaattctagtcagtaagatccatagaagccagaatagtgttagtcacctgttagctaacagggccaaagttgactctgtctctggggtttggttggaaggaagttgtaattttatcttacgtttagtgcgtgaggacattttaagagagtaatatatttcttctttccccgcaaaaaaaaaaagaaatacaagttaatttatatataaagcttttatatatttgttcgtagcaaggtaaaagccaatgctataaagaaatttacgttgaaaataagttgaaatcaactttaaattcaagttttaaaattcaaactttagcttttgctttgtgttattaggccaaccgatgaggctctaagcagttgtgttgggggaggctaggcctcctcccgccccctggcttcatcccttcgtgattgacaagtgcacaagcaaaacgaaagaaatatagtagtccctctaccccaatttgaccgtccactaagattttgaggttttttctaaatgaccatcatacaataagtgggagtaaatgggaatcgctgaatgcgctgcacgcatgcaaccgtatgcatgtaactagccaagattaatttctgatggtgtaactaggtatgaaaatggttcataaagtttcctatttcctgagaggtttttgaaacggaaagtgtcagtcagaattttatcggaaatttttagaaatggaaatgaattcagattttttttttcaaaatcggaaatgaatacggtgaggctactatcggtcgaaaaccggaatcggtcagaaactttccggagataaatttgaaaacttttcgaaaacagaaactttttatatatagcttattagcttcagccttctctactctatatatgtttagatttctacataatattgagatggttagttgaatgtagataattttttagtacggtgctttagatacgtgtccaccccctacagtagcaggctcaccatgagcttctcactaggctcccgcgccgctcccttcctgtctcccaagggtgtgacctgaggaattcccgcgctcacaccgtgatctccgccggagattcgccggcgacagggagcgccgccgcgtcgccctagaatcgtcagtccatcgcctgacatactcttcagtattcctattcctttttcatatgacttaaaaatcgatcttatgtttactacaccatctaataacaataaaaatactaattaaaaaagcgcaaggagtatcatttaagagcgggttgtttcatgtgtggttgccaccacttccacgtcgctaacagacttattaattgtaaaagtaaggtactctgttcatcgtactccgtacagagtagcatcaatgatagaaacttcaccttttttttaatgtttgataaaatgggatgcgtcacctacggatggaccaacggattgttggtcgttggtatagcaatatcaatattattatggctcttagttgactcaactgacaagtctacgcctgctcttactatttaagaagcttccaatgcgctaacgcagcccagcgatctgcgcgtcacaactcacaaagccggggtagcttgaggtagtggtgccctggattctaaggtataccttgctatacactgatccttatgtaagttcgtctgtaatatatacacgtaactggtaaaatttgtccgtgcaattgcactagctagtttctaatattatttcatttcaagcaaattagttacttgctccggcctaaatatagcggcctaatttgatatacaaaggcagcaatattttaaaacgaaaaaaagtgcgtgatacatatataatataatttcttgatattgtttgttttttcacgtgccctactgcacatttatacctgcgaatatgccccctttagcacattctcaaaagttggaagccaacaggaaatctttggtgtcgctaaaattcttaaattctaggtgtgtttagttcgcaaaaagaatttttttagttgtcacatcggatgtttgactggatgttggaaggagttttcggacacgaatgaaaaaactaatttcataactcgcctgaaaaccgcgagacaaatcttttgagcctaattaagccgacattagcacatgtgggtcactgtggtacttatggctaatcatggattaattaggctcaaaagattcgtctcgtgatttccatgcaaagtgtgtgattagtttttatttttatctatatttaatgctccatacatatatccaaagattcgaggtgacgtttttgggaaaaaaaaattgaaaactaaaccatgcctctttaaaaaagttgtgtcaaaacctgcgcaattttagatactagtatttaactgtgattggtggcgtccatgcctcctgcaatatacttgccatgaatgtccacgaggatattttatattactccctccgatttcatattaattgacgttttagataaggttgaagtcaaactttataactttgaccatcaataattttaaaaatatttagtttaaaggaactagaacaatatatataaatttgtctttcaaaacaccataataaaagtaaacatatatttatttattatatatattataatagaaaaataaaggtcaaagatatattttgtagaccgtgttcttgtccaaaacgttaattaaaatgaaaccggagggagtatataaaaaagaatagaatccattccagagttttagcactccagaaattttggaagttcgattgtgaaatgccaaaactgtcatcaatttaaagctgccagaaaaagggtaggtgatatcaatatattgtcgtgccaaaaatatataaaaatatatggttgccctgattcctgtgtgaagcaacattttcactgcactgctccaaacacgccgaaggaggaatcaattcaccatgatccactctagctaggacccgtaaaaaatggacagtttggtcagcaggctactccctccatcctagtttaatcatcccctaactaaaggcgctaagaacaataacagcaaaatattcatcattcttaaaattaatcctctcatggattaagtgttccatcgcttcgtgtcttatggattgctaatggtttaaatataatataaattaatcttgtttggttgcaagtaacacattccaatgatacacatttagtactcttaatttgcacaaataaacgaagatgatgattattttgaaaaggccttaaaaatattaggggatgattaaaatgggatgaaggcagtagtatttcagagcttgcttctccatgtgaacattttgtcaagaatgagaatcatcggtaattcaattcccgtaagggctaatacgtgaaacggattccaacatatattagagttagggctccagggtgagctaggtatggagagggccagaggggacgctagggagagaaaaaaagagagtcaggagggcttttgtgctcagatggttcgggcttctaaattactgttttatattatgataactagctgggtggtccacgcaattgcgcggctagccaaaaaaatcatttttttaagtatgattttacttaaaatttattaaatagctatctcattgttaagactttgaaagaccaaaccttatcatcctcgtgtttctaattatatagttttaaaaatcacaccaattgctaccccttatgtcatcttctttatttgcttgctcgatctatcactatttctattcattcatcttggaacatttaaaaattagattttatagtttttagagtttattgtcacgttgggtttcgtttttataatttctagatgtcccgtcaaacgttgccattatactcctatacagcctgtccactatctcttctcttttattgtcattgagattttaaaaatcgaactgtgacgccccacacttttatctttagtgataaaagtgtgagaacatagattattatttaacaaccattattttgccaaataataatccaccatcagagatcgcaacagagaaatagttagaactacctttaattcatccctaggagcattaaggtcatctctactccatctagagtacactcataacattgaatagagtttgtagcaactccccgtagactcccatccaggagatagtcgtgaatcacgatttaatttagcactgcgcaggcttgtatcactgtacccatagctactcttaacatgtttgactgtcgcacttcactagatgcggcaccatgctaagagtacagaacttttcccctacttcaacttactacactccacgtttgtgttgagcctatcagccctccacaccaccgcgctactatatgcgcctggaatgcacttcatcggcattcatggggtttatatcatctcccatcctactactacgtacccatgtggagtataataaacttgataaggtaccaggtccagcccgtcttaagacgaatctatggtcgacacggtatatacggttctttgatacgagtgagggggtgattagtccttatatttatacaccgtatgtagggagagccctgacctgccatcatcatcaatcatctcatccctgagctccccctacccaccatactagtatcctgatgatctccatcatcatcggcttgtcaatcatatcatcatcgttcatttcattatattctagaaaatactttttgatgcaatactaggagaaatatttttatgaaatagatttttaagttgaaatagaattatcatctaccaacatgatcaaaagagagacttgcctgagtttctgtagccggtactatcaaatgacccaatttctgactctagccttttccctgcattttattgtatacattgattttcaattaactttcaaacttgaagaatataattggcttatctatctatattacagtgcacctaaaattctagcctgatgtacaatttctagcattccattaatttgtattgagtatatatattagttacttgatttaaactagacttgatttacagatttattgacagagttttgctaagcttaatgttagtgtagacaactagtgtgcactaagcaatttaacccttattcctgctctcctcacttatgtctctctctctctctctctctctctctcgcacatacaacaagctgcatctagttactcatccccttcttccattttcttggctgttgctgctgctaatggctttcttcttccccaactctgctcctcccttccatctacagcaccacccatggcgctgccaccccggcgcccacggaggtcgacgccagccaccaccactacacaccccaagctagctcactgcaaatccccttttctccccctcccgatttctcctcttcctcccatggtccaagccctaccaacagcgtctgctttctctctctgtgtgtgtccctctctctctctcatgctaccaaatggatgtgatgccactaatagtgatgtgaaagtgcaggaaaatagtgcctcgtgccatggctgctctatgaggtggcaagaatggcaagatttgaggggctcacctttgtctaagggacaagttcctccatggttgtgctcccgtgttcgtcctcgccaatgtgttggtctcttctcctccttgatagatcatctccttgtctagccaatttttcttctccccttcctagccgacatagagatggtatgagtatttggctgagaactaatttggctactaactattgggattgagggattggttcttgaaatggattgggcagaatcttgcattccgctgatttgtggattttgggactttggctattccctcctcgctccctattgctctcctcctcccctgatctgctcactcctcaccaagtgcttggggctcatatgcatgcatcagtgagcaaatgggcatggctgtagccatgctttgactgcttgactgagaggtgatgaggttgtgctactacctttgtggccttgtgtgagtcctcctatgtgcagctatgtgattggtggaaaattagtactgctggtgaattgaggtccctttggtgaggttacttctttatatgagatgtgtgacttcttagtgttaattagccggagccggatgacgaacccaacttaagggaggggtgccagacggtattagccgatctaggtatctcggtgaatggttgaatatacaccacttcgtgtatgggtctgacggcaatatttatttacatattaccttttgtgcataaaagggtcaagctatgcatgtcctgtgcaaccgtatattcaaatatatgatgtattgtattattagtgtaagtgtatgtatatgctgactgtttacagtggcgtttgtttgtactatatttccaattatcactattatattgtggttgtatattggacattgtttgtttgtttaacttcgacgaatgtgaatttcataaattttgagtggcttattcttatttccaacaattttgctagttaactaattaattagtgatatatgccacttaatttttaatttttaaaatagcttaaatttccgggtaacataattatagtttgggtttatttttactttccaaaagtcccgccaaaccatcagcggttttgccattgtactcctctacggctcgctcgctgcctcccttctttattgccttctttattgtcattgagatttaaaatagaacatgattatcattggttttttttactttttagaatttctaaatctttaaaaattggacttgtagttttattttttataatttttagaagtctcatcaaacgatgccactatgcccctctgcagcccgtccgccgcctactctttattgtcattgtgattctaaaaatcgaacataactatcattacaattcattttttattttctagaagtcccgtcaaccgtcggaggctctgcaactatactcttatacaccccgctcgttgcttctcctttttattgtcattgagattttaaaaatcgaaaatgattatcaatgtggttttctttctttatactttctagaagtcccggcaaccgctttacttgtttacttcacggcatacctgatgtccctccttttaatcgtcattaggattctatttggtgttttattaataatttttatatgccgtattaaccaccaccaactctactactttatagccatgttacttaatttatttcgtcatgtgttttagatggtcttttctttcaatagtctttatttttatcacaaattttagttatttataaattttattcctaatataaatcttttttttctaatttcagaatttattttttctaaaaaattagttaatattgtattgtgttcttttaatgtttttattttttattttgaattttatttgtttcaaaattgtattcctacttgaactctgttttaaattttctaattttggatattattatatttttattcgaaattttaattaatcttgtattgggttcttatatggatttttctttcaatattgcttctttttaattacgaatttcagctaactacttgaactcttctttattttcttttgctaatttcatatttatttttatttttattccgaattttaattaatctcgtattgggttattagatggactcttcttttaatattccttatttttaattccgaatttcagctatttttaaattgtattcctacttggactctcgtttccttttctaatttggattttattttatttttatttcaaattttgattaatctcgtattgggttcttatatggaaacttcttccaatattgcttatttttaattccgaatttcagctatttttaaattgtatttctacttagactctcctttccttttctaatttgtgattttattttacttttatttataattttgattaatctcgtattgagtttttatatggaaacttctttcaatattgcttatttttaattccgaaattcagttatttttagattgtatttctacctggactctccttttcttttttttttctccgattaatgtgggaatttctaacccccacagcgaacgtggtgcctcctttcaaagctattttaataatataatagatagatagatagattaccgtatttctaaatacaccaatatttattatctatttctttatttgacccataatttagaagcccatcaactcctcaaccaaatatatgagtgcaaagttaaaagggagacaatttgtaatttgcatagtgtatccttgaattaattttcttatattatatggttatgcgaaataaaatgtgtgattttagatatttgttattgatttttgtcgataccaatgcattttcgttcatattgttctgtttttggtttccgatattattatactgtttttattttcgaatttaccgttttcgtttccaagaaaacaattgggatgttttcggacctttttcatcccaggtaagtggtcaaggcgcgcgattgtacgtccattacacgcactcggtaattccagatgcaaaattgatttaccgctagtttccaatttccaacgatgcaggtaagatccacagcaacgccatgaacacgcaggtcgacgtcgagaatgtggacgtggtcatcaagcctagaatggtacctgcccatcagggttggcagactagcctctgcgactgcttcggagacggctgcgaatcatgtatgcaaagctacgactgactggatttttctggtttggtggtacaatgcaatgttttttccgtttcatggcttaatttctcgacctgttggcagtttgtttgagtgcttggttcccttggttgtcgatttcctgcatcggtgaaatcgtcgatcaaggcttcacaggtaggggtcatctcctctcccatagccccatccaaagtgctttgctttggaccggttaccgataaaacagaagagcgtttggattcagatataaaattaaagaaaccatcaaactgaatttagatcgaattaatatccgctgatcaggtggttaattaattatcggtattcagtttcaaaattttgcattttcacgcttattattatatccggttacagatatgtatgtgaagattttttacatttgcttaccgatatgcatgttttctctcttgtcaatttccttttggtctcctcaccaattagagtggtgctgtatctgcttcatctacctcattgccgcttatttcggcgtgtggtgggcgtacgcggggtggtaccgcggaaagctcagggcgcagtatggcttgccggaatcgcccctgccggactgcctcacccatctcttctgccactggtgcgcgctggctcaggagcacagggagctcgccgcccgtggatacaacgtgctgaatggaacttactccctccgtttcaaaatatttgacaccgttaactttttagcacatgtttaaccgttcgtcttatttaaaaaagtttgtgaaatatgtaaaactatatgtgtacatgaaagtatatttaacaatgaatcaaatgatatgaaaagaataaataattacttaaattttttgaataagctaaatgatcaaacacatactaaaaagttaacggtgtcaaatatttaaaagggagtagtatactccctgctatatatgcatgtgccgctttagacgacactgccaaggcgatgcaaaccccaagatctaacggcgttttctttggcgattggcatatgcaggttgggacggccggccgcaggtggctgcagtaccgcctccgtcgcgtagtgcgcccgcagtccaggctccgatgaggcgatgaaccaggagcaaataaatagctcgctccgtccaccgaacgaagccataagataagtggcccagtgcgagctgtctatctaccaaaattataacaaaattataatagaaaaaatgatacctcgtgatatttttataaagactgtaaaattacttatctatatatctatatccaacagctgtgtaaagaagccaggcatctgaataatatttgacatcgccctagtttgataaactaggaagagaagaaaagcccgtccacataagcaggcatatgtttctcaaactttttattatatatcttaaatatgtgagatgtatatctatgtgtcttctttaagaataatattattctactttaaatttgttgtatttttttttctcactataagtttataagttttagattgctctaaacgttggttatggttttattgcaagtatccacgcagtggtggatcgaagaattttcttgaaactccgcaaagctaaaaatagataacaaatgtacacaatttcatactacttcaaaaaacatttactatgaacgtgattgtgattttttaagcatttgctttgctggtttgcttaagtacggtaattaagtacttcctactgttgtatgtggctggatggtaaataatcacataaatcaagtcctaatctactgctgtgtgcgttgaagcccgggcagctgcccatgtggctccgccattgtatccatggaacaaattctaaactaaaattgttaaaactacagaatcccaagactatggaatcttgaatttatgtaaaaatatcgtgttgcaataattctgttagttattgtgaaattatgaaactatagatgttcttttgaattttttagcatgcttctagaattcaagcttctaattccgcttcagagtgcctcgccagcatattctacgacagaaagtttgacgggtgtcaattggaaattccacattagctagggaccggattttccagccggcagcacggagaaggcactgatgatcctaggtcattggtgcaactataacctttgaggtgcacacgatgcaaaaaaaaaaaaaaaaattgaggcacacacgacgcaaaaaaaaaaaagagaagaggctcgattcggtcgaatccgatgctttgagtcactccccgttgccccagattacaaatcgaaaaaaaaaacaaacttctgtacatgctaaactttctgtacaagcttaatcacatttttttaaaaagaaaaataaactgttgcacatgctaaatcacaaattcaaccaaaaacagaacctctcgtcatcaaacggataggtgacgtgacatggaaagggaaggggagcatggcaaggtacccagatctagcggtcattgagctcgagacagcgccctcacgtcaccccaacgtaggggaagggggtgccctacatgttgtacatgctgtacatggcaaggtacccggatcttattgatggcccccgcagcagacccgtaccagtggcaatatccgcttccccttccccatccccttccccttctctacctcctccctacccctcaccgcctccggcgaacaccgcgccacggtgccagtggcctgcacggagggtaagtgcgcgtggggtggggggggggagcgtcaggagtcacgggagcatgcgcacgtgggacgcgcatgctgccgcctccactcatgagtttagggtcgagtcgggagagagagcacgcgcacaaggggaggagaagatagggagaggataaggacggagagactcggtctattggctcagcttaacggtctaggatgcttgtttatttaaaacaaactagtacagataaagtgataatattataggtgccaaattttattaataaacggtacctatatcgtcacataggtattagatcttctaaacggcccatgggcatgtgctcgagccaaaaataggtgttagttatagactttctgacacctataatactatcttcgttttcgtttatgttgtagtgatatgaccaagttatgggttgcagagagctttacatggtgggcaagtcgctcgtcactgaggcagagaaaagctctaggtcgcctcttatgctttgcataacaaatgttttattctcttggttcaaaccaaaatgttggctccattttaaaataatatttaaaataattgctggtggatgatgatgtggcatacttgcatgttgagttttaaaagttagtaggtattgactttatagtaagatagaatatcataaataacacaccgatacaaactttaatttctaatgttgcagatcttatttcgtcatacgtatttgcaaagctattgacggtaattaggtaccaaatctaaccatcaatccctacataaaagcaaatgaaagaaaacatcaaacttggtgttagtgattattactaatcattttcacaagagttggtggatatttttatgcaagtgaattatggaaacactgctactcccgtcccgagctgaaggctgaagcactgccgtgctgccccttcctcgagctcgagcaccagcaacttcagcgctaccatcatgtgcttgaactcgagcttgagaactagtatcgtagctgaccttgtgctgatctactactcctcacatcccctccctcctgatgatcggttatagcataccaagaacagagtgcggtagagcataatagcaacaaagagagggagcacgtgacatcggttatgggctgcctaaattggaaaaaaaattgggggtaaaatatttcttggcctcagtccttaaacggcagtgctaatgttattttcgtctaatcgtgttcatggcttcacttggtaaaatagtatagccatgcatggaactaaagagctagtacctgcaatggagcaagtgatgcatgcagcgcaagattcctagcatggaggcatggagatatcttatatgctaatctatgaaggtagaaacatgtacatcttccgaactttgttcgatcatgtgctttttttatcagatttttttaagatggtttatctcatcgagagaatccattatatgccactgactttgtcacatgtctacaatttaccactgactttgtcacgttctacaatatgtcatcaacttttgtttaacttctacgatttaccatcaccgtctagttagcctccgttagcactgtacaattttgtccaaatgaccaaaatacccctacgacaaaaacttctaaaatttagataaaattatcaaaatatcatattatgaacacaagattgcaaaacatccaaaatttggtaaaaaaaacttaaaatctaacatttcagaattcttatccagattttgaaggtttttatcctaggggtattttggtcattttgataaatttgtgcagtactaacggagactaaccggacaacgatggtaaatcgtagaagttaagcaaaagttgatagcatattgtagaacgtgataaagtcagtggcaaattaatcgtagacgtatgacaaagtcagtgacatataatggattctctctatctcatattgctaggcatgtaaatacaagtcctcttgagatagacgcctacgcctaaacatttcaccatgttctttctagccttagtcttacaagttatatgtttccttccagggattcactcttttctgttgtcgtatttatccatgtttgatatgatgtagctttttttttcttctcaactataaagtttaatgcttatggttctatgctcaatcatatgtaccatgacccagcatggctctttgtatgtgatatggttgccctaacgcaagtattactttgtatgagagttttcctccatagaatcaacttactacaagctttgttgcctaggcaaacattcttctaatgcaactaatttccacagcaacgtgcggagtatcttctagttaaacacatagggaagacaaattgatttgagatgattaaagggaagacaaaatgattaatcattagtacgtgcacacaaataattatacatagacgagaatagagtcttgtagcaacacacaaatacatataggatacatatccatgacactcatggatatgttacttatttttgaaggtgcagactcattgccacctatccattatacacttcatctgcaatggctttacggattgtattcatcacttcctcgctgttaggtgcgtcataccaaacacataggggtggagcctctgggatgttggggtacccattgtataacaggttttgtgtcatgaaatgcgggtctgaactgtcaagcttgaagttgtggagagcaaacgtacagtgtgtgatatttgtctgatcgttctgcccaggaaagtaaggtatttctctaagaattctccactaactcttgataactccaaagctctttccattgtgttacacaaaaaggagtgaatgtagttaaaagtctcttcctttccatgcggtagtgttgcttctgaaccctcaaaatcatccaagtggtatcgaacatgcgggtatggaggtaggaatccataccaactggcataacccgagcccacaaggagatatttgcttgcacaaataaaatattcagttaatacccctatatggcattaacttgtttcattaaaaaaataaaagtgttgcgaaccccatggaaaccttggaaatatgtagggatagcctcgtactacttctatgagcaccctttagtcgtgcatagatcctggttatcccgcatctataaatatgacacgattgtcccatccaataacaacaagaacattcctagatttgacatggtgacgattccgtgttgaatggaatcatcaaatgccacaataacaggaatgtgtcccatccactgaacctgccgcactagcaaatggctggaaggcctcatcttgcatgacacggttatccactctagcaaagttaggatctacatgcttatttatgtcaattgtaattgcatagacaacattaagcactctatggaaatactttgacacagtagatcgtgaatggaccatcctattatttgtcgaccgattagaatagccacctgccatgttgtataggaatattccaagtgcttccatagggtatatctcaattgttccgtgaaggttataccgattagtgagtagcccaaacaaagcatgaatctgatcagccctcattcgaaatatagcttggcactgagctgcattggacattgtttccatcattcattccatctcgaattgttgcgggacccgccttgcggccttaccacgcaattttgcctccaaactagcaaccaacatatcaagaatgcaatcttcctcttcactgaagtatccatcctttgaagcatttgttctttcagacgaagtgctcaagttcccatagcattatatgacaaaataaacatggttaaggtacaagtatgaatggtgctaataggttttaactttattatcgttcaactataaacttagtcacgatgaaaaaattataagacagtacagaaaatttcagaaaaagatggaatacggacaaagaacaaatgaggtacgaaatacttaaaatattagcacatgtcaagtaaaattcgtctcaacataatttattcaatcagtgcaactgatagctcaaattaatggtgccgaaattgttaaactaaacactcaaattaataaggcctagaacaatcacgtttctcgaaagaaatcgaacaagttatttaacggacatcacaaggaaaattagagatgcatgacaaagatcgcatggcaccagtacgataatcactgccttaagaaatgttaaaacattttaacattgctgcaccatctgctccaaccgtaccatcataacctctaggcccaaatccacctccaccatcaaaccagcctccaaatccattagcaccacctgagcatgttggtggtggagcaaacatagtttctacctggtagtgcgagtggatgaagtacacaccttcctttggtgtgatgcaatcatcaatgaagaactcatgcaaatacccatcacgaaacagcttcagtgccatgtggtacagaggaaccttcttggtgatgccatcagccttcagtagctccatgcaagctctagcacttttggcttgcctctgttcctcccttctttctttgctctcattggactgcacccttaggtcagccaacctattcagagcatctccagtggagtcaccgcaaatatgcttgccgctgccactagagacactgacaggggttacgatccttttttcctttaccgcgcctcctcattgaagaaggctctggagatgcataagtagtgccatctgcatgaggtcctcaacatcgaggatcttagcctcctaggacacctgtgactgtgccggcttggacctaggcacaccggagcggtttagcagcacagttcttcctctgtaaacaacatgatgctcagcgttgaatctgagcggtgcatttctgaatacacgcgctcctcttctaagctacacaaattacagcacatagttggtttaatcagaaaataaccacttgtatgcatgtacagatggcaggatatagaaatggcagcacatgtaaacatgtaagcatgttcaaaacagtagaatctggaatcaaatacacataggcacacatttgttataacaaagtatataacagtagcaagtgaaaatacatgtagtgcagttagtgtacacatggcagcaaccatgtgttgaagttaagaaaaaaaaaacggaagcatatcaccttctaccacaatacaactgagtagttaaaataagtgcacaaatatgcgttcataaattgtagatgcagcaagttggtacttaaaagataagttttatttattgttgtcattacatctaagataaattaaagttttgctgcaaatacaacacacaattcagttatgtggtttgatcacgttgttgctggaaatattgttttagatatgtaacacatgccaactttgcaaacaataacttcagctcctaaatctcttgcttaatacagaataattcaaacatgtgcaagttcaattatcagtaatcctcaacacatggcactaacaggtcagattttaattacaacatgtcatggctgatcgccttggattattttgcaacctatgcatgctgctcattgttatcatgataaatacagaaacattgcagacatgttcaaattaaatgtgctcttgtcatctacacatggcatgaaaagatcatagtagagagatcagaacatgtaaactttaattcagtaccctagacagatcagaaaacattcaacattcaatttaatttgcagaaaaaaatatcattttttgtaatccatacattgagctcatacttatcattctatgtacaaaaacattgcacacaatctgcagatgtaatatcagttgtgaactacacatggcatgaaaagttcatatttttctgtgtttttttgagtgaactacacacttacaagtttcattgtgtttttcagaaacaaatgtctaggtttgtgatgtatacattcagctcaaaattatcttggtatatacacaagcatttaaaagaacacacatatttaattatcaaatgtggtgtacacatggcatgaacagatcatattaggctgttttaaattaaggactacacttgtgacaaatatggtgtacacatggcatgaacataatatattgttaataacatggcataattaatcataaatgtagtttgacatatctaggcatagaacaagtggtctgtaatgtcatgtactttgggatcaacattccaaatatatgtatgatagttaatcatacatctatacacctatgtataaagttttgatacactggcatctagagtatatctataaacctatatatgcatgaaattctgctacaagtttcaatgtaattttcagatacaaatgtcaaattttgtaatctatactttgagctcataattatcttggtatatatagaagtattctaaagatattgaaatttaattatcaaatatggtgtacacatggcatgaacatatcatactaggttgttttaaattcagtaagactacacgcatgacaatgaacatatgaacatattgctgataacatggcataattaatcataaatatagtttgacatatcgctaggcatggaacaagtaatctgtcattcgaaatactttaggattaacattccaaatatatgtatgacagtaaatcatacatctatagacctatgtatgaatcatgcatgtagaggcctatgttttgaactatgctacatctggtctgtaatgtcattcatctggaggcctatgtttgttaaagctcctactctatatggctctattgatccactgatggtggtgtgtgaagcatctatgttttcaaatttgctacatgtaatctctagtgtcatgaactttaggaaaaattgcatggcatgcgcaaaatggaaaaattgcaaagttaaactatacataacccttccatctgctcccaccattcagagtttacttggatggagccagtgtagggatcttgccccagatcggtggccattcattccagctaggtccatgtttggaaacggtggcgacagtggtcccataagttcttcagctactgcttgttcatgacccttctcgtacatcttgttctgcagattcatgtatccttgagctttggggcagctggaggtgatgatgcagccctcaatttcttccatgcagctatccaggaatgctttcagctccgcctacgtccaatgggtgtgaccgccagccatctaacaacccaagtcaagcaagcaagtaggttgaaaataaaagctagaacttgtgctttacctttcttagggcctttacagtgcacctacgtggcgagttatcgttttccatctaggccaaactctgacgtggataaaaaaaaaggtggtggcctggtgggacccgtatctttgcaaaggtttgcatctcctaccaaggatccggtttcctcaggcccaaaaagaaactgtgagtggtcccctctcccatgtcgcgtgctactactctcaattttcccgattattcccctatacgtcatccctctgcttggctccaccgacctcgtcgtcgtcgattcgccggtgggtccaccaccgcctcggcttcctcaaccaccgccgcgtccccgtgcgagtgggcttgagcggcgtccgggagtggagaggccccgatagggataggagagaggcccgcggtggcggagtttgtcgccgaggtggggggagtggggagaggccgccagcggcagagttcgtcgccgaggtgaggagaggacggaggcagcggcatcgctggtaaactcgccaaggttggtgggtggagaaaatggagaggattgtgcagtggtggtgggtgcctgggtggggttgagatttgtattatttcctccactgtaaggtgttcattgtaaaatttgtacttctttctaaattgagaaaaatatgagggctaaaatcaaaagtggtaggagctaaaacgaaaaatcgaagtcacccatgaggccatttgcactgtggggaaccaaaatttggacacagtatctttagtctatgtggcagttttaggttcttcaaatgggtagtttgcattactactgcccttggtgctacgagtcgagcaagtcccaatcgagtgaagatgcaactctggccggagtgaggcggcggaccagctgcaagatagcttcatggaactttgcagcgatgatgatgagtgctcgcgctacggcctggatgtcgtcttcagctgtggcagtgtagctggcgtcggattgcagagacttggatgaaccctgagaggatttcagatctaaagccacctctcgccgttttgccgaagtaaatggcaactgtggagaggatatcaagggctcggtggtggagtgctagagatgaagcttccgtttcacgcctttggatgccatggccggatccacaagatggcttaatatagctatgagttcaagtccccctctccaccaattttggcaatggcgcctccttggatgccggatgggacgtgaatctccggccctattcggcacgagaactcaccagagcagcagacgcgcgctggagaggctgatgcactgtcggtggaatcgacgccgcgccgatgcttgctgcgactgtgcctctcgttttttctccacctccaatgcgctaatattcgatctaagtgcttctcccctactccctccgtctaaaaaaatttaacctagaaggggattgttcattattctaggaggggtcacattctgttataggttgagttttttttttttttttgatggagtgtatgtgcctggcaaccctcctgcccaatgagccatcgacgtcgagcgcatggtctaccgcttgcacgccgctcaggacaagcaggagccgatgcagatctcgattcgcctccgtgaccaacggttgctttagtgttcggaggagaaagatgagggactccgcaagaacaggtggagaaagcaatgcacgaacgagcgaccgaaagctatccacgccgtcaccctcacggttggcttgaacagtaactcaacaggccagtccatctcgcggtaccgagattattgcaccatcttaatttcagcccatccgaatcccagctttccaacgggcccaaaaaaatggtccaaaccaccgcattccagaatgtaattcaccaggtgtataccattgccaatgcgcaagctgagcagatcatgatcaaatgcatagcaatgatctaaccagtagtattatactatcatatagtactaatcattcaactgcattcaaaatgagctggccatgaaatcagtctcacaattttccatggttttaatcagagaaaccaactcggcagacaaaaaagggtatcggaactgacattaagttttgatcatccataatttagtaacagcccaaatctcctaaaaggtaaagcaactagcaacaccatctctactcagctgctgcaacctcccctgccaccgcctcgtcagtctcagcaggcctgtccagcttcataccgacatcttccttgtagtcaccgtgtacctgtaaaaccaataaagaccacattttctcagaatctatactccttttaaacaagggcaatggtgccaccaagtacagtattatttttatttcccacctactccatcatgttttgtaccaactatccaaactatccatgattttatcatatttcatctgtaacaacatctacaggaatgaaattgtcccaaaaacctcactattaattagatttaatccacagaaaagcacaggtgtttggctagtaaagttacgtacacacaggaactaggagtggaaaaaaaacatctggcactactgaggacatcaagaggcagcatactgaggccaatttgtgttggctgccttcaacgttatttgaggctgttaacaaacatgttttgtacttggacgccatatcatgtttaaatttacttgctacattctgtgacagtaaaaaaaagaactccggccaggtcatttagcccccctaatacttgagtaagtcttgcttccaaatcaacactacagtacagcactatttacagaaggcaagccctaatataagatttgagctaatattggctgcctaagagcacaaaattgcctaggaattttttatcaggaaaaattatctaaatgcataatgtcataaaccctaaaatatattgttaaaactcggtattgcaacatcttacactaaaagttagtattcaagtcaaagcaaaatcctgaactaagtattttagggcagccaggttatagcaggggagttagtaaacatagttgattccaacacatagcaaatatactagatagattttctaataagattccaaagccaataaccatgctaatacatttctcagaagaataaccaggagcactaaaggcatctagctaggcatgagaataaggttcctcacctccatcaacttcccaagatcaaacttcggtgccttcaagatcttcaccttgcggatgaacacattttggagagggaatatacttgaagttgacttctcgatctcctttccaatgacttcagggatgaattttgaaaccagttctttcaagtcacatgttgatgcctggttggccatgatctcaaccatcttccggcggatcttcaaacagtggacaaaaataaagtaaacaacaagaacatacctcatctcaaaaaacaagaacttacctagtacagaacatgcaaaaaagtatgacaaaacttttacctgccggatctggctagcctgagcgtaacaggtacgcttcacctgatttgggcggcgcttggtgaaaccaatgcaaaacaggcggagcatgtagttatctgtggtcttaacatccacatgggcttcaatcaatgtttgccatttcttgaccaaggacctaagtttgtccgtggtaaaactcatgccctagagaaaatatgtattggtttagactacataggacaaaagggatcacagatacaacacaaaaggattaatgaacaatcaatgctcattcttacccagaaattcgtgaggacattcctcccctgaacatcctcagcacgaagtctaaccttcctgtaagcctgatcctcgtcattctgaagatccgccaaggagacttcaaagacacgatgcttgagaccctcagatgcaatctagaaaataatttcatgaataataatcagcaacagacatagtgctgtaaaaaattcagataaccttaggaagattacacaaagaaatatcttgggtatttaaacatcagactaaaatatctaattagtgagaacacatgatagtgttactgaaatcaagcatttgatgtatgacgcattaaaggcagcaaacattaaaggcagcaaaaaggttactccaagtacatctcagcaagaatcaatcacctcaagaacttatatatatgattagtgttcatcaaatgaaatgaaacattccatgtatcagccataaaaatctaggagagtagaacaagtacagcacagaagaaatcttgccagaactcccacatttgcattaacgaaacaaacttctagccaaaacataaaaatgcatcaagacatcacaatcacaataactacatcaacgccaacattaatcccttagcctactcagatatagaatgacgcagccacgcagatccaaacagatagattccgcacatgtactcacagacagtgatacaaaatgaaagcatggatcagatcgcggattgaggttgacgggcgcgaatggggaacgaacgaacgaaccttggtcccctgggtcctggagacgagggtcttgccgatgttgcggacggagaacacggtcggcgccttgatgtcgtaccaatccttcttggaaaagggatcgacgctgcacccacacggagagagaaaaagagaagaagtcccaaatcagaatcccccaaaaaccccaagcaagaacaagcagctcagagaggacgagaggtgtggcgcccacaccgcccgcgcgcaagcagcttacgtcttcttcttgctgcccttcctgcccttggagatcctcttgttcttgcccacggccatggctgctcctccctctcctccggggttagggtttgggagtgagtggcggcggcgcaggtgggagaagaggtagaagaggcgaaacctagtggcctgggtggggttttgtaagggaggggtggctcgatcggacggctgggatgtgccaagccgcaacacgaacttagcccagcttggtcgagctcggctcggtgaagctcgcaagcgttacaagtaggaagaagagggatttcattcggctcgatttccagtcgagagcccagcagaaaacgagtttgcaacaagccgagctcaagtagctgagccttgaggcccatttggagttccttttaacgtgtgatggtttaagcccaagtatgggaatcagacttatatttagggtttaatatggatttgttaatgtgtagtctgattatagttgtataaataatttgattttttttattgatcttcctttagccctttgcttggactagagtgaaatcgaattcttaaattataattgaactatatttgttgtatttgaattatctccccttttataattcgtcaatatattgcttgtgtttgtgtataacgtatgaccttgtgattagcgaattaaattggtatttgattcccggacttttattacatcataattggattatatagaaaaaaattggtgtttgatttctctgtgctttatttgatatttgtaaattagttcatttacattcctcggtaggttttggtatttaattatttatagttccgttttaaggtgaagttccacataactcaagcaacaagatcctagaatgatgcaaaagttggaaattttactgatctttaactgaatatttagggtgttacactttctctttcgtaaaatctatttggagaggcctcttgattttgccttaactagtgacgtctaaatacggagaaacgtggagaagtccagctactacatggtactacatgcatgcattttttttaatatacatgtacgtccctttcctcttcaaataaagttttctctcaaattacttatccgatctacaatccgattacaccattgtgttcgttacaattaaatcttcacaacaaaatcttacgtgattatattacgatgaaaaaatatttatatttataaattacttttattatatatgtaagttactcttatctcatatatatatatatatatatatatatatatatatatatatatatatacatatatatataaaagttacttttagagttgactaaattacttcttagacatataaaagtaaatttaatagagtctaaaagtaatttacatatatttgtcagagttacggataaggtataccctctacccttggatgtacgctatacgacaatatggtacatctgcgcgtgtacggacgttctctgtatacactaaggaaatccatcacgaagtccaccaatggaaaggttcctacccgtataggactgggtcgtcactatatcgtgcagggtacgatgtctccgagtcctacttggagaccacatgacctgcgatataatagggacccccgggaagacctaaggcatcgaatctcatagccaacacaacgaccacagcctacgaagccggagcctacaggagccaagtcgtcgggtgatctagtcgaatcaactcgactacgatctcgtcggtatcatcgagttccattattccctttataatttgtggttctctccatataatcccatatcaactggattagggctattacctattaaggggcctgaaccagtataatcgttgtctcttgtttccttgatgtcgtactacgtagatgctcgtaccagcgtaccccaataccctctatatccggtctacgggtacccgccgtcgacagtggcgcgccaggtaggggaacttggtgctcaaggttgtactactatgacatcaagcttcgtcgacaacggcgtcaacaccggccccatccaaggagtccctacttcaacaatgctggtgtggactcaagtcggcaaaattgtcttcccggtttacaccacggtaccaatctcggctggtccatcaatgaccggaaacgagaacgccgtggctataaccccggacgatcccgtgtcgaaggatcctcccgccgtagcggagaacagaacatcgacgtcatacgagcccgagaaggttcctagtgcggccaaaccttgtccttccgacaagaactgtgagccgacaaggacaactcccgaggtaacaaagccctggtgtcctatccacaaatccaggaagcacaacttgcaagcttgctgggtttttctcaacgtacaagctgaaattcatgcttgcaaggagcgtggaatccagcgtacttctccaactcgtgatgtctattgtcctattcacaagacgaagaatcatgacttctcaagctgcaaggtctttctccgcgccatgaaaacatcgcttcctaaggtccagcagtcaggaatctctcttaaggatgcagacaaggaacaaggagcgacgttgacctcggatcgattcgttggagtaatcgacatcgatccccacgagccatcagtcctacacttgctcgaagactatggctcgtcatcttccagtaaacgacgcgacgtgtttaccatcggtgggactagcacgtctgcgcacgctaacgcagatgcggagaaccaagcggtcacgccggcccaacacctcggcaccgtcaacgcaatactgagagaagctccctatgaccccgtacttaacgatgatctcccatgatggacagaacgactacgggaatcagtagccaatctcagtaacgcgttcgaggaggtcgctaccagagcacaaccagaacatctgacggttggcggtgccgacggcgaaccaccggagcaacggacgtcgcctagacgagctacccctccacctcgcggcaccggcgatctccgcgaccatctgaatggccgccgagaagcacaacgcgcgcgagataacgagaatcgttcccaacattgtgtctcttcacgtcgtcataagaacgaagagcgaggaggccgctcgaacgaagaccaacaccaccataatcgtcacatccaccacgaccgcgacgatcgcgaacagtggacaccggacgatgctggtcgaggacgtcaacatgacggtgattataatggggatcggtgccaggacaacaatggtggacgacgatagaattctcgagaacctgaacgtcgccctcggaatcgcacaccggagccgagtgaaccatcgtcatcatcgtcatcatcttcatcctcgtcatccgatagacatccacggaggacacacgatcgccgacaacccaccgcccctagcgccgggtgtagagctttcaaccgttctctatgtgatgtccggtggcccgagaaattctgacccgaggcaatagagaagtacgatgggagtactgacccaaaagaattcctccaggtctactccacggtactatacgctgctggagcagacgacaacgcgttagcaaactatttgccaatggcgttgaaaggttttgcgcgttcgtggctgatgcacctcccgccctactcgatttcttcatgggcaaatttgtggcagcaattcgtcgctaacttccaaggaacttacaagcgccatgcgatcgaagacgatttacacgcgttaacacagaatccggggaaatctttgagggactacgttcggctctttaatgagtgcagaaatacgatccctgatattaccgacgcctttgtgattcgcgctttcaaaaccggtgtcagagatcgctacactacccaggagttggcaacaaggcgaatcacaactactcgaaggttgttcgaggtcgtcgattgatgcgctcatgtggacgacgcactgagacgcaagaacgacaagccaaaggcggggggagagaagaagccagccaaggacgcacctgagccaagcaagaagaaaagcggcaagagtaggaaaaggaaagctcaagcggaagtcctcgcgtctgaatacgagcaccctcccaaacacccagacccacaaggcagtgatacgaagagaatatgatgccccatacacaagtcagacagacattctccggaggagtgcctcatcttcaaaaagtcgctagaaaagcaactagctttggagaagggcaaacgagcacgtgtagtcgagaaggccgcagaggcaaccactcaggactcggactcggcgtacccagatttcgatcttcatgtctcgcacatcttcggaggttccacagcgtactcttcaaagcgagaatacaaaaaagtggagcgcgaggtttgttcgacatggcaaggggttacacccaagatgaagtggtctgaacagaagatcgagttctcagatgaggaccaccccaaggctgctgttatcccaggacgatatccgatcgtggtcgaacccactattcggaatatcaaggtagcgcgagtcctcatcgatggcggcagttccatcaactttctcttcgccagcaccttggacgcaatggggattcctcgaagcgagttgacaccaaccgatcaaccttttcatggaatcactccccagtcttcgtccaaaccattgggcaagatcacgcttcctgtgactttcagccaagcgagcaacttccgaacagagcagataacatttgatgttgctgagtttgacacagcatacaatgccatcatcggaagaaccgcactcgcgaagttcatggccgcatctcactacgcgtatcaggtactcaagatgcccgggccgaagggaacaatcactattcaagggaacacaaagctggcggtccaatgcgacaagcggaacctcgacatggtcgagcacacgcccagcccaccggccacagccgagccacccaagaaagtgagcaaaacaactaagacgccgaaaccagatggcgcaatcaaaattgttccactctccagtgccaaccccgacaagacagtcaagatcggggcatcactgaacgagaaataggaactcgcgctcatcaccttcctccgcgacaatgcggacgtattttcttggcaaccgtccgacatgccgggggtccccagggaggtgattgagcacaaaatcatggtgcgacccaacgccaagccagtaaaacaaaaactgcggagatttgcaccagatcggaaacaggccatacgagaagagctcgacaagcttctcaatgctggtttcatcagagagatactccatccagagtggctagccaacctagtcatggtgcggaaggccaacgggaagtggaggatgtgcgtcgacttcaccgacctcaacaaggcgtgccccaaggatcacttcctccctcgaatagaccaactagtggactcaacagctggttgtgagctattaagcttccttgacgcttactctagctaccaccaaatcagcatggtaaaagaggatgaggagaagacagcatttatcatgccgctcggtgtattctgctacgttaaaatgccgtttggactgataaccgcaggaaataccttccagcgtacgatcctaggcacgttcggttagcctaggatcttgatccatggttgctctcatatccgatccccagggtgtggtcagggtaacttctctacgtctacagtcaattactcctctatgctttgctaaccaatccattctcaaaatgacatcaagagtttgtggtatcaaaaccataaggttggagggaaacaccacatccctaaggcgaataggtacgtcaatgcaagctgtgtccacggctatttcacccccaggtgaatgtactaacattggttgccttagtttaactctggttaaattgtgttgttgacttgctttcagagatataaatgaatgcgatgctcctgaatcgaagagaactttaactggagtgaagttgagtgaaaacatacccatcagtacgccttggtcctcctgggcctcttcagctcgaacgtggttcacttgtccgcgtccaaatccggtagcggtcctgttagtctatggagtcctgaatagacctcgtccagcagcaggggtagtagttccgtgaatagtcgttgcattagctccggtgcaaataggtgtcttgtttggatgggggcatttgttggcgaaatgcccgtactctccacagttgaaacagcttcctggccttactgatccagtggcggcctgattcggtgcaggagcgcggttctgaatggtaaccggcctgtggtaaattcctcccagcttggttctccagcatcttcttctcaggctcctttgtatgtgtcccaccagtctccggctggtccttccaattggtttgccacaaagatcactttatcggcctcacgtactcgaacaagagttagcttcttctcaatgatccttaaccaatcttcagcatccataggttcttcagctgtggcaaatgtgggtggcttggtcctcacaaactctccaaagcttgatccaccgcggttgccttggttatttgcaatggcttgcagaagttgggtttgggtgaccataactccggccagggtggttaggtcaggtgtctcagtttcttcattgctggttgacgcccgacgtcggcttgccatctgtgtaggttgatggaataagtatcctaattttctaactagctcttatggttctatcccattaagggggttattttggtgtgaactttgttttgcaagcatggtggaataaactcatttataacacaacaacaatagatatcataaataacatcacagagtttcacaaatggtacataaatcatgatgcaatcgactgcatacatacgcagtccaaataaggttcatgcaaaagatacatcaaactaatcatcaatctactcgtcaatctaggtaagaggggggtgtgtctcgcatgctatccaaaaaccatctgatacgagatcgaagctgcaaggagtctgtcaatctagtcctccagccatccgcaggatcctggggcaggtagagggtggtcgctggcacgcgcaaacctgagtccccacggctcagaagtagtggcctctggatctggcttgggcctcttgcccggaggtcgtgtgctcttgcgagcagtgctgagggtgcgaggacctccaaggaaggtgatgcggggaacaggggtctcatcctctaaaggatcagtgatgtctggctcgatctctggctcggtgtcggtcccctctgtctcggagtcgacctggatcggagtctccaaactggaacccaactgcggagaaggtgtagggatcagtggagtgcgcacaatctccggggcaggtggctgtgtcactgtcgggtccactaggtaaggtgctgactcggtagctagcatactagcctcacccagaagagcgtggaacgttggtgggtacggcggggtgaggaagaagtagcggtcacgccctactgctgtggaagtagaagcccctgtggtgctgatcgtggctgctcgaagctgctcctccagctggctgacgtgctcctgactctctcttagctactcctcaagagtatccatcatcccgcggcgatcgttgtactggtcagataactgctggaactggtcgccgtggacctggagctgtgccttcagtgagtctatctcactgccccaggcctggtgctcctcctccaactgaagctgctgcgctgtgaggtcggtcacctcagtctctaactcccctacacgtctctactgatcgtcgatctccaatagggcctcctcgtagaagtcgtccgcagcctcagcccatcgtgacagtcgggtcactatcgggttgtagcagcaaggtgtgtcctgaactgtgcagacggagttgccctcctctcgaaatgggtggtgagcaaactcagtactcgccaactcagctcggtggatagagctaagtcggaggaaggcctcccgggctgcatcctgcatcgcggtctccggcaagtcgcgacggtggcgtgtcggaaagctgtagtctaactctgacgaaactcgtgtgtgaacctcgacccgagcctcctaaacagatccacactgtctcactcggtaaatcggaaatctggggtatcgcagacgcctcatcagccggtgtagctcaatgacgtatccctctgagcggggtacgcccatctcccaggtggcgggtgaatcctgatctgccttctaatctttaagaaaaacccaaagtcagctaagagtaaaacttgttttgtgaagaaaatagttaagagtaagatgaaaatcgttccgagttttgtaaacatagcgtttttatttttgaaagtattactaaatgggaatttctcccttggccaacttagaaaaggggtggagcgccttttggtcttttcctacagtcgtatggctctgataccagctctgtggacccccgtttttataacaggaatcattcgtgtaaacagtaccatttccctggatcaagtagtctggtacacacgagttcatagctgaaataccaaaagtacatacacgagagtctagtgctaattattacatcagaagcccgcaggcattgtcttaaatcatcggaccgagcggtccggaatacatccaaaagcagaaatagataaggcagcggaattcaggcagcggcatgccattgccacaggcaacgaccgtactaacacctactgagcgccatcgtcttcatctccctcctggtagtaggcatagggatcctccgaagcttcatctcccgcttctgattaattttatatttgcaagggtgagtaccaaccgtactcagcaagccaccacagcaacaatgcatatgaaaggggtattccaaaggatggctatggctcttttgcgctaagccagttttgtaattcttttcacaaacctaagacctagcatagactgatcaagttttaataccagtgttcacattaaacaacgacggttctgtccaccatccattgtgatttcaaggatagcttcccgccattgagtcgtcatggttttctgaggatgtccaccttccctcctctcaggaagtggctccagcagcataaaaatcatcatgcaatatcccatcccacacaggttaagaatttagagtctagccaagtgcaatacatgtcccggtgctcaataactgcgagcacggctattcgaatagatttggtttactcacactgcagtggatgtacactttacccgcactccacgactgcccaacacatgagcctcgtcccaacacatgagacgcgtcacggcaaagcttttcgataacctcgcattggcagtacccgctccatgaacttaaatcctcatgcactctaggcgtccatgtttctagcagtgagaggagttctggcgctcccgggaaagagaagtctcacacacatattaaattatggttcaagttaagttctctctctcacacactcatggcagtcctaccaatggcgacaccgatgtagggcacgcctctcggccctacctcaatggctgtcccaccgtagcgcacctgcctcactcaggggtgaaccatctatgcagggatactgcttccgctcggctatctactccgctaggtctatacccatacgagaagtgcggttgtacgagggtcgtttcatgcttaacttcatggctcggtccttaattgaccggggacggtactagccttttccagataccacccaaatcctccgtccgccccagtcgaaaacagttgtgtaattttatttctcctttcacaaatcatgtcatcaacatcatggcaatgtggcgctcatgtctccacatgccgcatctccattaccttcccaaaggtaattgcccaaacatatagcatttgataaatatgagtatgcatgattctagaatagcatttctaagcaattgtcatagttgactagggactcatacgtaaacatggttacaaagatctaagggtaatcaataatcaaggcatggcataatcacaagtaggatgttcatcattgcatgcaattttatttgtaaacaaaacaatttcgcaattgggatcaacatgttcaaggaatagtgatgacttgccttgctcaaagtcttgcgggtcttggccttcgcttggatccgcaactccctcaggctctatagttacgtgcgaaaattgatttgaattcggttagaattcaaataagaatccaaataaatccaaatgacagtcgaatgcgaaagtcgattcctttttattaactttactatccgcgaactacggcaaacccaatttcgatttaaactattttgcgggtataaatattttgttgtcataagtttttaatttaatttacccgagcattatatccatataataggttaggaatttctatcgcgagctaaatatcggacgaaaccctagaaatattatacgatttaatttagtctaagactgaatgattaaatgtaacacacggctaaaatctctagtaattaaatccgaatttctaccgtgaatcgattacttatagggattacccaaaaataatctataataatctataagaattcatctatttgtttagtaattaactacatctaaattattaccgcgaattgatttcttatagaaattgccaagaataatccataatttatattaaattttgcaattctacgactataattaatccataattaaattctaattattttaaattttctaaacttccctaatcttcctctaatttctatttattttttttcttttctttttctctcctcttttctctcttttcttttctttttctctctttttctctcttttctctcctcccggctcctttctttcttttccttctcttcctctcttttcttttcttattcctccctaccggcctctcctttcctctctctctctcggctcttgtccacccgagcagcggcggtggtggacgcgagggggggggaaagacggctcaccagcggcggcggcggcgacgacggcggcagcgcggcggtggcgacgacggtggcgcaaggcgacggcgacacccggcgcggcacacggtgcggcgcggcggcatcgagggcggcggcgcggcggcacggggacggtggcgcgacggcacgaggacggcggcgtggtggagggagagaggggaggaagaggaaaatggagtgggggaaatggaggggggagtatttatagggaagagggggagaaggagaggggaggggcgacggggctcggggcggcgcgcggggctcggcgcgtggtcatgggacggcgacggcgacagcggtggctcgcggcgtgaggcgggacgcgacggcgacggcgacagcacggcagcggcggcacggggcgcaagacgacgcgacgggcggcagcggcgacgtgacagcgggcggcgcggcgcggggcgcaatgacgcgacaacaacggcgacggcgacgcggcagcgacggcgatggcgcgcggcggtacgaggcgcgaggcgcgacggcgacggccgagcggcgcggggcgcggcaggcgacagcggcacggcggcaggcggtgatggcgatggctcggggcgcgaggtgcgcatggcagggaaggggaaggggctagggaacctcgtcgaacacctagagtgcaatgaacagtgtctttttcctatttatcccgattttagtttatttcccatataaatttgattctataatttctaaatcttgcataaatgaagtttactcaatgtttctgttatctcaactaatgaattcaccctagattaatattactcatattttattggtataatttatttgaatttttaattagggttaattcttgttccattgcatttaaatctaattaatacaaatatggccgcgatgatattttatttattcctatccttacataatctttattttaaattataatttatttatttctttaaccaaatctaatttcagggttaattcctaattaattttcccctatttctgatcgatgaattctgaaatcaaaatccaataaaatcgtcgaataaaattggcatgatgcaatttatttaaaaagtttttgaaggcccatatttttagagtttagattttttttttgtcggtcgaattttcagggtgttacaaacctaccccccttaaataaatctcgtcccgagatttcttaccagttttcgaatagatgcgggtactccgtcctcaagaattcttcgctttcccaggtggcttcatcctcagtgtgattactccattgtaccttgtacatacgccacactttgctcctagtcctcttttctgctttacccaatatccggatcgggtgttctggatacgtgagatcattgctaatgtgaatctcttccagcggagcttgttcttctggcactcgtaagcatttctttaattgggacacatggaagactgggtgcacatcagcgatattctctggtagctgtaactgatatgcgacttctcctcttctagccgtgatttgaaagggtcccacatatcttggtgctagttttcccttaatcttaaacctttttgttcccctcatcggagaaacctttaaataaacgtaatctccttccttaaattctaggtttcttcttcgggtgtcggcataactcttttgtcgtgattgtgctacctttaaacggtcacggatcaagcgaaccttttcttcggcctcattgataatgtcaggtccaaataccgcccgttcacctgtcttagaccacatcagcggcgtccggcatcgtcgaccaaacaatgcttcattgggggacatcttcaggcttgcttgaaagctgttgttgtaggagaactcggcgtagggcaaacacctctcccagtctttgctaaaatccaacgcacaagctctcagcatgtcctccaggacctggttggttctctccgtctggccatctgtctgtggatgataagctgtgctaaaagcaagataacttcctagggcttcatgtacttttcccagaaatgcgaggtaaactgtgtgcctcgatcggatataatcctcttaggtataccatgaagacacactatcctggtcatgtacaactcggcgagtttagcactgctatagtttgtcttgacggggatgaatcttgccgtcnnnnnnnnnnnnnnnnnnnnnnnnnaaatggaatcatatcctgttgcggtcttgggcaatccaacaataaaatccatacttatctcatcccatttccactcgggaatcctaaggggttgcagcaagcctgccggtcgctgatgctcagccttcaccttttggcacacgtcacagagtgctacgtattccgccacatctctcttcatgttgggccaccagtatccttccttcagatcttggtacatcttcgtacttccgggcaacctccaagagtaacaagtctaggatgcttgccgaggatgatcaagtgccacactagctataacaatgaagcaatgcacttggattggcttaactcactctctaacacctcactagataaactaagtgcacaagggtgtgagagctcttgcaagggttcaagataatgcaatggagtgccaaaaccttacccttgctgctggggagtgggtatatatacccccaaccaccaaaactagccgttggaaccgaaatccccaactttgtgctctgccagtcagactgccgttgtgaggctggtcagaccggactactttgtaacggctacggctagaaaactagccgttacagggcaatcattgagcccactcaacctggccggtctgaccgcagtgtagtggccggtcagaccgtccacggctcggtctgaccggttgcggctctggcggctctgtatcgccaccaaaaaccagaccagtgcaacagactagtggggccggtcagaccggccttaccacgccggtcagaccggctaacagacccggtcagaccggcctaaggcccacggtcagaccgcaggtcacttttcagctcaaccgaccgttagtaaaacgacgatatctcttgactcgggtctcggaatttggcgttcttggactctatggaaagcttattcaaagggccatccaacccatgaaaaatccatccaagaaacacaacttaagtcaaggataatgggctcacactccaaaggatatccaccggacatacccacaagatgtcactcactcctattggacatgtccacttctctcttggtttaggacttgagaaaactaatcacacttggttagacaagcccaaaaaatgcacctacatgcatatgaactaatatggcacaagatcatccacaagctcgcttcatagaaccctcttgatagtacggcgcctatctagcaaatccgatctacaccaaacaccaagaccgggaaaagactaagaaaacattcttagctacattatacctttgccttgcgccatccatcttagggtcaagcttgagccgagatcaacacttgtgaccatccggttgaaccatgtttatgccgaggtcttgtccatcctttgtcaagactttattctcatcacaagcttgacttcattcttgccaacataacaatgtacttggcttggtgaccactaacccatggtgtcattcattagcctcatcgtagtgggacctattccttttcacacctcaaaggagaacattagtctcaacaaatcggttgtcatccttcacttgatgaccaaccggttgcatatgaaagatatggatatgtttgttgagtattcattaacatcacaagtgtcatatactcgtatgcaagctcaagtgcaaagatccgatataaataataggtgaacaacatggatctagaacatgcacaataaatgtataggatttgctccccctaaatatatgcatacaaataaatatacaagagatacaagtgtatgcataattagagaatgaccaatgggggtttatcttatacatatagagaaggcatatgtagtaatgatgtagaccaacataaaacatataccttcatgatctccatgttctcaatgtaaatgagactaaataagataacattcgagtaaacattagtctcacacttatatatcaataacatggaaatcatatatatgaacctatcaaaaagtaggagataagaagtggtacatatcgttttatctccatgcatttcatccttgtcatgattaaggtccatcacaaaagaatgcatatcttccacatctcattatcaggaaataacctagtagacaacttatgcaaaagagaggttaatcccataaacatcggtttatcatctatcaccaaagtaacaattacacaaattgtttaatccaagatctttcaatcttttctctctttggtgatggataataacccgatataaacaatatagagagatgagatgaaaaatgatttcaaatcaagatagaaatcttataataaacaaaatatagaataagctccccctcaagatgtgcatacatatggatatgaaggaacgcatatgcacataatcaataaagatcaaataggaagctcatactatattttggatccacaagagagaccaagttagaatatgtgaagtttaatacatacctctcatcatttttactttcatatccaaatgagactagtcaaagaaaggctcataaaaatgattagtctcatatagttagatttgtcattaatcaccaaaaccaaattaaggcacttgaacttacatcatgacaccgcactccccggtgagctggtgcagaccagtgtaggtaacctgcagcgagccacggatctccgacaggttgttctcgagctctgacataaagtgctcaagcccctaccgttgccgctcgttgccggctaccagttccctcattttctagaggtcctcacaaacctccgccaagtcgcgcgccagtttgtcggcgcgctcgttcgccgacgacgccgccgctgccctcgcctccacgatctcgcgacttatgccgcgagcaccagcctcgaggatgcaccccatctcgacttggagctcctcccatgtgaggacggcagcaggcgggcctcgaccgggcacaagatcgctggcagggccgctgggcgtcacttcgcggctcctgggcgcgaccacgacatcggtcgaggccactgcaggagatgcgctggagtttcccccagacccatcttgcgccgccctcgcccgcgccgccctacgaaagacgatcatgttggtcatcataacaaaacgccagaatccgatcaagtcaagggcctcaaatttcgtccacttacttctcgccgagtgtcaccagcctatgccgtcgtggaggcgggggagacgcatccaaggcctaagtaaaccgagtacgatatgagggtgacattttccgactacgtaatcgataaccaaaaaggcttaccgatggggtgggcgtcttccggcggttgccgagcacggaggaaaacttcctccctttcctcggaactttgctgccgctggtcgtggcagcagcagcggcaatggccgcgtcggacgcctcctgggcaacgccctccttcaacgaagccgccgcctggtggtccgcgagcggcccaatgatgtcagtcagggagagtgcctgcacaacatgaagtcatgatgcgatctaagagttaaaaggtaaagggtcattgattacactcacgttgattgcggcttcgcgctcagccgcctctttctcgcaaagaggggtgggggcgttgctcgctgtcgtgggaccactgatcatcacctgggaaacacggtgctccacaattgcgctgttcaaacctgtagatcaagaaccaaatttcgataagtcaggaggaatgcgcatgaaaggagagaaacccagaatacaagaaaaatacctcgaggagaaacccgggtcgcgtcctctggcccagagtagtcaaaggctggatgggctcgagcctggagcggctggatccgtctaccaatgaagtccgcagcgacttcataccccgacaatcctcgtactcgtactcgtactcggagatccaaatactagagagatggggtcaaggcgggtttggcggtccaagacggaatcttgtctggttgctcctcaggaacaatgaagactggatccgaatcttctatctgaagatagaaccacctctgtggagattatggataccccatacctacacggcatgtatagtccgactgggtatggggtgtcatgtatagatagaatatttttaaaaggactcgggttaaattctaaacttgtatgtcaagaaaatacccgagatcctagtcggttacgattgtattttatctataactgcctattccgttaggaatatgggctgtgctttgtaatacggatcccttcccctatataaggagaggtccggatgcctttagggacacaattttcacccagatcatacgatcaataatacactcggtggatcaatccccggataggagtagggtattacttcttgattaagaaggcctgaacctgtataaaattccttgtctctaaacccatccacttttctagcttgatagccacccccttttagtattgccgaaatcttgtttcgacaacctcgcccgccatttgctacgagaagaggggcactggaaagggatgtatcgcgacttcaggccatcccgaagtcaaaaaccaacacacccggatacctttttagattccatccagcgcaactcgtagtaaaaacggaagaggtcaagaaacggctctaccccaatgtaggcctcacaaagatgataaaaaatgctaaggaaggctatggagttggggttcagatggagcagaaaaagaccgtagaagttcaagatgagaaggaaaactcagaaggcggaggaagaaaaccacagagaatataatcctcaaccgcaaccatgcggcccaggacgggttcaggttcagtacctcccggttccctctccatggtcccgcgaccgggaagagcgccctcctcctgcaacttcttcaaagacgcaccggtggaagtggacttgtcgaggtccatcgccgttggagatcgcgggagaagaaaccgaggcgagcgaattagggtttgcgtggaagcgtagaagacgaagagcgttcagaggctagaaagtttttgcaacaactggactccaaaatggattcccaaaactcctttaaataggcacactaccaacggtgcgaattgcaaggaaaggagagagatggccgccggaaatttctgggtccgttgcgcgaggcggtttttggacttcaatttaaattcactcataaccatttccatcaagtaattcaaatgcttgcatgcacatatttagggggagcatgtcctatgttttgtatttttgagactaacttcttgttaagtgtattttatgtttagtctcatgggaagtgaaacattctcaaaagtatgctattcacaagtggtaattcaattaccttttcatcgtatattttatctagctacctttcataatatagattaaattcccttgcttgatttaaatgtcaaataatgcacataaatttgccttccaccatatgtgtgcattacttttgggagaatttagtctatattatgaggtttcatgaataagtgatccaattttcctccacatcaaaaggatcattatatgtgaaactcgtgtgctttttatgctttctcttttctattgattcaaatagagaaaagaggtaatgatagatcaaggggagattgatttatgacaaccgaaggaatgggtgaagaaggatgagattggttaagcaccatcatcttgaaatgtgaggtttatgaaagtgtgctttacaattctagtccttaaatttatttcttttggtgatatttgcctcctgacccaaaatatagtgtaaactcctccccaattctcatttgagtaaagtgcatatgtatgcattaaatttatccttatatgcacaccttgagggggagtttattctataccttggaagactaatggtttaaattgagtttatacttttagtcttatgtcggaagtggacgactcccaaggtagacttcattattgcttctatggattttctttgcaaccttaatttcataatataggatggattcttttgttccttcatttcttttgtgaaagtgcataaagatttcttttcactcttttgtatgcacatatttagaaggagttcatcctatgttgtgatgctacataagtcttgatatgtctcttcatcgtcactatttattgggtcttggcttatgagacttttctttcgggcatacatgacttgtctatagcattatatgcctgacatactttttgccctccttttagtgagttttgggagaagtatgtgttaaagagaaaatattttttgaatcatgcttttgtaccttgctccaaattaagtgagtttatctaatcaatgtatttgctatatgtgcatatgggttcttaccaattgtgactacaaactaggcctatctcttttgattggtattattctatcaattggtgtggctcatatgcacaagaccaaaaagagcttgctttggattggtgtctctttggatcccaactctttctattggaattttgatgagttcaattgctttatttggtgttggtgcacatgattttcttgtatatcttcttgtgtgtacctcgaggctatttgtgctttgctattttgaaactaacgcttttgatagagtttcatcttgttgtagcctctttggaacaccaaaggtatgttaaacctttttcccttcaagtgtataggacttgtgtagttcttatatacttgatatgatttctttttctttatgctcccacccactcatttaatcttttggtgtttgatgccaaagggggagaagtataaagagaaagagatataaaggggaaagtgcatactcatttcatatgttgatgaaactaaccctctagtatatgtttcatgctcaagttaacatatactagagtattctctttaaattcctattcttgtgatagtgttgtcatcaatcaccaaaaagggggagattgaaagatctatgcactagagttgcccttgtaaggggaggttggaagatctatgatcctaagagtgtggtgattgttttgatgattaatgacaacccattgttggaactaactatttccatgagttggtgagattaggttaagttccggcatcaagttaaaagattgaagctagaagaagacgttataccttgatgaggagcaagtgaagacattgatgatgcggggtatgaagtggctatttatggcaaaacggtgaagggcaagtaaggctcggctacaatggaccatgcggagggtgaagggcaagcaagaggcttggcaccgatggaccgaatccggtggtgaagggcgagtgaaggctttgtcataatggtcatgatggaccgtgggaggccatttgaagctatgagtaattcgtatcaattattagaagaccgcaagatggaatgccgaagatcaagaggatgtggttctccaatgaacatcaagtcaaaagccaaagtgggtattgatcaaggcaaaggtataattgatttgggactaatatgcttaatgagtgtaggtgagaatagtccgaatagtgaaatggcgttgatgttgacaaccctcaaggtgaagcaagaagataacattcttagtggtgtattagtcccaggttgcttaggagtgggctaggatgcttggagaccccccaaaacaaagcggcgagaaaactcggagccgagttagactagtttactttttcgctttgagtttaggaaaaaccatactattaagaggggttccaagtgtggttctgagataacacaagtgctcttagtggtgtccaagtgttgaaatatttttaggagctgtttttgaaaatggctctactcgggacagagagtcccactcggaggttctgtctggaacttcctggcgccgaggtgaggttgaaaattttcctaagtgctggccggaagttcctggcacttttaccccgaacctcctggtaggtttccagttcaaacttgtgagtaatggctagatgacgtcacctagccgttatatatatggatttcgtccccaggtcaccctttggccattccactttagttcttgtgttccctagcttgttctatcctctcccaatgtgattttgcttcctccacctaaatcttgtgtatttcttgagtgagagagtgattttgagggtggtggtgaggattggagaaggttttgaaggctaggttgacttgagcacttggggtatctcgttgggctgtcatttggagcttgttactcttggagggtgacctcctagacggttaggtgtcgcccgcgagtttctaacaaggttgtggattgacccgggcaagtttgtgagggcgttattccacctccaaaaggaaacggaatactcggtgagtgtaatcctaggtgaggtttaggaggtcgtcttggtagagcaagccttacttgtggtgttcttttggtgttcaagttggggatcttagtggtcacttgaaaccaaagagaagtacctaggggtgttggcttgaagaccggagacctcttcctaggccttttcttggtgaggcaagggattaatcaagacccagctctttagagctcctcaacggagacgtaggattctcggtggagaatccgaacttcgggaaacaaatcgtttgtctcctctcactctctttatctttgtgattgtgatgcttatctccttatttgcctagttgtgctatcatgtctcccattgtatgatcacttgtgctatcttgtgtattttcatgtgtattactcttgtttgagacatgttgtacctctctatggtttaggcttccttgtgatttaatttacttgttgtgaggtgcttgaaatagcaattaacaactgcccggaagttcctaggaagaaccccggaagttccgggcagctttctctgcttgtgagaaaaagctgccaggaagttccggaccttttgccaggaagttccgggccctgattttaaccgttgtgttttgaagtaaattttaggaacgcctattcacaccccccccctctaggcgacatcaaggccctttcattgtcgaccactccttgtctctacggtcctcacaccaagatcgaccagtcgagaacgacagcaactccgacatcagaagtcgcgatcggttacatgagttcatttaagctgaagtcgggggctactgtcagggttacggataaggtataccctctacccttggatgtacgctatacggcaatatggtacatctgcgcgtgtacggacattctctctatacgctaaggaaatctatcacgaagtccaccaatggaaaggttcctacccatataggactgggtcgtcactatatcgtgcagggtccgatgtctccgagtcctacttggagaccacctgacctgcgatataaaagggaccccccaggaagacctaaggcatcgaatctcatagccaacacaacgaccacagcctacgaagccggagcctacaggagccaagtcgatgggtgatctagtcgaatcaactcgactacgatctcgtcggtatcatctagttccattattccctttgtaatttgtggttctctccatataatcccatatcaactggattagggctattacctattaaggggcctgaaccagtataatcgttgtctcttgtttccttgatgtcgtactacgtagatcctcgtaccagcgtaccccaataccctctatatccggtctacgggtacctaccgtcgacaatattataaaagtaacttaaaacaaaacagaagtaattttgtcacgacattataagtaaatcatttgtaggaataaaaatatgattttatctagaaattaaatttaatcagcagagatcaacacacataagtttaacaatttttaaaagtaacttcaatgttaattggaagtaacttttgcatggttcaaaagtaactgtctataaatctatttaatcatcgatagtttctttccttacatttttgtttttcatgtagaatgagaaaagaagatactattgtttttttcaagttgaaaggagatacaaaatagagtacaaactagttaccactagctatgtagtcacttccaattaaaaaagacattcattaaagttacttagtttttgttataagttacttctataatatatgtaaattagttttaggcttcattgaatttacttttacatatctaagaagtaatttagatatattataaaagtaatttataatttttcatcagaatatagtcatgtgagatcttgttataaagatataattgttacaaacacaacggtgcaatcggttcgtagatcggatgagtagtttaagagaaaattatatttgaagtataggtagataatgtctcttatagatggagtggaactagctaccactagctgtgtagtcacgtcctttctctttctatgtggcatattaccatattttatgggtccatattaagctaatatggtattttttggataatgccaaacgtcatggactaaattacgatccctttagtgtacagtagagcttatatgactgatgacaacaagaacatgtagactctcaaagcatgacttggcagagagaatgaagggatgagggactgggagcgggcaactatataatcgcccgactacacacgcactccaagaatgacacacccacgctaccaggcgcgagagtgataggtcatctgcagtacaacagagttcctgtggaatagtgatctaagtctgctacagtaactatcgcatggtactgtagcaagagtcctttagcaacagtggtcgaattttactctcgagtctcccagaggaacggcatattcgatgccacgtccatcacagacgaagccccatgagtaggggtgaaaacggtacgtaaactttccagattccagatctattttcaaaaacggaatctgtcggtcggaattttttcggaaacagaaacgaattcgaaaatattttctccgaaacggaatcgaaaattataagggcagtttctgtcggaactcggaatcggtcggaaactttccggaaattttctcggaatttccggaaattttgtgactgagatagcctggattcctttttttaaaccacttaatagtgaataccatggtgtcaggccgaaaatatcattgttgtgaaaatatcattgttgtgaacagtggtttccgtccgtttccgtaccgttttcacccctacaccacggtcagcaacgtctcctgcatttgccccgacgtccgtcagtccgacgccctcgtccatccaagcctccgaggctctgacagcgtccgccaggtcgccacctcgaccacccaggcctccaccctgggctgcatccccctatgaccaccatcatcggctcgtcgcccgttggatccgttgtggctgccgccgccgtcacccgctgcatctgccatggccaccgccaccgtccgtgttccccgcggctagcgctcctgccatcgttcgcgtcgctgcactcaccctcgccccgtcccgtgtggcagccactcttgcctgttgccggtagccgtaaggtcgcgccctctccccctccatccgctgcggccgccgccctcgccctcgctctcttcccgtgtggccactgctcttgcccgtcgcccgtagccgcaaggctgtgaccctctccccctttatccgtcgcggctgccgccgccctccatgcgtcccccgcgaccgtcgccctcaccctcgcaatcgccatggccaccgctgacaccacccccactctccccgctctggcgtgctcctaggtcccgtcttcactggccgcttgagagttgccttcatcgtcagagtaaaggaaaggaaaggaggaagaaaaagaagagatggaagaagagggtgtggctaatgggcgatcgatccccatgccccctgtacacacctctcctctcctccccttcttctcttcctactatactataaattttaaaaaaataaaaaaataaagttagaaaaaattatgtatagaaatactatatataaaaaatatttgaatttaaatttaaatttgaaacgggtatgtaaacttttgacttataaactttgggtttataaactaatatttgaattcaaattcaaatttgaatcgtgtatataaacttttgacttataaactttgggtctataaactttagatgtataaattttatatgtataaattttatatgtatagaaatactatatgtaaaaaatatttaaattcaaattcaaatttgaatcggatataattcaaattgaaatttgaatcgggtatgtaaacttttgacttataaactttgggtctataaatttaggtgtataaactttagatgtatagaaatactatatataaaaaatatttaaattcaaattcaaatttgaatcggatataattcaaattcaaatttgaatcggatatataaacttttgacttataaactttgggtgtataaactttagatgtatagaaatactatatataaaaaatatttgaattcaaattcaaatttgaatcggatatataaacttttgatttataaactttggatttgtaaactgtatatgtgtaaacttgaggtgtataaactttaggttcataaatttactaaaatagaaaagtaatgtggtgccaaaaaagaaaaccacgtggaggagaggggggaaaccgatcgctcctggcgatcaatcgccaactaggagtttcgggaagaagatgatgggccctacaaaaaataatagaatattggtattagagtaaacaagatatttctattgtatgcatgggctctattatttactataggtgacatggctacctattgcagccagtactgagttgtgttattgaacttgcttttagagcaagtttaatagtatagctatctactagctacaaatcatctatagccaatgtaatagccaaatcatataatagttgcttactatactattaatacctagtcccacctgtcaaacacacattacatcttggagtccgtgctgcaactagctacagatctgtagtccgttgctcttatctctcttcttttatctctttaaaatacgtttatagctggtttatagcttgttacgtacactagtaaccgtgcacgtgcaatgcacattccccacattatgtaacattaaacatataaacacacttaaactttgacgtgttttccccaatacatgacacaaaaaatgtagtttgagaattatatctattgtagtgtaatatagcacaacttaataactcccttttaaacacacggtaaaaaaatttggaaagcagccagtgaggataaaatcatccagcagccgtcaactggaagtatttaagccattaaaaaccctttggcagttatcagaaaatggggaacaattatccctaatcaagtaacctgtggcacctattagaaatgtttcagttatcaacccgataattcattttgttgaggcattaaactaaaggttgataaacggtgcatagctatatatcagtatattattcttcctctgtcctccctctgagtgttaagtctagccattcatcggtggagtacatatcaaacatgcagaaaatatacagaaggtaaaaagtatccaataattgattacatatttgtgctgctctatgataaaaagaagagatttaccttcccctaattctgattactaataattaccaagccattacatcgtacagtacacattcacttgacacttaaaactcacaaaatagtagactacctatcagttaactgaatggataaaacacttttaacagtacataacctacctcaaatggcattgtagatagttacaaatctctcttcctcttctgttgttccaaatctttcaattgcaattaaaagttgtagaggaatgggcaaggtacaggaggtgtttgtcagtgagccgaggccaagcagagagaggagaacaacaaaatttgcatcaataggacatgagctaactgacaacatatatgagtgaatgttaccaatctgcaaaacaaaacttttagaacaatatgtgaacttatattgaacattatttaagttttattgtgagcaaatgaaagcataatgtataacgttaggattatacctcaccattaagattcattctttctgatatggggaggaagactacagctgctgcactgaatcttgaatcatgtacaaaggtaaatcagattgaaaattgcatttataattcttttaaattcttcatttagagtgcaaatgaaataataccgtgagatattgaggatagttctcaaaaagatactggggatatatttgttgccaaaccgtcaggacatacaacattaaaaacatatgatttctacatcggcaaaaatatgcaacacaagcaatcaaatttgggaagcaaagagttgcccgggtggatgtgcagatcatagtaagacaatacattcactggaagctgcatagcaccttgagatcaggtctgtgttagcaaaccgattactcctgcagttcaagaactgtgaacaccaccaaacacggccgcatcaacaactgtcacctgctgcccttcttggaaaaacaaatatatgaagaacatgattaaatgacacatcaaaatatgatagcatgaatgcaaagcaattcaatgacctgaatcatctcatcttcatgctgatgtatgtgtgttctggacttctggtagaaagctggagcatccgaaacataaaactcaattaaatctctaatgtgcggcgtggttgcggcagagggctcagcgtgctcacagcgtcaacgacggcagatgtgggctcgacatggttgtggaggagagcacagcgtggccgtgggtgcgggtgtggggtgaatgagcgattcttgcggctgcggcggatggggaagaccacggttccggtggtggctggggacgactcggctccggcggcgactcgggacgacgtcaactccggccacggctggccgcggcggatgggaagaccacgtctccggcggtggctggggaagacctcggatccggcgagggcagcggtggagtgcgccgcggcggcggcggaaggggacgacctcggctccggcggcggctggagaagaagtcagctccggcgggggtagcggtggattgaggcggcggcggcagtacatgacgggaggagtgagccgcgcgtggagagggtgaggcatagacgcgtagtcttcgcgacgtcttcgcgcgaggtgaggctaaaatcgtgcggtcgagatgggtggacggtacagattagagatctgcggatggacggaccagattacaccggatttgcggatggacggtagagatcgatccgaatgattacaccaataggattggagggaggcgacttatctttttatattaatatagatatagatatagatatagatactcttacagtcttacgtaccatagtaatatttttcgaaccctttccataaagaaaaaaaatggaaaccggaaaagaaaacaaggaaccagtacactagcttacatgcttccattgattccccttctatgcattccgtccctcccgattctccaaacccactcacacacccaagaagatggaaggtcagggaacgcaccctgccatgcccgccgccgccgtctcggtggtgctcgacgacgacgacctcctccgcgagatcatcctgcgcctcgccttccccaccgacctcgtccgcgccgccgccgtctgcaggcgctggctccgcgtcgcctccgccccggccttcctccgccgctaccgcgccctccacccgccccgcgtcctcggcctcttcgccaagcacgccggggctcgctgttcgagcctctcccccatccccgcgggctcgccgccgccgcgcgccgcgccgcgaagggcgccatgctcggctccatcggcggcggcgagccgctgcccgtgtacgactgccgcaacggccgcgtcctgatggacctctccgacccgttcgaccgcggcgacggcacgctcgcggtggtcagcccgctgctgcacgcgtcgcggtcgctcgccgtcctcccgccggtcccgctcgccgcgcgcccgccgcccgtatccgccatgggcgacgacgacacgctgctcggccgggccaccgacgtctgcatcctcctccccgaggacggctgcgacggccagtcctacaccgtggtgacgctggtgcgcagcaagcgcgtggactggcgcgtgtggtgggagttcttcgccaaggtgtccgtcctgcgcgcgggcgcctgggacgacgacgtccgcgccacggcgccggtcgagctcccggcgcggtgccgcggcgacacgacctggaaccgtgccctgcttgtccaaggcaagctatacgtcctgggcatgcagtcccacgccattcttgtgctcgacctggcatccatggccacctccttcatcaacctccccgacggagtgcgccacgaggaggacggagacctcgacctgttccggtcaaacgacgccggcgtcaacctcatccatgtcaatgggtttcaagctcgtctctggcgtcgcggtggcgacgacgatgacggcgacggcatgacagcgggcaattgggtgttggtggacgacattggtgttcgtcgagggttcgatcacctcgcgaaggttggcggggagatggacattggtggtccggttggggttatcaaggtcggcgacgactgcgagttcatgttcttgtgcgttgatggcgatgtgctgtacatggatatcaggacgaggatggtgaagaagattttcaaggcgtcaccgaagagaggaggtgttctgccagtgatccatccactgaccatggtttggcctccaatcttcccagtgctggagtagatcaaggatggaggccatttcagtgatccttgaagaggaggtttggtttttggtgctttgtgtcttaagttcttgtctactgctggcttgctgctggattgatttatcatgtgtgtttgtttcttccattttgtggtaatggacttaaaaatggtatggtcgatgaattaatggattatgaatatatgggtatcctttactaaaatcaatatctgcttgtatatttgatttaactctgaaacaaacaagtaaattattatagcagattattataatctataagctagattattataatctaataagctgctctaggtgagcttttttcaaattattgagtggctaaagacccactactcctacataattgagaaaaattacccacctatgccatcaaccgaacagatagctgagggcattatagactttagcttttcaaacccaataatccatacctccaataatccaaacaaataaacaactcacagcttattctatgtcagcttattataatccagtttatagtaatctggcttaataatctagattataataatcataagctgaaacaaacaggaccttagttacttctatcgtaagcagagcctagttggcatgataactctggtgatgcattgatcttggagatttgttactgtaaccatgaactgcaagaaaggaagatatattttctttgaagcaaacaacccgttgatggaaattttaaccatgttgatggcttatgctccatatatccttccgatcgagcagaacgataaatatcttacgattagtgtacgatacaatgtttctatggcccaatcaagtatcatgcatgactggatcgtatcaaaatcgtaacaagtttgtcgtacgtacagcaatttcccgagcggaactacctcagcagccaggaactagagagccccaggcatcagtcgtttagtaattttgatgttcctattctcatgagttgccttgccgaatcaaaatgaaaaccgaaggattataggttctggatgttccatgctcaaaacaaaacaattgttgccatgttagaatctgaagcattatcaattcagcagtttcttttcgtagctgtgacttaccactttcaattatatgcatgagctgcttcaactatgacctgaaacccaaattcaactcaattttaagttggaacaaaactagataaaacatgctgggtaggcccacctggtgctagtgtctatcgagccatagctagacttatgcttggtgggtacaagtccaaattttccaacaacatcacaattgtttatatgatctgccatatccctgtttttcatttggatatgttgctaagccgagcaaatattccttttttttaaaaaagaaagtgttagaactcaagctatgacagagttgctctgaaatccgaaaattcctagttcagaacaagcagcacatggtacaacacacaaggatatgatttcttctttgttcctgtttcgtatgcacaaaatcagatattgagattcaatataaatgctacataatgttgtacctcctccatttcataatgtaagactttctagcattgtccacatacatatacatattaatgaacctaaacacatatatttgtatagattcattaacatctatatgaatgtagataatgctagaaagtcttacattatgaaatggagggagtattaagtacgaacagaataaagtctgatactacaaaaagctcacaacataattcaatcctaaattgtcaatgacagttattcacacattccaggtttccagtttttggactaaaaactcagaagcagtactttgcaaataatctccaaaacaggctatcaaaattaccagctcaaaattcctctgtagcatacctggaaaaaaggtgaaatttaaacctgaaatattgcttgaattcaatttgttaagcagaagaatatttttgaagtagatcaggttaactcatacttaaatcttattttaaagcataacaaaggaacatcacataagatgcctgactctcctaaaagaccagtaacaattagattgttacagcaagataactacatgctgaattgagaatcggttagacatcgcataaagcactagagaaaaatcctctgggatcattcatactgaattactgatcatcgtcatcgtcatagttcaaagccgggaaagtgggaggccatatcatcatgaagggaaagatttcaaaaccaatatcttcctttggagccatctcgaaaaccttgttcgctgtcctgctcgcaatatgtatgtggaagatcacgcggtctatcgtcaagaacagctcggcattatcctcgactctacgaagtgaaacaagagcatccccaagtgaaggatcccccgactcccaatcgggcctcgcaacttgaccaaacgattgatgcagagacatggtatcaaccatctcccaatcaccaccattcccaccgccgtctgtcgcacgatgccaaacatgaatctgaaaccccttcagatgagcaagatataatccggaatcgccgtcccgcaacaactcaaggttccccatatgctccagctgctccacaccatccgggagcttgatcaagaacaagctcatcgacgccagattcaacccaagaacatgctccctgcccagcatgtagaggctcccatggaagagcaatccacggttcatcttcttgtttggccagtagtgattcggcagctcgattgaatcggaggtgcggatctggtcgtctgattcacctctcaccaacactgctctcgcgaacaatccacggcctcttcgtatcagaaccaccagcgtgtaggagagatcgtcgccgccgtcgtcctcctcctcctccgggagcagcatccagcccgggcgcagcacacgggcatcgttgggtacctgatggagctgcgagtgcaggttcgggggcagatcgggcggcttccgcgcggggggcagcagcggggagacgacgccgaagcgtagctcgtcgggcgggggcgggaactccgccctgaggaggcggccgttgcggcagtcgaagaccacggcggagacgtcggcgccgccgagcgcgaacccgccgaggcggcggagcacgggggcgagctccgggggctggggaagcggcacgaacgccggctgctcgtcccggcgcgcggtgtggtagaagccgaggaggcggggcgggttgcgggcgcggaagcggcggaggaaggacgagtcggaggcgaggccgagccagcgggaggagacgagggcggcgcggacgagcgtggtggggaaggcgaggcggaggaggatctcgcggaggaggtcgtcgtcggcgagcaccgacgaggccgcagaagccgccggtggcggagaggagggacgcgtcgcctcgtcttccatttgcatgcgatcgaggaggtattggagtaaggagctcaggttgagctaagctaagctggtttaacaatatttttctacttaatgtcatttctacaacttcattactctatccatatcaaatataacaatttttaaccttcaaaatttatatattaatttttccacgaacatttttttccaaccaataatactccaacattcaagctcatcacttctaccatttaattctacatatattttttaataactatgtccaactctaaatatataaatctatttatccttaataaaggagtaactaaaaaaaccacatatattaatcagagaaaaggaaacatatcttatatacaaatactaactttaattcaggttttttttttcaatagttgggctgaattttggttaggaggcgcccacgctctcctgctgtaaaccacacacgcgtaggattatttggacaacacgccatgcattattcttttgtctcttttaatatcgagttaaacctttgctataaaaaggtttcaaacatctagctttaacatcggaacaaaaaaatctagatgtacatatactactcgtcctggagaaaaaaagaggcaagtgtcaagttgtcgaaacaaaatgtcatcttgttctgaacagggtatctaacattaagtcattaagtcattaggaacaccggtctaagggcctgtttagatccatgctaaaatttttcaccatgtcacatcgaatatttagacacatatatggagtattaaatataaaaaaaataactaattacacagattgcgtgtaaattgcgagacgaatcttttaagcctaattgctccatgatttgacaatgtggtgctatattaaacatttgctaataacagattaattaggcttaattaataaattcgtcttgcagtttacagacggaatatgtaatttgttttgttattagtctacgtttaatacttcaaatatgtgtccgtatatccgatgtggcacgccaaaactttacactcatggatctaagggggt

SEQ ID NO: 8075 - DNA, 1768 bp, Oryza sativa
tttttttgccactaagcaatgatgataccttgtttttgctatgagtatctcacttttgtcgctagggctaaaaaacaaatgaatgacgaacgtgagatgatccttggcttagtggcaaaaacagtatgaaaaaaaaaatctgctaatgaaaaaaaaaaccaaaaatttcccatgaaatatggcctggtagctgtctagcagatatcactaagtcatcgcgaaaataaggtaatctgactgaaactaattgctttgatctgttgaaaaaagaagtaattaagcccttgtatgacacttttataacaaggataacaagtgcatagtgatgaataatccttcagcgttgtagatggtgaaagtattttttttccctttgtcatggaatctcggtacagatgcgattagcaagacgtagtttacatctaaatgtttggtttgcttgtgcaggccttaaccgtgaattttcaaagttacgttaacaccatgatggtaaatcttgccgtggacgaggcacaatttccagattgtcatgagcttttggatgatttttccgaatccctcaggcagataaaggatgcagctttgagcctaggaaagcatcacacgaaggcttaaggcactatttaatcattgcacacaggcatgtattcgtaagaatgattgtaccatccaaatatcaaatactactggcaagtggtatctatttgtatgcactgtagcaactaaacctaaagtcaaatgactagataaaaaccatcagatgctttatgatcagaagtttccagagaacaagctctggcttttggttaaatattctctgaaaaattaagaataaatggtagtctgctatgctttactttgcttaccatgtgtaacgtgcagcatagtaaagtaaatgcccagatattactcatcttcttcgaagtccataagaaaatcagtcaagttctcagaatctgcaatagcttcttttagcgacagttgatctttcttcgacttttcctagaaaaacggaaagaaataagcagtcatccgtgagttactgagttgtgatcactgacgaatgtatcctttacgacagggtacgttacgtgcttggagtgggagttgatacagttacaaactctatgcatgcattagacacttccatgaatttacacaaaattaaaccatatgcacataattaggcaagatagtgaataggactgctggactggcaagaatgctactcgctcagcatttattaatgccaaaaggctgaactttttccattagaacagaactgataataatgaaaaggtacctttggattttcagcctgtccggtagtttttagaacactccaattacgactgaccttcccttcagcatcctcagcatcatcaccatcatcttcatcatcctattggtaaagcagtataatacaaaggaatgacaagctttcaagtaggacaagtatcgataactatctcatcaataaatcaactatttccatgcacagcaagagaggcattcagcttccaataagcatgtatatgaactgaaagatctgttgtcattgccagtaataagaagaaattcgcaaggctacattgagaatcgcagattgcatgcatttccatcaagtaaacagtacagtattatacctctagtgactcaggctgcgcaacaactttgtcagcatcctcctcatcgtcatcactatcttcgttgtactatttgaaaagtagaaaacatcccagtgaaatgcgcgtaagtttgtatggag

SEQ ID NO: 8076 - DNA, 5906 bp, Oryza sativa
ctccatccgccgcgccctcccgttgtttcccgcgcgcgcgtgccgagtggccgaccgcctggtcaccgctgccgtcaccctgtgccgcgccagcccgcgcctgtcgcccgtgtcgtcgcgccgctccaaaccgccccgccgtcatcgccgtcgtcaccgcctcggtcccgccactcccgcactagcctccaagggacggaggcagagcctccctcctccctctgccgcgacgcccccgctccctcctccttttcccgaagaggcaaggggacaagcccctttcccccccctccttttccccttttcccccgccggcgtcatcctccctgtcgccgctttggccgcgaccgccgagcgccagctcgcgcccttgaccgcgcaagttggttcccaaaccgacattgctgcccatttaaaccccagctccttcccctccaatctccctcgttttcgcctccgtgccattgccgccgcccccgtgctctgttcgccgtcgccgttcgttgttgcgcgtgtcggaggagttggcacgagcaaggacgcggaaggggacttcggccgcgccctctccttcctcttccccggcccgaggccggagagattactcccgcgccgtcggcctctcgtcacagcgccccgtcccgcacggtagtgtctccctccgttcttcctcctcgctccatctcctccccctagctttcggtagtagcccgagtagactccccgtagttagccggcgccgccccgaccgttgtcgtcgctcgccgcgtgctcgccgccgtcgccgctcgagctccatagcacccgctcgtcgccagcctcgctcggcgtagctccgtccaatccgacgctagcatcgagttcccgaagccgcgtagatgctctcaccgccgggaatcgacccctcgtggcctcgtcgccgtttccctcttccctccccgccggttgtcgccgctgcgattcgccgccgtcaagctccctccggcgaatccgagccgttggctcgtctcccctcatcacgaacaaccgcccggtgtgctcgcttttgcccgtatcgccgtggttcgctccgccgctcgccgccgccgcccgccgtccattcgcggccgggtcgtcgtctacctcccgccggcccgcgtggcagccacgtaggcgccacgtcggcgccagctcagcctagaccgggtcgggccgaccccggtcagtccctccccgtgcacgcgttccaccgcgagccgtgaggctgtgcgtgggcccgccgcacccgcgtccaccgcaaaccgcgcgcgtgcaccgtgtccctcccccgcccgcgcgcgtgcgccgcgtgctccctccgcacggtgagccgagccgctgacaagcgggtcccacccgggaccgcgcgtggtgagcccggtccaccggccctctctctcctctcctcccgcgcgcgcgcacttgggccgccttgggccggccggcccatttaggtcggccggtccgctccttttcccttgggccgcgccctagccgtccgaggaaaagtctataatccctccctccttccttttctttttccaaaagggtttaaataaatcctttttccttcagaccaaaaatccaataatcttagaaattcaatatcttcccaactgtaaatccgattgactccgttcaacttccaaaatttcccaaatctcgagatctatctaatggcacgcttagaggtcattaatagggccttattttttcgccgtttgttgagttgtcccgtttcgcgtgtagtttcggagcccgaagacccgcagtgcgaggatttcgaggatcaagctccagatctcgagcaaggcaagccacctttgaacatcttgagcctatatttgaaatttaattatgttgcttgaaaaatattatgcattgataggatcgcacataatctgttgtcccgtctgcaaggcagattggcagacctacctaatttgttgcatttgatccttcctttgttaattgttataccatgtccccttgtaaccacccagtcgcgcctcgatattcgtgcactctgtgcgagtatcgacggtcgccttcaaacttaaaatctgaaaaacaacttgggtaaaactggagttttacaaaagacttggaaaacccgacacctgggtcggtgcttgcgaactaaatgatttttcaaaaccgcggaccgggaaacgtaccgggtgtacggtttcccgctcttgcacttaaagaccgtttccttggaatttcatccaaacataagacaagtacgaccacatgggtggaatgggacacccctggctgagtaactagcttatcaggggagccttgatgccgagagacatgtggattcgccggggtggtgtcggggaggacccctgggcttcctggcacagtatggtctgggacctaacctgttgttggtctgggacccctctcgtcggcatatggtaaacctgtgtcggctttggaaatgccttgtcatgaaagcttggaggtctcccgacgtggctgatccccacgggctgggtgatccgggttagtaatgtcgtgtgggtaaagtgtaccccctctgcagaggttaacaaactgttcgaacagccgtgcccacggtcatgggcggatgtgaggtgattcctagcgtagttttgtttgactactgcttgtgaaattgctgttgtgaaaagaggttcaatgtttgaaaaatctgtagctgacgggatcagctaggcccgggtggccgtttgaaaagttgttggcccgggtggccgtttgaaaagttgttggcccgggtggccgttgaaaagctgttggccgggtgccaaccttgttttaagatgtaaagactgatacattgcacatactccgaccggacgggacgcactgtctcaaccgtgtcgtttgagaagcactcacttagttgtttcagaaaagagttcaaataaaatcaattgcaaaaataccggcctttctttgaagcctgcattaaacacttatttcccctggcttgctgagtactcctgtactcacccttgctctatataaataacccccccagttgctgaagaagatgaagcggatcctgctgatgaggagttcttccaggaacaagccggttacgatgagttttagggtttcggcctagttcccaagtcgcgcctgtgttgtttggtccaagccctggcttccgtttcccttttgtaatgcagttgtgagctcgggatctgtccgcagcccaacatgactgtactcctactctataataaagagacctctgttgctgtgatattctatcttcctgtgataccggcactatttcctgggactggtatcgattaacaggttaatttggagcgtcacgggctaattccagtcgggactagctcggggcgtgacactttgtctttagaaagccagccaccggcaacaccaacagtagagagcccgagagcgacgcgtcgctgttagttctatctttagaaagccgcactcgacacgttaacactacaaattctcctagcatcggaccctataaatcaagtttgaccaataataaacgttggaccgtacctactaattagaggctcggtgttattaagaaatgtgataaactaaaagcatatttgtccgtacaatgcatggctccccttagttttgtattatatgatatgaaaaaaaaaacaatcgggtaaaaagaataggaaaaaaagaaccattagtttcatattatatgatatagatacccttttaaaataatattattctgctgaataaaaatgaagggagagctagcagagggacacagtcattaggggatcacgttaatcacataaggaatttccttaatttttatcagtaaggtacaaaattactaatgtagtaattaaccaattttgtaaaaaaattgagatgtatcttttttttttcaataaggaaattccttgagttttttcatgcgtagtttgcctccaaatacttcccgccaaactcaattttccctccaagtagtaccgcaacattagataacaaacctgctaatctctctccacatctctctcaacgaataagctccctatataatccccattcaacctggaatcagttagtcagtcttctgctccccattatctctcaccagagcactcctccatcgcctcctctaagatcgcattctcaactgctcagccgcgcagggcctccggccatggctctccccctcatctggccatctctcgagactctctcccctatttcttgagttgtggaatctgcagactcgaagatccaaaccaccccatccttttcgcctgcgcttggtgagggcaggtcacaggaatcgacatttcaaccaaaggattcctctctacagtttgtgtaccttctctctaaaattcctgatgcttatttctgagagttagatcaactagggttaaataaaactggatggcttgctctctgttagagctatatacaccatgtgttcgatgaaaagcaccggtaccaccatctaaattccatgtttatttctgtacaagaaacaaaattagttcccactgatgattattgaagttctgatcaaacatgcagttatttgataaaccgtggtagcatctgctagacaatctgaacaggttaatgacatatgttcagtgacattgattacattattgtgaaatgaattaattggatttatgttgccagatctatgtaattagttgtgtgcaaaatattcctgtttagatatcttgataatgctaagtaccgaatcaaaatgtatgctccgactaataatcaaagtttatgcaaagtacagaagcaggggaagattcttgtgtgaaatagtcaattttaggttactgcattcattctcacttttatctccacctctaccatgtggaactgaaaatttgttatgctcgtatctctggctgtacttccaaacccaaacaagcaggtcatatgtgtgttcttgtctataatgaatatagtgcccctgtcttaactgaaagtttagtagtacttaccgcatttaagctcaattatatgcatccagtttgacggagcgtggggctcctcaccgggagaccgcgctggcccccctttgccggttcggccggggaccctgggtgagactctaagctcccaatctgtggaaggttcgcgagacaggaagcacacaagacgccggcgatgtatacaggttcaggccgctgagaagcgtaataccctactcctgtgttttggtggattcgcgtatgaagaagctacaaagtatgagccagcctctcccttgttctgggttcctaatctggaaaagtccagtcccccccttctctaagtgggcaaggtcctccttttatatcttaaggggataccacatgcaccatttccctcttttttgtgaggacttcccctaccttttcataaatggacggagatttgtatagttgccgtccgagtcaccttctgatgggatggcctacaactacctccactttcgccgggagcagatgcgacgtggaatcgtggctgtctgctgtcgacatgaccggagtcagaccagtcacgtcggtcattcttgtccaccacgtgtcagcttagcaatctacatgttcgcccttcttcacacaacatcttgcctgtaatggttaggatgaagcctgacatatatctgaccaggactaacgtgccatctctgggaggtaacacgctagctccagctggggacgagcgcctagaagccctcgtcctgacgggatggggcgaggcgtgcgccagatcgcctgtcgccacctaacccgcaatctgaccggtctgtgactggtcacagaccggataaatgagtgcactgcactgcgttacatgcggcgtgacacgctcagccaaatcacaataaatgtggttaggtg

SEQ ID NO: 8077 - DNA, 7670 bp, Oryza sativa
gaggggtcggggcgcctcggccctcggggatgaggcgggtgcggcccgaccccctcggggggactaagaggagggcgaacacatcaccctcgggcccgacgtcccccgagggtgccaggccacgtgggcgattgtgtctgcctcaaacctctagtcatgatactcctgatcccatgtcaccgacacagttatatcatattaagccatttataatttatagttatctctttgaacaattcataagttttcaatagatgtagttttccaatttctgcaaagcatatgattttcatgtagaggcggtcaacctatagcttttctcttgtagctgccatattacactctgctttagctttaacatttaagagcaattgatgatttatttgctttccagtactgtgggaatggaaggtgctgagaaaaaggaatatttatttgtttggttcttttctggattcttctctagctgaaagtgctacatccattatatttttgtcatgcatatactacacttataattgtatagtcttctaatcttttactccttgtgcagagatagttgtagttggtacaatattcccgtatagtcaagcatacttacacatagattaattcgtgctcttgaaatacagtaagccaattttgcaggcaaaatggctagaaagaaaaggttgaacatagtacatagcagctgtcaccatggaaatggagagggaagtagcagcggacaatcattgccacaagtcgagcctcctctaccatatgaagacgaggtgattcatgttgagcagcaagatgatgagcccctcaacatgcctggtaaaactttaactacctgaatcccaaatagtttgtgattgcatatatatggttaacctaaagttagtgagccttatgtcaattaattttgtagtacaagatgaagaggtgaagaagcgcaaggggacaaccttgcgatatgtttgggatcttccacctgggaaacgtatagttgtaaaatgcaacagattagggcaacctatcggggatgaaggtggattgctaggacagtttttgggcacattagcaagaaatggagcttactgtccattagataagatgacctggagaaagatcaaagcagatgaaggagatttaacaatactacaatttgtccaggtacctcaaacgctaaaatagcataagtataatgctctgtttgtattactagtcattactttttgcctactctcagattgatgcatctgttcatatccatggcaactgaatgttttcgattcaatgtttatatgtattttacagatattcaatgctgagttttcttacttgctgttatcccttgcctaaccattgacgtaatcatgcaaattaaaatacttctactctcattattcctatgtatttcagacaaagttcctataccctccatcatgcgttcaatggatactgaaatcaattggaagagattggaggcgatacaaggctgcactaaaagataaatattttaacccaaagaagaagcgttctgctctgtataagctttgtccagacgatgtagaaaaagaccaatggattccacttatcaaatattggaagtcaaaaaaaggaaaggtaaaaaatctgctccacaatctgtactattgtctcattgacatatattgtactgttgttcctaccgtaaacaacattggaagtgtgaactcaatgagactacattgcttctgtaataggccctcagtgcaaagaacaaaagaagtcgttcaatgttacagaaccctcactcagcagggacaaagagttatgctcgttggtctgaggacttggtgagccaatttgtttcgttcaaaattcatctatacatgttcactttactttcttacattacctttcattttcagagacaagatgatccaaataagaagcagccacatagagcaatggtttacttagcaactcacaaaaaaaggataaagataaaaatcaacacgtggtatgccatatacacataatccttccataaatatctaatatgtatgttatctaccttgtacagtgggcatatattttttcacttgcaggtcacattggagaacctcatcgatgaacaaccagagttggcacaaaatgatcaaggaagagttgcatgggaaggtgatgcgctaaataaagtattgggcaaagaaaaacctggccaagtgcacggaatgggattacttcctgttcctaagcaggtttatggtcgtacatcacatcatctcaagaacataaacatcactacagtgaatgactcatcatcggatgaagagacacatgttagaggggaagtgggggaattaaaaaaattagtcaaaacactgggtcagcgtattgaggagttggaaaacaaaggaacaagcaatgggaatagtgaaccaactatggtaaacgttataaatacctttgtccttaacattgaatttttagctacttctgatttcatttttgtagatgcttgtaaaataaaaaatttatgtgattcacactaaaatcttaccccttcctgatttcattgctgtaggcaacatctcagagaacttttgatgatggtattgaagagggagtagtacggactaatagaaaggtaatgtcaaagtaatgcattctatgtttctcaccatattttgtgcaacaatatttaaatatgtgcacatacagagggttcgatgcagtagacctgatcaagacgactcaatgagtaatcaaataaatatatcaatggtattttgtcgtttctaattgataaattttatttgaacactcaatacacatactggcatgtatagtaaatttttattgtccattccactatagaacaaaagaagatgtgaggaacagcaaaatatgcaccatgacaatattctggatctttgtggcaaaaaggttaggatttgttgttttcattcatatggtgcaatgcaatttatatatggttttacatggattatatatcatggaaccagcaccaggaggctgataacaacataggatcaccatgtcaagatgattcatcatcacagccacaccttgctcatgatcttcggtgggaggtagttcttgaatgcctattaaaattgtacttgtttctcaatgtgttttattcatctcactatgatattagagtgaaatataaacacgttgttgggagaacccctagttaggcaatgctacatctgtgaatgcatcatttgtgtgaaacataaacataatcttttcaaggagtactgctatatttttatagacattaatcaactgaaaattaagtagtagcttctagtgctcaagtttagctttggacccttcatctatgccatttagtgttggcaaccgaatgataaacatgaaaggatattaaaagcaatttgtcatatcttaataaagttggtcttgttcatttgtgctattggtttgtatataccatttacatgatctaaatactgttatatgtcatgtccttccatttttcctaattataagattaatgtgcagagttgggttcaaagtacaaaagttatgtaataatgcaatatgttctgacctctttgtaatgtaacaaaatttcttatgtctcaacatagatgaataaaaagaagcaccgaaatttagagaaatttgcaaagactacagaaaaacaggacactcagaagaagactgcacatcacatggcccaaaatagggtgcattcttcttcagtgaaggtagtaaaaacatacaaagatggtactactaaattattgtttaacaattaattattgtatatttcttaatgaatacattatttctattgtaggttggtaccacaataatcttggtgactgcaaaatatcctaacaaagaaactgtggcatatgctacttatttgagtagtaacccaagagacaaagtggatggtgttgagattggtaacgagttcactaaagtggttgtcaatcatccacttaaggaagatgaagagctcgtaaggccactaaagcactgcaagacaattggtgatgcccattatgaaggaatgtcgattgcttggccttcattttgtgtatgctcataataccttcatgtaatatatatatgatgaatactatatttgcaatgcaaatgctaatatataaatttgttatgtaggttcaaaagatcaatggttaaaattctcatgttttaggatcacatcaagatggaatcaacaagatatggagctgatgaagattacataagattagatatattctatatttttttgctagtagtttgttgctcgaaatatgtatttaccttttcaaaggacatgactctgaatttgtttgttttcaattgggatgatgtaattagagtgctcatcaaaactttcttattgcaaagtaatatcatggttacatcacttcgtttatgattatttgtcctattgtgtgtatgtgcatttactttattacaccattttcttaataaatgtattaatattacaaagtgcactacagttcttttgtaattatgttgcaatatgtaaaaaaggtgttacagaatatgttgctacaagtgaaaaaacaaattacaaacagtgttggtacaactagaaaaatggtgttactatgatgtatggtaacacataaatacgtgttgctatagcactaatgtaacaccttttcttttctacaggaacggtccaatgtgttacaacaaactaaactatagtaacatagtctatagtaacagtttactgatgtgttccaatagaccattgtaacacctttttagggatatagtaacacaaaatcatgttattaaatgcctatcctgacgtagtgacaatgcttgtacgtgtgcccacgttcatcgcatttgctgcaacgcttcaccctgccagcctccgactcgtccatatcgttgcggatgcgacgagtcttcctccttccagtcttacctcggagcttcgatgggtcaggaatattgagtacttcatcgttagtctttgtgaactccccagctatgccgaacccataatctcgccactccatgtatgatatactgcttgcttactgaagtactgtgacacatatactgcatctggtatgccacactccgttgcggcagcaatgacatgggtgcatggcctgtggagcagcttcggctttgcacaagagcaatgacatgtgccatcggctttgagaacacattcctacttcactctcttgcggtagatacccctgcctgccttatcttgacatagtatctcaaacctgtgctgttgggtaccttgcactagagctagatgtttcatggcctttttacgcaactcctctagctttttctgcatgaaagttccgaataaaatgctgttgttcggtatagagggaagaactgcctgaaaccgatccctaaaatacctgcatgtcccatgtaaaatgaactccactatgccaactagtgggagtccacggataccgcgcatcacccagttgtaaacttctgccaaatttgttgtcattattccatatctagcaccacctgtgtcatacgccttggcccatttctcttttggttcatgcagaatccactgagaaaatttccgaatctccactccagttcttctaaccaatgttggactatccgttgggagaggtccaagagcttgaggagggtcagcaacggtggtcgatggagccgctgcatgctgatcactgcatttggctgtcaactcatctaatctcttccaaagctcattgaattttttctcctggttctgattgcatagcctcttgaacatgttcatgagctccttgttcttgaattgcttgaagaaattagctcccatatgacgcatgcaccacctactctgtacatcttcccactcaccagggtatcctcgttccatactcccaaactacaactcttctatcgctcgcagaatgccagcgtgtctgtcatgtatcaggcacacatttagcctcataccaacaacttttgttttaaccaatttcaggaaccagtaccagctgtcggtattctcactttcaacaaaagcaaatgccaagggcaatacctgattgttcccatctacccctattgctgttagtatctagacccgatactttccagtcaagaatgtcccatcaatgcagagaacaggacgacagttcacgaatgccatcttgcatgcatgtagagctaagaacgccctttgcagcacactcttgccaggatgttcagttgaggggaatttcttcactgcgtaagagctcccagggtttctttcttcgataacaccaagcaggcgtggcaaattgtcatacgaggtttcgtaagttccaaatctcatctctattattttctgtttggccctccacaccttggcatagctaatagtatacttgtatgtctcttcgatgtgtcggattattgaccttggttcatatgtgagattatcgatgacatacgcatacatctcagatgcaacaaatgcacatgtaatgttcctgtggtatttctgaacaccaggtagaaaacatgtatgcttggtaacgactgacactgtctaataatccttccattttcccttataagcgtgcactctccagggacaaccatctttttccttaacacaccgaacttcatattgcgaccggttggacttggcaacccaaaactctctatgaagtgacactgcaaaatgttttaccacctccttcatatcttctgctctagtataaatcgctccctgaataacctcattttctttgtactcccatctcacactatcctctttagagacgaccagaccagaaaattcctcactagcccattctgctggattaatatctgactcatcatctgatgaatcaccttcctctacacgcttgttgtcagaatcctccctctccatttcatccacaatggcaccgacagtctccctctcgtcggccactccacctggttgaatgcccactagagctactacgcccccgtcctctcgtgcgttgacctcttccacagaagtctcatttacttcagcacttggtccatcgccatcatccatgttcatctgcacacctggatccttcgggtgaacaaacggaaccatagctagaggccacccgcgttgcaatgcattttccacataccatctccacactcgagagttttgaactggcattagttcccaataaaaaccctcagttgcccgacttactataacattgattgttatgtcacttgtctgtggatcaactctcaagcccctcattaaccatccttttatagaaggtacactcctctcagccggtctatcaattcccctttctgatacaataaattctgacagatctaccccagttggcccgtaacggacgtttcctgggccatggtaaacttggaatatttgtttgttcgacatatctgtcaacgaaataactagatcatattattatttcatacaataaacacctacaacgtaatatcttcttgtgtatgccaatgcaacggtaaagtactgattccaaactagcagatctacgtagttaccgatatctacaatacgcacttctagattagtacaactaaaaccttaaaaatataatgcatttattcaaacaaagttgtaaaaaatacacagtatttaactcaataggcacatataggatcta

SEQ ID NO: 8078 - DNA, 6234 bp, Oryza sativa
ccgcccatttgcagccggccccccgcacagtagaaaatcgccctcgcggagggcggcaagggggccgcctgcaaatttcgttgacggccgtcgcccgagagcgaacggccgtctgccacgtcattttcgccgccctctgggagggcgatttttaaaaatcgccctcccagagggcggtaggcgactatttccgttaattttcaaaatggaaaattatttttgtaaaacttttaataaaaaaaattataaataaaaaaaattccttcaaattcaggctgccggtctccacgctcctccaaaggcctcgtttagcatgggccaatttatgggctttacctgtgatgggccgggacaggattcggcatatgctaatcaagccctctaagaccagtcacaacccaagacactagacatagtttccatacactccacatcatcaagaaactacactactctcccaatgcaaacactactatttcatacttaaatttaatgctacttatctcacatgatgtcttgaatgttgtgtagaaaccatgttgcatgcaagacattttccttctctttcctcatttattcacttgccatatcatttttcattctaggtggcagtttatttaatgttatagacaccatcttagttattgggttaggaatggcctaaaccggctcgttctggacgaaagtggaacagacgaaatggagtctaggatagggatacactagtaattctcaagtcctaaccgtgatcaggttcactaaaccgatcggtttgcatgaaaaccaatgatattccgtttgtggaagccgacctgtattactcggtttatgtacgacgtttactaaaagtcatcggttttattgattttcattttttattgattttcagtcggtttttcataaactgatgaaatacggttcttacttttaaaacgaaaaggtaaaccctctccgtgatattcgtttgtcaagaaaccgtgatatattcccttgtgtttccagtgcaatctctaagctctggcggttggcaaacaatcgaatgatgaagaaacgaccaaaaggtattcggtgtatttatttttctgacatcgcccaattctttttctaagcacaatttcctgcaggatgagatatagctggatgcatggagagcacgtatggtacgacaggttggcgatgaattttcaggacgtcccattcccacacaaaaagaaaaactggtacaaagtgtcaaagcttagcggttgcgaattgtgatgatatttagctggatatggctgtcaccacagccaaacagatcacaccagagtttttctcttttccgacagatgtgaacatttagccgaagtccttttgctcaaccttttgctcaaaagtaggtggatgctgagaataattgtttgattctctgttcctctcaattctcattaacacagttgcaaagaaaattaatcaactaccaaacggaagagaagcatcagtaagaaaaaattgttcgccagatcaagataacacggagtggacaacaatccataaccctgaacgtctatacagcttgaagtaaaccagcataaaaaaaaagggtactacatagaataaaagttcaagattggtgttatactagatttatacttgtaaaacaacatgacatcagaaaaacatcatagtccagtatttcagtatatgcatgaaaatggcttatgcaacaaacaccatctacatagcacaccaaatcaatgatacctgtacacgagaatttttttcggaaaaaagtgatactaccaggctctctgctaactaacgctgggctctgaccaaacacatcagaaaggcaatgaaaatgaagatggtcttgcgcatagctttcgtatacagtaatagagatcaactggtggttaataccagcggtagagtacaatacaaagccaataagtatccaagtcaccacagcatggacaatatacagcacaaaacaaaaatatctaatatggaacaactctctgacttccaggtccataaattgacagaaaatcaacatcacaaactcatgagaatacgtttaaagaataaataatgcctgcaggtgacaagcaaagactgttagctcaccgtcccttggggttcatgatctgtgagaagacagcgctaggagtaagcccgtcggagtctatgctagcaacactttggtcgcccatgcttatggacgtggttgtggttgtagtggtgcttgactcgatcgatggatcattgggatccttctttccaggcatcacaaggggagtgccctcatctgacatcccacaaccaatgcttccactatcctctgcactttcctgcatttgaagggcaaattccaagttccacagcacatctcccattgaaggacgatcgatgccttcatctgaaacacatttctcagcagtctcggcaaacttcttgaagcactgtggagcgatctttcccttcaggtggggatcaacaatctgatcaagaatacccttcttctggcagtgcagggcccactctgccaagctaacttcttccttagcaagagtggggttcaaggcagggcgagcacagaggacctcaaatagcacaacaccaaaggagtagacatcagatttctcagtgagctgctgcctgcggaagtattcagggtcaaggtagccaaaacttcccttgacaactgtgctcacatgtgtgtgatccatcgatggcccagtctttgacagaccaaaatctgaaaccttcgcgacccacttctcatccaggaggatatttgttgtcttcacatcacggtggatgattgtgtgcttcgcaccagtgtgaaggtagtgaagcccacgggcagcaccaatgcagatctccaagcgctgcctccatgtaagtggtgcattcttggtcttgtacaggtgctcacgaagagttccatgagccatgtagtcatagaccaggatcatctcattcttctcctcacagtaaccaatcagtgacacaagatgacggtggcggagcttcgacagcatctcaatctcggtttggaactcatgcacaccctgctcagacagtggattcccacgcttgatagccaccttggtcactccaccatcaatctccccacgatacactttaccgaaaccacccacaccaaggaggagggattcatcgaagttgtttgttgcagccttgatctccgcaaatgagaaatggcggcacaggttggatggcagcgatgaagcgtagctcccagtagtatgtgatttggctgagccagatgagtgtgagttgccatagagtgaaagtggcaaccatccagaatgcccatcactcatgcctgtgtccttccccactctgctccgacgcttgcagatcataaagcagcaatatccaagtgcaagaaccaccagacctccaatcactccaccaacaataggcccaacacttgacttcttcactgctccaccatccaacgatggctcaacagttggaacagggttgagcccagcaaggctcccattactaagcggcaacttgaacacctccagtccattgaggatagcatcatagtactgtggtttagcctggacatctggatagagagctacccacaaatccatagcccctgaaccaactgttgtcactacaaagtcttgatacactggactgccgatcccattgttattagtccatgcaatcacatcggcgccctgaaaagcagtctggttgttgatgtaaatgttgaacacccgctgattgatcatagtgattggatattgtatctcacagaaatgaagcctcacaaggtatgtgaacccagcatccacctgcattatccaagtgaggttgtatgccaagttcacgttcttgtccggccccatcgaccttgccgtagcatagacatccaccggcgccacatactccggcacattgctagggtaggcaatggtgacattgtcatcttttgggtaggacaccccgaacgccgcaccaaaaacgtatggcgagtcatcgtcccacgaacggtaaccgcccgtgtccttggagggggagatcgcctggccgccgacattaagtcggtacattgtctgcagagcagtgccagcgtcgatcgggaatggctgattgttgccatccccggtgaccagattcggggtggagatgtcgaagagatcgggggaggagacaacctcgatgccgttgacgaacgcgtaggcgttggggtggcccttctccggcgtgaaggtgagctccatcgtcggggtcgtgacgttgacggagaactcgcggacgatgtaggcgaagttgagggcggtggcggtctggtaggcgctgaagttggagaggagcgtgacgttggcggcggggacggagacggagaagcgcgcgtcggcggcgtcgcggctggagtagttggccgggtagaagtggagcctgaggaacttgcggccggcgccgagcgggaaggagtaggtgaagggcgccgcggagaccctcgcggtgaggtagggcacctgcggcaccgaggggtcctgccccgcggcggacgccgagccgaggctcgccggcgcgtacttggacccggcgtccccgctccacacccgcccgtccgtgtcgttccccttccccgtcgcgccgcagtcgagcaggatgtcgtcccgcggcacgaacggccccgcccccgcagccggcgccggcgccgccgcgctgctcgagtttccgccgccttgcccccgcgcgacgcaagccgccacggcgaggaggaggaggagcaagagcacgaatctggagcttcccattgtggccacccccgctctcaactacaactagctaactgcttccgcttcacagatcgggcatcgagctttcctacctcctcgcagatctggtggatgtgggtgagaaactcgggttcaaggtggaggagacaagcaatgtgggggagggaggtttcgggactactacggccgcggcgttatgcgggagattgggggcgacgtcggcaacggcaaagcaagcgagctcctcgctctgctcggttgctcgcgtttttggttcactcctcgtggtgggatgggtttggctgacgggtggggacgggggcgggaggacgggagcgcacagcggggagatggctggagttatggaggacagctcgcaccgtcgtggcagcctgttcggggtcgggttgcgcgggatttttctgttgctttccttcggcgacgcggttgggaggggaagggaatcgtgcccatgtgcgggagacgggcccaccggcgagcggcggacgcggacgcggacgcgactgatcatggccaggtggcagatggttgttagatcgagaaacctggaaagaaaaactcaaaaaaaataaagaaaaaaaaacgaagctcggattgtgctcggatcatctgagttcagacgaaggtggcgacccaagttgccaccgaagagcttttcgtcatcgcaagggcaaggtttgtggggtgagaggggatcgaacttagacctcaggatcactcaatagctatgagacctacgcgctagccaactgcaccaccaccccttgtgtccaaaactccagattctgataaacagtcctaaacttttacaagagcagatttccgtgtcacaaagtactgagccggacaggaattgaagaacatggccgggaatggagaagaaggaaaataactaaagaaaaaaaagggaaggaggagaagaagagagattcggcggcgattagcccgttaccacgggctatttaactatttgttacttatctaaatgcccctatttgatttgtatttagtaatttaccactggagataggtgatttcttaacaatttgccacttttgtctacgtaacgagccatcgtggcgtgcccacgtggaaagcgacttggtccccacccgtcaacccctcccctctccttcttctctacctctggccgccatatctcctccacctcggctcgccttgccgcatatagctgcttgtacgccgacctcctcttgcggcagcaaccggcgaccaccgcggcggggtgggcggaggcggacgtgggttcttgccgacgtcaaagctgcttgacttgcgcatgctttcttgagaaggaggcagaatgaaccgtcaaggacgaggatgacgactatgacgtcgattgggcctaccgttgtttacttatgtctgagagggccacccgcacgtggttgcccttatggtgtgtgtggac

SEQ ID NO: 8079 - DNA, 2955 bp, Oryza sativa
accaaaacgatgatccttctggcaaagcctagccactctgacccaccgagccaaaaggaaagaaaaagaagtaaagaacagtgcagaacagccggttagctcgggtagtcgtattatcattttttttctatgccctgttaaattgttagcataatctttgtttggattgatacgtttgaacatggaattccttacttcttcatggattagaatattaccagtagagtagtctggctttgtttgtcttgtatgtttttccatagggaacatacctttgcccaagttggtggtatggtgctgtcctgtttgcatgttgggtgtgcttgtgggtgacatggtttggggtgtgtacattgccatttgccaatataaccaatatggcctgcttggagaaaccgagaaagaaaggcactttacaccataaccgccagctaattttaaggaatgaaatatgtgtaatcacacaaataattatgttaactttatcacttgaacaaagagaattgttgtgaccatatttcagtgcaagcctcctaaatgtgatcaaattctaatatctatagcttctcttttttagctcttttctgctaatacattctctgtcttgatacactgctatatttcttttagctcctttgattttttttattcctcctttttttttatgcaattcatttgttgtggtttgtgccactagccactgtaatgtctattttgttcactatgtaagcatactggtatatggagcaaacagttttcttgtgtcatgctccagtgctccatccattacaaaatactctcttaaaaatagatatgttttatgtattcacatccgatagctcctgtcggatctctattctcagtcacacttcatccctaagtttaacatgtttgagcgtagagctctagattggagctgtaagaagagagtaaagaatatcagaaccatgtagttatttttccctttctggaaagctgaattatgttggcaaggctgtatgattttaaatatatatgtggtcttcctgaaaagtcaatgacattgtgcaatggaagaaatatgtgtgtctgtagggtgttgggcgctgcttcattaaggtttatggtatctgtagtgaaacatggaacaactaccctttcaaataattccttttcgcaaaaaaacagattcctgtctgaattttctgtatatttcatttattatttcccacaagtggaatttattgttgttatctacaggttgtccacttcagattacttgagaatccaaaagatgatgacttcactttggagctgtatgtgccaggaatatttgaacatacatataataactgacatacctcctttgtctgtgatatgactcactgtttttttcccctcctattttcatatttgtgaagttcaaagcgtttcacgtatgatgatgttgttgaaaaagttgctaatcaacttggactcgatgatccttccaaactccgccttacacaacacctcccgtattcacagatgcccaaatctcactacattaagtatagaggtcttgatcatctttcggacatgctaaggaatggcaatcaggtttggcagctttatggagtattctgagcaacttcttttgtgccttttacatgaaattacttgcgcttcctttggtttggcagatgtctgacatattgtattatgagatactggacatccctttgccagtactgcaagatctgataacattgagagttgccttttatcatgctacaaacaatgaggtttgtttgaactcgttttgtgcttgtaaccacttctatatttctgatcatgtcctgtgctaatgcttacttatcaggtgtcatctcactttatacggttgccaaaaggtagcactatgtctgatttgattgaggacatgaaatccaaggtgaatcaactgctagttttctttcaagtgttgtgtgtgcatggcaatttaatgattttttttcaggttgagttatcttatagtgatgctgaattccggttatttgaggtctacaaaaacaagatacgcaaggtatttcaacagttcttctgtaattcttaaaggcttattcttagggtagagaccattacacacaaaaaaaaaatactgcaaagctcgtttctgaaactggagggttgtattgttgtagaaaatcagttcctgctgtaaaataacaaagatctctctgtttgagttgatagattttttctttcactttgattacgaaaggtagtcaacctggcaggttttgcctgactcttccaagttttaccaaaaatcacgtcatatgctctttaagaaaaacacataatgctcacgtcatgatttcattttaccatgtaaagtttcatccctgctttcatcgtagaaaacaatattttctattctttcatcaaggtacacgtatacttaatagtggttgaaaatacctcttttatgcatgatcaatcacttgcctcgttaatttttcaggtgtatcaaccttcggagaaaatttcagttaatgaattcaatggactgttatgtgttgaagaggtaagcatttgcttatacggaaactttattgagatgttctgtcctttaagcaatctgaagttcaggctacaaagcaaatgacctacagttgggcatgctttgttaaaatgagtgggctcatcaacacgtcatcccctgtaataagatgacacaataaaatgtggtcatctcatgttggaataaatcatccatggaataacccactcaaactgaacatgttgttaattagtgtacataattagctaccttttctccacatattccttttctgttggtcaggttcctgaagaagagaaaaatgctggtgtgcgagaccgtttggttcatgtctgtcacttcatcatagaaaaacaggtatttatatatttagaacctaatgtttcaatactgcttgtagtcatttggta

SEQ ID NO: 8080 - DNA, 54871 bp, Oryza sativa
  unsure (1)..(54871): unsure at all n locations
cggttgctcgcgtttttggttcactcctcgtggtgggatgggtttggctgacgggtggggacgggggcgggaggacgggagcgcacagcggggagatggctggagttatggaggacagctcgcaccgtcgtggcagcctgttcggggtcgggttgcgcgggatttttctgttgctttccttcggcgacgcggttgggaggggaagggaatcgtgcccatgtgcgggagacgggcccaccggcgagcggcggacgcggacgcggacgcgactgatcatggccaggtggcagatggttgttagatcgagaaacctggaaagaaaaactcaaaaaaaataaagaaaaaaaaacgaagctcggattgtgctcggatcatctgagttcagacgaaggtggcgacccaagttgccaccgaagagcttttcgtcatcgcaagggcaaggtttgtggggtgagaggggatcgaacttagacctcaggatcactcaatagctatgagacctacgcgctagccaactgcaccaccaccccttgtgtccaaaactccagattctgataaacagtcctaaacttttacaagagcagatttccgtgtcacaaagtactgagccggacaggaattgaagaacatggccgggaatggagaagaaggaaaataactaaagaaaaaaaagggaaggaggagaagaagagagattcggcggcgattagcccgttaccacgggctatttaactatttgttacttatctaaatgcccctatttgatttgtatttagtaatttaccactggagataggtgatttcttaacaatttgccacttttgtctacgtaacgagccatcgtggcgtgcccacgtggaaagcgacgtggtccccacccgtcaacccctcccctctccttcttctctacctctggccgccatatctcctccacctcggctcgccttgccgcatatagctgcttgtacgccgacctcctcttgcggcagcaaccggcgaccaccgcggcggggtgggcggaggcggccgtgggttcttgccgccgtcaaagctgcttcacttgcgcaagcttcctgagaaggaggcagaggacgccgtcgaggaggaggacgacgaccatgacgccgatggggccaccgctgcttcctcaggccgagaggcgcacgcgcactgacggcgctgctgctgctgctgacgctcatcaccaggacagcggtggcacaggacgtgaggctcggggacgtggcgccagaggagaccacggtggtggcggcactcgcagttgagctgggccagctcagggcgaagatgaagggggtgcgaaggctgaaggtggagaagaaggagaagggaggggttcacgggtggggaccacgtcgctttccacgtaggcaaaagtaggaaatagttaaggaatcacttctctctagtggtaaattactaagcgcaaatctaagaggggcatttagataagtgacgaacctaaaagtggtaaagagctaaattctccgttaccatgagtggcggcgcgatgagactattcggtagtctgttttacagctattaggattgcactgaacaacatagttgttcggctatcggttatgcatctcaaccgttgctagcgagtactagacgttgtagttgctgcagcagcactatcttacttgggcctccttatttggatcgaattggacatctatgggtcgtttgatcggaattttgccgaccacatcaagtagacaagtagaaggccagaagctagtgacgcagggccttttctcactatagaccccgcgataagtcccatacagcatttactgttactgtctaatttgcatacggccatactcctccatccaaaaaaaagagtaaatttcactttgggtcacttatattgacctcagttgcacattgggctaggggtgggtcacttttttcactttataccacttatttttaccatcctttgcaagttggaccaggtttattgattgggccactaggctgggcttcggccacgcaagtaggtgcgtttactagcagccggcaatccccgtctacgggctccggcgagggctccctcgacaacaattccgcctcccttctctggtacgagtacttccctcccaacccaaaaaagtctctgttcacacgcggttattgtgcagcggcgtgaactcaacaatcgacacacaaacgccaccgtctaggtccaccgaccaccggcgccaaggtggagcaagtctcgtcatccggccggggcgaagggcctctacctggtggacgcccatgccacctcgatcgatggcttcccgaggatggaatcactggggtcgttggctgcctcattgataggatgcttgttgggtttacgaggtagacaggtatatgcatctgctattcgatcatggatcaatctatggaggaaagttttgacccttggacttgggagagtgaaacaaagcaatgtattcagtaattcctatgagatttgggttttgtgggggtaatcaatattcctcttctgctcttcgaaaaaactagagtaattaatctgtgttcctcggttggtaaccggaaacatgtcgaattttcacaagaaaagagaagatcggatcttgattactgctaaatggaatagttggcctttgttttttttttcacatgcatgatcggaatgggatagttctggtgtggtctcagatcctgtcaacgtaatcagatgtgccgtagtattgttttgagcgtgacagggccgagcgtgatcaccctagagtccgcgtccactggacgacgacatgctcgccctcgccgatgaccaccccgacgcgtcgcgcacgctactggtatcgcgcaccactgccaccatgagcaaacaccagctgctcgcgtggattaggccgaaacgcatccctcccatgccgtaaacctggtccaacctgaaaaaggtggtaaaattaggtggtgctaactgttaagtgaaaagagaaacttagccctagcccattatgccacattggttaatataggtggttcaagatgaaatttactaaaaaaacaacttaagaggagattctagtgcaacaaatctggatagagagctgtttagattcgttgtctgaacggagggagtacgcgggatacaccgtccgatcaagactcgattcgttgtctgaacggaggaagtacgcgggatacaccgtccgatcaagactctgccgtacctgaggactgaggctctttctcaacggaacacacggcattaacacagtttactgtctgtacctttctcgagttggatctcgtactgttaccgagtgatggagctccccatgggccatggcgggggtccgccggtccgctgctggcgcccgaacttcacatggatcacagccatgctggcaggccatcgagcttcgtcggcggcttggactgataacgcgtgcaattgcttacacatcgacttcttcaagtcttcaacgacgacgatggtggtggtgtgcacacgggtaggtggcgaactggcgatggctgtgcgcatgtgcggatgtgcccccgagcatcgtcagcgcctgcaacaaagagcaggaggaaaacgctcatgaggacgacgatgaagtgccgtctcgatgtttttttgttaccctggagctcacctgccactttttaaaaaaaaaaatacgtgcaaataactgcactacaatcggggtaacaaaaaatcattgttgcatagtttgtggaaaaaaaagggaaaccaagctcagttttgctctatcatctgaaatgggcaagatgtgtgacgacccaaagtagccacgagagcttttcatcatcacttgagtttcatatggggtgagagaggctcgaactctcgacctcaggataactcaatagctatgagacctacgcgctagccaactgcgccaccacccccttgtgttcgaggtggcggccagcacggtaaaatcatattagcatggtaggccaacagcgcgctaatacgaacgtgtgctccactcgctgcatcgctggtttggttcgtgctccgctgccacgcgagcgagggcctgcactgcatctgcacgggcgaaacgttggggcaatcgtttctcgaatctcccaatgcaacgcgagcaccggccgttgcgcgcgggtactcgccggcggcgacagggcggccgacgagctcaacaggatgttcctggtggtagtgaaggccgaagagagcacgcaccggagggcgtaaatgagttcttgcgtggccagcgccaggcgtttgcaatttgcaaaaaagacaaaaagacctctccgcaccatggggagatagtaatacatgctgcgtgtcgggaacggtcgtgttttaggacctaggactttctaatcatgtttccttttctactcgtacgtacgttttgagaatcctaaatgcatggcatggccaaaatacattgttaaaataaaattgtgaaaaagaactaatcatgtttccttttctactcctagtacgttttgagaatcctaaatgcatggcatggcaaaatacattgttaaaataatattgtaaaaaggaaaaaccaagctcagttttgctctatcatctgatatcggcagacgtgtgacgacccaaagtagtcacgagagctttttcatcatcgctcggatttatggggtgagagaggctcgaactctcgacctcaggatcactcaatagctatgagacctacgcgctagccaactgcgccaccaccccgttgttgaaaccaattactccctccatcccataatgtttcaacctaagattcgtagtcctataatgagataggatgagtctaatctcattctagattgcaatattatgggacggagagagtacaataatccattaacataatatattcctcctgttctagtttgcgagctagcaggcgccatatatcatactacctccacccataatataaaagattttgagtttttatttacactgtttgaccactcgtcttattcaaaaaattttggatttattttttattttttttgacttactttgttatccaaaatactttaagcacaacttttcgttttttatatttgcacaaattttttgaataagacgagtggtcaaacagtgcaagcaaaaactcaaaatcccttatattatgggactggggggagtatgtgacatttaacttttttttaataattaaggatttgtgtctatgatacgtgggctctcatatacctataatatgcgagtctatgggtaaatcatttatcaccagtggtatgagtggcaaaaagaagttaattattcctatatgcaaagtgcattcttctacttaacatggtgacaagaaaattgagaaaaagcatgatttctcattcgtgaaaggacggagtccggtacaccattctctttacagttacagatattagccactcactcatcttgatcttacttacaccgacatgcatcaaaatgtacatcaagatcaacaaaaaatctccggtcaggttaagccccaggcagtcaaagttacccccgctgcatacgccggatcaggcagatcctttgccatattacagcgttcttccatcagtcaaatcatgaacggtgcacaaccttggagataactgagaacgggatcatcacccggtggcccttgtcgccgtagaagccgacgctgccgaagctcgcggaggtgccgttcatggtggcgttgacgacgaaggtcacctgctgcctctgcccgctggggatgaagaactgggccggcgacgcggagacggcgaccccgtaaggggcgctgtaactgaccgtgtagcgctcgtcgctcgccacgttggttacagttcttgttatcgttcttgactggttgagcactgcaatggtgatggaggggaggttcagatcagcccctgtcatggcggaggagctgcagctgttgccggtgtaattcatcactactggagcagagccgtttatgccacatagaaaggagaagaagtcgtcgtaacctgtaaagtcatgccgctgtcaggattgaataattactaaactacactgagaatttcagtctgactttatagtgagaaaaaatgttgcattgcatgtatgacattcaagctatattgctgttgctacttgctagtttgtattcatactatcaggtactccatccgttccagatagaagcatcagatacattttgaaaaatgcatagaaaaaatgcttatattttggaacggagtttgtataacataggccccagtgaactctaccaaaggtagaggtactgataatagtaaaataaacagaagaaatggcagttgaacttactggaatcaaatatgagcccaggatccaaagcagcagtagcattgacaaatccatttcccatgtcaaaaggtgtagctggagattgagttgaatttggattgccgtatgttctctgtgccatgattggattcccctccctgtcactgagacttgtagtagtcgataatgcagaacctatagctgcagggctaaaataagggaacttctgcttgactagagcagcaagcccagcaacgtgtggtgcagccatacttgtaccggaaattattgcaaaactttcacctagacagtaagtcaaaaacaacataattattcaattaatctatgtaagaaaaaaattattatataagcaaatttattaatagaagatgttataggttggattctaatgctaaacgaacatcttattaagggcttccacaataactagaacagtttttatacaaccttttctgtaaagcattatgtctagagcatgacctaaacttaggtgttaaaatgcacaattaaagagtgaaatcatgtagcgctttctgtgattacttctacataaaattttgctctatcactctatcagcgaggtaaagggaatggactaacaaaaatgcagaacaactgttggcacaaatcaatgccaaccgtaatctacaaatgattcatggtactattgaaggggaaaaaattaggctgaatcttcaattcagacataagctctctcattaacaggtattttagcacctaatagaactgttaaaaaaacagaaaatgcatgccactgttttgttttattgctattttatatgcctgatgattcaaagaataaaacttatgttctaaacaagattagaaagtaggtaaattgtcaagttaccagcaaattcagcagagtccaatccaagagaactccaagcaccccaaatggaactgccaggtgctatcagatttggcttcaggatatcagcattggccagtgagttgtcctcaggatcaggacccctggcagaataaaacattacttttggggcagaaataccataatttggattttggcctcctagtatttttgcaattgcaccaaagctgacgattttgtttgaggtctcatctctcacaagggactcattgtaataatttagaaatacctgagaatgttgcatcacatttgttaattttcttcatatcagcaagggatgagtaataacaagactcttgctttggctgtcataccttagagtcatcagatgatggtattataagtccaggcatatccattggagttggattcagctggaatccaatgacaaatggatccagatagaatataactcctgcagcactgacattctttgcagtatctaaagcttgcttcacagacgacaggccaagtacaaatcgtatggaatagctgcagaccagtatctttccccttatcagatcttcatcaaggtggcttgaatcttggcactcccctagggacatttcagtaggactggctacattgtttttcagtgcatgaggtgcagcaactagagtgaacatggaatcaccatctgttccagctgtatttgtggagtaacacaaagttagaatcaaacaacaccagccatgtgcagttgcgcacaatggaaaatactactaggaacttacgagcaaggccaactcctgtaatggtcagattgttgccaagtacaacatagttgttgtattccctgtcatgggcagatgctcctacagtaaaaatccatggactgtatgatgacatgctcttgggggaaggacctgtatttcctgcagcttgcacgacaaatatgccagcttttacagctgaaagaagagccatgtcaattggattaaagaaggtggctagtccaggaggccttctatttggggtaatggataagctgattatatcaacattatcttcagctgcctgcaatatgatgaatgacttgtcatcaataaaatgtcacaatgtgcccatatgcattgtagcattctaaaatgtggtattaatttgtgctaaatcaaaagaagatagttagcttgcaggtaaaccattacctgatctattgcagctactacatcagcagcaaaccctccaaagcttttgtacagagctttatagacagcaatgctggaaattaatttgtcattaacatttgggaataaagtggatcttatatgtctccgcagaaaaaggtaatggacttactgtgcacgaggagccattccacttgcattcccaaaatgatgcccagccacaacaacaggaattccatgattaccagctgctatggatgctgtatggctgtacgatgtacaaaaaatatatatcagaaaacagatatgctgacaaaaaaagagccacaatgacatatggagtgaaaaatgtaaatgaaatatctatgaataatttaggcagaagctgcagaactggatagtcaaacaagaaaaataagaaaactctactgtagcactatgaattctcaagaatgctactattttacttaaaatttgcaagcgtgattggacaatgtaacaaaaccagtagtagattggtaatggcttcgtattcttgctccttcaaataattttaaagggtgaatcagcagatagtacttacgtcccatgaccatcactatcagaaggtgaagcatgatcttgagaggcattgaacactcccctggttattgcagaggctgcaaaatgcctagctcccacaagttttctgttgcaggatccagatggaaaatcatttgtaacctcgcaaatgccagagtaatgagcaggaacaggataactgtcagttatcaagtcgtctgcgaagctgggatgagttggatcgattcctgtgtcgatgaggccaacaacaacaccctgaccagcacattgtgggccaccctcttgaacccatgctccttgtggcaaaccaaggaattcaggggtatgagttgttgccgtcctaactgagaagtccaacattacatttgccacttctttcgtcatagatagcctctctgccttttaaattttaatgcaaggaaaaccagttaaaaccttattgtcaatccaaatagcttcgatattttttagtgctataaaaatcagttgagatttagagaagtgaccaaatctaaacaatcatgcaataaacctgacaggttcttgagaacgatgataaaacaaccaagggtatacaaggtacaacattttaacatgctaaaacatagcaaattttagagagagatagcagtagaagcaaaatcataagtgttcagtgtatgtaacctagcagatatcaacacgccataattcatattgccatggacttttctttcgagaacattgatgcagcatctaatagtctgaagatttcagaacttctttttgaaatgcaacttaaaaaaacttgtaatgtgacgttacagaacaaaggtgcaaaagtggtggaatcaaagaaaaaaatgatacctgctgaggagtgatgacaacagcaaaaccattaatcagatagcggtagctgtagagctttatatagcgctctcctctcagtgttctcttcaagagtgaattttgaagacgaactaagtacgagccataattcataggttgggctggaccatgcctgcattacaacactggtgagcaaaaaaacgaaaacttaatttgtgacaagcaagggaaaatacttgctaaaaacttgtcagataaacagtaaagtacagaatcatcaatagcacgctagcagcacagccgcacacacattgttcatgttggtattaaattccatatcttttgtgtgttaaaaaaaccaaacatttctactgcaatagtgggttagccttcccaatattagcagcaactacaccaatgaaccgagctgtcggcagataatgacgtagcatctctaacatttcactatagaccaatcaaaatcacccaaaaactcctcccccaaaaggagagattctcacccaaactgaatcgtacatacatatttcgcataaactgtaaagatagagcaaaaccaaatcatagaggagtaataaaccatcaaaaaccttggcttcatgaggatgctagtggacggggtgtcccccccgccgccgccgccgccgccggcgactctgctgctcccaaacctctccaggtcgaggcgcttgtggaacaccggcgcctgcttcatggtcacaatgtacaccgccgtgccctcctcgaacgcgccagcggcgcccaccagcgccgccccaagaaccgccacggacagccatgcaaccgcccactgctccctccgccacgcccaacccatcgcctcaaagagagctcttcaccggtcagctcccaaagcgccgcaagaatcgccaagaaacactagctgcggcaagaatccattgggggagcaaaaagggcctcgctcgacgagacgatctcttccgagcgaggtggagctgatgaagctagtagcactactactacggcctatggggcttgctccaggctcattaatggcgatgtggaagtggccgccgcccccgccgtgccgtgtgcgctttaagccgcggcgagagtgagagagagcgagtgggttgcactgaggctgagctgcggcacaaagacgagcagcgagcacacccaataaagagcgaggcagaaagccagaaaagcgcactcctccggtcctccccttttatgcctactttgatttgattttaaaacttcggttcgtgtcaaaaataaacatgtaatacgaaattacgatccatcgtcatagtatcttatattatatttgtttattagcagagatgtaagcaactgctaaattctaatttgtttttttatcatgtagtactacttatgttttgtattataagtcgttttgattttttaaaattaattttttaagtttgatcaagtttataaaaaattatagtaatattttaacacaaaacaaagaaactattaaagtatatgtaatgttagatgtaatagaattaatttaatgttataaatgttgttatatttttttcataaaatcaaactgctaaagaggtttgttttagaaaaagaacaacttataatataaatgaaggaagtaataattattagttattctaaaagtctaaataataatctatactgtttgaaaatgctaaaaactttaagtgaaacttatggagtccaaacatgaattgacacagctgctgcgtctctcctctcagcgaaagagcaaaacacacagctcagcgttgcagagagagtgaggcagacgaggcgaggcctcggttttccattacctcgtgaactgtgtggtactccggccttctcttggaagaagccattttacagtccatttttactgccagagtacgatgaagaaaggtggtggaaaagattgatcgaacggagattgatcgaatcgctgcttgcggcacatgacaccagagttcacagtgcagtgctatgctaatatcccgatgtttcagacaacagaaattgccggtgttctgcttctgtgtacctcgcgttgcaagatcagtagtggagtactactgtcaacaacaactgctgctactgctcctttttgactaagggctgtgtttagtgcacgctaaaattaaaaatttggttgaaattggaaggatgtgatgaaaaaattgaaagtttgtgtgtagaaaagtttcgatgtgatgaaaaaattgaaagttcgaagaaaaactttaaaacaaaacacggcctaataatatttactcgtatcattttgaacaaggttattatcaaactctaaatgtcttactatataaataacttttaaaatatgtcttataaatatggtgaccatataagattttaaaaagtgcttgataaaatcatatacttattgatatttctgtatgtattgtaataaaaaatagtgatcaaaattggctttgaagatcatgtttctatccaaaatgttaagtaatattatcaggttggagggagtagtactaattcagtatatgatcatgaagtccgtgaccattgttttactcatgcacctggtcagaacgggcgtgctgtaacggaattgtatgtgcaagcgttgcatttgcactgttgcagctagagtgaacaggctgtagaacagtgctagcgctatggatttttctcttccgtttttattgatctgtactgctgtactgctatgtcacaaaaggaaaaaaaatccataccccatgatttcaatggattattaaatgggttggcccagagcgacgcatcatccgtgcacgtcatccaacggtcaattctctgggctcattagaattttctaacagttttttaatcgctctggagtactgatcttaacgtgatgctgcattgtctacccgaaaaaactgttttccagattctaactgcaggtttttcagaatcttgtctttccactatatgaaacactgttcttaccattcaagctcttattaacatgttctattagtctagtgctactcaattatcagcagctgaggtggaaagctaactgaccttaatatgctcttattaacatgtactcctacctactaatctaatattgtctctgttataaaaactggcacagaccttaataagctgaatagaaaaaatatcatagaaaagtccaaactgatgacgatctcaagacacaatatttgttactaataaggtttaagctgaaaactgaattactggaaaacttattacgaacaccacttcttgatttaacatattacaatgtatttagatatcatgacccttgattgaccatattggcgactctaattctatttgaacatctaatataactttaaattttaaactgtaatcgtttttatatacatgtttaacacaaaactcttaagagtttcaactgaaacatgcaaagcctgaatttccagttggaattctccaaccgcaaaggatcttggccacgttcagcgccggtcccagtttatcttttataacccagcactttgagctttgaagcacaataccaggcatgtccaattgataatgctgctcggtgtgcactttgactgcactttgtcgatgaccgattataaaaaccgtggtgtgcttcagtagtcgccggcagctcatgatttcgttgatcatctattccaaaggtgcacatctccaataatcatcaccaaaagtttcatggatccaaagcacaaaaccgagagaccctaaattcaaggccgtcccacccctgttgctaatccacctctgaaaatggggataagacatagcaaaggcatttgcagaaaaaaaaaacgaagtttgagcctccccaaaccaaaatgactttgatcatgtactaccacgagacaatccaagaacctttgtccatctctctctctctctctctttttgtcctaaagaaagagatctgagggagagtgtgaggcatgttaacatgcaaccaaagatactaaccgatggcgacagaacacaggccacaagaaattggagtacgtgatcacgtgatgagtagtagtagatcaatgagcaaactacgcatgcactcctggtcacctggggccagcattgctctcggctccctgcaaccagtcaaccagatttttttttaaaaaaaaaaaactgggaaaagcgactcaccaacactgttagagtaggtgacaatggcattgcagcagctgctagctagcttgctgcatctttactgtggtcctaattaacaacttgaaaagtgcaaacacttcatttcatggcctccattgggaggtagatgatggtagcactgaactatggtagccggtaggcgccaaggtcaccttttttttttttttttactgctgtctcctctgctttctgcttgcccggccggccaccaccactcggctgcagagaagcgtagtgcagcgctacgagctggtccattctcgtatcctgaccggctcgatcgatcgatcgatcgaaatgtgaggtgtttctgacgaagagggcagctagctactagctaagctgtgtgcagaagcagacgaggagaaaagggatggaaaagggttaaaggggctggaattattgcgcatagtgagtcggcgggctaaagcttggccaagcatgtccggcaattgttcatggcatgaattattcgagagcacgtacaccggcggagaaacaatgtttacagatcataaacaccactttaattagttaattatatacttggtagttttcaagccaaagtttatcatacaaaatggaaagaccatcgtagctgcaccaacacgagcatgtaaacataataaagctggcttgcacgctcgacatgatcgccccatcggccaagattccttcatatccgcgggctaccgactttgcaaatttctgtactactccctccatcctaaatgtttgacaccgttgactttttaaaatatgtttgaccgttcatcttattcaaaaaatttaagcaattattaattcttttcctaccatttgattcattgttaaatatacttttatatatacatatagttttatatatttcacaaaagtttttaaataaaacgaacggtcaaacatgtttaaaaaagtcaacagcgtcaacatttaggaaaggaggtagtatgtagtataatctgttcctacttcatcatagcacgcactcactcggatgtagattatacactactgcatgcgtactagcagtacgatttttctaagccgaagctgcacttcgctgcagggcgagcattatccggtcagtccggttcacgccgcggccgcatgcatccaaccgcttataatttgcaggttcgccgccttgttttctcctcggttccgggcggtgcggtggggcctcggcgcggctaaagattcggaattagggggtgctgctggtgattcgatcacgggggagaatgtctctcaattccactttagtggtggtatctgctgctaatctagggctggtttggtttgtgttctaaattggccttatcaatttttatcaatgtcaaattttgataacttttgacatgactaattttggcaaaggtaaaattgtgtttggattgaagccaaaatagcctaaattaactgttgaaatgacctattttcttagtcatgctaaaatttggctctaaaccaaatagataataaacattattaaaattatcaaatattgataagtccaatacaggcctcaaaccaaaccaaacgcctaatctgcgtcggctgtaatgtagcggccgtcgaacagtgcgggcatgtgtggcgacaggtgtgcgtgcccgcgtgggagacgttgcgagaggtaaccgttggataacactgacacggaccggctaaaaggcttaaaaagcagctaatacacagtacagtactagtctatacccaccaaaacggtccggattaggggctgattggtttggtgccacacattgccacaccacatgttagacatgccacagattgttagcttagcgtttagttgcttgtttcagttgtggcaagccacactttcttgtttcatgggcctacatgtcttatacttattttctagctaaacattgccacacttgtggccaacaaattattggccacactttatttgccatgctacatctatgacaaattaagttatggcaatattaggcaacaaccaaacaaaccctaggacaccaccaacggcatgtctccgtcgcagtactacagcggtacaaccggttggccatcggcgagagtacgtaccagtctgcgtgcctgtacgtgacgtgacacggtattcgtgcgtgcgtgagccaaaatcctcgttgcgccgccgcgccgctcggctgtgctgcgcgggcagccgacgggagcgggaagtgggtgggcgcgcgcgcgcacgcacgctggcaaatcttggcctttttttacgtcctcggctcacgcgcatccccacgcgacgccgggctgcagctttccaggagacgcggccggcggggtttccgccggctatgggggttaggtatgcggtacacgctcgcggactcgcctgtcactcgattatcacgggccggtttggctgaattatccgtggacggtggacaaatggatctcgcaccctgcagcgcagtggtccgtccgtccgtcctctttgctgcgctggcgaagtggcaagtcagtgaagtcgcaagtgagaagggaaagtaggtcaatagtaggtggtggcttcagatgttctctgggcctctcacctctggctggaaaagagcaacgttttaatgccaatgtcacgagctttttactgatgtgatatatcggttttagatggagatcctcgctgtcattggaccggttgggtgggctggcgtaccatacggccataccaggcaggagtgaaacgaagacgacaagatgtgaatcgttcacggcttcaagcgtggatcatagggaacctgtacacgaagatgctgaagcagtgtgaagatttttactagtaacactgtatatatatgaggggatatgaaaggaaaggaagcagcaacaacttttggcgtcgttcaccgtacggtcgtgtagtggccggccacgttgtaaatcgcactctcgtacgattgactaactagccgcctcttgtcagctgtgactttatttagcccagttgagatacacaatctctctctctctctctctcacacacacttgcaatgtcaatgcattcattggcaagatggcaagatgggattcatcgttcatgagaacttcatgtcctgcacaggtcatttcattaaccactttgtactactcgagttttagccttttatgcacactggtgactggtccagctatagggtacaatagcatactattagccagctatataaacatattttaataagataagagatgagagaaaggagtagcgggctataaatttatagctagctacagcacggactacaagtcacagtgtgtgtataacagatgagaccatatattaatagtatagtaagcaactattgtataaattagctattatattggctataaatgaattggagctagtagtgggctacccacaaacgcatgaccctggcagtccgcacattgctaaccaacaattacagtgttacacttttattccccacttctgtagcggggatggattctaatagctcgagtggacgtccacccgtttatttcatgtcaactaaatggctatgaaaaattttcaaaaaaattggcaagatagatcaatatgtaatatatcacttcacaaacatgcaagttaaaattcaacttctacaagttacaacaaaaataacaaatttaactgtaaatatacatatagtaatttaagttttgtttgttatttttgttacaatctgtagaagttgaattttaacttacatgtttgtagattgatacattacatattgatctatcttattcatattttttcaatttttttcataaccatttagatgacatataataaacaggtggacatccactcgagctgttaaaatagtttccccttatgtagctgtttgctggaatgaagtgtagtgccgttactgcagtaagccagtaattgcactatgtggaaatgtgggatgaatggataatacatataccaacttaccaagaacaggattttcccggttataatatttcaggattgtaatcttgttttttttccacagctatattaatatgaaacttctcaatggtataagtcgtttaaaaaaatgtagggtcatatttggcaaatgggatagggaaatgatttcccacccaccataagacatctttaaatcctaaccattcattctcccccttccatttaatcctaaccattcattcatttcacaatctcaatcccacccctcaacggaagaatatatttttcttcttattcgcacgcttgtcgcatgccgtgcagtgagtagtgactatcacggttcctgtgctcgcatgcttcagaacccaggtgctttgtagcctatagccggcaatgcgaaatgcaaagatgatttcatgttctctaccaccttgggttcttacttcttggcgagcttatcatgagatgcgtactgtctgcttgtcatgaatcaaaatcatcctagctatggatatgggaataaagtacttgcatcttttgtttcctccagcctttttcctttgtttttctgctctcttttacttttgccaaatgatgaataaagcatcgcgtaatcaacgataaggggatatatagcttcattctgacacctattcttacaattgcttccgtgtatggcatcaaaagaaatgatacaacaatgaaaattgccctctcaagttctctattcaagagggtaactacagcaaaaatcgaaagtgtatatcagtgtatgcatatccaaaaagaaaaaggcagggatcgactttctgaagaatagaatgattatgttgccctcctttttgttctgctgctacaaatataggcacagaaagaatccgatggtctttgtacgaaggttacttgcctaagatgaagcaggtagcttaggtttgttattcctgaccaaattttggacaaagagctctcctgcacgatatgaagaccgaacctgaaaaaaaaaatcacaaaatagagaataagctcatgtaagacactgacttggttatccaacattcctacatattagtcgattacagaatcgtacaacaaataataatagcactggtagctgtgttcttcactaaatttccagaactttactcatgcatcatactgatatttgtcagagcaaattatacagtactacaatttcctatttgtatttacaattttaagggtgacaactgaagagtcccactaattagatgtagcacttaccaggggtccactagcaacatagcggaaacccaccgattctccatactccttccaaaattggaacttctcaggagttacatactcccttactgtcaaatgtctttcagtgggctgtaagatcaagcagatggtttgcatcaaagactgaccagttattcttgactaatgataaagtggtactgggctaacctgcaaatactggcccagtgtcaagatatcaacaccaatggcccttaagtcaatcatggcttgtttcacctcctcgtcagtctctccaagaccaagcatgatagaggacttagttatcataccctctttgcaactttttgcatgcttcagaacagctaagctctgatcatatctgtaagaatgaggtaagaaaaattcttacaatgccagaggatatgaggaaaagaactgtgcatagtacaagttattaactgcacattgccacgagatactagaaatatagtgtatgcgcaaaatcgaggataaactggataaactatatcctaccactatacttccttcgaacagattctaagggaaaggtagttgatcaggcaaaataaatcatctcccaagattatgatgcgagaaacgttcagaaataaataagagtaccacaactcaccaatcaaacagattgcaaagctttgatatttgcaaaactattgttatgtctcatacaataaatacagcaaggaatatgcaggtcatcagatagaaaatatctatggctgtttttattttgcaatgttacagtctacaatatagtttacacttcagagacaacaatttgcaacctatatataagcactattacactgtaaagtatgcatagctcaataataattagattcatttttactcggggcgaatttaagattaatcacttaaactaagacacaccaatagcctgagaatgatcatatagtcaagctgtaaaattgatgccagggacagaatactcgaacgcagtgttaatttgtctttttaggtcagtttaagacatgactgggcacatcagtcttgtaaaaaacaataacctgaatagaatggtactccattgaatagagtaaaccacatggaattagttttaacttttaacagaaaagcgcatgcaacatgtgcatgtggatattattcaaagtttggattatgtagatttcatgtacctgtagtgtaaatgaaaatctggaactaggtacagtttagatgttcctttccagtaggaagtaatttcattagggtgatgccttgggtgaattggttattgattctctaaattataaatgtacaaatagtcctaagcaggatataatagtgtgccagtaaaatcagtgaatcacattaccctgctcgaggatccctaacaattctttgcaggctcctcacagtctcgatgttgtgcgcaaatacatccagaccagagttggccaaagctgaaacagcctccaggtcacctcgaaaatctgaggtcaagcactccaccagtatcccaggtttgagctcctgaataggaaattcagaaaacttcagcatgaaacttctacaaataaatgcccaacttctgtcaacacaaggcataaggtagtaaacctttaaagctctcactgtctgcgcaaaatggctgctaccaccatcaggcaagtcatctctgtcaacactggtcagtacaacatagtccactctgaaaagagcaacatttgtcagacaatctgtactaattttgccacacaaacaagtgcatgtgcattgattttctttacttccagacttaacaaaatgcactgttatctctgttccttcctacaactatcattccatcgatcagtaactcagacaattcggaaggcataaatggctaatctggagatggagcgaacaggcaaagttaccatacccccagcttgcaactgccaaggccgtgttcagaggctccaggggatccggtggtggaggcttgttgctagtcttcacggcacagaaacggcagccgcgcgtacaggtatcaccgagcaccatgatggtcgccgtggcgatgccgtcgccttccccgcccgcccctcccccaccgttccagcactgcgccccaggagcaaaggatttagctgttctcgcagaaattgctcgcgaggatcaccttgctctagtcccatacgatacgactgaatcgcgtacctcgccgatgttggggcactgggcctcgacgcagacggtgttgagcttgagctcgccgatcgactcccgcagccgcgcgtacttctccccctgcgccgcacgctgccgcagccacgccggcttcttcacctccgggtccctcccggtgtacggccccgccgccctacgcgccgccggcgccggagccggcggcgcagcctccgcgcggcaccgggccacggagaccgagccgggccggctccggcagacagggttcccgcaggccggccggatcgggggccgcggcaacggccgcgcgagcgagctctgcatcatggccgacgaattcggcgccgccgctcgcacccgcgcggagtcgtgtagccgtggcgcccgccgccgtcgtcgtgcggggcgatgggttcgaagcgagacttaaagattttgcttctgccgattttacccctctgctctggccgcaaatccactggatggttggatgggttaggggtaaaataggaattatagaattagccggcgatgataccaaggttgctgctcaaccagtttgacacccgctgccagttgtttgctaccagagttttgatttgttgtcatattgatattgaaacgtcaaaataggcaggaatttcacataaattagtttagttcttgtaaaattcctccatttcaaggcctaacaattgctgaagatttcatactgaaaattcctcctttccaaaagaggccctcacagatgttggaatttcatactgagatagtgtacatcaaaccgttacttgaggctagctgtaaccaatagcagcaagcacaagaccagcatattgacaccatcaaaaagacaaaagcattcaaatgctccagtttatatggctgtaataactactacacaaatttacaaataaaggcatgcagcctcaatcctggcaggaagtatatagtgcaaccggagttccctttaaacaaaatgtaggcagagtaatgaacaaaccaaacatttatgttcgcacaaggctaaaagccgaaatcttgtgccaatctgaacaagtgaagaaatgaaatgacaacaaactgtaacgatttacaattaagagatatacccccagtttccagtaccccaccatatagtgtcagtaggcacctggaaatacaggcatctccatgacattttaagtatccttccaagaaacctaataaacagaacttcattattccaacacactttggtcctgactaaaatagattaagaccagactagtgtttacttgacgctaggcaccttccacaccagtaaaacgacagacaggaaggccctagtacctgtacaaccactgctgctaagcccactaatcttggacgtcttcttcgctggggaatatgaatgttaaaaactaaattttgcccccaacgagttggctagttcatcacagcatagtgttacaacagtgtacgtacatatgcatatcaggtgggtgctatataaatgacccacagaaaggggagatcgttggtctacgagattaatctgaaacctaaagtcacaatctgaagaaggctagtttttccctgagcaaatggaactttcttccaagctcacatcttatgaagggcatgcatgtctccagatatatatgaattgccatctgcaagacaagtgcatcgagtccttttaagcatttgcgatcgaccctttggcatcttcagctatatcaaccaggaacagactcagaggtgatgtacccaccatttgccccagtgggattaataccggtcactggcattgttcgctgagcaaaatcaagcagcagctggcgttgctgatcgtttgtatgaggaaggcttgcacgtagcaactcaactggcatctccctgctggttgctttcgagacttcagatccagttacagagcatggtgactgcatgacaaacatctgcttaatactttcatacttactgaggcagtattttgtcaggagtccaaagaaagcatcaaatgatgcctgccagagagttcggtttgacactgtatagctggctgcagcatggtggtcagtcagcaactcggttgctcggtccagtactgatttaataataagagaagccccatcaccagcagagctagcaagaggacgcagaggtggctgctcagatgaacatacgacagcagcaaggcaagcactaagagcacctagttccatatggagcacacaagatgaaacagtctttgcaagagcaactgttgtttctgctgcactagaatctgatggtaaacccccaaacaagtacctcagatgtcgaaaaatagccatgcatattatacgggtcaactcgcttccaggggtaagaagtcgaaggtaccgtgacaaaagtttgcgtcctttaggaagagaaacaatccgaagaaaaacaagatcatccttaggggccaatccagatgaatggcttgatttgctcggaccaagagggtcaacaagctgaagtgatgtagctagaccttcaaggaggacctgccgtcttcgcctcagttggaaactgttatcttgtgcctggctagactgcaatagacggtcaatatcatccacctcaagaagtaggcagatggcatcttcaacagtgactctagctgccagcattggttctttctccaggggcctcagagaagacttctgatcatgagaaccatcaccagatgaaggaaggtcaacttcaagaagagaccgaggcctacgtatggaagagaaagaaaccctccctagagcatcaacctgaagatatgcatgatggtcactgctagatctggacttggaaggtaagtctttcattgatgttggggcaaaattggccttttgcctggaactggcacccttttttgctatgcaagcttgatggtaataatcaactacataaggatcactgctgtgacttgctgaatgctgcattcttaagatagattcgatctcttcagatgacatgtacttagacctgaattttagtccaccactatcaccattttgactaccagtatcagtcaatggttgagaaaaacgtgtgctgtgttttccccttcctgaccttgacctcttgtctctcaatgaaggaacattgctgatagaatcaaaccttcctgttaactctggggagtgatgttggtaaaataggtgaggtggtaaatttaggtaattctgatgggatggctggacttgaacttgtgccaatctctgctgctgttgagaaaatagcagtgatgacattgggctatttggaagtgatatttgtttctgtaacatgttcggaagtagattaaattgatccacagcatacgggttggcttggtttggccaatcattttgtattggattgcttccaggaagatttggagaaccaaaggacacgctccctccatatggtagtccatgagatagtccagccatatgatatgaagaacttggaagtgacatgcttggagaacccatttgtagaccagcaccaactgatggaatgctcccatgacgtgtaaggccttgagcagtataaggtgatctagcacctggaggtggaaaggatgtaaatggaggagattgtggtgcaatgataggttcacttgcgcggtgctgcaatggttgttgaggatatgaagatgttcggctcaatggtttggcatccccttgctgccccagagaacgtgactgtgaccaccatcttttactttcctgaagttcctcaccctctaatatgtcttgatctacccagttgggaaactcagcatcttcagcccaatcaacagttagagaacctgaaaaggtcatttgcatagttcagtaacaagttcagccttccagtgttcatttgactttgactacaccatagagtttcaatagcatggttgcttttcaacaaataaaggtgtaatagacacaagataacctttcttccagccgacattgacggcattaaaattttgaaaacatgtgtagtaatgcagaatggaagcatttcataaatgagattacatagagctttcaacaatgttgcatacaaaagctacactatagaacactcttaatgaaaacaattataattcataatgttttcttttcttttctacaacagactgttgacatgataaacaaatccacaactgtgtacagcaagtcaaaattataccaagaatgagttagaaatgaaatgcaaaatggttgacttcaacatattttaaaaatgaacaatcatgcacaaaagacatgcatattgtcaatattgtagtcaacatctttaaaaacaaaacatcattagtcattttccatcagaacataatgctgacttacttcctcttgagatggatcttctgtcaccaataacaccaggattccgtgttccactaatgcttcggttcaactgatgataaaaaaaatgtaaataaatcaatgtgcaacagcagaacaagcgcataaaagaaacaagaacagaagccaaggttaaaacaaaatatcatgcaattacggatccatatgcaagcaatatgtcaggtgtagataaaagttgaggcctcattactcattagtgattatcccaatcctcttgggactaagggatgggatatataacgtatccttagaaaaagagcagcagcctagttgatcactccgaaacaatttcagacattacagacttggtagttggtacctactcctagatcttctatgtgcaaatgggccttagatggggcaaaatacttacagatgcaaaacaggctaacgcaagaagaagctacattcagcctaaagaccactaatatgtatcatttatccagtacatgcttggggtagcaggcagcccaattgtagtggaaataatcagatagccagaactacaaatgaataaaatgggcacttaatgtttagattatttcagcttttggggggaggggtataagttatatgccccacaaagattgcacctttaggatttgcacctgcatgtatcgttgacatgtggcctgggggtgcaattttctggagaaatataattatttatcaatacaagaatgaagtatggaagagtcagagtaaccacttggccaacactggtaaggcataacagggccttaacatatctaatacttaaacggctactgcaaagtgaatccatccaagcgaagtcactttttttttaaataatgaaacatcaatttataacactggagtttgtgaaacaaacctttgcaaaagtgctcgcaagatcatcaatttctgacaagttactcagattatcaatctgcagaacatagtaaattgaatcagaataactccacaacactaaagacgatagtaaatccataatttatgatgagaagaagaaagggaaagcgctacaaaagtaaaattcatgtatggggtgcaaggctgttcaaacatgcagacatccctaactccttgtagagtcttaccttccacatgatacagttccaaatattgatggcaattgtaatgtaatattggccaattgtaatgaaatattagacgattttttgcccatcacaataaactccaagtggctatttagaaatgcacattaactaattaaattcaacccccctaaagttgtttcatccaaccagcataagtataaagttgttatacattacaattgctgaaaactagttgtgttaaccagcacaagcttaggattacatgatattgataataaaaaccaccatttgatccatagaagatccaaattacctcataacatttcaagcatgctcaatagtaagccctgtcaatacgatctatcaataatgcagtgaagattggagaatgcaaaagcaacttgaacattcaagaaatggcatacagccaacagtagaaacagtgaactctagcattctgtatcaaaataggttatatgttttttgtcccattctgctattgatctcaaaatgcagagatagttctcttctagctccagagcaagtgagcgttgggccaagtaacactaggaaaagtgtgccagaaaactaaccaaatcaaaaaatcataccgtggccacaagctatacagctatagcctgaaaggctaccaaaaagaactatgactggactgaaacaagccaataatagggttgtgacaaaacagccaaaaaggctaccttgaacatttatccgaaacaaaacatcatttgttctagtaattctcaacttaatacatttagcagcaagattcgtcttctatccccgtctcatggaattccacccttgcaatggaaccttttagctatcaaacaactgataaaaacaatgaccattcaacatgcatcaaggtaaaggatctgcctatgtttgagcataaaacttcccgccctccaacgctaatgatgtgaacctcaactccactgataagaccatataggcccacaaggatttattcttaattcctcctagaactaaacgtgctatcggaaaaggagataaaaggacggcatccgaaccaagaacacaaatcaatatcaagaggacgatagttcacaagaagcatggcagctgtggacatgatcaaatgaaggttccgggatccgcacctcttctccaacagaagagagccggtacagcccatcttctggcccgctgaatccaccgccattgccatcaccgccgccatcctccaagcaactgagctcgagtccctccagtggctccttcccgaagaaggcgtactgcccagcatcaaaattacctgcatcgagaagcgtcagatggcacggattaatattaatcggcgtaaaaaaaccataacttctaaccaaattacaagcgagaaccgacaacaacggcaagaaccacacgaaacgccaatcaggccaacaaaagaacatcatttttttttctagttgagaactcaaagagcccgaattcgaacaattctccatcgatactcccaaagattcgcatcagagacgcaacagattaacagtaaggcgccgacttctgcaccaaatcagaccaaaacaacagcaactactggaaacaaccagctcagcggcaaaagccggagcggagaccagatcaaacagcgcgtgaaacccaccggaaggtgggttaccgaattgccaaattcagccgcgagaagcctcacctgcggcggcgggggaggaagaagacgcgccgccgcctccgccacccgactcgacaccccgcatctccgcaagaaccctagcagcagcggcggcggcggcagctgtagcagcaagcggcgtcgcgcatctaggcgagggattcgcgcgatttctccacggctttggatctgagagagctgtgtgcgaggaggaaaaggagaggaaggatagctcggcctcactgcggcttactacttcttccctcttttctctctcctgccttaaataaaaatgatttgggatatgcaaccagaggagaatttatgaatcccaaaaaataagaataagattaaagaaaaaacactggtcttttttttctctttctttaagcagaagacttgcagtagaaaatactagggtttcccttggaaggcacacaaatattaatccagcaagggcaaggtaagaggaggaagatgagaggaaatagaggggattagaagtggtagatgagagatgctaaagagttaggtggtgtttgaatctagtgacttaattgtccctttatttagacactaatttagagtattaaatatagactacttataaaactaattacgtaaataaaagctaattcgcgagacaaattttttaagtctaattaatccacaattagagaatgtttactgtagcatcacatatgctaattatggattaattaggttcaatagattcgtctcacgaattagtccaagattatgaatgggttttattaatagtttatgtttaatatttataattaatgtctaaacatccgatgtgatagtgacttaaaagttttagtctcatctaaacagggtcttaaggacgagaggagaagactttagcttggtttgtttgttactctaccaatatttatttcctttgtgtttgcctttttatctcctttctctctttctatgttgcttttttaggcctgatgatttaaaatttgttctggtgttacaattaatccttaccttgtttctctctcttctatgattatctgtcacaatgatgatggtttagggtggatttggcactcagttagcaattggttgtgatcaataggggaattattaactgccagtggtggtaggtttcaggtactctaggaaatttgagaggaggaccatatgtatgtaatctgttgtaactaagtttcaaatatttacatagataaaacatgaagcatcaagcatataaacctctaatacatttaaattttaatacatgtagatagcatgtgtaaaattcaacgatctttagtatagtctgttttagaaataatgtatcgtatcgtttcaatagaattaataaatcttaggaaactatagctattgttaaagctatatgtctgctaaaattttagcatatcattttattaaaaactaaaaaaatatttatgtgacaggtctaggctggcctgtcaggtagcatacatcacttgcataagtttaggattatgtgtcggagaagaacaatacatgctccgttcctggcaaaattaactttcagagatgaatttggatatatgcttccctagaaattaatttattttaaaactgagagatcagttaaaattatatgtatattaataaaattgtctaatattgttgcagattttttttgactagtcacgggggtggagagctttctcacctgaattttataaataaaagaggtgaagatacaatatcagtttgataccaactgcacagtttgcatgtaaattgcgagacgaatctgttgagcctaaattgcgccatgatttgacaatgtgatgctacaataaatatttgctaatgatagattaattaaacttaataatttcgtctcgtagtttacatacgaaatctataatttgttttgttattagtctatgtttaatacttcaaatgtacgtccgtatacttaaaaaaaattggccaagcccaaaggatatttttgcagatttataaaatgtgtagttaaaattgtagcaaatgcatgatttcatgcaatgtattcgtccgcgtatatagtgtcaaaatgcagctacaacaactgagcagaacatcgttttccacagaggacgcaattggcgcgcttcgttcactgtttcatcggtacactttcgcaacttgcaaccgatctgggctccacggtcccgtgtgggtttgacgttgtgtagtcgtgagcatctcgcaccaaacatcatacgctaccagcaaaccagtcgagcaagcagccaagcacagtgaccatttcacttgttcactgcttttttccccccttttcgtttccacttaaaataaacatgccactggccttccaattgtttagccttctcttcttcgtcttctttttgttaacctcaaaagcttccagctaaaacgacaactagaagaagctgtcgccaagtgaagagccggtaccaaacatgatccttcaaaaggagcacgcattttctttttttaataaaggatcaaagctaagatgtgcggatagaagtattcgatcctggtgctttcgttttggacggcactttgcaagagcacttttgttttttgttacgtttctttttcagcttccatgggagatgatagagttattggtgagcggaatattctttttcattgagatggttgggaggaatatgttccaaggagcttggttaatcatcagaggctctggattttagtagaatactcctacatgaaacctcgggctggccaggaatctgtgggatcaataagcgagtgtgatgtgagcttgagctactaacgagtcaacagttgccttctagcagtacactattaatgttgcctttctctagctacacaagtaggattacaaagtgatggtaaaagtgcatggtactgttactgtatctcgaagttacatcaatcatcagagaagatgatgcttagagtgtgtttagtttacgttaaaattgaaaatttaattgaaattggaacagtatgatggaaaagttaaaaatttatgtgtgtagaaaagtttggatgtgatggaaaagttgaaagtttgaaaaaacagtttggaactaaactcggccttacatttaatacgccaagaggattactactttcgctagtttgtcttaagatttatagcaacatgtaatgtactattagaagctagctagtaaggatcgtgctacacgtgacaattccctttgaagtgctaatctgaaatcccttcttcataaatttaattaatatttgacttcaagagaaaaaaaagtttagttaaacccccgaaaaatctcccccagaataataatggcgcgataccttttctacaagtatcgcaacgatttacgcagaattctgtaaatcttttgctacccgatacatacaccaaccaattattcagtgccagcttcagacaaaatatcagcggatgtaaccatattcttatcgggcttgacaccgaccggatcggaagatcaattctaaacccggatacgtcaacgtagaaacacacaagcaggacaccatttttgtgtgcgactctccaaagatttttttttaatcgccgctttcgcttttggacgggtcactactcacgcaccaacgacgacaccgctccacgtacagtcaaaagccggtggacacgtagcgctgcgctagcgacgccgctagctccttcccgcgtccgcgtgcagtgcaggacgatctgcttctgctgcagggtgatctgatctccccgcgtgcttatccgcgggcgtggccggcaaaaaaaacgccgagacgaacgcggctgacgagcgcacgcgcgggtggtggttgcggttccttctcgttttggatcaaaactccatcccccccgtctcgtcggtcctgtctctccgctgtctcggcggcgagagtagtacgatatccggcggttcagccgtgtcgttttcgacaaggctcggctctcatggttgcgtttccttctcattttggacaacacggtgccgcacgagctcgatggcaggcagccaggcaggcagttagtagacgataccccgtctctctctcgccggtggctctgctctgtagcaccgagccaccgacgatgatccggcggtcaggccatcgcgttttcggtgtctatatgtcagtttcatggtccagctgtgattaggaataactggacgaagccggtggatcaacggtgaaagtaagcacgaaaaagacggtcgaattgaactcagagtaaaaattacctgagtcaacgcacgggtgacacaaccgagaaaattctctatgacgagaagatagtactccacaggagtaccgcctgtaccagggctacttagatggccagctaacctgacggttacgtgcgaagtggctgtgatcacacgcgaattaactggagcagagtaggacatgtgtgattgggcggctaaagccggccaaagaccggtgctaactgctcattatagtcggtataatcgttggggttagttggatctcccgcggtgcacggcacacgcggcctattatactaatccaccgtcccaccaggtgtcgcttgacacataagcaaacgcggcggaaaaggagaccggccctcttcggttaggctagcggcggcctaattaacgtactccgcgtagtagtagcagtagcgctcgtcgcgtcacgcacggcacggcgtgcggcccccccatgccatgcgctgctccgcgggacgtgctggtgtttgacgtccagccagccaggtgctggatcggatcgagcgggacgtgccgtcggcgaagcgcgcggggcggcgcgtcccctggccagcgcacgtgaggcgtgcgagctcggcgcgggggagacggacggcaagacgatctcacagggggggacgcgtgcgcgctggccccgcccgcgcgcggaggcgaggcgccgggggcgtgggcacgtagtaggctgcacgcgtgggcactggccgaaacggaactcgcgcaccgtgcccaccacgggtagtacgcggccgccacaccgttcgggcgcgagcacgtgggcgggggtgggacggtcgctgaccggtgtttctctactcctggctcggcctctgggcggtttttcaatcggcaacaacggtgagtgattcggtgggtaggtaggttggtggtgagagcggcacgacgacatgggccaccctggtctgcgcgtatgttcggttcagggtgggccggcatggacgagtcgtcgtaggatgcgtggatgaccggtgatattggtagcagtagtaacctcgcgtcatgtaacccattaggctagtctgtcgatctcttgaatgtcgcggttcgccccgaaccacgcaattatacagccttccaaggagtgacgccgccgtcggcgatcgaggtctctcgcaggacactactgaaacaagctcgttacagaaaaagaaaaaaacaaccattctacttaattgaaatataattggcagttctcctgccggtttagttaaaaaaaaacaagctcgttactcaacttgacaagttcctttgtgtattgtctacaaaaggatggcttatacttactccgtccttaaaaaacaactcagaacagaatgtaacgttttctattacaataaatctaaacatgtgtactataaaacgttacatcgatagagtattttatactactactttgtaaatctcctcgccaaaggaaaaaggaaagtaagacgctcatttggctgtaggagtgtaggtgaaccgatcaaagtatcacacagttcgagaaatgatgggagcaccttcaaattgtcttatcctaaagaaatcgatgcaaatatattgttttatgaatcattgatcgagatccgaacacaatacaaagcaacggattgttgttatagtaatatgggctgttgagactcaaatttgtaaagatgttgccgttaaaatcacttgccttcataacttgggagtttttttagcctataaattgtgagttacatgacaagttacacgcccagcgcactgggcaaacacttctcttgattctttggtaaatctacctctacagtcggaaacaaaatgagaacgtacgaaggtgatgtcacaaaaatttgaaccaccttcctgcaaaaatcatttgcacagaaaacctcgcccaacccagcgaccacaggtccacaggtgtgaagtaaacccccgagtcagtgtacacttctcaaaaaacagtacgccatgcatgcatgctcttggttcaccaagcacattgatcttggtacaaccaagtttcacttgattggggctacttgaaagaatactcacctataataccagggcatatcagacactcgtggcaatcttagttcacgtgaagaccaaataagaatactcgactataataccagggcatatcagacactcatggcaatgttagttcacgtgaagaccaaataagtccggttaactgaatgactgacaatacttgaactccttgcttcgacacactctgatgttactcagcaatttgaaatccagctgtgtaaacatgatctttccagctgcccagttctgcttgtatatcagctgaaatggttgtgcaaggaacacaattctttccagcatttcacggttctgcatttgaatcttcacacatcaaatcaagaacattggcctcttctgcagaaacattccagcaacaggacatctagtctgcagaacaatccagtcttcaaagcaggtgagcattcaaagcgaatgagcattctcctctatatgggttatcttaagtgtgtcttgttatatcaagatcataccagcaaggaacacccagaaaaccactaggaatttcttcgccagtccataaaaggccaaatcaagaggtaactccaacacagtggttaaaactgactgcctgaattcaccaatatatatgaagtcaactaaagaacgaacaagctatagattgatgctccttgcttaactgacaaaaccattcagagatctgtcttccttgcaaaacatatagatctggtaattgcccagaatgtgcaactattttatcgaatgccaatgggaggaggctaagcaatgccccaatagcagaaagctgaacaggcatgttccttgagtttgaaacttttgttctcattagcactgataagtgattcctcaggtcactaactgctctttgctcataaccaacatcgtcaacaaagaacctataaaagacaaatgagttgtcaacaaagtttagatcatgtgtattaggagcaaattgaccaatagaaagtataatagttatactaggggacaggatacatatatcaaattagaacatcacattagaaccgcacgctcctgtgctagtaaaagagattattgagaacagagcgggtagaagagacgcaatagacaggaataatactggtaatgctaactaccaaattaccagcttagctcttgtgagttctcagaatatgtttttctattaaaaatccttgtgcacacaacaacccaaacagggtataacatatgcacctggagaattctagaatgaagaattgtgcggtaaaccatagcagaagaacaatgaaaaaagagaaaggaagaaatgcttcaatataaaaatgtaatacattaataattgttccttgaaagtatattgaagaaatgagtgacaagtcgggcaaaccttccaagttggctgagaagtattaagagagcagctgaatactcctcacatgtgcatgactccaaaatcttcaggaggcggacaacaacattattgtatgtccattcgcagctctgaaaatgaacacaacagaatcagccaacactggaatagagcatgcttaaaattgaacaataaattcttgaatgggaatagcagacaatgttaataacatgactacattttaggtaagtaatgtcaaataagaaaatttcatggccagaaggaacaatattaagttcttttctgattctggattgacaatagaacagaggcaagaattatgctaactttctattccaacatttcaaatctgttaaaagttaaaactaagggcttaataactgtaaatataaaccctgaaaatgtcttgtgtacatcaaattatgcctgctgatcaatatggctaacatattttgataatttgaaaagaaatatcaaggcaagctaaaccaatataagtatcacaaaaatgcacataccatgtaattcccgaacaactccaacaatgaagttatctccgcaaaatagcataagtcccttcctgcagtatggttatgaccatcctcagaaagttttacttgcttggagatatagcaaggttcaccacagttgacctccaatccacttgatcccaaatgtggactgcatcttgcaattattttatttgtgttagaacaactgttccattgctgagaacacaaatgcagctcatccaacagagaagagataaaaccgtcaactgaaactgaatccaccacatcaaataggcaatgtgcacaagttggaaaaacggctggcctgtttgactgaacatatgatgacaaaaggcacaaagaattgttttttgcctcaagaagcaggacaaccaaccgtatagttgtcatgagaaagttgctactctttgagagaaacttgtcaccacacatggaaccaatgatatgaatagccagcagagtccacgaaagattacttttacccatcagaagaactttgtatgaaacctctaaaacaatgtccattctctccactttaacacatatcgaagccaacaaagcgcaagcagagatgaattgatctatggtggcaggttcagtagacacttgtataccagtctcatcatccaagagactgtatctgtccacgtcagaaatcacatgccccgttttattacagaccacaacttctcttttcacaagaaaatcctcaattaaagagacaggaacatccagctgattgcttttcagaaacgcccatcttgtttccatgtaagatttcactgcaaggaagataatgccttgtaattataaatgaggagcgcaactatataagaatatattcctaaaaaaactatataagaatatgattgacaaatgagtatcccagttcaacaaagattgcacaactgagaacttatcagtaaaatgagtgaagcatacaagtagatttgatgtttaaaatgagaaatggaaaggtcctccaaagtccatttggcactcttgtatattatggtaattatgtttggtataactattttctgatgctttggtgtttggctagctaactttttctaaagcaagttcaagagatttgaaggaatagaatgtatccacagatttggctttggccaggggtgtgtgaacatcgatgatgactgatgaacatgcatgccataaccatgaggtatagacattattttggttagctggctcgatttgagtttcatcactagactctctagcctatcccaacttccttgggactaaagattgttgtcatgttttgattgcataattttctacttgcaatcgtaggggaatatcaattgtacaacaaaaggaagcagctacagcatatgtttttcccaatagaacaatttaaaagtgtaaacctgaattcgtttgtcagccaatctctactattataaaaattgaagatgtttttgccggtattttggtacgtcatccgtgtatgagtcggtttttaagttcgtttgcttttagaaatacatatccgtatttgagtcagtttttaagatcgttcacttttggtaatacagaaggaatcatataagaaatctgtttaaaaataactcgcatgctaacttgagccgatcggactcctaactgcagctcatgattttctaaaaatatatatatccaagcgaactcccacagtgaatttcatcttaactaaatcatataacaataataagatttaaatagacttcacccgttgcaacgcacgggcattttttctagtaaaagaaaaaggagacaagaaatgagccacgaatatatgggaaaaagtccgtcagttgtcttaccagtcaaggcgaaaactgatgaagcgaaatttccatctaaaacaggatctgcagtgatgactctacaaatatcccacaacagtaaggagatgatgagtgctaccttctccctgcaaaacaaaaacaattagatacgatcacaagtgctaatatgaacaaaatgctggaaactgctaatagagaacaggagttaaatgaaatgggaacaaacttactctaaaagtagcaatggttcagatgatattctttcaaataatggagtatcaacaaaagcttcctcagaagtttctctggcttcagcaatcagggtctcccaatatcgaaacattcttattatgttcctttttttcatgcttacaagaccaacaaaacacataggagatcttttgtctccatgacgaagcccaataatactatttaagttcaaatcggttaacccggctgcttttgttttacatccaccaacaatattctgctgtccagaatctgatatggatgagctatgtatctgatttgagctgttttcattagatgcctccttgtgcgaatgctgtaaatccaaagtagaatttggatggctattactagtattgctaggcacatcagtaggagaagctacaacattttgggcctgatcctcatgcaaaatgcagctcaaagagcgcttagttggcacattatccaacttggtgctacaagaaatattgactactgaattagatttatcattatcattcgcacgcagttgcttaacattatcatgacaatctattctattatgtccaagcttgccagtgctctgaatcaacttctgaattgcaggcccctcgactcctaacaaattgggcctcatctccaaatctgtggcattggctccagaggaaggacaatctctctcatattcaaaagcattgggcatcatatcagacaaatggtgggatttttcatgggtaggcgctttagttgcctgtggtagaattatgggcagatctggtgaaagagttctctgcattgcccttctgtatctttcctcatctgcatcattgtccaaatcgagtaatttcaagcagtcccccttgatcatttcctcaaaagagagtagcgaaggaaatttgctaactgcataagcatttcctgcttcagcaaaaggaactttagctggaacactcaagaaaggagttttaccagcaataacatagcatttcctcctacgagtttgcacgtcatcttcattcacaacgggcatgatgctgcttccttgctgcacacgagaacgatcatcactgcataaaatgccatttgaagtggaatcatgggccttcatttccagatgcaaccgcttatgtttagatgaaagacaatcagttgactttagagacattttggtcctttttctcttcttatctcctttgggcattttatctgtaacttctgtagcaccaaacatggatgattgcagtgccttctgttgaaagggatcaccagaaactacaggcaaagctctatcactgggtttccttgtatcattaccatctttactggttaactcgggaaccattgagctttgttttcttctgatatctgttgatgcagggactaacaacctatccttaccctgtgagtccattaactttttatcagatatggatgtgggacatgaagatctgtgtggactttttgacttcgttctgagagagctaccaaaaggaggctctagttcagaactagtacctgagattggtcttgtgcagctttctctgggtaactgatatgaagtgtagtctcttggtacagatgaactgaaaggaactattccagacggcaacccaaaatatggggctgaattatgtggaagtagattttgttcaaagttatgtatctccggatgtcgcttcaactgccaagatgataacattgaaacacattaatattaagatgcatatatagtagaataacaggcctaaattaacacatctaaagcatgtgtagtatagcaattagatttacacattacttaatattgttctggacacatcaattcgtgcacaattctctactactacctccgtcccaaaatgtagctatttctagcacagtactttgtcccaaaatgaagctatttttctacctaccttctcctctcaaccaatcacaaccattctttttcacctactttctcttttcaaccaatcacacaccttcttcaatcattctcacctactttcttaatacccgtgccaacctcaaaaatgcttacattttgggatggaggaagtacttaagaggagctggtaatgatgatggtatgtttgatgctcatcatctgtggatgaatctatgtagacatgggtgcgtcatttctgggatttttttaaagaaaaagtaaatgtattgtgtaacatgtcaatatctcaaattgacattcttttttttagttgcagatctgaaaataattatattgttatttttaggctataatatatttgaaaaccaatggaccaccccagcactgtgctagatagttgcctgggtaactaaactgaagcatatggtaaggagttaggagtgagtcagtgaatcctcttgtctaacaaaagtgtctgccgaatgctttatattttctaaacttcactatgactgttaaattgccaaactagtgaatggtataaaagaaaatgacataatacttgatggactcgatgtcataatcactagcataaaatgaaaacatataatgcgttaaaatgtcaatatagaatggcaaattaaacttgtagattgtgcagtgtctaaatgactgaagtttgtagacagagggtaatgcatttactctcagcactaaaaagtcccacttcttgccactccacttcgaataaatgaagattgagaaaggaatttcttaattttacatttttctgcgcatcctaaccaaacaaactctgtgatgcagacagatttgcaagatatacacaggtggcttaagataaatgatttgcctctactaatatgctaagattattgaccaagatagtttcgagcacattctagttcctactaaagttaccttcataagtacagttgatgatagtataagtagcagatacagacctcggttaagacatgaataccttcaacaccatcagcagcaagatgttcgtcaagcatattaaatcggctcagcagctggatccaatcctgtttaaggcgctgaagctctcttcttaccagcgcattttttgctttatctagctttgacacatttttcgcatgctttaattgttgtttcttcagcttaagtttctctttgagaagccttatatttgcaccttccgtaaccacatcaatgcgttgctgtccatgtttgccaaaagaagttgtatctttaactgcacataatttttcaagcttcctctgcaaattttcacttcgttctttctcttcttccagcttctgggatagatggtctatatggtttttctgatccactgcattctttctttcaacctcaattctaactcgtaaatcttcattcaacttcttctgctcctctaactttgcaaataaacactcagcacgactcttctcttctgtcaactttttcctctcggtttcaatcagatttttgttcttttccgctaacgacttctctgagttggcacatttcttttctctggcagctttctgcttctcttcttcagcccttttatttgcttcctctgttttcttcacctgagcaaccagcctttctctggcttcacttgcttcactcctcaatttttcacacgatgccctcagaccattggctgcttttctttctgtatcagaaagccgtttatactcttcagacttgtgtgtttccatattcagtaacctttgcagttctaaaaccttgcccttttcttcttcggcatttttcttctcggaattactcttcttcttttcttctactaaaacctgtttgagtcttctaatttcttcctccaactcagtgatgcgtataagttcattaccatctttgcaaacactttgtgattgttgcaaagcagagttctgtgccttcaattcaattatctctttctctagcatatctctggcatcagactcagagatcctagctgcttctgccgaatcacctcggagacgctcctcattgcacactgttcatcaacaaggtagagataagaaaacttattaatgcatgataaacataccagaagtttcaagacgcagatgtaaaatcatgaccaaaattccatatgcttcaatagtgacaggcttgcggcagtcttcaagttcttttagtcatgcatgaaatgtcacgataatatgcataagaagtgctacagagaaaataaacatactttcaaaggatcatcctctctgcgttaggcaccttctgttaaattcctgctagcatgctactaacatgctattaaattagaattcagagcattagatacttcagagaaaagtattttttttaataaggcaaatctacaatcctgaataagcataccatattatgctgtcgccaaaatattcatactgctgaattcatcccggcttaaatatgcaaaactgtgtttcaatatttgcgctgcccatttggtcgcagaccactccaggtgattttttttgttccaattagaatcacgatttcacaatgcaggagaaaccaacaaaagcagtgtggtagaaacaggtaggggaactctctagatgggagattaggtacctctgctgagctcggagcgctccttcagcagcttgtcattctcgccctgcaggagcttcaaaccctcgcgcagcgccgcgcggctcgcctccgacttctggtacttcctccagagctgcggggaaaagaaaaggcaatccaaatgcgcacgtcagatgccgtcccgccaaaaaggagacagtagagagattacaacgaattcgaggggctcgagcaggagggaccgggttaccttggcgcagcacgggttggggccacctatggcggcggccggggctgcagcgggcgcgggctcctgcgaggcgtcgggctccgacggctcggccgccatggcggcgagatttcggagggggagggggaggggaggaggggtttagggtttgtgtggtgcggtgtgatggggtgggctccgcctgccagtttccggagtgggggaaggcggtgcggtggtggtgactggtgggtgagaggagggaggaagcgagcagctgctttggctcgtgcgcggcacgtggccaccggggggggggggggggggggaaanncccnangcngttgagggcctgaaattttttattttttagatttttttaaaaatatttacagaaataatctatcggctaaaaaaaatttaaaaaaaactctgccgccccagtggtgggccgcaagctggcgaggcagacggcgggtcgaccgcgccgtctaccaccgtcggccaaaattgcatttagccccttgccgtaattttggcaaggggctaaatgcaattttggcagcccataaagagcttggggctcgtactttttgcatttgggccccttgccgccccactagagggtggcaagggacccagatgcaaaaagtaccgccaaatgatttttctatattatgttaataataattaaagaagtatttattagtaaaacttgttaatattgttataaaaatgtattgaagttggttgtttcgcaattttatatgttaagtaaggtattattttgtaacttattcgacgtattagtactcggagaattgatataggcctatcgcagtctcggtcgtagaaacattatatggacttaaacaaggagaattatgtaacatgaagaaataatagtacaatttgaacatgatacaactatttccattgcggttacatagatgatattagattcaaactaggagggaggtagtgcaatagttgaacataacgacgatgtagtaatgggacaaggaagcatgacagtagaaatttcaatatgccaagttgtccaataaaagctaacccctacgtgaggatccctcttctctctcaaaccgcgctttagtaaccctgtattgctctggtagttcaagctgcacaacacggctaggtggagttagaacccttctggtgtctatccattctctgtattgacatctccttggtggttcctgggaggaaagaatagatgtgaagcgagcaaagttagtaaatgttgtgagaaaataaggattcatgtaatcaaaatattcttaccatgaaatcgtcgtcaagaatatttggacaaacaaataaccttcgacccaatgttgtaggctttatggaacgaagaacctgacaacgatcaccacacttgcatcttagacgggcttcccatggagggagtgccatagttagcactcgccagtcgcactgttgttcacgacattgtcgttcgtaagccgcttttctctgcaagtattgcacaatacttttggatgcgaaataccatcgaccttcttgtaaacaagtggttaggttgagaacgggattttctgtatcgacccactcgatgtatgcgcaagccgtagtgcgggtctgccgaatagagtagtgttacgaagaataaaatgattgcccatacggaatgaataagcatatgcagataataaaatacctcacggtcatagttagggcacctaaaaaagcgccttcctcgaatatcaggattccttgaagccattagttggcatcgattaccgcataggcagagaggacgctgacactaaggtggtagtaggtatacataagaatcgctacgctagttcggattctcaacgcccaggcgtctagccattgacgaaagccggtaggatttgtaatgaagcaagtggggaagagagtactgaatgtgactgagttctgaaagattgtgaggcctcgctcgttaaggcaacttatataggcaccaaaaatcgagtgatatccctgacatttgaatgtggcggggcatggtgggtacgcctgattggcgccgaaagttacattggtcgtatgcggcaaatggcgggcaaatactcgtatcgcacgcgaataaaggaggctgcatcggtgcggcagaaagtagtcatgcatgcgccgaaaggtatcgtgcatgcgccgaaaggtgtcgtgcacatataacaacaacgtattcattacacaagcatacagtactagcatgtgaagcaaataaacaaagagaagtctgctctactggccctgccccgcgccgcgttcacgcttggtcctccgggcctgtgctcacacgtggtcctgggagtaggtgaaatgatccggtggcacagcacgggtagcacgagtgtctggcggtggagtggcctgcgcctggtcctgcgtctgcaccggcggtgcgcctcccagctgtgaggggccgatgacgtcctctgtcgagcctgaagcgaagtcgaagtcagtgatgtcgaagagtaaggcggaagccaccaagtggtccgacgaggtcccaacatggtccaatggtggaccctgactcgacgtgccggctgcctgtgacgaagtcccggtgtactgctcgacttgcaagcgttcgataaaatgttaggcaccttaccttacgactaaatatgtagtacgcttgtcatctcggtacaaaaacactcacggtgaactgaagcagccacctcttcgtaggtccggtgttgcggtggtgtgccaacggctggagcgggagatgtggtgcgcgctgtactggtgcgaaacatgctgttagatcgtccttccagtccacacccgtggtcactggcccaacagcgtctcccgcgagcggtagccccaacaagtacgatacgtcctgtaggataggggctacttcaccgcacggcaagtgaaaagtgtgcgtctctggcctccatcggtcgaccaaagctgctaggagggaccggtccacattccagcgtctggccgggtccgcgtggccggcgacaacctccaccaaccgacacattggtaggaggccggcctcacgcaacctgcaagaacaaattaatatgtcattataaaaattattacagcgcaactaatttatagtaatacaccgttcgtacctctcgacaaaggagtcgtgaaccgtaagtagcttaccgcacgtccgtgcccggaatgtcccaagctgagccccctgcaccgcaataaggtgagacaggtgtcggtgatctatcgccgggtccaacaactcaggtgtatcctgacgtgccatctctgaaaaatatagtgtttcatgttagaacaattcaaaaggtagtaatgtagaacaaaagataacttgtaaaattatgaaatagtaataaaatcataagaattattatgtacaacaagagtacaggctatttaaatatagcaaacgttactaagggtacataacgatgacgtgcaatttaacatatatgtagagttcgataatataacataacataacataacattacatgccaagtccgacattacatcagcatacctaaagacattaggtgcctaagtctgacgttacatcacgagacctaaagacatgacatgccgaagtctgacattacacgacgaaacataaacacatcgatgataagttcgaaacaaattacaagcaaagccacatgccaacatagaacacaagaactacaccacgtagccagatgtggcacgacgacgcctaggacgtggtcgagttgaggtagtgccttcacccgtagggcgagctccatctgctgcttatcctgatagtcctgcctccgccgcacttggtttctccttgtctttaggacacactacgtcagaactgacattctgtaacactattttgtaacacattcggagatgtgttactggggaatgctatagcaacgaaaccttatgtgttgaaaaaaaggttgtaacacatttccaatatgttacagttggtatacatatagtaacaccaattcattgttactaccacctatagtaactctgtgttgcgctatgtaattaaaacagatttagttttggataatatattggtgccttggtttattataggtttatttaacatagtgatgtaacattatctaatcacataaaaagtactagggttggataatatattggtgccatgggtttatttaacatagtgatttaacattatctaatcgcataaaaagtacttgggttgctttctaaaacaactaacgtgcctaacagaggagttgaactcctaacctcctgtgtaaatacacaagaatcgcaccagactagccaactgggcaagcaaacatttgtgtcattagttgtaaattattgtacttgtttttttttgcattaatcaaaatttaagaaatttaattttatacacacatgcgtacactttatttttaggaattgtggtttgatcaatgaaccaagcattcattgggttgaccaatgcccattttatatataaaaaaaggatggctggactcaagttataaaagtaccacaagcacagtgagaaagcatgcagaatttatagatgaggctgtgggcttggttcataactccttggatttattttttaatttagcgagtgagtctgatccatgacatgtgtataaaaatatttaatcacaaaattgctacaatgtagctgaggtatttgcacggaatctttttgtcttacatcatgaacttagaaaaaaaatggaagaataatcatttcggcaatatgaaagaataatcatttcagtaatatggtaaaaaacaagatgctagagagatcacataacccagacatgattacaggactaatcaatatagcaatagaaaaggaaaagctcacacgaacaaatttaaaataatctatacagatagactacattgggaattattattgactactgaagactggcctaaactcatgtttgcttggactagaactgccatatgttgcttagtgacagctgcttgttcactttcgcttgccgaaagaaacagtaacaccccgatgccacctggccatgtaggaaaagaaaccaagttcatcagcaaagacatgacatttcttttgttgttaaagaagacatggagatagcgagctgatcaatagaatctagaaagacagataccttgccaatgtaactgcgtctgcatcaaaataatggacctgaaactaaacaatatagagcaaagaatggacatgaacatgcatgaacatgttttaatcaatcagaaataaatataaacacaacgattattgctatcttttaatagaaagaatagccaaggtaaccacaaattattcatccactacgcttgtaatcatatttctcacaagaacataatgtaagatcatacttaaccagtggacctaatagttgtaccgtacaccaaaaaggcagaaaagttaaattaaaagaccataaatattgttggatttagatgcattcagttggatagagttttcgatagttctaaaactggaagcacctttgctaacaaaaataaatccatcaaaaggttttagatcaggtaattgcatataccttgaagtaatgaaataaatcatgaaagagtaactattttcctctgttatccttcattattcaaagcattattatcaacatctactgttgttccttcaacatctgttctaacccattgcttgtaattgtttgcattactggacattccaccaaggtgtgaaacatggaatggctcaatttctatgtcacctgcccattcatcctcaccaatgtcatatatatctctaggtttgttcttccttaccacagaccactcaggattcattggatcatcaacataataaacttgatctgcttgattggggaaaataaaaggctcatgctcaactttttctccagtatgtatgagatgtgagaagttaactagtgtgtaaccatacttatcttttttaactccttttccagaaacaacatcaacccattcacatttaaacagtactactgaaaattgtccagagtaatttagctcaataatatcgatgactctaccatagtatgttagatcacccaatattggatttgtgtcacttgatttagtataactggatgtttttgcacttaggacaactccgctattctgtgtcactccatccaaatgtttaggcctaaaccggaagccacgggtattgaaagcacgatatctttttgctggaccaatcggaccacgagccagccatctatgatcattcttgacactgcatatgccatttttcctctctagatccattatctgtgtacataggattacttagtcatgattttatttgttgatctaaatgataataacacgaaacttacatgagctctgaaccattcatggaatttttcattttggatacgctcgataatctttggggtgatgcggccttgccgatatgttcttctaatctcatcagcatgagttctgtaaaaggaaaaagtgtcatgaagtatgctttgaagaaaatgattagtgatgaagtgtatgatcttgagctaataccgaaggtatgggttgacatctggacagttgaagagcacatatctatgtgcttgcattttagtcaagcccctaataacataacttctcggcttgccaagtggttttccaacatgaggaaaaagatatggtgtgcattcatcatctgaacatgcaactgactcatcattatcatcatttcgtgtaggctggttatgctttgtctcaaaaccttcaagatatcttgaacaaaatgttatacactcatctgccaaatatgcttctgcaagacatccttcaggatgtgccttattacgcacatatgactttaatacactcaaatacctacataaataaagagaaagattaaaaatgttaaaaattctatactagataacaaatgaaattatatttgtgagagaaatgtacctttccacaaaatacatatatcggtaacacacaggacctcctaattttgcttcagtggctaaatgaacaaccaagtgcaccataatggtaaaaaaacctggtggaaatatcatctccaaacgacataatgtcattttaatttgttcctctaacttgtcaagcacatcaatgtacaggacttttgaactcagttctctaaaatatccacatagatcaaataagacaaaagtgacattgtaaggaagcacaccccgcaaagcaactgggagaagttcttgcattagaatatgacagtcatgacttttaagacctgaaattttcccttgactaacatttatacattttgagatgttttctgcatatccatctggaaccttaatatcatggagaactttgcaaaattgatgtttctcccgtttagacattgtataggaagcaggaggcaaataatacttattattagcttttcttatgggatgcaaatctggccttatattcatttcttgtaggtccaagcgtgcttgtaaattatcctttgatttgccttccagtcctaacaatgtcccatatatgttatcacaaacattcttctcaatatgcattacatcaagattatgatggagtacattcaagtcccagtaaggcaacgaaaataagccactacggcatttccatgtttttgacttctcaaaatcattaattttctctatcttttgtaaaactgatgtttcagaataagcaagaggttctactctatgttcttcagttccatcaaaagaattttcattatatcgtaattcatggtccagaggaagaaatcgacgatgtcccatgaaacaatacttgtgtccatgtttcaaacgtttagagcacgtttcttcacgacacataatacaagcaaattcaccattgacactatatcccgcaaagatcccaatcccaggatagtcactaatagtgaacagtactgtagcacgaagctgaaacatctcattttgagatgcatcatatgtaggagttccaacctcaaataaatcaaataactcttcataaactggttccataaataaatgaaaatcctttccagggtaagatggaccaggaattattagtgcaagcataatagaagatgctttcatgcataaccatggaggaaggttatatggaatcaagacaactggccaacaactataagttgaactcaatgtcccaaaaggattaaatccatcactagccattgcaaacctgatgtttcgagaatccgatgcaaactggggattcctagagtcaatggacttccaagcctctgagtcagctggatgacgcaacacaccatcctttgtacgaccctcatcatgccatcttaatgctatagctgtttccttgtgcataaataacctcttaagccttggcttaattgggaagtaccttaacactttccttggggttgcccttctcctttccttctttgttaaagtagttttatcttctttgtttttccaccttgaagtaccacattttgaacaaaagtcatcgtttgccttagctttcctataaagctggcagttatttggacaaacatgaattttgacataattaagtccaagctttcctattatcttcttagcttcagcaaatgttccaggtaaattcttaccatttggaattgcttgttgcaagattgctagcaaatcatttaatgatttattatttcacttgttaactgattttatgtgaaacaagagaactagaaatgacagccttgtaagttcacacccttcccacaaagggtcatgagcatctcggagcaagtcatagaatgcttttgtttcatggtctggcccactgtttaaagaattttgtacatcatattcattcactggagggtcattgtttgtgttcccaaaagcatcttgcactagttggcgcatgttaccatccattcctctactttgtgactctgttcccctactgttggcagagatgaatgatgtggtttcaccatgacaaccccaaggactataccgaagtaacattccatgacatactaaatgatcatacacttcatcccgcattaataaccacttgttgacacactccttacatggacatcggatcttatcttcaagactcttttccctatatgcaaacagaagaaaaccatctattccagcaaggtactcatcacttggtctagggaaaagcaataacttcttaatattattcaaatccatcaattttctgtgttaaaataagaaatatagttaatacatgagtgttcctaatttgacaacaaccactaaatatttttgattctataattatgccttcaagccaaaagaaatttgtctaccgaacatgtgtaggtgaggttaactgtacctggaagcttaggattaggatccagtagatacagcgtcgatgcagccctgatgcttgcttaattgaaccaaacgaaaacgaccatcttatctactggctagatcagaaaaatagcaaagcagtacatgagtggatcagacattgctgcagatgggattgacaaaagcaatcagaataaagaattaaggactttacatgataattgaggaattaaactgcactatgagccaatatttttggttgtacagattaaattatatggttaatataagagtttctgtgagctagattaaaaattgaaacaataagatgcagggtaaagttttaagatgccatctgcgtacaagaaaaatgacaaacacttggtgtgcatagaaaaacttagtgcttaacaatttgctaacctgccgtcatatgcacttgactgccttagggtcttgaccgtcttgatcaccaagcacagatccaccaacaccaagtgaaaatgtgatggtgaggtcgctattgctgatgtgtggcacgcacaagggacatgtaacggggacgcgcggaggatgctagccacgccgcgcgagtcggaactggacctggattcctagggataggccaccggggcggctagggcacgactgcaccggcgtggaggcgaccggtggccggcgctgcaggggctcgggcctgttttggtggctcccgtcaacgacggagtgctggggaacgagactagattggatgaagattggaagggagcgcacaggcctacacgtaggagatgagcgtgtttctcaatcggtatcacaactgcttctggataaggagaagtgaacccaggaaattgagaaagaaacgtgcaaaaagatgtttctagactcaattgatgagccctggaacttctttttttttcatgtttttcaggaacgatataaatagattagatgcaattcttttctttttaggaatgagagaaacagataagatgcaattctttttttttaggaacgagagaaataaatgattgccatttttttaggaacgagagattttcttttgtaggaacgagtgaaatagatgattatttttgtaggaatgggagataggtgagatgcaatatattagctaactcttctgaatgctagaacacgtgtacacattttaagtgctagaacacgtgtacactattttatctgtgccactgcaaatgtgtctttttagataaatactactccctccgtcccaaaatataaacatttttagcctaatgtaaagtcaaccatttttaactttgactattaatagaaaaaaataaaaatataatcatgtaaaattgaggttactagatttatcattaatcaaactatcttaatatgtaacttttttatttaaaatattttatttttataaatataatgtgaaaatagcatgcatctcgaagactgtgtcggagtacaaaaatacttatattttaggacatgagcattaaaattcgtctattatttgtaagggatgttgtgcgtgaagctccacaaggagatctatgccgctgccctccccggcggctgcaacgacaacaccaacagctgagagcccgagaacaacgcatcaccattagtctttgtgtagcgcccgttccgtcgtggcgcctagcgggaaaattatctcctaaaaaccctaattgcgaaatctgtttctttgcttgttgtctagtgtccgtgccatctcaagatctcaatccccgatctatcgtcgagttcaaatccgaatccaaatccttccaaatcaaattcctccgcaaaagtctattttgcctcccccgggtcgatgggccgaatctcgctcggcccatctccctctctccctctcccgggcgctccctctctctctctctctctctcgccctctcccctccccggcgcgctccgcttttccccccgttcagctccgctccgcctcgcccgcgcgccgcgcgcgcgtgcgcgagagccgcgccgagcgccccctttccttctcctcgctctgccg

SEQ ID NO: 8081 - DNA, 18236 bp, Oryza sativa
gcccccttgccgccctccgatagggccactctccgctgtgcgggggggccgcctgcaaatgggcggcgagggggcatggaattttgcaggcggcccccttgccgccctgggggagggcgatttttgcctcccccctataaagcccagcccctcccctgtgaaatttcattatattcactaaaaatccaaaaaaacgaaagagagagagaggggagggcagcagaagggaagcggcgaagccctgctggttcgctcacttcatcacaggtatgctcccatacatcttttgcatttgtactaatatattacgtttgagtacatatgttgcgttttagttttagttccatatattttagcagatctgtagcacacagcacatatgtgtagatccagagcatagaatataatagtatgaattgagacatagacagtagtgttaattgtaagatgtagtttagtttgatctggagaatgtaacctacttttagaaatttagagaacaatattgtagagaatgtaacttagggcgtagtacagaaatgcgaggttaacgcagttattgttttcatcaggcacaatgtcaagtaaggtcacatttcagatagttcacggtgaaggaaatattagatttggtccagatggtgttgatctgtcagattttgtaatgacatctaagggcatcgataggcctgcggagagaacatttgagtcaatttatagttggttgttgagaggatttagaatagaccaagaagtctacacaatgtcagtatctgttgtagtgagtcgtgcaatagaaggttatttttgggaactaatgccgatggacagcactgctgcttggagacggtatgtggaaatggcttttgaacggtcatggcccctcgttatatttgtgtcggtacaagagaaagatacaaatgtttcaatgcaaaccgaagatgtggagggtcctagcaatgcaggggatgttgttggaccatcgatgcaaaatgaggaaaatcaaccaagggaggagcaggccatgggcatggcggatgagggggagagagtcggtataattgttgatgaaatggagagggaagattcggataatgagcaagcggaggacgacgcatcatccgatgaggaaggtgatgtaatggccactgattgggcaaatgaggacttctctggtcttgttatatcagagggtgatcatgtaccctgggagtataaggagaacgaggtaattgagggtgcaaggtatgctcataaggatgagatgaaggaggcggtgaagcattgggcagtttcattgcagagagagtttagggtggtcaagtcaacaaattatgtgtatgaagtgaggtgcatgaaggaagaatgtccgtgacgtgtccatgcatataagggtaaatggaatgattattggaaagttagcattgtgaccgagcacaagtgctacttacaaggggtggagaagtatcaccgaaacatcacttcagcttttgtggcaagtgagatgtacagcagtgttgttggtaacattggctttgaaccaaaatcaattattaggcacatcgagaacaaattcaagtacaccataagctatgcaaaggcctggagagccaaacaaaagatcattgagatgaggtatggcacatttgaagcttcttatgataatttgcctcgtttgttagccaccattgcccagaggaataataatacttactatgacctacatacatttacatcggttgaagatcgaacaaagagtgtgctgcaaagagcctttttctcattgggtgcttgcatcaatgcttttgtgcattgtcgacctgttctatgcatagatggaacttttatgacaggtaaataccgaggtcagatattgacagcaattgggtgtgatgggaacaaccaggttctacctatggctttcgcatttgtagagagtgagaacactgaaagctggtactggttcctagagagagtgcacattgcagtggtgcgtatgaggcccaacgtttgccttatacatgatcgtcagtagtgttctacctcttcagtccttatgtgaccgtttcttttggcttacaaacttgtaaagcagtactacttttgctattactactgcagtactacttgtgtttgtctcgtctacgtagttcttttcattcgtatggtgcttgaacaacttatgctcacaacaacacactttcggcgcttcacggtagtgccatatccagtagcgcgcacagtccacaacagcacacatgaaaagcggcagctcgagttatcactatcaactttcggcgctgcctgttgacataaagtgaatcacgcccacgcgtgatcgtcttgtcacatctaatgaataatgtatctcattgagttcacatatattgcagtgaaaacgacgctatataattgacaatctgaaggcaacctcttcatatcttctttcccactaccacaccacacacgaaaatggaagcctattaattggtaatacgtaatctagaattgagattatgtacaacattattcactacaattttacattttggcagcaaaccaaatatgatcaaatgcaattttaccttaccaaatatttggtagtgccaaaacttgcttatattttggcattaacaaaatatttgtacggtaacattccaaatatgccctaaaaaataataaaattgtattttaccagtcttggatattttaatcttgtatagttttcaatataaaaagatttgataactattgatatttatataaaaaaaatatagagcacagtacaaaatcgccctcccccagggcggcaagggggccgcctgcaaaattccatgccccctcgccgcctatttgcaggcggccccccgcacagtgcaaaatcgccctagcggagggcggcaagggggccgcctgcaaatttcgttgacggctgtcgccagagagagaacggccgtttgccacgtcattttcgccgccctgtgggagggcgatttttaaaaatcgccctcccagagggctgtaggcgactatttccgtcaattttcaaaatggaaaattatttttgtaaaacttttaataaaaaaaattataaataaaaaaaattcgaatttgaagtccaccggataaaccccgtgttcctcttcgaaaacctctccttgttatcctgtccccttccgaagaccaaaccggctacctgaacttcggtgcgcgtccatggagctcaacccatccgcttccctcccctagctctctctcgtccacctcgggttccaaccgcagcatcggaggcggagccatggcgtcgtgctcccgcacttggctcctcccaggtgacctctcgcccctcatttccaaccgccaattcgcacggctcaagcgaactcacctccctccaatactccgcaggcatggcgccgcaggccaccgcccagactgttcctcgccccctccagtccttggtaactcctcccccatcggaatgcccgagaaaattgctgaaattttaccgcgttcccgtgctcccagttgtcatgggtgctgagtatttttttattttgatttgtgtttggtgcgtgcgcagaaggtgtttgctggattgcctcaccggagaagggtgctgttttctggtgtgtcgagcagaacgcgaagaggcaggatcaggagcgtcaaggacgactcgctccattttgatccatctaagatcgaggcgccaccgtactccagttacttcgactccacgtcgggccagctcgagccggcgtcgggtgctcgggcaagcatacctgggcaggagtactggccggagggcactgcatcccgcgtacgcgctgcccgtgcacctgcaccggtcggggaatcagctgggacaccgtcgtttggtaagaagcccgggagtagaaggaaagggtacaaggagcaggtagcatcagcgacggcagggagaggcacggagaccagtggagatgagggagagtcggttgtggccattgaggcctcatcagatgagacactggaggagacaaaggattcattggatgagtacgtcgtttatgagatgcccaaggaagaaaatttgagtgaatatgagatggacaagatgatgggacggccacacccgttcgttgacccgcagaaggcaatgtctgtaggggaaccaaaatctagtgaagagctgtggtggaactggaggaggaagtctgaggaaaatgaaatgtggtcaagatggcagaggaggcgtccagatgttgacacggttagttcttgattggtttgaacttaataaatgacttataagtcttttttacttaagtttttctgcctattgtcacttgttaacataacctagtagcgaatatgatgtacacagtatggttcttattctccactcctcctgctgcatgtccacaccacaattttgagggtttcaattgtttgtatgctagtcttcgtataccctattttgatagcacaaggcacaaacactaaggtagtactccctctgtcccaaaatataagaacctagtattggatgggacgcaggatactatatactttggttggacacatcccattcggtactaggttcttatatttttgggacggagggagtacatgtagttttgtgtgtgccaaaatatccaaccaaagtatagtgtttgtagtgctaatatttccagaagccacacaatgtcgtcatgatcatcgtatgcatcttctagtgtataaaagatgcaagcagagtagtgtacacagtgatgagctggtatttttattctgggagttcaaaatgagatgaaatacttaaccatatatcttgggttcagacagaattaggttcttcattagcctagactggtaacatttataaggatcttctggggtcatctctattccacgaatcctaaaagctgtgtggctcagttgaacgcctattcccccatactaaatccaccacctggtagatacacgtgcacagcttgcagatgtggcatttcctatacatggcttatcaatttaatctatattgttggttgatgtttttaacctttttcattattcagattagtgtttcttctaacttacagctctgtgtcttgtcagttataatttaaattgtaacactcatttcattattgtaggtctttgcaaaagcaatggcagaaactgggcagatcaaaatatttggggaccaccctaccagaacagaagctgctcttgccaaggcaagaagacatttattcaaagaggaaaggttggctgaatactagaaattattttctcaaaatttagtgattttgcttttcgtgggtcttcaccatatgtgaaaaccgtgcttttaattttaatatcttcaccatatgtgcaatgatactctttaagcttatgtagactctttaactgacctttggtatcccctcgttgatttataacaaatatttgatggatgttattatgtctagttgcctacctgctggtttgtacttcaatgttacttgttatgacagcagaaaaaaatattgacacaacgtcctttcaacatgatattttcacagtattcttaaggtatatagttctatcttgccttccgtccattcttatattggatatacaatgaaaacacaggttagaagcagaacaaaggagactagaagaaatagggccaatagcatactattcggaatgggttgaagcgtataaaaacaaagacacttcacgagaagctgtacagaaacactttgaggagactggcgaagatgagaatactcaacttataacaatgtttcaacaccaaactgctggggaattccgtatcatgatgggcactgatgttcgcatacaacgagatcctttggcaatgaggatgcgggaagaccagatcaaacagagtatatcttcttttctcaatcctgatcattttatattattgacatctacaagccgcttttgctgaatttatacatggtccatcctacaatagcttctttctttaatcgtatttattctgttaaaatatattgtatgataaatcctggaaattgagcacatattatgatcttaacttagcacagaagtagtgttggcatttacctgagaatatatttggaacatccaaactacttgttaacttctatggtttgtttttgaaataaatatgacaaaccaaactttgtttcctgtcctgcttatagactggcatgatcctggaacggaagtcactgggtttgaacacaacatgacatgttttctccagtttcacgtggcactgttgtgactgtttgtatttttatgatatctacattgtttctgtataaatgcacctaaaatggtctattagaaatgtttacaactagtatattcaaacaagtatttcaggtataccctggtgcagtttacatgggaataatctttccatattaaaatatgcagtttggggtggtgatcctgtttacccaaccattaactacgttcatgatcctgacgaagtagcggactacaggggtccagaatttcatgagcctacacctgaagttgtaccttacttgatggaggtatgtcgtagtgcttccacacaacttatagtatttcacaatgtgctgcctaaaatttactggattcatgacgatgtatggttattgatttggaaagccatggctgcataagtatatgttacctgttgttatttataacagtacaatagtatagcacagtactaacaatgccagtcatgcgacaactggcgctaagctgctaataggactgatgaagctctaacatgatatatcgcctttccccttttaagcatggtataatgataacaaaggaagagctatatgcccgtttaaatgaagagatggaagacatcaatcaggacattacggtatacgtttaactgtaactctggtttggtattaattgaatgttgagaataggcatcacaaatacctcttttacttatcctgtcttaccttcttgacagtatcttcctgaagtcagagatcccatggctactgctgttgatattggggagcattctgtgagtatccatcctaaatgcttctattttttaccaaaacctctcagtacaggagaaataaaaaaaatgtaaattctgtttctttgggttcataactgcaaagtaatgctagattatataaaagcttctccatacaaacttacgcgcatttcactgtgatgttttctacttttcaaatagtacaacgaagatagtgatgacgatgaggaggatgctgacaaagttgttgcgcagcctgagtcactagaggtataatactgtactgtttacttgatggaaatgcatgcaatctgcgattctcaatgtagccttgcgaatttcttcttattactggcaatgacaacagatctttcagttcatatacatgcttattggaagctgaatgcctctcttgctgtgcatggaaatagttgatttattgatgagatagttatcgatacttgtcctacttgaaagcttgtcattcctttgtattatactgctttaccaataggatgatgaagatgatggtgatgatgctgaggatgctgaagggaaggtcagtcgtaattggagtgttctaaaaactaccggacaggctgaaaatccaaaggtaccttttcattattatcagttctgttctaatggaaaaagttcagccttttggcattaataaatgctgagcgagtagcattcttgccagtccagcagtcctattcactatcttgcctaattatgtgcatatggtttaattttgtgtaaattcatggaagtgtctaatgcatgcatagagtttgtaactgtatcaactcccactccaagcacgtaacgtaccctgtcgtaaaggatacattcgtcagtgatcacaactcagtaactcacggatgactgcttatttctttccgtttttctaggaaaagtcgaagaaagatcaactgtcgctaaaagaagctattgcagattctgagaacttgactgattttcttatggacttcgaagaagatgagtaatatctgggcatttactttactatgctgcacgttacacatggtaagcaaagtaaagcatagcagactaccatttattcttaatttttcagagaatatttaaccaaaagccagagcttgttctctggaaacttctgatcataaagcatctgatggtttttatctagtcatttgactttaggtttagttgctacagtgcatacaaatagataccacttgccagtagtatttgatatttggatggtacaatcattcttacgaatacatgcctgtgtgcaatgattaaatagtgccttaagccttcgtgtgatgctttcctaggctcaaagctgcatcctttatctgcctgagggattcggaaaaatcatccaaaagctcatgacaatctggaaattgtgcctcgtccacggcaagatttaccatcatggtgttaacgtaactttgaaaattcacggttaaggcctgcacaagcaaaccaaacatttagatgtaaactacgtcttgctaatcgcatctgtaccgagattccatgacaaagtgaaaaaaatactttcaccatctacaacgctgaaggattattcatcactatgcacttgttatccttgttataaaagtgtcatacaagggcttaattacttcttttttcaacggatcaaagcaattagtttcagtcagattaccttattttcgcgatgacttaatgatatatggtagacagctaccaggctatatttcatgggaattttttgggtttttttttttcatactgtttttgccactaagccaaggatcatcgcatgttctgacgttcgtcattcatttgttttttagccctagcgacaaaagtgagatgctcatagcaaaaacaaggtatcatcattgcttagtggcaaaaaaaacccttccctgtcatagatttgaggatctgacatactaacaagttaatgcaattatttaattctatggcaaatatgcatttcagggaacttacttctggaggtccatagccgctaggggcaatgaagacaactggatgcccacaaaactccacctgttcaactgggccgatcatgttggagaatgatatggtagtatgagagatcatacgatggaagatagcagctgctgcctgtttgattcacaagttgcaatgatattgggaacaaagaaatccacaggggatgttttttggcgcatggctcaaaatttggcgctgtaatgctctttctaggaaacaaggaagttaaccactgccaacaactgggactgtacacaatttctagtgaatatcacaatcttgtacacctacgattgtattttcttgataactaaattagcatggttagacagcaaatactaaatcaggtattcagttatacttggagtatcctgaaatctattgttttgtgaactaaaccagtgcttgtcaatagaaacaaagtgattatcgcattgcctgccaagataataatataaggatcaagttgctgatgaggcgatagtacaataaaggacaaatttaccttgagcccaaaaagtttgaggatcacttctgcagctaaatgagtgaataccacttctaatgagctcttcttcctatcaacaaccttctttgctttccgaacgtagtctagtggatctttgtgcacgcctatgaagaacgggaggattatgaaaccaagtgcatttccccatttcacttcatcctctctgccagaattgatcatatctacgtatgcctggccattgaaatgggaaagaaatcacaatagattttaccagtccaaaattgctaccactacaagtatagcaacaacaatgttcggtcctgtgagcttaaattgccaatcttgaatccaagtataattattacatgcaggcttgtggttggcctcaaattgacaaggaggatcgatctcaaacgtatatcctcgtcagtgtccatgtcacctgcaaaggagaacaagcagcgtgggagtaaagaactactgtatcagccaggccgcaatttaagagctactgtatcagccaggcagcagctgctggagcatgattttattggacgcaattggtcacctgacttccggtagtaatagcgcgacagtgcagagtacgtgatcccaaccagcacatcattgaccgtctgcgagagtgcaggcaaacataaagagaggaaataaatctccccagaacttttgctgagggttctgtcctttgctacattcaatttgcaagcaggtgaagtatagaaatggagggaaaatgatagacagaaaaaaattcgtgtttaatgattatgtatactaatattttatccattttaaaataaaaaatctgataatcgatatggcataatctaggaatacgaatctaaaaaaatctattatagagacggagagagtaggtcctatgtggaagatattattacttctacagaccgacagtttataagacagcaacactagaccaaactaacgaaaaaccattagtcttaaaaattttatactctcttttttcttttttcacttgttagcaggatactttgactacatgacttctaaaagagtatatgtaaaaaaatttgtattatcaaagcattttgcatgctaaatataactatactatttaagttcataaaaacatcgtaattttatttaaaaagatactggtcaaagataatatcatactagtcaatatagtggagtacttctaatcttagatcaaggctagaaagtgacaaaaaacgaaattccgtaaatcaattctaaaattttaattttaaagttttctgcaatttatatgccgctatatactcaaacaaacaggctctctaagaactaaagaaaacatcgcttacgcagttcatggcgttcttgacgagcttgacgtcatcaaggctaagcccccggtgcacgatgcgcttccgctggaactccccgtgcttcacccgcttgaacagcgtgtgcggatccttgaggaacatggtcgtggcgaagaagctcgcgacgtccaccacggtgtgccacgccagcgcgacgaacgaccagagccacgcggcgaacgccagcgcgcccgccgacgccggcggcctgggccgcgcgtagatcgcgccggcgcgcgtcggcagcggcggcatggcgggcagcctcgccgggtcggcggcgctgcgcgtgcacgccatgaggagcgtgagcagcgacatgccgtccccgagggagtggtgcacgcggatcgccgtggtggccgccgcctccgacgtcgggaagtccagcacgtggaactcccacagcggccgcgactcgtccatgggcttggtggacagcgacgccacgtagtcctccaccgccttgtccgggtcggccgccaccgcgtccatgtccaactccgggtagatgatgtggtcgtccaggttcaccgtcgtccgcacccaccgcgggttgccgccgtcctcatccgtcacctgcacacgcacacacacgtacgtaccgttcgtcagatcagcccaagcaccagtggcgagctcctgggcgcgccgcccgcggtacggcaggtgtacggaccgacctggatgctgcggaagcgtgggtagcgcgcgagctgggcggcgatgccggcgcgggcgacggggtcgttcaccggcgtggcgatgccgatcaccacgacgatgaagaagtcctccacgagccgcgcggaggggctgacgggctccggcggcgtcgccgccgcagcccccttgctgccgccgccgccgccgtcgccgacccggaacccattgccgccgttgctgctcgtcgtgcggacggtgagttgccgcttccgaagggcggtggctgcgcctgcacccgcgtccatctcgtgtgggccgcggcttaactgcgtcgcgctagctagagaaagtgtagtgtagtgagctggttttgcatgggcaatgcgcgcgtccaccgcctagctagaccgagaaacctgttccgatatataggccagaaatgagacgagcgttgtgttggtggtagtgcagggtattcatgtggggactgggcgcgcgtcatccgtccgtgaccagggccgacgattcaaccaggggaaaaaaaaacagggctcccgtgaggaagcggcatcttgtctccgccggaaatagagctctttgttgttgtagagtagagatatacaatatacattgcgtgatccagtctgtgtttagttcacaccaaaattgaaagtttggttgaaattagaacgatgtgacagaaaagttgaaagtttgtgtgtgtaggaaagttttgatgtgattgaaaagttggaaggttgaaaaaaatatttgtaactaaacaccggcccaattgatttcttttatgcatcaaattgtgaatatgtaatatttagttgttcgaattatatgctctataatgatagactatgggcatattccgattactgctaaaatataaatattttttagaatttgccgatgttaaaattagcaagttgactatattgctaaagtttaataggataagctaaatatattgttatcaaaattctttaggcgttattaatgtttggtaacaaacttcatcatccacgtgtttgtgttttttttaaatgatatggttcaatgtcacaaatctgaataggctctagaacttcattgaaataaggatggaaatatttttctcggcgagaaataaattttattatcttattaaagcaaaaccgtagtttcatcaccgatcgaaccgatggactggtgacagagggttgactaggagaactgtgtcatgagtcgtgaccgtacagccgccaactgccaacggaatgtgttaatgctactagctttcacgacaaatcgacgtgattaattatgcacgatgagctcgccggatgcgagcttgcgggtcggattcctaaatgtgatagcgatcttacattcaggcgatggtgtccaatggcagttggtcaaaacttgcctagatggttcgagatttcttattaatgacgtgatatatactcctcaggtttcattttaattgaagttttagacaataacacggtttacaaaatatatttttgaccttattttcctattataatatacacaataaataaatacatgtttacttttattatattgctttgaaagacaatctatacgttgttctagtttctttaaactaaatatttttaaagttattgatggtcaaatttataaaagtttgatcttccaaaacatcttattatagaaccagagggagtatagaaatgacttgaatgatgtaccactgtgccgtgtgccaggtgtactcgtatttgtgaacgtactaatgttaattaacgcgtacatcgtccatatatgctcaagtctctcagactgatctatactgctaccaatcacctacatgatttaatatgtacacagttcatgccatggcaaacggagattttattatggccctctttatttaggcttaggtttattggcctagacttttaagttaacttattggcttatatgatttataagacaatggatttaatgtcctaagtttagtggttgagtcatacatctacctcacataagccaaaaaagcttctccaacctagcttttggcttaatagtgttaaagtggcttgtggcttcaaacaagccaaacggaaaagctgcttgtttgtttaggtttagacttttcgacttataaattggcttataaatctaaactaaagggcttatgtagctccgcaggcgtgaggcttcttgtgtttccttaattaattgctagtgcatctttggagtgcaaatatctgccagcttcattgtgggacacgaaaaatccatgaacggcccaacgatatataattaattcgcaggcaaacacccgtgtgcctgcggtgtgattgtgttcctttcaactagaatcaacgacaattcgtgttactacgcgcaaacgaaatacggagttactaggtactccatctggttataaatattgaatattttaattttaaattctagccatctacaatttctcaattacagcttttaaaaatagggtataagaaaatcgacaaattttgctacaagacatcagaaatatgtataatttactgatagatattgtaaaaacgtgtcatggctaaaagacatcctagaaaattagtgatttgctgaaaatgacacttctgactcgattggagagagaagttcttcaaatagacaataatatatccccctagggtcacttgcttcaaacatggtgttggagtaaaaatttagaatttatggaactctaaatctgccactaccataaatacatcactagagcatatatcatatttcatcttcaattctttctcgggtaagatatctaccaacaaattacacaatttgaagtgtcctatagcaaaatttgtcataaaaaattgtcttgaaaaatactattctaatagcataaacctattattagtttttataaatttattctagtttaaaatttatgattagaatttttaaaaacttaatcaaatattgttctgaatattaaatatttgtgactagctagagtgagtacaaggagtacagtacaagagcaaatgtgttttacagagcatactatatgcttggcctccatgcatgcttatgtctcaacgtcctagaaggaggcctcgggatttgttggaaatttgtctcccgaaatctggagctctccaaaaccacttgagtttttttaattgaatttcaaatgaaatttatcaaaatttatgaaattcgtcatatcactggcctagcactagcatcttgacccttcaatgaaagtgtgaaccttaagagacttactccctccgtctcaaaaatactcaacctaggagaagatgcgaccctcatagtacaacgaatctagacaacttctctgtcacatcatctcctaggttaagttttttttgacagagggagtataaaataagcccaaaaaaagagtcaggggttaagaactctagtgaaaaagtttgtggaataaatagactttatttcctaaattttattaaaaatactatcctaaagtactactccctccggtttcaaaactgttagacattttgagatttacttggtcaccaaagacttattagcccttgcatgtatacatacattcccagggatggcaatgcttcgatccccacatgcacaaaattcaatggtggactcaatccactagactacattagagcaaggctaataggaacaagtttaagtttaatagtatagccaactactagctccaattcatttatagtcaatctaatagctcattcgagttcgtgctacagctgactataaatctgtagtccgctgctcttctctctccttatttatctccttaaaatatgtttatagctggcttatagcctgctattgtacctgctctaatacagccgaccttttggctataaggttttttgtggtcttctctcacccacccatataatagttagctctttacaattaatatagggctcacttgattctctcatagagtttcttggttcttatgtccaagtcggttgtaagtttacagcccacttcttctctcctcaacatcagcatttagtcggcttatagcctactattatacttgctcttagaatttcaagtataatatgcaaactaccgtatttaatatgggcataatagagaataggcacccaaataaatccctccttgtatatgagatcatgtctaaaacgttaagattatttttgaaactggagggagtacttctcactccaactactgtcaatttaaatttctccccatcttacttctcaaccaccctctctcttccaaagactgctttgtttaacgaggacgtatagatcatttaccttccttcccaatttgtcttataaatgctagaattgtttaacgagtctgtttctttgggttcataactgcaaagtaatgtagattacatacaagcttctccatacaaacttatgcgcatttcactgtgatgttctctacttttcaaataatacaacgaagatagtgatgatgaggatgctgacaaagttgttgcgcagcctgagtcactagaggtataatactgtactgtttacttgatggaaatgcatgcaatctgcggttctcaaattagccttgcaaatttcttcttattactggcagtgacaacagatctttcagttcatatacacatgcttattggaggctgaatgcctctcttgcagtacacatggaaatagttgatttattgatgagacagggaacttagccccgcaaacccaatctgaaattttcgctccataggagatttgaactcaagggtatttttttacccggcctctacatccaatggatatatacggccattgaaatagggaacttagccccgcaaacaacctaatctgaaattcgctccataggagatttgaactcaggactttggggtactactcaggtcactgtaaccactaggctatatgccctttcgtagttatcgatacttgtcctacttgaaagcttgtcattcctttgtattatactgctttaccaataggatgatgaagatgatggggatgatgctgaggatgctgaagggaaggtcagtcgtaattggagtgttctaaagactgccggacattctgaaaagccaaaggtaccttttcattattatcagttgtgttctaatggaaaaaagtgcagccttttggcactaacaaatgctgagcgtgtagcattcttgccagtcctattcatgagtcttgcctaatcatgtgcatatggtttagaaaattcatggaagtgtctaatgcatgcatagagtttgtaactgtatcaactcccactccaagcacgtaacgtaccctgtcgtaatggatacattcgtcagtgatcacaactcagtaactcacggaaaactcgaagaaagatcaactgtcactaaaagaagctattgcagattctgagaacttgactgattttcttatggactttgaagaagatgagtaatatctgggcatttactttactatgctacacgtacgttacacatggtaagcaaagtaaagcatagcagaccaccatttattcttattttttcagagaatatttaaccaaaagccagagcttgttctctggaaacttctgatcataaaacatctgatggtttcatttgactttagatttagttgctacagtgcatacaaatagataccacttaccagtagtattagatatttggatggtactccctccgtactcgtaaaggaagtcgtttaggacagcgacacggtctataaagcacaactttaacttcttgtttctataaaaatatttattgaaaagtgatatatgtatgcttttatgaaagtatttttcaagataattttattcaaactcaacaatttgagagttatttatatcacttttcaaactcaacaatttgagagttatttatgatttatattttcaaggtttgacttaaatattatcctaaacgacttcctttacgagtacggagggggtacaatcattcttacgaatacatgcatgtgtgcaatgattaagtagtgccttaagccttggtgtgatgctttcctaggctcaaagctgcatcctttatctgcctgagggattcggaaaaatcatccaaaagctcatgacaatctggaaattgtgcctcgtccacggcaagatttaccatcatggtgttaacgtaactttgaaaattcacggttaaggcctacacaagcaaaccaaacagttagatgtaaattaggtcttgctcatcacatctgtacccagattccatgacaaagtgaaaaaaatactttcaccatctacaacgctgaaggattattcatcactatgcacttgttatccttgttataaaagtgtcatacaagggcttaattacttcttttttcaacggatcaaagcaattagtttcagtcagattaccttattttcgcgatgacttaatgatatatggtagacagctaccaggctatatttcatgggaattttttgggtttttttttttcatactgtttttgccactaagccaaggatcatcgcatgttctgacgttcgtcattcatttgttttttagccctagtcacaacagtgagatgctcatagcaaaaacaaggtatcatcattccttagtggcaaaaaaacccttccctgtcgggctgcagga

SEQ ID NO: 8082 - DNA, 50146 bp, Oryza sativa
ggtttaggcagctccacaactccactccagactcaactcctggagcaatatttaggagttagagctgtaccaaacaggcccttagtttacagttgtgccacttatatgtgggctccactttgttatgatccacatctcagtagtacaactacaaactgtacaaagttagaggagtcttttctctagtttgtgtatttgcggttcctcttacaagaaaaacacagccacagagaccatgtggtacattttccattcacaaaaaagaaagagaataaaccataaaaaaagaacgggctttttattacctgaaacaaatatgtgaaagatttccaatcatgtaatctctccgtctcaaaatataacaacttttagctcttatgatttgatgtgaccatggctactacggatacatccgttgctcacctcatggatggacaacaagatatcaagttcgagtcctccaagtctcaaaatccaattcggccacctactaccctgctgacttcaaacggccgccgaagctccatacgacctccgttttcggcccgtgagtacttgatggaaagctctcggagtcctctttccaatgcatcaagcctcattgccaaattccatctcagtcggcagcaactgaagaaacaaggtgctgcgacacctgtaatgggactatgggcttgtaacttcatttgggaccccggcccaggtggggcccatgtggggtgcgccccaagctagtggagcacgaccctaggcactcctaggtcatcctcccacccctatatatagctagttaccccttcagggtttctggggttttgttagaataaagtttagccattgctacttgcttgcagcgcgcgtgtcggctagaccgtccgtctgcttgttcttcggaaccccaacttatcatttgtattgaattcctatttgcaatatcagattgcttttatcttgttcttgcttgtttcttcgatttgcttgcaggaatagggttgatctgcaccggcaagatcaacaacccacggagaggtgtatcgatcgctaaggcgcaacacaacgtctcgtacggttgtagtcggatcgtcaacgtttctcccaaatcgtagttatcacaactcaccgaaagatcgggccaacaacagccttgagtgtcgagaggaactcagggttcatcaggtggtatcagagctttcgttgctcggtgaatttttatcttcctaaccagaaaatagccatacaaaaaaatcgtatcatttacctagccatattgtgccattgcattgttcttttcagtttttgctttgttgaattttgtgttgcattgtcacatcgtgttgctggtcttagcgtctagtttgtttagagtttcaagttctggtcacgttttgtaccacaatcgtcgctgccaccgtgtctctgttgttgtcgggacctacgaaaacggaatcggcccgctgccacggttttgtttttgtagttttcagaattttttatcggtcagttttggagttgcctttaggatttgcttgagtttctggtttgcccgtgaatagatcggcctgcgcttgttgccggtgtagagaggaggaagaagaatttccaaatctgtttttggaagtatgagagtttaatctggaaagaaatagtagatcagattgattgaaatcagtttccctttttctctcaccataaccggactcctaggtagtgccgcatccttcctttcctcacccaccaccaccccgggtccgcgaccaggccgagtccgagtgtctcctctcggtcacggtttcaatctataccgtgatcttgcatactgcttggtgaaaatttttcgagtatcggattgaaaatccttttgcaaaaacggaacctacaggacgagaggattccattattgtatagttctaattttgggttttaacttttacatttgagtccctataaattttgtatttatgtttgagtccctgtaatcttacattgaggtccttgaatctgtttttgtaaaataaaatcaaaaaaaaagaaagaaaaaaaaaaggcagaaaggtgcataaaaaaagaagaaaagaaaagccgcacccaaaaaaaaaagaaaaggaaacaaaaaaaaagaaagaagaaagaaagaaaagagaaaatattgttatgtttgagctgaacttcatatatcagagttgtgcatgagttgttcctagtgctatcttgtggtatcatttgtgtctaggctcgcgtctctagtacgttctagcctaggaccagcacggtgcttgactttgaacaattattcaattttgcattctctgatttgagcatttgctattcctttgctacatatttaagcctacccagagctccacagatttgattgcagccgtacaacaagtgttcgccaaggcatcgatacatccaacctccattggggtgcttggttgagtcggtgtatgtcaccattccgcttgcattggtaagatcttgtaagagcttggttaaaagcttgagtgtgtgtgatttttgagctgccactacctagtagttaataggaacgcgcatatttttgtgtatgtttcttgttttctactaacaatggcagggatacgcaagataattggggatagctgtgctcaccatcgacatcttcgtcgagacatgaggagtgatcaacatgacctttatgaggtaagtgacgatgttctaggtaagatcaaatctgcactgccttatttcgagggaaactataatcctcatgcttacattaattgggagctagcggttgatagtgaatttcaaaagcatgtcttgtctgagaaacaaaaggttatgtgtgcctctagtgttttagttaaacatgcttctaatgattggaaacatctttgtaggcataacaaaataccacaatcttggaaagacctgaaatgatattttagagatgtttatgttcccatgtattatgctgatattctgctcaacaaactgcaatgtttaaaacaagataccaaaagtgttacttcatattatcatgatatgcatgcttgtttattacgttgtggcttagatgaatgtgaagaagctacagaattgaggtttttatgtggacttaacaaagaaattcaggacatgcttgcttgtgaaaagtatagatctctttctcatttgttacaatttgcttgcaatgctgaaagtaaaatagaggaggatatgaaaaagaaacacgctatgtctttgcctccaattactaactatttgtaggaagtgcgtaatcacgaaaaggaggagagagacatgaaagagccaccaattccattgttcacactcaagtttgagacacctccatcatctaaagaggacatccaaggtaaagtaaatggtactgaaattaatcaaggtgagtgcattattaacgaagtaaatttgttcacttttcatgcaaaagtagagcaaccgttagtggaaccaaatgctggaattcctttgtcacaagttgatttactcgctgttccttgtgataaagaagagttgtgtgataatgcttcacttatatccatgccacaactagtgaatgagcatgctattcctagtgtttctttgtgtgctgattttaagcatgctgttcacattgctaatgaagttgaggaacgtaaattgctatcttctttaaatactttgggctatgttcagtttgatgatttttgtgagctcgataatttgaaggagaaattatttgctaagtctgatttgccacgtccaactaatgctatttttcatatctttggcaaatataatgatagaggaatatatttggtgcatagagttttcatttgttcggatttagagaaacatgttattgctaatcacactacttcgagtttctctagttttgattggatgaaacaggttattttgaatggactatgtgaagaacaccatatggaaaaaccgaggacggttttccgtgaagaaggggaggatgatgtgaccatgactactacggatacatccgttgctcacctcatggatggacaacaagatatcaagttcgagtcctccaagtgccaaaatccaattcggccacctgctacactgctaacttcaaacggccgccgaaactccatacgacctccgttttcggcccgtgagtacttgatggaaagctctcggagtcctctttccaatgcatcaagcctcattgccaaattccatctcagtcggcagcaactgaagaaacaaggtgctgcgacacctgtaatgggactatgggcttgtaacttcatttgggaccccggcccaggtggggcccatgtggggtgcaccccaagctagtggagcacgaccctaggcactcctaggtcgtcctcccacccctatatatagctagttaccccttcagggtttctagggttttgttagattaaagtttagccattgctacttgcttgcagcgcgcgtgtcggctagaccgtccgtctgcttgttcttcggaaccccaacttatcatttgtattgaattcctatttgcaatatcagattacttttatcttgttcttgcttgtttcttcgatttgcttgcaggaatagggttgatctgcaccggcaagatcaacaacccacggagaggtgtatcgatcgctaaggcgcaacacaacgtctcgtacggttgtagtcggatcgtcaacgtttctcccaaatcgtagttatcacaactcaccgaaagatcgggccaacaacagtcttgagtgtcgagaggaactcagggttcatcatgatttgtcctaaaatataacaacttctctaccaacattctctttccaaccaatcacaacccttaaccgttcacttttcacacatatcttcactactcatccaatcataactttccaccattcacctctacctactttcttaataaccgtacccaactctataacttcttatattctggaacggagggagtataagaagaatgtaagatgttactctctcgattctaaaatatagtaacgtagaacaatggttttattcataatactattatatatctaatctaatcttaaattactatatatttgggactgagggggtattacatttttatggctcttatatcacctagtaaaactaaaatgagcggataacaataaggtaagtatagtttaactgattaggttttttttttttaaatctgtttaccctagttcaagttttaaacttgatatgagtgttcatatatatttatgtctaattaaattatcctgtttcggaggtgattaactagaacccgtgtagagcacattatttttcctataaaaagggaacagaatagtatcaggtacatttttgctagagcgatgttcaaaatttccaacgtttatgttgaaagtgcacgttcgtcgaaagtgcgaaattgtcatttgcaaaccgcaaaattcttcgacacggtgcaaagaagtccatatggcttacataagattatgtgacgacgccgttttgcaagtatagatcatatcgcacgcttgcttaagtcaatgtacatccttccattttgatgaagagagacgatgcattaacagttccaaatatagttcagttagttatcccctcagctgagaagcaaaggtcaactctttcctaattaaaagatcttctctcgatcggttctcgccattcatcccagatcggagattccgtggctatcatcccactgtaccactggctgcttattaatcggcaagagaggctcgcagcggctcaatgcacctggtccacccagcctagccacaaccggtccaatccaaactctctaaacacaggagtagcggcgtgtacatgcgccaactgcccacgcggccgctgtcaagttgttggccgccaactcttcgcctcgctcccgtgtgtagtacggtaaacggtgtactaccacttgccctgacgtacgtactacacgcgccccggtgagccggtccaatatatacacgtcgtactcccgagaggccgagacgcgccggcagagagcaagcagatcaattgccaaatatctcgctatcagctatggacatgggagggcacgacatgggcggcatgtccccgccggcggccggggcggcggcgcagggcggcatgggcgccatgaagtcgatgaggtacacgcacatgaccttcttctggggcaagaactcggaggtgctcttcaccatgtggcccggcacgagggggggcatgtacgcgctggcgctcatcttcgtcttcgcgctggccgtcatcgtcgagttcctcggcagccgcagggcggacgcctgcctcgccgcactggcgcggcgcgccccggcggcgggcgggctcgcgcgcgcggccgtgcacacggtgcgcgtcggcgtggcgtacctgctcatgctcgcgctcatgtcgttcaacggcggggtgttcctcgtggccgttgccggccacgccgcggggttcctggcgttccgcgccggcctgtgcggcggccccgcgcaggtggaggaggaccgcaagaacgacccggcctgctgctagtagccgcctcgtcgacgttggtgtgtactgtgagcgatcgattcggttcggtggacgttggtttgatgcttgcatgtgtttgtgtaattgtgtatattgttcgcggtcggttggatgagttgtttggctggttttctttcgtctgtatcattgtatggctcaaaaacgtgacatgaaaaaggctcctgatggtccatctctcaagttgaaatctgaaaagttccggtgccgtgaaactgtaatcgtgcaatccgctatctatcacttgtttcattgatgattcaccctggctgtaatttcaattctaataaattgattatggtgcgcttatgtaaatgtccttgtctttaaaaagaaatgtaaatgtccttcaaacaattcttgttttgttttgcatctgtatgtgctagttggcacaaaactgttctgcattggtttgtttctaccttcctcttttgtgttgctgacccaaaattgctcctctgcatgcaccggagttcatgttgctgaatttctcatgccactgtattgtccattttttgctggtaaaaagcactgaactactgactggattggcaattccatgaatgatgattagctctaccgaaacagtatgctaccctgaaagtactgtcttactgcctctataagtttgctttgctccatcgatttgacgctctatgggttatccttcacgttctcccatcttctttcctgctgcaccatgggccaccgccagtggtaaattctctgagacgcaaaacagagcgcatatgcagcaaacatttcaaaaggttaccggtagatagattggtactccatccaaaagacagcacccttagtgctttaagtctttttgtttgctccgctcgcgtcaccacttttagtagtacaagaacacactttacttcctatgtagtactaccatctcctttttctccttttgaagatcttcatgtttctatggctgctgttgaaaagcacaggtgttcttccacatgtggaagaacaaaaatctctcaaagttgagctgctaaaaaaaaattaaatcaaaatatatcaaaccggagtctgtacaatactattacatactcgagtccagttgattcttaagctgcgtcagagattggctgtcaacctgctgctgtttaatttgttacattatccaccgctatattttagagataatgcactgctaaacaacccaaataatggttttttatgcacccaactgaacaaaagttaatcaatttcaccacataattgtactactaaatcgggctgaacacttcgcggaggggcaattataattggtcagttgtgtgtggttcagacttaaaatctggccacttgtaaattctacaatttcgtcttgacagtggaagcctccgaaggaaacctttttccgcccatgccgtacgatggattttcctcgttgacattctgcgcccaacgcacagcatggcatgtcgttctccataaacgtacacacaaaaaaaagcaccaaattggcttcaagataaggtcgtggaagcgtgctacgggggatgatttgtctggtggaatctaaggcctccataaatgatctgttaccagaatacctgccgtacataggatgattagagcaggtacaatagtagcctataagtcagctataaacatattttaaagtgataaagaaaaagagagaagagcagcgggctacatatctgtagccagctgcagcacgggctccaagatgtaatgcgtgtataacaggtgggaccaagtattaatagtatagtaagcaactattgtatgaattagctattatattggctatagatgatttagagctattagtgggctgctatattgaccttgctcttattccttcattcaattgatccatccataagaccatgattattatccatctcaagagggaaaatggccagtaagctgtaagcccaatcaagtccaagcccgatcatctgttgggcctaatttgatctcacttttttttttcatctctaatggtcctgtgacaatagccagattctgcaactcatgaaaacctcgaattgcgaggtcctcgatttgcgcacctgttcagttatactaatccatacttataaaggaaatcatttaggacaatgtttaagtcaaaccttagaaatataaatcatgaataactctcaaattgttgagtttgaaaatataaaaattatatatatagatttatcttgaaaaatactttcataaaagtttacatatagcacttttcaataaatatttttatagaaataagaagtcaaagttgtattttgtagaccgtgtcactgtcctaaacgacttccattacgaacatagagagagtactacgtaccagtacgtacctgtactacacgctcgccgccgcatatatctatacttgcacggcgtgtggatgacggatcaaaccaaacacacccgtgcacgcggagatcaggagcatctgcaatggcggacatgggaaggcacggcatggccatggccatggcgcctgcggcggctggcggcgcgggcaggaggaagcggtacatgcacatgacgttttactggggcaagaactcggagatcctcttcaccgggtggccgggcgccagcggcggcatgtacgcgctggcgctcgccgccgtcttcgctctggccgtgctcctcgagttcctcggctccccccgcgtgcaggagtcctcctccctcggcagcaggcggcggcgcgcgacggcggcggcggtgcacgcggtgcgcgtcgggctggcgtacctgctcatgctcgcgctcatgtcgttcaacgtcggcgtgctcctcgcggccgtcgccgggcacgcggcggggttcttggcgttcagggcgggcctgtgcggcggcgggtacaagaagggagagctcgcgcctgcggcgtgctgctagatgtggttgccatggcgcaagacaaaagcgaatatatttgttttcgaaaatttagataaggattttgagtgcggatctgctcttgaatctacgctaaaatctatatttgttatcctcacaatggaaaagaaaattcaatgttagggtagggatgtactcgatcacgtcgatcgtgaactgatagcccccgttgttggattcggtgtttgcatgtgtaccttcgatcctatttgaagaatccataaccctaactgttaaacccccaagcagtgcttctttcatatttcccattatctgcagaattaaaccacagtggtagcccaagaggccgagaggcccgagaaggcaaataagtggaggcccgtaataagtcgaatttctgatatgttgtcccgacgaactcatgacgacatgaaagctaactactggagtaattagttgcattgctgcaaggtactttggttagccaggcccacaatctgagtcacatgtcaccttcttttagctctttattaatacttttcatgcatttgtgtttgtacttttctttataatgaaatatataccggtcttagtttcaaagaaactatagctaattgttaatttgttatagaatttgtaagacgaatgacttcgcttgataaaatcgtagcttaactaaaaaaattacttattagaataccaccttaaagacataggttatctctatttatagatggtaagatctgcataaccattgttttcccaaacggtttactcaaaccaggaacataatctatgaaatcaatgatcgattattgtgtcgactgaatacctctaagaaggtcacaacaactacgatattgctatcgccattctaagcatctaaaactatatttttttactcggacagttcaccccaaggcattaaggtaacggagaggatgttagcaacattgcccatagacattgtcaatgttggtgctcccaatattgacggccttggtcccatatctacgacgatctgaactcaacctcctcccctacgtttagtggcatcatcaactttcctaagcacaatgacggcgatgatggtcgaacctgaattggaggggctagtgatgacgtgcatgggcaaatgttgtccagatccatatggtgccagtggcaaaggagacctgcagtggtagagatgatcacctagatgatgttggaagcctgacaggcaactcaggcgcaaaggagtcgcaacctcccccatctcctccctgccttcaacgcgctagacaaaaaggggtcgtgttgccttcggatcatcgatggccttatatatgtacatgtatttgtatgaattagaacttaaattttttaaaaccggtttacaattatcattatgttgaatgttgatccctttgtattttatatgttttaaacttttcggttttctcataattttggttcgtcatgataggaacatggcttttatatttattttaagctggtaccaagcatatgcaaaaccgtttgggtcacctaataccaatctccaacggtttcgttgataaatgttcatttggtactgcccaaaaccggtataattcagataagattttactgaaaatttggattttggtttgatgacatttaaacttggtttgtttatcgagcggttcttgaatctcgatttaagtcgagtactcgcgataactgagtaattacagcctcaaggctcacaggctcacagtcctcaccgtactagcactagtagatataagtttctcatatatctattatctatctatctatctatctatttctatctatctatctattatatactaaaagtccattaaacttcctacaaatactctcaagctgccacgtggcactactataaacgatcctagaccgccatgtggcaatgtctaatctcgccgtcgattccattagattagattagatgtattttatttaaaaagaaactaataccttactgttggcagggaaaaaaacataaatactccataagtacgtacgtactatatagaaaacaataaaacttaacttctcttcatcggttcgcttggaaaagagcggcttacttacgaatctacgatttgtgagggaggaaaaaaaacgtaccagcgtatttacgataaaataaataaagccaaaaaccacgtgacactgctacaaacgttcctagaccgccatgtggcaatatctaatctcgccgtcgattttcacttaaattggtggacccgataatttagaccattagattagattagatgtattttatttaaaaagaaactaatagcttactgttggcagggaaaaaacataaatactccatgagtacgtacgtactatgtagaaaacaataaagcttaacttctcttcatcggttcgcttggaaaagagcggcttacttacgaatctacgattcgtgagggaggaaaaaaacgtaccagcgtatttacgataaaaaaaataaagccaaaaaatatacgtatatagtaccatcgaaaaaatcaaaaatagaattttctacatataaaaataaaatatattattccacaaatatgcatcaactagacccgtcataaaaaatataaaatatcaaatctaaccgtcgattttcacttaaattggtggctcctataccgtcacatgccactctaataaatttataattctaaaataaatttaacaatcagttttcttttaatctggtggacccattattttttaccatttaatttataataaaaatagccaagccaatttatctcaaaaggcccacataacccacataggtgcatgtaagtacgtacgtacttcatgcatggtcccacgtccatcttatctcttttcttttctttttcgctcacaacaataaaaaccaaattaattattccaactcatagatattaactccagcctatatatatgcaaaaatatatgtacgtaccagtaatatattatattttttatatattatagatattatttagtacgttgggccacacatccctttttttcttttttcttttagactcacatgacataaaacccaaattaatattagtaattatatataaaagtctaatagactttctacaaacgctcctaaactgtcatggggcatcttcaaatgctcctaagccatcacgtggcactctaataaattaaaaaaaaatataaatcctgagaaaagaacatctaacatccactttcacttaaattgataggctaattattttaaccatcagatttaatctcatataaacaaagagatggaaagaaagaccacgtaccttccccacctctctcctcagtcgttacgttcgccctctccccacgtatgcccctctctctctccctcccctctatgtataattcatttttcctgtattagctaacggggggaatttgattaaaaattttttaacattcgtaacacctaaatcatatacctaaaaaataaacatctaaccttaaattttttttattaaaattagtggacataacacttcaagccattagattagatttaatttttctcatccttaaaaaaaagacgtccatcctcccctccgttttcttttaggaaatcctctacgtttttttccttccattctctctctatgaaagattttgcaacaataaattttaaataagtatacttctaaatacatattatttgcaacagtaaattttaaataatactaactttttaactttaaaattatacgttcaatttttgatctatttgtaccattgtgttatttatgattaaaatcacaattagaatttaagacacatgttgactatattttaacttgtaaaattatattcatttaagttttgttgagaccctttacatgttattcaaacatatatgaacaattattaaaagaaagtgacattatatattatttcatcatatatcacttcactggcatgcataactaaaacagatttatgaacttcaaaaagttctaaaaattctgaattatgagaaaaacaaaatatagattataccataatttgatgcatcacaaaacatgcataactaaataagatttacttaaaaaataatcagtcagatcctagctgtttgtccacctatatacattccgagcttaagatagaaatgacctattatgtaccaaattctacttgataaggaaatagaaattatatggaagtaaacataaagctaaattttctttctgtataacatgataatataacggtaatgttcaacttcggaacaagcaagcaaaagctgcatgtgtatttgtcctgtgtatctatatattatatatgaaaaatccattaaacttcctagaaaactctcaagccaccacgtgagactcctaccaatgctcctaagctgccacgtggcactataataaattagataaaaccttacaaattttgagaaaaaagaaaaaaaaatccaaccctcgattttcatttaattcggcagacccactatttttaaatcattagattagatttatttaaaatgcatctcattctcacatgtacaatacgtactactatccaccggattgagaaaaaaaatctcccgagcatgtacatactacgcatcgtccacccgtccctaataaacttatcaataactaataaacttatcaataatgttggattatttcttgagaaacaaagtgcgctcacaacgcacgcacactcacccctacgaacgcacacatgcacactctaccccctatgagtacctctgagagattgtgccgacatattttgagatgacaaagtcaccatgattgtctcgctgtcgatgggtacgttgtctaccactgaaagaatttatcaagtctgggatttgaagacaagtgggcaatttccaccacaaggaacctaaccagttaagctatgttcaattcaaaataatgttggatattaaaacaaccatgatttttaagctacacttttagaatactcctatgccttttaaaccagtgaaactattatttttaatcattagatctatcttatataagaaaaacaagcgtgtattcatggtacatcacatttcaaaaatattattgtgcaattgtattcacgttagattgcgtagaacctcttacccactctacatgaaatgtttatagatggattgtctctcaaactatatcaattatattaggctatataaaatttagtggagctttatgtcccaccaaattcatcctctaataaaccaggataatatatgtgcaataaaaaaaataaaaacacacttcttttgctttacacttacttttactttcgttgaaatattttcaaaagaaaataagtctaccttcttttcaaatgatgaagaagattataaataactaatattacttaaatatgatataatataaaactaataggttaaaaattataaaagtaactaatgctaacaaaaacaatttacggagaaattggggtagatgttctccggttaatatatcgcttttagtgtctcaaacttagcgtaagacgcatgcccatgcatttgcgcgggctaccttcctagttatctataaaaaaaaaggtagagaagtttctagcaagaatcctaatgctaaatcaaaatgagagaagaaatgaaacaagcatgacactactagtttataattaggtatactgacgtagtgacagagtaattctgatcaatgcgcatgcagatcacatacacaataccagttgcttatgatctattatttatatataaaaaaaacatatcaacggtttacgtaatgcgaagtcgagaacacgtttcttctggaccacgacttggagccactttgttcctcaggtaaactcagtgtccacgtgaaagtattgacaagttgtcaagcaggaacaaaagctgcagcgtacatacgagaacaacgaaccatttccccacttttcactatctccaagcgcatcagtcccgccggcccttttcgataaagttcaagtcgttttccatcgcattttgcacccatgaatgcgttaacccaacgaaaatatggctcgtggccgtacgtgagcgcatgacctgcgtgcgcacgcatgtcactgcccgatcgatcagtcacacactcacacggtcacaccgcgcgcggccccgggccacccgcgttgccatcgaccccgccgacctgcctgcgtgcggtctacctcgagggcgcgacgccaccccacccatccgtccgtctcgcttgccacgacgcgacgcgacacaacgatctaccgatgctgccggttgcctctcgctcggacgcgcgggcggagcggcgcgttggccatatatacaccgcgattggccgggcgggggggtcaccaacccacccattctcctgtacacatgcggtgcgcggcagcgaccgattaagcaggaaaagcggggtaccgcacgcgcgagcggcgcgacacaataattgagccgtgccgtggcgcgcgctggcgctggcgccgctgtgtctgtcgctggtgtgatgtgagcggtgggtgctcgtggcctcgtggggtttatccgggtccgcgcgctacaaaagctgtagcggagattgtgatgtagtacgatctacttcagtactatcacaaaaacattatcgccatgtgttagctcaaaaaagggagatcagaccgtatcatcttgtcgagagcatatgtggaaagacagagtgtacatgcatagaagatgcgaaattcgtgttttttaaacgtgggtagacgatcgatttggtcagtgcagggatttcaggcgaataatggagtgtccaagctggtcgtgcatcgtatcgactgacgtgaaaaaaaaggggtgcagaaaaaagaaattcgcgtgcacatttgcatgtgtgtataaactaatgaaagtgtgttccatatggttagtatatttgctgtattttagtgtattataggttcatcaatctgctataatggtcgttttttatgccaagattctccgcaatgcgctcccatgcatgcctgatttcagcgctacagtcgacaatgctctctgccattgtttttctttttgttgggatatggtcattgctattaaggagtaataacgtatttgttcgtcgcaacgtggctcacgaaattgagacatcatacgtgcagtctgcatcgtgcatttttcctaccgtgggatccatttggacctgctcgagcaatctctgccacgaaaaatattctctgtcggaaaaaatccatgtcatcctaaactttgaagagaagtttgtttagtatcttaaactgtaaaactaggtatatatgaccctttaaaccttacaatattaataatattgttcatatagccagacggtattattttgttttctaagtgtcatagatgttgtaaaatttttactatatgacttgcacattggacatatatgttaacaatttaaagggttatgtagatggtgtattgcataatatgtagggttgtctagtttgaaggtttggggtgatggatagactttcattcgagaaaagcacagggcacgtgcggaacttttccttcttcattccacaacttgcaggctgcagctcgcaaagggtgactggcttcagttcactgccacacaatgttttctaccatgttgacttcaacggaagccttatattcttgtgctctcagcaaagctgttgaggtggatcaccaaagtggccggtgaacacaaagtccaagctagtattgaaaatgaactgtgcccagattccagaatagaaaaacgaagcagggatgcataatctgatgaacaagaaagctcgaagaatccatcaaaccctcaatgaacatcccggtcgcgcaccatcgctccattttttgctttgcctctggggctgtggaatcacaggcataggtagttttcagaaatcaagacatctgtctccgtcgtctcctgcgccgatgtaacgatgatgcaaccctctgggtagaaacggctcaagcgatctgataggattgtcgctatagcttggaaatcccgccctttaaattccgataatatgtaatggcacgccgcttgctgtgcccgatcctctatgtatgaacctttaatttgctcactttcaatggaaaatttaggtggagaatctctctcctccggtgattactccaaaaaaaaaaaaaaggcttcaagaatccacacattcatctgccattctggcgattgctatgtatacaaactaaaaacttcgaaataagttgcataacacgtattgcacattgccgttttctccggagcaaaggcgtacacaccaacacgcacaaacaaaacaaaagaggaaaattgcgatcagcaagaacgcagcgctatacacaaaaagaccaagaagcgcacggttcgttccatcaccaaatcatggcgcggttggtttcctctccggcgttgccgtcggcctcgtcgccggcgatctgatcgagcacgaggacgatcgccatggcgaacgccgcgtcgaacccggcgcccacccgcaggacgaacacgtccctgcccatgaccacccgcgccccctcgtccaccttcctcctgatctctgccaccaccgccgcctccccgcctgactcggccttgggcgccaccacgcggcagcaccgccgcgggaaggagccatcgacgcggaggagctcggcggcagcagcgtgggtagacgagaaggaggcggggagcggggcgaggagctcgacgacagcgccggccgcggcgccgccgaggatggaggagcggcgagcagagaagagaggcttctggccgtcggcgcgggcgccgaggtagccctcccagcgttggtgcagggacgggcggcggcggcgcacggtgatgagcgcctctccggcggggccgaggagcgcgagctcgccggcggaggcggctccccctccgtggccgcggccgtaggtgtcggcgcggaaggcgaggccgccggtgcggtggtcgtaggccgcgaagccgtcgccgggggagaagtgggaggtcttgcgcaccgtgagcacccgctcctccgcggagcagtactcctcgcccacgatcgccattgccgctgcgctagctagctgcttgcttgcttgcttgcgttgctctggctcgctcgcgtcgcgtgcttgtctgcgcggcgaggtttgcaggcttaagtagagagatggagtgaggagctcctgtatcgcttgatactgtaaattcgtatggaagccacttacgaaagtagtgtttcacgtgaaaacgtgaaatatccaatatatatatattaattagccctgattactttcacttcgaatgctttccaacagaaaaaaaaaaccggtgttgtctcatgcccatgcatacgtgaatgacgtgtatgcataatgcaggctagtttctccgtgccagctgttggcttggcttgagctttgagcgacgactcgctcgcgcgcttgccaagatatccaactaggcgtggccgtagagtatgggacacagagcacggaacggaacagcggcgaggtacgaggtgcatgccgtgcgtagcgatgcggtacagtgtacgtatgtacgtgcgccctgcggagaccatacccttcctccaccgactcgatcccataccgtcgagtgctcgcgacgaggtcgatcggctgccgctgactttagttttagacgaacggcaaggtcgatcaatacgttaacgggtgcgcgggggtgcatgcatcagcatcattgtgcgcgcgagcttagagatagtatagccaactactggctctaaaccatctatagctaatctaatagcctatttatataatagttagatataaaaatatactataccattaatactcggttccacatctcatatacacataatgtcttgaagtccgtattgcagccggctataaatttgtagcccgctttcttctctttcttctctttttttctcgatatgtggttatagcttactattgtacctgcttttagagcaagtttaatagtatagcccaccgctagctctaattcatttatagcctatctaataggcaattcatacaatagttgcttactatactattaacatatgatcccacctgttatacacacattgtgtcttatagttcgtgttgcagctagctacagatctgtagcccgctgctattttctcttatcttttatcttattaaaatatgtttatagctggttaatagtcttttattgtacctgctatagctccacaccgagtcaactatcaacgacatggacgtgattttatagctagcctggcctggtagaggtaggctcgatcgggtcgcccgtagcgggagtgagtgtgagttgcattgggtatggagtacagtactgtacttgtgcagtgtgtggtggtgcgtatatttaggtgatctagtggatgaagaacgaccgaaattgacgtgagtttttggcttatgtgtatggagattgaacttttgcgcgtcgaaagatgttgataggtggaatcgatgataagacgatgatgcgtatgctttgaacaaactcgatcgttctccttcggtagtagtgtcgcgctcgaattttataagagttccctagccagtttcccatagtactcataattctactctcctacaaaaaggaggtactagaattcaaggcaaaaactgattacacttcatagtaataatccaatccaatccaatatcgatgaaagcataagcatactccgtatatgacacgtgatgaatctcccaacgaagacgtgtactccctccgttttataatgtaagtcattctagcatttctcacattcatattgatgttaatgagaaatactagaatgacttagattgtgaaacggaggaaatgaatctagctagatatctcgctagattcattaacatcaatatgaatgtgagaaatgctagaatgacttaagattgtgaaacggaggaagtataaaagtcgtctcctgcatgaatgtctccagaagtcttctgcatggccaccggatacgtgtatcgtcgatccagatacacagtatggttccctgcttcggtgacactgacgcgcctatatcacgccaaagatctccgttttcaccctcacgcgcggtcccacgtcccaatcggtggctgaatcagcaacacccgatcacgtcacgtcacgtcctcatcaccggccggccgaggcttggctccctcccagccccatatcccaggggtccccatgccccccgcgcaagctcggaaatatcgcggcgaaaagccaccaaactctcggatccgtccgtcctggcgcgggcgtctctctccttcgggcaggttagattcgagctgacgcgagcgcgatacatcccccgcaccgcacgcacgcacgcagctcccccgcaccgcacgcacgcacgcagctcccccgcaccgcacgcacgcacgccctcttcggctacgcgccacgttcccgcgcgagcggtgagcgagacgctgccacgaggatacggctacgcgaagcaggcgtggtgcgatactgcgatcccctagggggcccgatgccgttctagttgcccggacattggggggcagttaggaatttagggcctacaactacaagtaaaacgaaggaaaaatctcgatttcaattgtcaaacgtgcctgtggcagctgattacgtggtggcatggaaagcaacacttatttgaaccttttctcgaactcatctgcaactctgcaaggctgttcctggtcactgtaacctcttctcattgtttcgttcatcaagacatcaacgttcaccagtgagcaaatcctagagacgggcggatctaccagagtagactacagcatggcatatgtacgggccgaagttttggattgtgtgggctgccgggctgggtcgagaggtcgaggtaagccaggagattgccctcttttatatggcccacgctccaagaaatccaggcatccaaccaagcttcagcacggcaggttacggcttaccaaccaatcgacctccatctcctgccgtggattttgttgtttctgcctgcaaagacccagcatgatacggttcattccttctctacaccacgagtatcatcggtgcaattggaaatagtatcatcatcagtgtaattggaaatggaaccgaaaggagtcatattcatctgtaatcttgtacagttctctatacccccaactccccaagtgattgtgttgtaatcatctaatgatggcctttctataaaagttggggatgtgctctcttacaaaaattaccaatagtttccggctccttcaggctaattttgtaaccctatagccatgattataggaaggatgcataaattgttcaagtgcatggttatatcgtaatgcacaactaatggtagagcatccaatcacaggaatattgaaaactcacgctagtaatcctacacatcaagccctccagtgacgatctactccccaggggcttagttaaactaaacagaacgaagaaacccccactaatgcaatatcgtgtgccgcatttgctttattgtagcatagctccaaatcttctgggttttctcaaacaggcaagaaacattcctagtatcgcctccccgatgtgatcttcagcaagatgttattaacatctgaaaagtataaaattggagtcagatcttcacaccacatgatgcaacagtaacgactaagtttatattgagacaactatttgtttaacagaagtgctacttttcttttgtgaaaatacagataaaattccataacagcctaatatagcatatgctgtacaatcaactgcagctttccctatcgataagaaacttgtacaaagcaaaaaaacacacaagattcaacagataatgtgacgaccttactcagactttggctcactgatcagtgtacccacactcttgaaccagcgtatgagattgcggtgatccttcacatacagccaagcttgtaggaaagggaagagtttctcatttataccacgggcctcgatgtaatgatggaatgcatcacgcacattctcatccaattctctgtcaatcaaagagaagataattattcatgatcagtaaaaagcagtacatcaacatccagggctaacatatgtgtttgtactgtatcgtccaggacaagcaccatacacagcggacttagtcttatacatgtaataaacatcaaatgaattattgatacccatccatgagagaaacaaacgaccacaatccaaatagctaagcaaactttcagttattgcaagatagtaaaaggcttttaaagatgtgcttggatcactggacttatattcggggttttaatattacttttagtactttttgtgcattgtgcactgcacaactgagccaaactgtgaggcatgtgcatacatatttaaggcacatgatatcagtaacttaaccaattatgcaacatgtaagattcatattactgggtaaatgtagccactgttacatagatcaaaacattttttggtcatggtacctaagcatctatgacgtatcactagccatttgataagtgttttaaaaggatttgttttatttagctctctcaacatgtaaacatctctgtaaattatggtgatcattatttgtatgcatatatggtaaccggtgtagtgactgagaaaattgatttaactgataggagaaactaaatacccataggagtacagagttttgagcatgctagtacatctgaaattttacatgtttcaaactcaattagcactagtaaggacaacgaaaatattcttcctttatacacattaaacaataggtaatccacagcttgagataaaatatttacgaacaccacctgaaaggctgaaagactactgttatacttcatagaccttaaaagttagtacacatcataaactcccacacctcaagtgaaagtattacagaacataaaacactgggcacctgaactgccaccatccttcatgattaggctaacgcaactatttttacaaaactatggtatgcaacagctaacaaaatatgccctaaagccccattctaaccactaaattagtattaagatcgcacctgctaggcattcactcattctagatcaattgctttctgatcaggttatactagcgccaccagtcagattacccaaagccccaaaaatttactaaaatgcttgcttacaaactgaaccaaacaagtaattcacagaatgagaacgaatttcgctgatttggaagaaaaactcactggaagatacggccctggtacccgtcaccgcccttcccagccaaacccgccgtcccagactcggcagtcttcggccggaggcagacggaatggatccccacggcgtcggggtacagcccgcacaggaactgcagcgacttgctgctccctggcctggagatgtcgacgtggaggaaaagctggctaatcgactcgctcaccccacccccgccgccgtcgtcgtcgtccgagtcgtagtcggcgccggggggcatgatgttggcgagcctggcgacggagattgagatctcctcgccggcatccccgtacccgcggcggagcacggggccggatgcctggtccagggcgcccttgacgatcgtgtagggcttgggcgggctgatcttgggcgggggcgtcatcttggagacctcgaggaagtgctccttgagggagcggaggatgatggagttcacggcggaggaggaggcggccgcggcggcggcggcggcggaggaggagtatggtgaggtggagagggcatggcgaaagaaggtagacgcggcggcgcggcggaacatcgtgagaagggaggagccgaagggtttaggaggaacgggaaacggtatggaagctgaggtttttaggttacccggggtttcagatcagtttttttttcctcttgaacctactctctccccgtccaaaaaaaatcaaactcgcacaagtatctggacatccctcctaggttatttttttctttaacggagatagtacagtataaacaccagatgcagagacaagcacttaccttaaaaacgtatatatacacatcctatccttacaagcatcttaaaagaccacgggcatatttgagattaacaaagtcaccgcgggcagatctctcactgaaacacacacgagagcatccccgaaagattgggtcggcatcgcttgagagttgagattgtcgaagtcaccacggtcccctcgttgaaatgtacatgcgcacaccttaaccttatgaggtgctccggaaaactgggtcgatatattttgagatcgacgaagttatcacaggccccttgctagagcacacacgatcacccccagaagactggaccgatatatgtattgatgaagtcatcatggatcaacattgttgatgggtacgttacctaccgctgaaagaataattagctgtaaatatgatcacacatgtcaagtatagtacttaacccaggtaagttagtcccaccataagaaactaacgagttaagttcgtattttatcatatcagttcattttggtaatatcaattgcagttgttgcacgaaaattagtactacttttgtcacggttaaaatttgcaggttacactacaatgaattcggaaaaatttaactagaacaaatacttcatatgaaaaataggtcaatttctttaaaattcccatgaaattcgtccaaatcgaataggctctaaaattatatagtgcgtttcagacggtgaactcaccacacacaacatgtcatttgttctacatggatttatagccgaccgtatgctttctagagttaacaaatacttcctccgtttcacaatgtaagactttctagcattccccacatttatatagatgttactgaatctaaacatatatacgtttctaggtttattaacgtatatatgaatatgagtaatgctagaaagtcttacaatataaaacggagggaatacaatataaaatgttcgccgattttatttagacggtacgaactagtcaatgtcacactaaaataagattttatgtgtagccattgcctatttacaaattgtaatatcagatagaaacccttcggtgtgttcagcaaatgggttatgacttatgattggtgggattgagaagaaaaatagataaatgtttaggattaaatgtgttgtaaagaatagatgactaagatacagtaatattacctttagagtgtctgatattattctcctgtcctatttaccaaacaatccctttgagtgtggttttcagtaaccctacctttttttggttaaagaaaaaaaaaatgaaaactaaggctgtgtttttaactggatccaaagtttggattttgattgaaattgaagatgatgtgactgaaaagttgtgtatgtatgacaagttgatgtgatggaaaaggactgaagtttggattcaaattttggatctagacacagcctaagtagtaggagaaacgtggttggtcacgatgtgcatacgcctccggccttccacatccttccagaaacgagccggccggattgctctccaagccaaacacggcccagagaggcgagagcccccacaccgccaaacccgacccggaaatcaactgcacacgctccgatcccctctctccagatcgattcggaccccatgggttggcgttggcacgacgacggcgatgacggcggccgcggcctgggcgacatccccgacctcgccggcggcggcggaggcggagatggggagcgctgcgccacgcgccgggtggtgcagtctcggtgccacacggaggaggtggagcccggccgcttcgtccgcaagtgcgagaagaccgagcagctcctccgcgactgcgtcggcaggtatatacatatactccatggcctcgcgcttttccctgatctgttccttcttttcctgcgaggatcccctctttgcatattactgttcgttgttttagtgatgaattggtgataacatgtcatgcgcagttgtgttactattagtcccgtgtatgattgtgagctgtgtatagccgcctctctgtggacgattttcgtgagtctgtcctcgctgatttgatacaaacacgaattcattaagaatggggaatgtgccgtgatgatcgagacgtttgagttctgtggtgaatagtatgatcaaatgtgtgtaataacttgggcttttgaattttggtagctaattagatatggaatttctatccagttttaggtgcccgtgccatcgacatgggttaaaagttattgtgggctattttgcgctcaacttgttaatcaacaaattttggacggaggcagtactttgtaggcatggggtaaatttgtatgatacacttgttgcttgaagatgttcgtgaactcatgggatttctagacacctacaaccaattacattacagtgttattatattctaacgatatgtaaagagcagctgtgttcgtgttgtctacactaaagattcaacaactagtggtcatcatcaaaccgatagcatatcctcattttgcaggattttgaaaactcacatctcgttagcatccttccttttatttcttcacatgcctcatgttaaacttttaagtgcatgaaacccaaatttctgtatttcgtagctccttgtaaccaatgtacaacactatgattagtattctggatagattttgtacttcccaaagtattttggttgttgacaagctattacaataatctgatggataacctaccatacattatttctcctaaccgatcacaataatcttcttctaggccctctgaactggtggaatcaaaaactgaaaatactgaagaagacgtcacagatgaaatgaaaagcgggtcactatctcttggttttccgaccaatgagccctttgcatttcctggacttcgcagtgacatagaagctcttgagaaaggccttttcgggagcattggtagctttctggatgatgctgagaggatgaccaatgatttcttgaagtcttttggtgtcccttccatcaatgaaagggagtcgagctcatttgatggacaacctacaggcaggcacattggtggacaacctgcaggcaggcacattgaggaaggtactgcaaaggacactaaacagaacgactacgcagaattcagcagcaagattacagatgtgtaaggatctacagttagctgacgcacctttgggagcagcttgccaattttgtattttgaacatctccatggttgtaattggaaggggaaggatcagtttgactgttttataagcagagtcgtctgaagtctgaagtgttgcgcttataagaacaattgtgtatattactgttttagataagcctgtttgtgttcctcaacaatgagatcaattatggatggtttttttctctgcttaagtttggtcatggataatgcaatgcattgttgtttctgcgttctgctgctcttggcttcaactgaaatatttgggggccaaaggggcagagactctggcaccctgatgcgcgattgcccatgcccatcctagctaatccatttgtgcgttctttcaaaggagattggggagattgtgactcgttttccacgcgcacgcttcccaaactactaaacggtgtgtattttgcaaaaaatttctatatgaaagttgctttaaaaaatcatattagtctatttttaaaatttaaaatagttaatacttaattaattatgcgctaatgacatataagtctcttcaggatgggctggggcctggggataggaaattctccgatcccctgtttttctcaactttaccttcacgtggtcttcgaagcaatttcaagttgctatgatgcttctagatatctgaaatatggacctgcacagtgtcacggtgaacgctcctctgatatttcggtaaaactacgaaagctcgtagctacttcctctctcctaaaacaaatccactcttagcatcctatcccaagacaactttagttgtaaggataaaataaacaaagtgtcccttatttataggaaaataatattaatagatggataaagggtattaaaatatggtgagataatcccttatttctctatggtatatgagctgcagatgctagatgcctggtgaggtatgtacgctttcttattatgaaacatgtatatcatctcgatttttcgatgtttctatgccaataattcgaaacagaagatttctcctccgttcatttgaaagtctggtttcagacgtaagctaccaaaaggatgaaattttttaagataataccaaaaggatgaaatgcttggtaactcgggctaggtgcttagagtaaccagaacctgcacactactttatcctacgctttctatataagtacaaccactaactagtgaggataagacatcatcaaaataaacctaacctgggaatatagggtaggtttggtttgctacctatcaaagatttggtagtaccaaatgtttggcaaattttggtattatcattcttttttggtatccttggttgggtaaatatgtttggattactaccaatatgaagtcaaaactagaaattgagcacgcctattggcgcacttgttttaaaccccatgaatttgttttcgtgttattaaaaaatattatgtttgttgaaaaagcaacgtcctcaaattttgacatcttaaattattaaattgtaaatatcatattaatagatttttgatgaaaactcttctatatagttgtgttttaatttttatagtctagaaaacaatgataaaatatgtgtaatagagtctgttgatttttaaaatgatattattttaaatacacaggtaatataaattttgcaaagttttataagaattagttaaattttattgaaacttgagaaaaaaaaagtacattcgaataaaatttcaatcaacttttaatttaaaatttaggggcaattgtatttttaccctgttttaatgtctaacttccaatttgaccctgttattttaagtttgcttatttgaccctctttttaaaaaataaagatcaaacttgaccctattctgtgaaagcaacttaacggtgttaactcatgacaaaagtaccatttatacccttgcttgtttgacccttctttattgaaagtttttgtttatttatccaggtttaacaaattttgacctaggtttgataaatttaacataggtttcacaatttgtcttaaatttgatgaattttgacatatatttgatagctttttgaaaattttgacttagatatgatatatttttttacaaaattgacatacacttcacagatttgataaaattttgacaacataaatctcaaactatatattccaagaaaaacacaaacgccatgaggctaaccagatgtgtctcgagtccaagctgctcaatctaccgcagctgctacgcgccgccgtgagaatactcaccgtgttgccgttgcggccgcacctgcgcgtcgtcgtggccgcacctacgcgctgctgcagctcccacatgccgctttcgctccctccgtgcgccgtcgccgctaaagttcccactacgtgctgcctccgccgctgctgcactcgcgtgtagccgccgcagctcctgcgcaccatcgccgtcgaactcttctccgcgcgtcgcctccgcagctcctgctgccgccgccgccggtgaagaccactccgcgcgccgccgccacagcccccaccgagtgccgcctccgcatctctgtctccacagctcctgccggctgccgccgccgccgccgaagtcctctctgcgtgccgccaccgcagcccccaccgagcgccgccttcgtagctcctatcgcgcgccgccgccacagccccgccgcgcagcgcctctgtagcccccacgcgcgccgccgagaaggcccggccggctggggtgaagtagactggtgagaaatttggggatataattgatttggtagtcaggggcattttagtcagttcagattataaaataatttttttcggtgcactaagtaaaccctaactgtacagtgaaaatagggccaaacggcagttccgatttctaaaagtagggtcaaataagtaaagttgaaaaagtacggtcatattagtagttagactttaaaatagggtcaaatgagcaattgtccttaaaaaaagtagcaaatcacattattacggaaatccttaaatttctgttttttctaaccacattatttagggtttctttctttttgtaaaattatagttgagttttctattaaatgataaaattgatcattgatattttttgtaaaggtgttctaaaggagctaccgtactcatcattttttctagtaccacatgaaaagttacaatcgtatagattttgtgccataaacacttactccctctgttccagaatataataagttttagagttgggcccggttattaagaaagtaggtagaagtgattggtggagggttgtgattggatgaataatggaggtaggtgggaaaagtgaatggtggaggattgtgatttgttgggaagaaaatgtcggttgagaagttattatattttgaaacaaatcctaagggttaaaagttgttatattttaggacggatgaagtatttaccatcacgcacacgggagggttacctttcatcttctttaaaagccaggtaatctctcaaatgaccaggcaatgtattgagttttctagagatttattataggtatatgtgcacaggagacatactttccaacacacatatactgcacctctttacctttaaatgaacacatggcagttttctaaagaagcctttactaaatactagccagtaaagtcgtgcgttcgcatgactatgccttcccacctattaaatgcaatatattgattataattatattgtaaataagttcttaaagaacatattttgtaggaactaggaagtttatctattataaacaatatttgtgatcataaataattaacatgcctagcatgtaaaatttgtcgtaaatattaatattagcatatgttctcaactttgtatattattagcaggtattatattttaattattagtccaagtaatttttaaacatttatattaaagcattaatttctgaacattcgaagaaccgtgttctgtattgttggaagggaacacaccacgcttggaaaaagcattagtttttttttctaacattctttttcgagcttaactccagatgctccccttttctgatcaaagtaaaatgactatgcttttattattcccatgttttcttccgatccttccattggaagtgtcatgaatcttctcctgccctctatatttctaaccaatcctttccaaatccaacggcacatcttaaaagcatacctggctcaaatcaaaatgcgaataaacattttacgttcattgtatgatgacgacgacgacgacgacgacgacgatgatttagtgtgcacgtggctcaataggaggctagatatttggcccttaaatcggttatagagatttaatattacagaggagaaaatttagattagtgccaaatttacttgaggcattaccgatttgtttgctacaatccaaacacctaacattactattcaagctgccaataaattggttggacacattttggtagtaatccaaaatagctaaattcaattgtcgctatatagttctgtattttcacccatctttacgtgacgctagacaagtcggcagcaacatcacacgagttattgtcaccacattcattcttacggttttatatgaattcctgtagtaaagcgtgaagtatcatcgggtttacttttattctgaagtgagaaaaaattgcccaaaaaagatagcaaccaagcaactcgacttagcaaaggggggggggggcatgtttggggcacgcattgcgcttgcaacaaaactttggctgctgctatgtctgctgctatgtctgggataatcagttggcacaaattgatgaattcgaaaaggaggccccatgagctgctaggatactatgttagattgtaggaaagagatcctatgagattttttcagtttaatttaatagttgtataaattatatgtagctattctataagaaaacatgataataataatagagtaaattgtaccagcggtccttaaacttgtaagcagatttcacctaggtacacgaacctgcaaagcgtgcatcgagatccctaaatgtagtttattgtatcatctcggtccaaagtcctgtttgaccgtggttttaccagtgttcacctagtcgctaaacgctagtcggacggccacctactgactagcgactaggctgattaggcggcgactagacggattaggcgaattagacatttttttctatttctttcacgcaaaaatactgattctagatattcggtactcggtaaatataggcatttaggcaaatagcataaatcatagttaagttcagaaatcatcaagtccatacaacgcactgacactgcacacgaagcattgggtttagtacaaatctatagggatagcgaacacatcagtatagccactgtacatgcacatcataattcataaatcataactttatagatctgaggggctggagctaggagagaggaagaaaaatttatctagaactggaagaacagagaaggtgaggtggtggaggggagcctgatcccctgatggcctgatctagggttggcgtaggctgcttgagtggttccgtgcttgactgcttcaatcggtgtgtttgccaccttccattgacagcaaggatgaaggatgagatggagagcaggagcagcagaggagggggaagaacgtggagcagcagaggaggagagggaagaacatagcggcgcggtggaagatcgatgggcacggcgacggagccgtcgctcgtggcggtgtgaaaaaagggggtaggcagggattgcgctctctctccaggctctcaaataaggcaacctaaatccccttctataccgagtcggtcccgcgtggcgcttctaaattttatcacgcccaaattttgatttctatcgcctagtcgccgcctagacgcactgtccctttgtctaattgcgctcaggcaccgtcctgtccaggccgcctagaaccgtctaggcggtaaatcgactaattcactgcctaaggtgtaaactggacaaattgtcgccgactagcgattaatcaccgtttagacaggctaggcggccgtttaggcgaacattgggttttacttacgtggcatgctacatggatggtgatgacatggcgaaattttccctcctttttttacctgctctgccttcactatgcatgtcgagtcgccggtcggctttgcccgtaggccaacgacggatggattcggcaggacaacggattctgcagcggcagtgttcggcatgagtggatccggcgtcagccagtcaacacgttgcgcggaccaagccgaaggcgctaaggcatgggggctcggttccaaatggaggtgctcctatctcctatcgtccctagtggatttgtagcctccgtccctcaaggagggaggatccgacgcaggtgacacaaggaaatgacatatcctatgttgttgttccgctaacatgaagggatgacagatatggcagcaccagggtcggacgggaccgacgttgctgtcagccacaagcgctccgatgtgaggctccacattgctctgcgtcgtgtcctcatccgtgccatccatgccgccacctaaaccgaatcgaagggaaagagatcttagccaagttggagcggcaacgctcgcagaggagggagtagaagcagcatcccaagaagaagtaacatgctagtagcatcaccatgatgcccgccagtgcaggcatccgccgacacccatctctccggtcgcgagctcctccattagctcaagcccgtcactcctcccagcttaaatcatgtcggatcaagccacaacctatccgaagtcatcatccccagccaccgctctgccgttgggccaaccccgttgctagcgcatctaccttcggtggtcggcgtcgtctctctcgctgcctccctctccctttgctgttgtcgtcaatgcggtcgttgctcatcatcacagccgccgttggtacatccagcagtgaaggaagaagagaagaagaatgggagaataagaacaggaaaaggaaaatttgttcgtgtcatcgttcacataggatgccacgtaggcaagccacagtcaaacgagactctggaccagaattaatacaataaaccaagtttatagatcttgatgccatggattagccctgcacaaaaattgcaatggtaactcatgtatactcttattttgcagtcgtcgctaaaacctatcttatgcaggcaaatgaagcccaacaacacttaatttaggaataacagcacttcataatcaattcgtagctagcacgcaaatgaagcccaacaacacttaatttaggaataacagcacttcataatcaattcgtagctagcactaccaagataggtgaaatgtggaaagacagcctactctgaataccgtactctaccacaacgttttctacttcattttgccatcagcaaaacacacactgcctacaagggcaaaacaaaatattgcttgcaaactatgcacgcacacggcgtttctgaattgtgtagactaatcacatgtgtgtttttagggtaacacatcaaactattcaccgactcttacaatcgtctactaataaaaaaaaataaaaccaagggaaccgaaaccaagatcgagatacaatttttttgaaacgctttctttcacaagtctgtgtgctaccatattcgcgacgaacccacctcagtttcacctcagtttcaaaccctagaaataaagccaggggaaccgaaacttgacccctggtcaagatacaattttttgaaacacctttttttcgcatgtctgtgtgctactatattcgccaaacccacctcagcttcaaaccctagaagtcatcaaaatggctgagatcttggatgatcaccccatggaccgaccttttaagctcactttgtttcaccatattggcaccctcccaaggagacaattttctcaaaatgtgtagtttaacgttacaaacgaaaacagattcccctttcgatttaaacctgaaatagatttcgatcatattatgtgggcatcaacagttatcccacaaaaccccatggtgaaacaaaaaccactgggatgatcagcccatgcccaatatacagctttcagaatctacctaaaaacaactaagaattccaacattaaagaaccctgtacacccaaccagatggaaaatttctttcaaccgaccacaccagactgtgcaacgccttcttgcgcagaccaaaataatgactatatgtctagaagaagacaatgaactttgccgggtgaggaataaattaaggtgctcttgatgatctcattagcttgtactacggcaggtgagagctctggatacatcacataaatgtgataatttaaccacctctagttgaaaatcttcacagccttatcgaaagaattgcggttctgtaatttattcaaattgttgtcagaaaatgcccactgttcacatgtcagttagtaggagtcataagcgtatacctgattggacaagcatgacctttttggggtgacgtctgagtgctcaagtcctaggcattgttcccatggtccataaacatctttctatattaaataaacaaggcagaaaaaaattatttgagaataatccgactcaactcttaaaagagaatttaacccacctggaatcggctcaatacgatatctgaatcttgaaagtattcaccagccaggcgattgtgagcaatataagcaaatttccactgatcaaagtagctcacgtcagatagtatccaatatatgatacagcagaaaaggtaattgaaaagatcactaaaggtttacactgtagcaccagcctcaccaacagtaaacaagcagtaataaagtaatacaaaatcgatcgtgtatgagatgaaaggttgaaataattaccttcgcaaactgctcatcagaaaccagaagtttcttctgaatacgcactttgatatctgataatgtctcaccatcacggataagaaagaagaaaggttctccgtagtaatcaatgtgctggaaagattgagacaaatgattcaataagagaaatcccaggtcgccgttgcttctctcaaatggcacgcaagaaaacaaacgtcacaaaaaacaaagaattggagcgagaatcagagatgcactctgaagaaaatacagaacatgctcaggcaaatggaacgatgcttcataatagaaccataaaccagcataggaattgagaggcactgatcattgaggtcagcttagtaagtgacgttacacctttaggcagcattcagttgtgtccattggaggactatatagtggcccattattacagataaaatgcaacgacctggttgtttacaatgaaatgaaatgacacaataaatgcttcagtcatctcttgacgagacaatgcctaagaaagtaccaaacagtttgagcttatccaggaagacagttaaaacgtggatagatatttccaacattgactgagcatgttcacgctcaacccttccaaggccaaagccatatttcccattacacgtttcccatgtaaacaagctaaagtacaacgactagtcagtccaccatgtaaagtagcaaacctcaataatttctactatgttcttaatcactgtgacaagtgggacagctaatactttagagatgactgtttcatcacgcttagatcaaagaaggctgaaatgggatttactctgaactatatccagaatcatgatgtcgtgaacattgacatgttcctcaaaactggtcttaaatatatgacaccattgactctaattcatttgattatccatcttttctagaaatatctgtgcaaatagataaacattcgaggcacacttaaattactttgatgacagatcaagcggtactcttcacatgacttaactaagtaattgaataaatattgctggacatagtttgaggacgaagtcaattgtgttgtatattaaaaaccagagggagtaccaaatgactacaagcagtattgaaacattaggttctaaatatataaatacctgtttttctatgatgaagtgacagacatgaaccaaacggtctcgcacaccagcatttttctcttcttcaggaacctgaccaacagaaaaggaatatgtggagaaaaggtagctaattatgtacactaattaacaacatgttcagtttgagtgggttattccatggatgatttattccaacatgagatgaccacattttattgtgtcatcttattacaggggatgacgtgttgatgagcccactcattttaacaaagcatgcccaactgtaggtcatttgctttgtagcctgaacttcagattgcttaaaggacagaacatctcaataaagtttccgtataagcaaatgcttacctcttcaacacataacagtccattgaattcattaactgaaattttctccgaaggttgatacacctgaaaaattaacgaggcaagtgattgatcatgcataaaagaggtattttcaaccactattaagtatacgtgtaccttgatgaaagaatagaaaatattgttttctacgatgaaagcagggatgaaactttacatggtaaaatgaaatcatgacgtgagcattatgtgtttttcttaaagagcatatgacgtgatttttggtaaaacttggaagagtcaggcaaaacctgccaggttgactacctttcgtaatcaaagtgaaagaaaaaatctatcaactcaaacagagagatctttgttattttacagcaggaactgattttctacaacaatacaaccctccagtttcagaaacgagctttgcagtattttttttttgtgtgtaatggtctctaccctaagaataagcctttaagaattacagaagaactgttgaaataccttgcgtatcttgtttttgtagacctcaaataaccggaattcagcatcactataagataactcaacctgaaaaaaaatcattaaattgccatgcacacacaacacttgaaagaaaactagcagttgattcaccttggatttcatgtcctcaatcaaatcagacatagtgctaccttttggcaaccgtataaagtgagatgacacctgataagtaagcattagcacaggacatgatcagaaatatagaagtggttacaagcacaaaacgagttcaaacaaacctcattgtttgtagcatgataaaaggcaactctcaatgttatcagatcttgcagtactggcaaagggatgtccagtatctcataatacaatatgtcagacatctgccaaaccaaaggaagcgcaagtaatttcatgtaaaaggcacaaaagaagttgctcagaatactccataaagctgccaaacctgattgccattccttagcatgtccgaaagatgatcaagacctctatacttaatgtagtgagatttgggcatctgtgaatacgggaggtgttgtgtaaggcggagtttggaaggatcatcgagtccaagttgattagcaactttttcaacaacatcatcatacgtgaaacgctttgaacttcacaaatatgaaaataggaggggaaaaaaacagtgagtcatatcacagacaaaggaggtatgtcagttattatatgtatgttcaaatattcctggcacatacagctccaaagtgaagtcatcatcttttggattctcaagtaatctgaagtggacaacctgtagataacaacaataaattccacttgtgggaaataataaatgaaatatacagaaaattcagacaggaatctgtttttttgcgaaaaggaattatttgaaagggtagttgttccatgtttcactacagataccataaaccttaatgaagcagcgcccaacaccctacagacacacatatttcttccattgcacaatgtcattgacttttcaggaagaccacatatatatttaaaatcatacagccttgccaacataattcagctttccagaaagggaaaaataactacatggttctgatattctttactctcttcttacagctccaatctagagctctacgctcaaacatgttaaacttagggatgaagtgtgactgagaatagagatccgacaggagctatcggatgtgaatacataaaacatatctatttttaagagagtattttgtaatggatggagcactggagcatgacacaagaaaactgtttgctccatataccagtatgcttacatagtgaacaaaatagacattacagtggctagtggcacaaaccacaacaaatgaattgcataaaaaaaaaggaggaataaaaaaaatcaaaggagctaaaagaaatatagcagtgtatcaagacagagaatgtattagcagaaaagagctaaaaaagagaagctatagatattagaatttgatcacatttaggaggcttgcactgaaatatggtcacaacaattctctttgttcaagtgataaagttaacataattatttgtgtgattacacatatttcattccttaaaattagctggcggttatggtgtaaagtgcctttctttctcggtttctccaagcaggccatattggttatattggcaaatggcaatgtacacaccccaaaccatgtcacccacaagcacacccaacatgcaaacaggacagcaccataccaccaacttgggcaaaggtatgttccctatggaaaaacatacaagacaaacaaagccagactactctactggtaatattctaatccatgaagaagtaaggaattccatgttcaaacgtatcaatccaaacaaagattatgctaacaatttaacagggcatagaaaaaaaatgataatacgactacccgagctaaccggctgttctgcactgttctttacttctttttctttccttttggctcggtgggtcagagtggctaggctttgccagaaggatcatcgttttggtaagcttgcctcaccaactagctaatcagaccgaggtcttactcctcaccagctgagccgttattttccttttagcaatcctaatattagaagtagcttgactttactctttttttttcaattctgaaatagccttcagcccactggtaccagtggtgccttgatcacttgaaagtgaggctgttggaaagtttgtctctagtctatcccattatcccattcgcgagttattcgacttctttttcttaattagcagattttagttattggcatccataaggataatggggaaaacagaacaagcaaaggtctgttgcaactgttactgactgaaggacaaaaaaagaagataagataacagtccacagaaaaatgaaaaagcatcaattcatccccaggacagatatatttacctgtctattttggatatattcaaagaaagatggcacatcggcacagcgatagtggtccaacttttctggagaacaacgtttttggtagcatataatgtcaccatcttcaagcttaaatcaacaccagacagtcaaacaggataagtaaaatgacaactaaaactcttggaaagctaaactaaatctgttagaaaaaaacaaaatattaatagaacaaacctggcttgaaaggaaggaatcattaatgttaataggttcacacattacacttggctcgaacattacttcctacaaaaaattagggaaataaattgcagttttacaactcctcaaatggtgcctaactaaaatagtcaagtagaaccagtaactaaaaactaacctcatacagttcaatatcttcatctgactgaaaccctgccatctcttgcaatttttgcactatatcagctggcttccctgatgctttcacaagaagttttccaacatatctatttcataataacagggataatatccatgcagcttggtcaggtaacccatagaagtaaattaaataaataaatagctatatgcatatacaagagataggaacaaccttagctcttccttttcaggatcatacagcttgaagaatattaatatgtcatcctttgtctttggaggcacagaaataggatgattttcctgtacacatgtcataatctgggttaaattgtccacaagtaaaccaagatcaatgaactttggctaaacaagtagcacaacacaattgagtagatgacttagcaaataaaaagcactttagtaagtagttaacctgtcccaatgcaacctccaagaacagtttcaactcagaattgagtgatttatttgatggatctgtaaggtgtccaatctgcagaaacaaaatttattaattgcgagtcaagagagctgatagatgaaataaatggaagctaaagacaaacacaaaaacaaagtagatctctaaattgaatcaagtaatgttaataggtagataagcttaatcaaagtgcaatatccacacgcctggttggttggttgcactattaactcataaatctaaccaagatataataatatacctgaatcctcgcatatagaaactgtctgtgtattctgtatacataactactagttccacaaaatgagtgcaaggtaccaatctctgtttcagtacactcaaaccatgtatttcacaagagttctttacttgaacagtttaaaagaacagaaaatgcccgctgctcctaggggcatcccctcaactccaacgttggagaattgggaaaactggataagttccctaaaaagcaactttatggtgcaaattatgttatgtgcgcataccaagtttcacaggcaaattcaaccatactatgaataaactggactatgaagttatgcatatgtggaacacttgatgacctacagccaagaaacttttggggttaggaacagtgcacatccattatccacaaactggactatggtgcctcccatatgaaatcatatttgatctcttatatcctcttacccagtttatcactcccaccactgacaccttacttaaccaaacttcatctattctatactcatttaaaaagaccatgggtctttaaatggtaatgaagtgccacatacatccctaaacttgaagatataagttggcaagcattgtgatctggctcacttcagtcatcactttggacatggctaaaagtgttgatgtggggatgaaatagtgttgtgaagtcaacaaagtactcccttgttgcacaacactttaattgtggtttcgcatagttttagtttgaccactcccattttataaatactagtaccaatatgcccttccattgtaaggggcgaggctcatataattaaggatgggttaggagggcaattgaactcggagcgtgcggtgggagtagaatgaaaggagtggagaacaactccacttttaaagtggtagagaaaactatactccctctgtttcatattataagaggctttgacttttttcctagtcaaacttttttagttcgactaaatttgtagaaaaatatcataacattcccaatacaaaacaaacatattatcaaaatatattcaatgttatatttaatggaactaatttggtgttgtagatgttgctaaatttttataaacttagtcaaacataaagaagtttgactaggaaaaaagtcaaaacaacttattataatatgaaatggagggagtaggtattaaaaagtacaccatattgctaaagtgtgttacatggtaaatatataaaaaaaaaataagcccactcatcacaatcagacgatttaaaagatcatactccctccgacccaaaataagttagatctccagagttcaaactttgtgacagaatgagttcatttctactctgtaacctaccctcggtccacaaatacagaagttttactccttcaataccccttgcctacccaatcaccaataccctaaagttgcatcgcaatgcgaggaatgcttttattttgggacacagggagtaagttcatacataatggaagaaatcaaggctgatgatttcatgtaggtagcatggacagttactgtcaagcaaggtaatatgatgttaattaatgccaatattgcacttacactagatgcttcctcctggagagtcaacgggcgtacgggtctaaatgtgtggttctgtcgcttagcccataaccaaaatcgttgggattgtacaggaataccaaattcttttgataaatcgacctgtcaagaaagcatatttcaatcagaacaccacattttttgctatcatgataaaattccagtatgaacaaaatgttcagattttgatgcaacaaacaccaagcagatccccaacaaagcaactgaagtcaaacaacagcgcaatataatttgttccagttttctacttgcaataaagaaataataataacagcatacacatattcaatcaagtagacattatgttttcagtaaataatatattccaaacatgggacttcaaacaatttctccgagagactggttataactgaaaagaaaatgagctagtctgtttcttatactattttgatttcaacactgtatcagatcaataatggagattacatgtattccagagagccagcaaagataggcaaccaaagaaagaaatctttgaccatgttattaggcttatgaatataagaatctgatctaacccagtatgaactctcttcataactcattatttgttagaaaatcatatttgaggcgtatatttgtgtgtatgaaaaatctaaagcacagctgtttgcttcacctatggatagtcaaaccagcgaaactcaacatgcaattagacttaacttgtttgtttattgtcttttggggtttgtgtttgtactgtttccagttttctttcttctttaatgaaatgatatgcagttctcctgcgtatttgagaaaaaaaaatcattgtattgatatattcaagttatctttggtgaatggtgttgaatagcatttccatgcaacaaacatatacatgtaggttcgacaatgtgttgctctcacagaatatccatagactatgtttgttgtactcttagttggtctatttttacagagtcaacaagatcgatcaaagctaaacacctgtgaaagattcaccaaactacacaatcgggcttataagctaataatgaaataatgttactcactttaaatttaagaatggaaaactaaaataccagaattcaagaaagtactggaaaataaaataaaataaattgtagcgtagttatggggcatcatcaatgcaatacaattctgtgcatatcgtatattcattagatatacacattttgatatatcatggatgacaaatgaggctcagcaaaaagttaccttggcctggtttattgtcaaatgtttaggtgcccgaaggctttggatgttgtcataatccacaagatcaaaatatatatgttttccaatttgctctgcaaaatcagaatctcgggcaacctagaaaatgaagcactaagtgaggagcaactagaatgatagcattttcagataatgtaacgtatcaaataaagaggtaaacctttaatgcagtgaacatgtgggcctctgctttctcctttttcttatactctctttcttcattttcttttctcaacctaatctggtaaaggttttcatgacatcagaacaagttctgtgatacccaagaaaagaaaagggaagaagtattaccttaaggtgttctggtatgtcgttttcatctaaattgcaaataattttttctctgtcactttcacgaatgtacacaagcatgtaagcatttgaatgcttagtaaacctaagcggggtggtattcaatccaggattggtatgtgggagctgtaacagaaaaaaaagacattaataaaactaatagaagtaaaaggccgacttggggcttccagtgttcatgtgtgtatatacctcttcctcgccaccgtattgctcctctaatgcccgcttcatgtcttcttttgtcactcgttcatcatcaaacttgtacctaaattgtgaaagtacaaaacattacataaattcatcaaatgactgtccaatggaatgctaaaaaattgaagatagaaaggcagggcattattagcaacaaagcaatcgtctaacaagcttatcttcaaactaatgttaacaaaaatggaatgatcctttacaaagtcattaaggatattcatgcaaatcacatcaatccataaaaagaactcctgcaagcacaacaaaaataagatatctctttttaagcctagtaatgtaggtcttgccctctaatgcgaatcagatgttcaacaaaaaatattagccatagaactgattcagcaacaagtcactgacttgccaaaacagtacctgatgtgcattgtgtattcttgcttcattggaacaaattaattataatattgatgtacgagtaatatttttttgtttctgaaaaagttactacccaatacaagacgacagcagtcatgtcaacaggggaaaaagaaaataggaaagcgtatacctattttctagtaatacgttcatgctaattattgaccatttatgtatacctattaatgcaaaaggatcagattttgtattcttatgttttttatgaagaaataaacaagaaattatttgctaggagaatcaaaaaatatacctattcaaaaagtttaacatctaaagctacagaacataccgttgtgattcacaatgtcattaaagcataagtccttttctaaataaataacatttgactatgactaaaatgaagtaatgaactgctgtgaatgataaaacacagcatactgtattactgtttcacaacgagaaagagaggatatcattaaaataggatatcattgcagccatgtttaaaaaaatgaaaagcagggagtaggtttttatatcatatttcatggatcaacttatccgttgatgattagccaactaggatgaaaataagacgattaactataaaggaatatctcaagtatgttataaagttcatagagcttccactatttaaacttagatgtaccatatatctgaaagtgccgggcgtataaaggcgtagtagtgtccaccatgaccaccaccactatgaacaagtacgctgcattcaaaacaagttgttaagactagtgtaagggtccaaagcacttgtcgataacaacagaaactccaatgtatgctcagccaggacaagctaaactgagaaatgcttcctatacacaatccaaaaacttcacaagtaaagggtgtagaagaaattgtctaagttctctgcctgaaaatagcatgtgacatgactgaccactgacatttgtaacagctatgtaacacaaattgcgtgtcaatgcacaaacaagacatacaagggaccatatcagtatatacacactggccacaacttcaaactggaacgagtgagaccaaagtaattactaaagaaaacaaggtggtcattcctaacattggttgcagagtttaagcgcagcaggctggctgtgggccataggatacaggagaaaaacagcagtgcagctgaagcctcagctagctgatgcatgcactgcaacagtcttgaacacatgtctttgatagtcttttttttttcctaataatatgttggtgtaaaaatatggtgatatcatggtactttaattgtcaaaaatatatttctctgtgacaacttctacatgtgccagtaatcaaaattttagaacatcaacagcaagcaagtacaggataactgacagagtataacatactacaaagcaaaacagaaaacataaatcacatggagagcttggaactacctgtgtagagtatagaggttacgcaccctcctgtcagcttctggagagaggtattttccatcatccttgtcaagatctaattgtaatgggaactcatagcggtcatttatctacattgtccaaattagtttagtttaaccagtgcaggaaaaaattgtgtgtataaagtattttgcatgtttccctcaaaagtaaaagatacagttgagcctccaaactttagcaagcctacttttaagcaactaaataaggaattttcaagccagtgagaagatattaatccgagatattgcaagcgaactccctcgttttcaacatttgaagcaccaggttctatctaatttttagccttaaaaaaaggaacttcctgaggatcacccaagtaaataaacaaaataaggtgtcaatggcatgtgcagcactgtagcaaatttattttctgcttgttttgttgctcacactttcatcaagaaatatagaaagtactcctagcctacagcgcatctagaaggtttttcgtgtggagatgggatattcaggagacaaattaaaatatgttctggtgcatgtaagccattgaccattatgttgaaatgaggacacacacataaaaaaaatacaagaagcggaaaccataattgcattaagaaagatcttctgttacaaaaggacattgcaaatgcgacatcattatttgtcctctcatggctgcccatgttatatttcagaattttaaaagcaagtcaaggaaatgaagctaaatttcaagggggaattctccatatcttgacagctaaggctcttatcatgcaaaacacaatttggaaaatctagttttccatgtccttgatatgtgagactacattatgaaaagttcgtttgtagcctatgttaaatattagcaagcgccacaatgaaaaggataaatcatagatgaaatctagaaacaagccagagaaaatatagagtgaatttcagaccttaaccatggtatcccgcacaaaatcatattcaaaccgctttaattgaacttgcaggactggagggaagtcaataaaaagcatccctttcttggcatcctgaaaagagaggacgaaaatgttctgaagcacacaatctaaaaagtcacttcattaccaagtaatttgtatgtgtcaaagcacattttccttatcaagaatctagcattaaagtatacttaaaaaaattatagatcaaccagaggtggaaaataatattgatgtgctatgtcactggcatggtcacattcaaatatgatgacactttttcaattgatacatccgtgcacgctggggatagtgaataataatactacccaaccactcaacatagattcaacaatgtgcaactcagtgggtgagccatgagcatatgatatttacataagttacccttaggatgggaaaaccaacatcctagcttgtccttgtggatgtgccagaatttaactaaaagccaggcctacccacatggatgggctgggaccaaatcaaaccttagataatatatgaataggtttaacacagctcatgtgaaagatcaatatggaattgtgcataacaacataggaaaagtgttgcctaaaatgaattcagctgcaaagaaatatttaaatccaaacattggtaaatgtggcatttgaaggttctagatctcaaatgtcagtgggaccaacctgcaaaccatgtttctcagactggtatttattatcaccttccaatctctctacttcaacatacttatcaaatgatgcataaacatctgaacagcccttgacatcaagtgcaagatctagaaaagagttacgaaaatacatgataaatctacaatcatgatgaatagataaaaacaataaagaaacaaggtccagatttcaccttgtcacctaccatagaatgattctttccttgtagatttgtagtcaacattaatgcactcaatataattcatatgatgaccttcaaatagctgttgaattgtcccttccacagtagttccctgaatcgagagagtagttgtacattgatgaaacactatttattatcttacatataacaaaaataaatgtccaaccttcattttgttttccagtttttcgcagagaacacgattcagttcttgaacatcatgctgcaggaaagaatcaacggtatcccatccaaaagatttggtaagctcttttgtagaaacactattgtcactatgctgaagtttgcagaaaagactttgcaaagccaaagggatgctcccgcaaggtgtatcattctctgtagttggcatatggtatacagcctaaaatatcattctctgtatcagcctcgcatcataggattcatttaagagaatttacaaatttagcctcacctttcggaagtacggaatatggtaaagcgtctgaagaagagaattcatgtagcatgtagccccttgattcttaaggccaacatagccagtctcctttttggaatcataattccagaaatcaactattttacgcacagcaacctcagcctcaataatgcatttatcattcacaatataacctttagtcggatcatatagatctcctaaatgcataaaagaagtgaagccccaatcactttcccgagtactgaaatgatgtgctgcttctgtggaggggaaggaaactcatgaataacgactggtgaaattcataaagtattgtgcttaa

SEQ ID NO: 8083 - DNA, 43488 bp, Oryza sativa
  unsure (1)..(43488): unsure at all n locations
ctctcgggagtacgacgtgtatatattggaccggctcaccggggcgcgtgtagtacgtacgtcagggcaagtggtagtacaccgtttaccgtactacacacgggagcgaggcgaagagttggcggccaacaacttgacagcggccgcgtgggcagttggcgcatgtacacgccgctactcctgtgtttagagagtttggattggaccggttgtggctaggctgggtggaccaggtgcattgagccgctgcgagcctctcttgccgattaataagcagccagtggtacagtgggatgatagccacggaatctccgatctgggatgaatggcgagaaccgatcgagagaagatcttttaattaggaaagagttgacctttgcttctcagctgaggggataactaactgaactatatttggaactgttaatgcatcgtctctcttcatcaaaatggaaggatgtacattgacttaagcaagcgtgcgatatgatctatacttgcaaaacggcgtcgtcacataatcttatgtaagccatatggacttctttgcaccgtgtcgaagaattttgcggtttgcaaatgacaatttcgcactttcgacgaacgtgcactttcaacataaacgttggaaattttgaacatcgctctagcaaaaatgtacctgatactattctgttccctttttataggaaaaataatgtgctctacacgggttctagttaatcacctccgaaacaggataatttaattagacataaatatatatgaacactcatatcaagtttaaaacttgaactagggtaaacagatttaaaaaaaaaaaacctaatcagttaaactatacttaccttattgttatccgctcattttagttttactaggtgatataagagccataaaaatgtaataccccctcagtcccaaatatatagtaatttaagattagattagatatataatagtattatgaataaaaccattgttctacgttactatattttagaatcgagagagtaacatcttacattcttcttatactccctccgttccagaatataagaagttatagagttgggtacggttattaagaaagtaggtagaggtgaatggtggaaagttatgattggatgagtagtgaagatatgtgtgaaaagtgaacggttaagggttgtgattggttggaaagagaatgttggtagagaagttgttatattttaggacaaatcatgatgaaccctgagttcctctcgacactcaagactgttgttggcccgatctttcggtgagttgtgataactacgatttgggagaaacgttgacgatccgactacaaccgtacgagacgttgtgttgcgccttagcgatcgatacacctctccgtgggttgttgatcttgccggtgcagatcaaccctattcctgcaagcaaatcgaagaaacaagcaagaacaagataaaagtaatctgatattgcaaataggaattcaatacaaatgataagttggggttccgaagaacaagcagacggacggtctagccgacacgcgcgctgcaagcaagtagcaatggctaaactttattctaacaaaaccccagaaaccctgaaggggtaactagctatatataggggtgggaggatgacctaggggtgcctagggtcgtgctccaccagcttggggcgcaccccacatgggccccacctgggccggggtcccaaatgaagttacaagcccatagtcccattacaggtgtcgcagcaccttgtttcttcagttgctgccgactgagatggaatttggcaatgaggcttgatgcattggaaagaggactccgagagctttccatcaagtactcacgggccgaaaacggaggtcgtatggagcttcggcggccgtttgaagtcagcagggtagtaggtggccgaattggattttgagacttggaggactcgaacttgatatcttgttgtccatccatgaggtgagcaacggatgtatccgtagtagccatggtcacatcaaatcataagagctaaaagttgttatattttgagacggagagattacatgattggaaatctttcacatatttgtttcaggtaataaaaagcccgttctttttttatggtttattctctttcttttttgtgaatggaaaatgtaccacatggtctctgtggctgtgtttttcttgtaagaggaaccgcaaatacacaaactagagaaaagactcctctaactttgtacagtttgtagttgtactactgagatgtggatcataacaaagtggagcccacatataagtggcacaactgtaaactaagggcctgtttggtacagctctaactcctaaatattgctccaggagttgagtctggagtggagttngaaaaacccttccctggcatagatttgaggatctgatatactaacaagccaatgcaattatttaattctatggcaaatatgcatttcagggaacttacttctggaggtccatagccgctaggggcaatgaagacaactggatgcccacaaaactccacctgttcaactgggccgatcatgttggagaatgatatggtagtatgagagatcatacgatggaagatagcagctgctgcctgtttgattcacaagttgcaatgatattgggaacaaagaaatccacaggggatgttttttggcgcatggctcaaaatttggcgctgtaatgctctttctaggaaacaaggaagttaaccactgccaacaactgggactgtacacaatttctagtgaatatcacaatcttgtacacctacgattgtattttcttgataactaaattagcatggttagacagcaaatactaaatcaggtattcagttatacttggagtatcctgaaatctattgttttgtgaactaaaccagtgcttgtcaatagaaacaaagtgattatcgcattgcctgccaagataataatataaggatcaagttgctgatgaggcgatagtacaataaaggacaaatttaccttgagcccaaaaagtttgaggatcacttctgcagctaaatgagtgaataccacttctaatgagctcttcttcctatcaacaaccttctttgctttccgaacgtagtctagtggatctttgtgcacgcctatgaagaacgggaggattatgaaaccaagtgcatttccccatttcacttcatcctctctgccagaattgatcatatctacgtatgcctggccattgaaatgggaaagaaatcacaatagattttaccagtccaaaattgctaccactacaagtatagcaacaacaatgttcggtcctgtgagcttaaattgccaatcttgaatccaagtataattattacatgcaggcttgtggttggcctcaaattgacaaggaggatcgatctcaaacgtatatcctcgtcagtgtccatgtcacctgcaaaggagaacaagcagcgtgggagtaaagaactactgtatcagccaggccgcaatttaagagctactgtatcagccaggcagcagctgctggagcatgattttattggacgcaattggtcacctgacttccggtagtaatagcgcgacagtgcagagtacgtgatcccaaccagcacatcattgaccgtctgcgagagtgcaggcaaacataaagagaggaaataaatctccccagaacttttgctgagggttctgtcctttgctacattcaatttgcaagcaggtgaagtatagaaatggagggaaaatgatagacagaaaaaaattcgtgtttaatgattatgtatactaatattttatccattttaaaataaaaaatctgataatcgatatggcataatctaggaatacgaatctaaaaaaatctattatagagacggagagagtaggtcctatgtggaagatattattacttctacagaccgacagtttataagacagcaacactagaccaaactaacgaaaaaccattagtcttaaaaattttatactctcttttttcttttttcacttgttagcaggatactttgactacatgacttctaaaagagtatatgtaaaaaaatttgtattatcaaagcattttgcatgctaaatataactatactatttaagttcataaaaacatcgtaattttatttaaaaagatactggtcaaagataatatcatactagtcaatatagtggagtacttctaatcttagatcaaggctagaaagtgacaaaaaacgaaattccgtaaatcaattctaaaattttaattttaaagttttctgcaatttatatgccgctatatactcaaacaaacaggctctctaagaactaaagaaaacatcgcttacgcagttcatggcgttcttgacgagcttgacgtcatcaaggctaagcccccggtgcacgatgcgcttccgctggaactccccgtgcttcacccgcttgaacagcgtgtgcggatccttgaggaacatggtcgtggcgaagaagctcgcgacgtccaccacggtgtgccacgccagcgcgacgaacgaccagagccacgcagggaacgccagcgcgcccgccgacgccggcggcctgggccgcgcgtagatcgcgccggtgcgcgtcggctgcggcggcatggcgggcagcctcgccgggtcggcggcgctgcgcgtgcatgccatgaggagcgtgagcagcgacatgccgtccccgagggagtggtgcacgcggatcgccgtggtggccgccgcctccgacgtcgggaagtccagcacgtggaactcccacagcggccgcgactcgtccatgggcttggtggacagcgacgccacgtagtcctccaccgccttgtccgggtcggccgccacggcgtccatgtccaactccgggtagatgatgtggtcgtccaggttcaccgtcgtccgcacccaccgcgggttgccgccgtcctcatccgtcacctgcacacgcacacacacgtacgtaccgttcgtcagatcagcccaagcaccagtggcgagctcctgggcgcgccgcccgcggtacggcaggtgtacggaccgacctggatgctgcggaagcgtgggtagcgcgcgagctgggcggcgatgccggcgcgggcgacggggtcgttcaccggcgtggcgatgccgatcaccacgacgatgaagaagtcctccacgagccgcgcggaggggctgacgggctccggcggcgtcgccgccgcagcccccttgctgccgccgccgccgccgtcgccgacccggaacccattgccgccgttgctgctcgtcgtgcggacggtgagttgccgcttccgaagggcggtggctgcgcctgcacccgcgtccatctcgtgtgggccgcggcttaactgcgtcgcgctagctagagaaagtgtagtgtagtgagctggttttgcatgggcaatgcgcgcgtccaccgcctagctagaccgagaaacctgttccgatatataggccagaaatgagacgagcgttgtgttggtggtagtgcagggtattcatgtggggactgggcgcgcgtcatccgtccgtgaccagggccgacgattcaaccaggggaaaaaaaaacagggctcccgtgaggaagcggcatcttgtctccgccggaaatagagctctttgttgttgtagagtagagatatacaatatacattgcgtgatccagtctgtgtttagttcacaccaaaattgaaagtttagttgaaattagaacgatgtgacagaaaagttgaaagtttgtgtgtgtaggaaagttttgatgtgattgaaaagttggaaggttgaaaaaaatatttgtaactaaacaccggcccaattgatttcttttatgcatcaaattgtgaatatgtaatatttagttgttcgaattatatgctctataatgatagactatgggcatattccgattactgctaaaatataaatattttttagaatttgccgatgttaaaattagcaagttgactatattgctaaagtttaataggataagctaaatatattgttatcaaaattctttaggcgttattaatgtttggtaacaaacttcatcatccacgtgtttgtgttttttttaaatgatatggttcaatgtcacaaatctgaataggctctagaacttcattgaaataaggatggaaatatttttctcggcgagaaataaattttattatcttattaaagcaaaaccgtagtttcatcaccgatcgaaccgatggactggtgacagagggttgactaggagaactgtgtcatgagtcgtgaccgtacagccgccaactgccaacggaatgtgttaatgctactagctttcacgacaaatcgacgtgattaattatgcacgatgagctcgccggatgcgagcttgcgggtcggattcctaaatgtgatagcgatcttacattcaggcgatggtgtccaatggcagttggtcaaaacttgcctagatggttcgagatttcttattaatgacgtgatatatactcctcaggtttcattttaattgaagttttagacaataacacggtttacaaaatatatttttgaccttattttcctattataatatacacaataaataaatacatgtttacttttattatattgctttgaaagacaatctatacgttgttctagtttctttaaactaaatatttttaaagttattgatggtcaaatttataaaagtttgatcttccaaaacatcttattatagaaccagagggagtatagaaatgacttgaatgatgtaccactgtgccgtgtgccaggtgtactcgtatttgtgaacgtactaatgttaattaacgcgtacatcgtccatatatgctcaagtctctcagactgatctatactgctaccaatcacctacatgatttaatatgtacacagttcatgccatggcaaacggagattttattatggccctctttatttaggcttaggtttattggcctagacttttaagttaacttattggcttatatgatttataagacaatggatttaatgtcctaagtttagtggttgagtcatacatctacctcacgtaagccaaaaaagcttctccaacctagcttttggcttaatagtgttaaagtggcttgtggcttcaaacaagccaaacggaaaagctgcttgtttgtttaggtttagacttttcgacttataaattggcttataaatctaaactaaagggcttatgtagctccgcaggcgtgaggcttcttgtgtttccttaattaattgctagtgcatctttggagtgcaaatatctgccagcttcattgtgggacacgaaaaatccatgaacggcccaacgatatataattaattcgcaggcaaacacccgtgtgcctgcggtgtgattgtgttcctttcaactagaatcaacgacaattcgtgttactacgcgcaaacgaaatacggagttactaggtactccatctggttataaatattgaatattttaattttaaattctagccatctacaatttctcaattacagcttttaaaaatagggtataagaaaatcgacaaattttgctacaagacatcagaaatatgtataatttactgatagatattgtaaaaacgtgtcatggctaaaagacatcctagaaaattagtgatttgctgaaaatgacacttctgactcgattggagagagaagttcttcaaatagacaataatatatccccctagggtcacttgcttcaaacatggtgttggagtaaaaatttagaatttatggaactctaaatctgccactaccataaatacatcactagagcatatatcatatttcatcttcaattctttctcgggtaagatatctaccaacaaattacacaatttgaagtgtcctatagcaaaatttgtcataaaaaattgtcttgaaaaatactattctaatagcataaacctattattagtttttataaatttattctagtttaaaatttatgattagaatttttaaaaacttaatcaaatattgttctgaatattaaatatttgtgactagctagagtgagtacaaggagtacagtacaagagcaaatgtgttttacagagcatactatatgcttggcctccatgcatgcttatgtctcaacgtcctagaaggaggcctcgggatttgttggaaatttgtctcccgaaatctggagctctccaaaaccacttgagtttttttaattgaatttcaaatgaaatttatcaaaatttatgaaattcgtcatatcactggcctagcactagcatcttgacccttcaatgaaagtgtgaaccttaagagacttactccctccgtctcaaaaatactcaacctaggagaagatgcgaccctcatagtacaacgaatctagacaacttctctgtcacatcatctcctaggttaagttttttttgacagagggagtataaaataagcccaaaaaaagagtcaggggttaagaactctagtgaaaaagtttgtggaataaatagactttatttcctaaattttattaaaaatactatcctaaagtactactccctccggtttcaaaactgttagacattttgagatttacttggtcaccaaagacttattagcccttgcatgtatacatacattcccagggatggcaatgcttcgatccccacatgcacaaaattcaatggtggactcaatccactagactacattagagcaaggctaataggaacaagtttaagtttaatagtatagccaactactagctccaattcatttatagtcaatctaatagctcattcgagttcgtgctacagctgactataaatctgtagtccgctgctcttctctctccttatttatctccttaaaatatgtttatagctggcttatagcctgctattgtacctgctctaatacagccgaccttttggctataaggttttttgtggtcttctctcacccacccatataatagttagctctttacaattaatatagggctcacttgattctctcatagagtttcttggttcttatgtccaagtcggttgtaagtttacagcccacttcttctctcctcaacatcagcatttagtcggcttatagcctactattatacttgctcttagaatttcaagtataatatgcaaactaccgtatttaatatgggcataatagagaataggcacccaaataaatccctccttgtatatgagatcatgtctaaaacgttaagattatttttgaaactggagggagtacttctcactccaactactgtcaatttaaatttctccccatcttacttctcaaccaccctctctcttccaaagactgctttgtttaacgaggacgtatagatcatttaccttccttcccaatttgtcttataaatgctagaattgtttaacgagtctgtttctttgggttcataactgcaaagtaatgtagattacatacaagcttctccatacaaacttatgcgcatttcactgtgatgttctctacttttcaaataatacaacgaagatagtgatgatgaggatgctgacaaagttgttgcgcagcctgagtcactagaggtataatactgtactgtttacttgatggaaatgcatgcaatctgcggttctcaaattagccttgcaaatttcttcttattactggcagtgacaacagatctttcagttcatatacacatgcttattggaggctgaatgcctctcttgcagtacacatggaaatagttgatttattgatgagacagggaacttagccccgcaaacccaatctgaaattttcgctccataggagatttgaactcaagggtatttttttacccggcctctacatccaatggatatatacggccattgaaatagagaacttagccccgcaaacaacctaatctgaaattcgctccataggagatttgaactcaggactttggggtactactcaggtcactgtaaccactaggctatatgccctttcgtagttatcgatacttgtcctacttgaaagcttgtcattcctttgtattatactgctttaccaataggatgatgaagatgatggggatgatgctgaggatgctgaagggaaggtcagtcgtaattggagtgttctaaagactgccggacattctgaaaagccaaaggtaccttttcattattatcagttgtgttctaatggaaaaaagtgcagccttttggcactaacaaatgctgagcgtgtagcattcttgccagtcctattcatgagtcttgcctaatcatgtgcatatggtttagaaaattcatggaagtgtctaatgcatgcatagagtttgtaactgtatcaactcccactccaagcacgtaacgtaccctgtcgtaatggatacattcgtcagtgatcacaactcagtaactcacggaaaactcgaagaaagatcaactgtcactaaaagaagctattgcagattctgagaacttgactgattttcttatggactttgaagaagatgagtaatatctgggcatttactttactatgctacacgtacgttacacatggtaagcaaagtaaagcatagcagaccaccatttattcttattttttcagagaatatttaaccaaaagccagagcttgttctctggaaacttctgatcataaaacatctgatggtttcatttgactttagatttagttgctacagtgcatacaaatagataccacttaccagtagtattagatatttggatggtactccctccgtactcgtaaaggaagtcgtttaggacagcgacacggtctataaagcacaactttaacttcttgtttctataaaaatatttattgaaaagtgatatatgtatgcttttatgaaagtatttttcaagataattttattcaaactcaacaatttgagagttatttatatcacttttcaaactcaacaatttgagagttatttatgatttatattttcaaggtttgacttaaatattatcctaaacgacttcctttacgagtacggagggggtacaatcattcttacgaatacatgcatgtgtgcaatgattaagtagtgccttaagccttggtgtgatgctttcctaggctcaaagctgcatcctttatctgcctgagggattcggaaaaatcatccaaaagctcatgacaatctggaaattgtgcctcgtccacggcaagatttaccatcatggtgttaacgtaactttgaaaattcacggttaaggcctacacaagcaaaccaaacagttagatgtaaattaggtcttgctcatcacatctgtacccagattccatgacaaagtgaaaaaaatactttcaccatctacaacgctgaaggattattcatcactatgcacttgttatccttgttataaaagtgtcatacaagggcttaattacttcttttttcaacggatcaaagcaattagtttcagtcagattaccttattttcgcgatgacttaatgatatatggtagacagctaccaggctatatttcatgggaattttttgggtttttttttttcatactgtttttgccactaagccaaggatcatcgcatgttctgacgttcgtcattcatttgttttttagccctagtgacaaaagtgagatgctcatagcaaaaacaaggtatcatcattccttagtggcaaaaaaacccttccctgtcatagatttgaggatctgacatactaacaagttaatgcaattatttaattctagggcaaatatacatttcaggaacttacttctggaggtccatagccgctaggggcaatgaagacaactggatgcccacaaaactccacctgttcaactgggccgatcatgttggagaatgatatggtagtatgagagatcatacgatggaagatagcagctgctgcctgtttgattcacaagttgcaatgatattaggaacaaagaaatccacaggggatgtttttttggcgcatgactcaaaatttggcggtgtaatgctctttctaggaaacaaggaagttagccactgccaacaactgggactgtacacaatttctagtgaatatcacaatcttgtacacctacgaattgtattttcttgataactaaattagcatggttaggcagcaaatactaaatcaggtattcagttatacttggagtatcctgaattctcgattgttttttgaattaaaccagtgcttgtcaatagaaacaaagtgattatcgcattgcctgccaagttaataatataaggatcaagttcctgatgaggcgatggtacgataaaggacaaatttaccttgagcccaaaaagtttgaggatcacttctgcagctaaatgagtgaataccacttctaacgagctcttcttcctatcaacaaccttcttggctttacgaacgtagtctagtggatccttgtgcatgcctatgaagaacgggaggattatgaaaccaagtgcgtttccccatttcacttcatcctctctgccagaattgatcatatctacgtatgcctgtggccatagaaatgggaaagaaatcataatagattctaccagtccaaaattgctaccactacaaatatactagcaacaacaatgtttggtcctgtgagcttaaatggccaatcttgagcccaagtgtaattattacatgcaggcttgtggttggcctcaaattgacaaggaggatcgttctcaaacgtatatcctcgtcagtgtccgtgtcacctgcaaaggagaacaagcaacgtggtgcaaaggagaacaagcaacatgggagtaaagaactagtactactgtatcagccaggccgcaatttaaggtggtgtttgatccagagatttaaatttagtctctgtatttagacactaatttagagtattaaatatagactacttacaaaactaattacaaaaatgaaagctaattcgcgagacaaaatttttaagcctaattaatctataattagagaatatttactgtaacatcatataggttaatcatggattaattaggctcaatagattcgtctcgcgaattagtccaagattatggatgggttttattaatagtctacatttaatatttataattagtgttcaaacatccgatgtgatagggacttaaaaagttatcagccaatcagcagctgctgtatcagccaaaattggtcacctgacttccgttagtaatatcgtgacagtgcagagtacgtgatcccaaccagcacatcattgactgtctgcgagagtgcaggcaaacataaagagaatgaaataagggcagctaaaattgaaagtttaattgaaattagaatgatgtgatgaaaaagttgaaagtttgtgtgtagaaaaattttgatgtgatgaaaaaattagaaatttgaaaaattattttggaactaaacacaacgtaaatctattattttggaactaaacacaacgtaaatctccccagagcttttgctgagggctctgtcctttgctacagtcaacttgcaaacaggtgaagtatagaaatggagcgaaaatgatagacagaaaaaaaattcgtgtttaatgatatttgtatactaatattttatccattttaaaataaaaaatctaataaacaatatgacatacatattctaataatacaaatataaacaaatctatttcagagacggagagagcaggtcctatgtggaagatatttttactgctaaagacctacggagtacagtttataagacagcgacactcgaccaaactaacgaaaaaacattagtctcaaatttttacattccctttgttcttttttcacttgttagcaggatactttgaccacatgacttctaaaagagtatatgtaaaaagatttgtattaccaaagcattttagatgctaaatataactatactatttacgttcatcaaaacaacgtaattttctttaaaaagatactggtcaaagataatatcatactcctagtcaatatagtggagtacctaatcttagatcaaggctacactactagaaaaatagtttttacacaggcggccaaaaaggttttcgcaggcgggggagtcatccgcggctatcccatcgcctgtgaaaataggttattttcgcatgcgggtccatggcccgcctgcgaaaataaagcgagggaacaaaaaaaatccggcgctacccgccggcgccggcatcctcctccggccgatggctctccacctccgtccggtgccgttacccgagggcgaggggagcgccgcctttgccgccgctgctggccggctcccctcttccgtccagatctgggaggggagtggccggtgctgtctgcgccgccgccgccgtcggcgtctggggggaaggaagttggtgcccagagccgccgccgctcctcttggccgccgcctcctccttgcgcgcatcgaggcgccgacggccgccggctgctcctctccttgcgcgcgccgaccaggccatcggttcctctgacgtcgtcgcggcccccttcctctcgccgccgccaacctcccgccaccgccgccgccgcactcgtggccaccgccctcaccccgccctccggccgctggccaccgccctccgccgccgcctccaatggtagacgccgcgcgccctacaccgccgtcagcgccagggagaggaggagaggtgaggggtggggagaggtgcgggagagagctgagaggtgagggaaagaggacatagaaaaaatctagggtatgtagcctctatttgtattcgctatgtattttcgcaggcggaccatatttttgcaggcggaccacttatatggtccgcctgtgaaaggcgggcagtgggtttcaccccgatttgtatttttgtaggcatctatttggctccaatggtcatacccgtctggaaaaataaaagaccaatgttgctaaaaattactccctccatttcataatataaagcacaattacttttttttaaatgttccataatataaggtatgcatacatgtaggcaattaactatggccccttctccattaaattattattttttaaaatcatgcactctcatgttccctaattctattagattcatgcattgtatttattaggatgatccaaactacaagatgataataattatttcttggtcttttagttaggggtggttatgccttatattttggaatggatggaatatttttctagtagtgctagaaagtgaccaaaaacgaaattcttaaattttaattttaaagttttctgcaatttatatgccgctatactcaaacaaacaggctcgctaagaactaaagaaaacattgcttacgcagttcatggcgttcttgacgagcttgacgtcatcaaagctaagcccccggtgcacgatgcgcttccgctggaactccccgtgcttcacccgcttgaacagcgtgtgcgggtccttgaggaacatggtcgtggcgaagaagctcgcgacgtccaccacggtgtgccacgccagcgcgacgaacgaccagagccacgcagcgaacgccagcgcgcccgccgacgccggcggcctgggccgcgcgtagatcgcgccggtgcgcgtcggctgcggcggcatggcgggcagcctcgccgggtcggcggcgctgcgggtgcatgccatgaggagcgtgagcagcgacatgccgtccccgagggagtggtgcacgcggatcgccgtggtggccgccgcctccgacgtcgggaagtccagcacgtggaactcccacagcggccgcgactcgtccatgggcttggtggacagcgacgccacgtagtcctccaccgccttgtccgggtcggccgccaccgcgtccatgtccagctccgggtagatgatgtggtcgtccacgttcagcgtcgtccgcacccaccgcgggttgccgccgtcctcatccgtcacctgcacacgcgcgcacacacacactcgtgccgttcgtcagctcaagcaccagcggcgagctcatgggcgcgccgcgcgcggcaaggcaggtgcacggaccgacctggatgctgcggaagcgtgggtagcgcgcgaactgggcggcgatgccggcgcgggcgacggggtcgttcaccggcgtggcaatgccgatcaccacgacgatgaaaaagtcctccaggagccgcgcggaggggctgacgggctccggcggcgtcgccgccgccgcccccttgccgccgccgacccggaacccattgccgccgttgctgctcgtcgtgcggacggtgagttgccgcttccgcaggacggtgtcggtgtctgcacccgccgcgttcatctcgtgtgggccgcggcttaactgcgtcgcccgtcgcgcgctagctagctagagaaagtgtagtgtagtgagctgagctggttttgcatgggcatgcgcgcgtccaccgcctagctagaccgaaacacatgttccgatatataggccagaaatgagacgagtggtgtgttggtggtagtgcagggtattcatgtgggggactgggcgttatcggtccgtctcatttctggtggtagtgcagggtattcatgtgggtactgggtgttgaaaatactggacctggccgacggttcaaccagggggaaaaaaacagggctcccatgaggaagcggcatcttgtctccgccggaaatagagctctttgttattgtagagtagaaatatacaatataccttgcgtgctccaattgatttcttttatgcatcaaattgtgaatatgtaatatttagttgtttgaattataggctttataatgatagactatgggcatattcagattactgctaaaatataaatattttttagaatttgccaatgttaaaattagcaagtcgactatacactgctaaagtttgataggataagctaaatatgttgtaccaaaattcgttaggtattattaatatttggtaacaaacatcatgcatccacgtgtttgtgattttttttttaaaaaaaatgatatggttcaatgtcacaaatctgaataggctttagaacttcattaaaataaagatggaaatatctttttaggcgagaaataaattttcggagtattatctttaagcaaaaccgtagtttgatcgccgatcgaaccgacggactggtgaacagagggtttgactaggagtactgtgtcatgagtcgtgaccgtacagccgccaactgccaacagaatgtgttaatgctactagctttcacaacaaatcgacgtgattaattatgcacgatgagctcgccgtatgagagcttgcgggtcggattcctaaatgtgatagcgatcttacgtactccactactcaaagaaagtcctatagcacaattttcaagtcaaaccttgaaaaatataaattataaataactcttaagttgttgagtaaatagatttgtcttgaaaaatactttcataaaaatatacatatattactttttaataaatgtttttttatagaagcaagaagtcaaaagttatatctttttaataaatatttttttatagaatcaagaagtcaaagttatattttgaagaccgtgtcgctgttctaagggcaagtgctatggtagatgtgactatcacctctaaatttatctattttattcactcatgaattaagaggcaacacatacaatgtatcacctctaacacacaaataccaatatctctaatactctcacacacttcttgaaatttgtgtggaggttatctcttgatttaggggtggctcatcttctctctctccacttctctcctctacctcatcacccaatctaatgtggcatttttaggggcaacatatgagatattatagtacttgctctaaacgatttcctttaaaaaacggagaggagtacaggcttggcagttggtaaagcttgcgtggttcaagatttcttattaatgacgtgatatagagatgacttgaatgatgtaccactgtgccgtgtgccatgaacgtactaatgttaattaacgcgtacatcatccataaatgctcgagtctctcagactgatcttatactgctaccaatcacctacatgatttaatatgtacacagttcatgccatgtagctccgcaggcgtgaggcttattgtgtttccttaattaattgctagtgcatcttcggagtgcaaatagacttttatttcctaaactttattaaaaattggtatagtggcccgcgcagattgcgcggctagtatcgttacattcttttatacaatatcatatatatttttatattttattattaaaatatattaaaattatagcataacttttaattttgtaccaacttgaccaaactaaggctgtgttcgctacctccagatcccaaccggaatagtaacacacggaaaacggaacagtccattagcacgtgattaattaagtattagctatttttttaaaatgaattaatttgatttttttaaacaactttcgtatagaaactttttgcaaaacacacaccttttagcagtttgaaaagcgtgcgcgtggaaaacgaggaagaggggttgggaaaggagacatccgaacacaccttaacagatgtgtaatattcatattgtattttatatacatgatatttattaattatttaatattctaattttagttaattataaattgtattcctatataaactataaactcatattctaatatttcttatttttcaattccgaagtcatgttatttacaaattttattccaatatggactctaaaccgttatttcaatattccttagtttaaaatctctaatttcatttatttctaaattgtatttctatataaactctagactcctctttcaatatttcttattttttaattttaaattttagttatttccaaatctatctgttatatttttaaaacagctttgaaaggaggcaccacgttcgctgtgggggctagaaattcccacattaatcggagaaaaagaaaaggagagtccaagtagaaataaaaatttaaaaatagctgaaattcggaattaaaaataagaaatagtgaaagaagagtccatataagaaccgaatatgagattaatcaaaatttggaataaaaataaaataaaatctaaaattagaaaagaaaaggagagtccaagtaggtatacaatttaaaaataactgaaattcggaattaaaaataaggaatattgaaagaacagtccacataggaacccaatacgagattaattaaaattaagaataaaaataaaaataaaatccaaaattagcaaaaaataaaaaatagtttaagtatgaatacaatttaaaattagctgaaattcggaattaaaaataggcaatattgaaagaagaatccatataagaacccaatataagattaattaaaattcagaataaaaaaataaaatattatccaaaattagaaaaattaaaagagagttcaagtaggaatacaattttgaaacaactgaaattgacaataaaaatttgaaaaaaaaaattagaagaacagaatacgatattaattaaaatttggaaaaaaattctgaaattagaaaaacaaaaacaagatttcagttaggaatacaattcataaatactcactctgtcccataacataagggattttgagtttttgtttacactgtttgaccactcgtcttattcaaaaaaaatttggaatcattattttttttgaattactttattatccaaagtactttcagcacaactttttatttttttatatttgcacaattttttttgaataagacgagtggtcaaacagtacacaactttttatttttttatatttgcacaattttttttgaataagacgagtggtcaaacagtacaagcacaatttatgtgacggatggagtaactaaaattggttaaaaagactattgaaagaaaagaccatctaaaacacatgacgaaaccatctaaaagtagggtggtggcggttgatacgacatataaaaactgttaataaaacaccaaatagaatcctaatgacgattaaaaggagggacgacaggcaagccgtgaagcaacaggcaaggccgtttccgggacttctagaaagtaaaaaatataaaccccattgataatcatatttaatttttaaaatctcaatgacaataaaaaggagaagcagcgggcggggtgtagaggagtatagttgcagagccaccaacgtttggtgggacgtctagaaaatataaaatgaattccaacaatagttatgttcgattattagaatcccaatgacaagaaagagtaggcgacggacgggccgtagaggagcgtagtggcatcgtttgatgggacttctaaaaaaatataaaaaatgaaactcaacaagacagtaaactctaaaaactacaaggtccaatttttaaatgttcggaacttctaaaaagtaaaagaaaaaacaatgataatcatgttcgattttaaaatctcaatgacaataaagaagggaggcaacggacgagccgtagaggagtataatggcaaagctgctgacggtttggcgggacttatagaaagtaaaaatgaacccaaaggataattatgttcgatttttaaaatcccaatgacaataaagagaagagacagtggatgggccgtagaggagtataatggcaacatttgactgcgcatctagaaattataaaaatgaaacccaacgtgacaataaattctaaaaactataagatccaatttttaaaggttaccaggagaatgaatagaaatagtggtagattgagcaagcaaataaagaaggagatgacagaagtaaagggtagcaactggtgtgactgttaaaaactatataatagaaacacggggatgataaggtttggtctttcaaagtcttaagacaacgagatagctatttaataaattttaagtgaaatcataaaaaaatatatgattttgtttaggtgctagccacgcaattgcgcgggccacccagctagttgtgttcatatatggactttagactctttttctagtatttcttttttttttcaattttgaactttagcttcatctaagttgtatttcatatggactctagattctttttctaatatttttttatttttaaatttctagttttagttttttctaagctgtatttctatatggactctaaattatacttttaatttttcttatttttaatttcgaaattcaattagatctaaattttatatgtttttctatatggactctaaacttatctttcaatattctttttttattttcgaatttcagttatttctaaattgtattcatatatggactctagactattttttttcaatattccttaattatttctaagctctatatggtctctctaacctcatcttttaatttttcttattttttgattccggattttagttagctccaaattgtattcgtatatggactctagtctcttcttccgatattccttattttctaattccgaatttaaactatttttaaattgtatttctatatagactttatttttctttttctctgattaatgtgagaatttctaggccgtgagagtgaacgtgaaggcccatttttctattcctttaataagttaataagttaatagatactatcctaaagtactgctccctccggtttcacaactgttgacattttgagatttacttggtcaccacagaattacttacccttgtatgtatacattccaaggatggcaatgcttcgaacccaacatgcacaaaattcaatggtggactcaatccactagactacattagaattaagtataatgtgcaaactaccgtatttaatatggcataatagagaataggcacccaaataaatcaatccttgtaaatgagatcatatctaaaacgctaagggcttattcggatcggagggtaaactcaggaaaaacataggatctgcattcctatggattcgggtactgtagcagcattcggatcaaaggaatcccctgtaggaaaatcagaggaaattcgaaggaaaatttccttggccatccattccacaggaaaacaaacaatccactccaacctctttttatttttcctgtgcatgggaacgaggcaatcaacaaactaatcttcacaagcttcactcctctgacacatgatgattttagttagtgggtaggttctttaaaaattcctatgtttttcctacgctctatccgaacgcatgtttatatagtattcctatgtttttcaattctctgttttacacgtgcattcctatcatattcctatgattttcctattcctgtgttttttcaatcctccattccgaataagccctaagatttttgaaactggagagtacttctcactccaactactgccaatttaaatctcttctccttactacttctcaaccaccctctctcttccaaacactgcttgtttaacgaggacgtacttccttcccaatttgtcttatacttttttttagataagggtatttttacccggcctctacatctaaccggatatatacggccattgaaatagggaacttagccccgcaaacaacccaatctaaaatttactccataggagatttgaactcaggaccttggggtactactcaggtcactataaccactaggctacatgccctttcgtatttgtcttataaatgttagaattgtttttataacagaggcagagcaagtatcaaccaaagatacttcagggtgagatatcagtttgagtatattttaagggcattaattgggatgaaacaagggcgcatttaggttgtgtttagttcacaccagaattggaagtttgattgaaattggaacgatgtgacggaaaagttgaaagtttatgtgtgtaggaaagttttgatgtgatggaaaagttggaagtttgaaaaaaagtttggaactaaacacggtgtcaaatgacagaatttttctgtgcatgtgagagattagactattatcgcacgtcgttaaaaacatggcaggaccgcacaagaaccatacaagtacccttttttttttaagataaagagagttttattgatcttaaacaattacatcaagatgatacaatttctctaagaccactctcggcctctgcatagttaggatgtacacagcctatcaatattataaaagaaaaggaaaaaaaagcgacacaactgctacaaccgtgccgcagcgacttacatctacgagtaatcttcatctcttatctccaccaaaacaacacttagactatcaaacggactccctttaaaacaacgcctccaatgaggaaatgacgtgcgcacgcgtcatcattgtaatgttccaatcaactaagatcagaccataggttttcacctagggaaattctgtgaactctagacaatgtcttcaagaaggaagaacatccattgccaagtacaaccaactaaggacagacttagggatttaaccccggagttaaagaattagtaacaagtaccgcctgaatgaagcccactagtattgttgcccccttattccgagacagaacctccataccccaaacttaacataatcacaaaaggccacgaacataattacctgcatccttctatagatatccttcgaagataatgtcgcgagaagccaaaaaggcacacacccaaaatccataggccatagctaaataccctacgaagataatgtcgtgagaagccaaaaaggcacacgcccaaaatccattgggtagatctaaaggatgagatatagataagcgatacctttaatcgaagtcaagctgacgatggtctatggtagatctgaacgccactgccttatgatgatgaaaacatcatcgcgagaagtagccactaaaatgatgagaagaaagttggcatccgcctccttcaattgtagcctgccatattaccttatcggtcccaaaatagatccctccaccaccatccacaacgaacagctagagggtcataggaacgaaagaatctacgaatcaggctgccgggttgtggcgacgagtgtactcttcacctcgaaaccccagaacacctttagcgatctgggaagcaagatgaagaaccacaaagagaagcgtttggggagacgaggcttgccgtcgacgagtcttggtggaaccacgcgacgaggtgaaggttgccatggagtctgaacccctaccggcaccaagcgcatggtgaggagagcttggcgatgtccacctccgcactcgatcttgagcacgacgtgcctgtcgccctgttcctgatgccgccaccgacaaattcttccagaatcgctgatcagcgcatgtctgcatgatgccccaccgccgccttcactgcgccccgcacggcagcgcgctcgggcggcggcgagacggcttcacttaggtggtgtttagatccagggacttaactttagtccctgtctttagacactaatttagagtattaaatataaactacttacaaaactaattacataaataaaagctaattcacgagacaaattttttaagcctaattaatctataattagagaatgtttactgtagcatcacataggctaatcatagattaattaggctcattagattcgtctcgcaaattagtccaagattatggatgggttttattaatagtctacgtttaatatttataattaattttcaaacatccgatgtgatagggacttaaaagttttcccatctaaacaggccttagccggatcgccgatccacgctctaatcacggatcggtgcgctcgcttctgaaacggctacctgaccgaataatgacaggccccgctgtaccatacaagtacagtacagcatggagtcagtcagaccgccatcctcccttgcgcctagttcggacgattgtaatgaacgaggatatcatttgaattttgactttactgaaaccggataaggcctttgaacataatcattggggctagcaatttaggtctacgtttctgattgaccgcctgatcccggcggtttcaccgtctttgacaaattttgaaaaaaaattcctgttttcgaaatccttcccgaaaattgatttcgagccatatagtagaccctgtttagttctaaagttttttttttaaacttctaactttccatcaaaacaaacattttatacacacataacttttcagtcacatcgtttcaatttcaatcaaacttccaaacttcagtctaaactaaacacagccgtaataccaaaagatcgtgaaaatcaatcagtttttgtcggtaaagtaaaccctcagcttttcttcgtcgttttgacgttttgactaggagctgtcaagtcttttttattttttgagaactaggagctgtcaagtctactccgtccatctcaaaacaagacaaaccatgggtttccgtatccaacgtttagccgtccatcttatttaaaaaaatatgaaaaaaattaaaaagacaagtcacgcataaagtattaatcatgttttatcatctaacaacaatgaaaataataattataaaaaaaattcatataagacaaacagtcaaacgttggatacggaaacctagggtttgttttttttaagacagtgggagtactcggcaagtcggcagtagccagtagtacgactagcaagtcatgagggtgtggttagatcaagggtctaaagtttaaacgtgtcacatcggctattatataggatatcgtatagggtgttcggacactaataaaaaactaattacagactccgtcagtaaaccatgaaacaaatttattaagtctaattaatccgtctgtttactatagcatcacattatcaaatcatggagcaattaggcttaaaagatttgtttcgtaaattagtcgcaatctatgtaattagttattttttagcctatatttaatactttatgcaggtgttcaaacattcgatgtgacagggtaaaaaattttggggtgagatctaaacaaggctagttaataaataaaaaagaaaactataaagcgaccatgaagggggtgtaggatcgtaaaagtaaacaattctatgcacgtcaaccatatcggcatgttcattagatctggctgcggctgcagcttctctgcagcaacagtagctatttactgacaaagcgaacatggatatacatcgatagaacaacttgatatatgaggattaattaatttcatagtgaagaatgttttggtgtcataggtgttgatggcctttgcctatattaggggatgctcttttttttttccgagaggggatgatcaagttagaatggagaaagttcatcttttagatttgttgataatttttttaacaaatatgtgaagctgacttgatgcttgatagaatcatcctactaaaagaataattagtgatgaatatgagcatccatgttaattctaatacttaaatccagtgaacatattccaccacaagaaatctaaccaaccagttaaattacacatacttttcttatttgagccaatttcatccgtaaaaatattacagtatatttttagtgagcttatacggaaagatgggaacagttgcgattttaattcatttactaaaaaaataaaatataccgatggtattacaacttaaaaaggatgtaatttagtagtttattcttacaggttgttcaacacgaatgttacaaaacatatagcgcatggcctgtactcattgctaagctggtagattgccctaacattatacgctcgtgagcaacaggggcatgacaaatttatgtgtcgagaccagcaatgaaaatgcaaatcaactcctatattctcagtgtgttgctgctggtgtgtttttcaatcaacacatctgcatagtggttagcactaaaaagaaggttcatcttatatcagatttactatcaatagtgctagtagtaattattgcacgtaccgttggtttatttgtagcttatgcgtgtatgaccgtgttagcgaagtgatcaacgtgacgcatgtacatggaacatgttttacgttattcgcatattcggaaaagatcatttacttgtttgagtattttgctagacaagtgacaaaaatataccccttccgtcccaaaatatttaacgccgttgacttttttaaacatgttttactgttcgtcttgattatttttttaaataagtaaaactatatatatacataaaaatatatttagtaatgaatcaaatgatatgaaaataattaataattacttaaatttttttgaataagacaaacgatcaaacatattaaaaaaatcaacggcgttaaatatttaaaaaagtcaccttgtaaaattgtgatacaatcggtatattttacttatttataaattattctataattctttttttaaataatgcaacacaattaatctctctactaatttagtcaagagattaagtgaagaatataatacgcagcaggattattttgccgtgtcaatccgaaaagcatagtttatcaatctgcttggagaaaaccatgcttaatttggatcaaacctaccgagatgttttagccacgtttacgaaggattgacgtggcccgctcctggacaaccttccacgcttcgcggacatggcgctcctcggtgagcgtgctcccgatggcgcacctgagcatgtacacgccacccaccatggcggagctcatgtacggccccgagctcgccgcgttcacctcctccaggagcctcctgttgagctcgtttgccgccttctcgcctccgacgccgacgccgacgccgagtctctccggcggcgaccggaggcggaagcacaccagcgcgaaccgcctcggcgccaccacctcgaacctcgcgtcgcccctcaccatggcctcgaacgccgcggccatggcgacgtgggagcggacgtgggagcggaggccctccacgccgtagcagcggagcacgagccacaccttgagcgcgcggaaccgccgcgtcagcgtggtgccccagtccttgtagtcgacgacgtcgtggccctccgccgccgcgtccctgaggatgtactcctgctccgtgcccagcgccgccaccagcgccgacggcgccgccacccacaccgcgcagcagtcgttgttggcgaggagccacttgtgggcgttcatgctgagcgagtcgacggcctcggcgccggcgatcacgtcgcggaactccgggcacaccagcgccgacccggcgtacgccgcgtccacgtgcacccacacgccgccgtggcgcgccgcgacggcgcagagctcgcggacggggtccacggcggtcgtctgggtggtgcccaccgtggcgcacaggaacaaggggaccagcccggcgtcgacgtcggcctgcatggcggcatgcagcgcggtcggcgagagcgcgaacacgtcgtcgcggcacgtcggtatctcgcggcagtgctcccgcggtatcccggcgatgcgcgcggccttgcggaacgcgaagtgggtctgatcggagcagtagacgacgaggtcgccgatcctcctcgcgccgatctccgccagcttccggtccctcgcggcgacgagcgcgcagaggacggcctcgcacgacgtgcccaggatcgtgccgccgcctccgccggcgaacagaaggctctccggcaggtgcagcgccctgccgagccagtccacgaccaccatctcgagctcggtggcggccggcgaggccgcccacgtgaaaggcacgacgttgatgccggccgcgagcgcctcgccgagggcgccgacggtgctgctcgacgccgggaagtgcgcgaagtggcgagggctctgccagtgcgtcacgccaggcaggatgaggtcgcggacatcccgcagcgccgccgcaaacgcctcgggctccgggcgggacggcgcgtcggcggggagctggcggcgcaggaagccgggagtgacgcttgggtggacggggtagtcgcccaggccggcgtagtagtcggcgatgaagtcgacgacctggtggccgagccgccggaactcgtcagcgtcgagcagtagcgcggtatctgacgccgccggcgtcgacgtcgtcgtctccacctccgggatggcaccattccgtggggcaccgccattgatggtgtggcagtgcgagggtggtgccatctgcgggaacgggcgtcggtacgtggcggaataggcggtattagctaccaaatttattgggctcgctagctaatgctctggtcaataatgttagcaatagctacaccagcgtcgatctacccgtataactgtatctctctatctatctctatacttaatgagcaatgtgtgccacattaattgggaaaaaaagtcagattatcgatttaggtcctattttttatccctctctcaaatagccaaatagccaaaaaaaaaatctaaaaggtgagctatttgagaactatttgaaaataacccatctaaaaaaatatcccacccaaggagtgctaatttaaactattttgggtggggcccactaaaaaaatgccttttatctctatctcttttcatgggaaggtatattaaaagccaaatagctctcaaaataaccctttgatccgaacaacttagggctattttttttggatggctattttcttgtgctaaaaaatagctctcaaaataactcgtgactagttctccaaacatgatcttagttgggtcacatacattgtattgccataaatgcacgttaattacttccttcgtcctagagtaccataatagaagatgcggtatctataacttagaacggtatctaaaattcattttttaattttttattatatttatactttgtagcaataaaattataaccattcttgataaaaaaaaaaagatcataaccatgtggaaatcaaatgccaattatgcgatgctatttttttttatcaaatgtgtctccaattatagcaatcagctgaaaaatatgtcaaaaaattatagcaaaaccgttaaaaaaaatgagattaaaagaagcttaggtataagtgtgacctactactacctccgtccagggttcacaattccgatgaaaaccgacgaatttgcggaaaaccgaggttttgacgtggctcaaaagtagaagccatttggaatttcgatgggtttcatccaaattaaaatttaaattgataaaaaaggaaaaaaatcaaatcaattcctataaatgatatgatattcatagaacctatatgggtataaattttccaaaaaaattagtgtattccgtgtattcttgaactttactgtagaaaagagaataataacaatatttttaaaaaaatgaatacactttcttggaccgaattccatgtattaggcctacttagtacatagcccagataatgatgtataatagagagaggatgtggtcttgcacctgatttcgctcggaatttcgcccaagccaaccggttttcgtgagcatatcgataaactcagggaatttgtattcaaattttggtttatgaaatttgttcgaaatctaccggcttttcaccggatttcgcgaaaaacgtcatactaccagagcccggaacggaatgtcatctcggaattgtaaaccctgcctctatcccagcaagtcacaaacaaaataaataattattcgataactttttttaataagacgaatgatcaaaggttacaaacaaaaactcaaggcggcaagtattttgggatggaggtagtaactaatagttcccattttttactattaatcatgaaaaatataatggctctaaaccgggtaaaacattgtcgacgttttaggtctcgactacggtatttgtatggtatgagaatcgtcggtaccaaggtatatgcgagattgaggtaaaagagacagagataaggattttatataggttcgggccccgtatgtgataggtaatagccctactcctgttggccgaagccggtgttgctctttattcatctgaatcacacaagtacaatatgtgagataacctatctatccaccgtcaacttggtggtatggataaccaacatgtagtcgacgacagggtaatcttcctcctcgagtattagcccatcgtaatcaaagatggcgctagatccctcttgttggcctccgcaggcaccataaggggtctgtttaggtttatccctgatgttaatgtctagtgacgtgtgttggcttgtgtattgtgtgtctatctattgttgtgtactctctccccctatggggtcttgtatttatacccatagatgtccctttgtccaagtagaactaggcagaccaatatggatacaatctgagttgtccttatcatttccatatagaactctacttatccttccttatccggaactccttctatatacgaggtatgatttcatataggacttagtatatggtgggcgtcgccgtgtttactcaactactattagatatgcggtatctataaccgtcacaaacatgatgtttgctaattcaaaattttgggataattaaatgtttgggaaaagtactactccactctaaaactcagaccccaaaaggagaacaataattggtagtactaattaattctcgagttttgaaatataactaaatcacgaagcatattaaggtagtttttcaaaagattattcaccagattattactgcagatattacacttgtttgttagattaacttaaatattttgagaaataaactttataaatagcatagaacaagtggcataataagcattaaggtggaagaatgtttttttagaagtcatatgtttagaaacatggagtaaataaatcaggacaatagtccggtcaaaaagctggaaacaacgagtccaacacaaatacaaccagagacttattagttgcaaattttataaatattaattaaaaattataatggagggcgcagtatagtgaactttttttccagagaaaggtattttttttacccggcctctatatccaaccggatatatgcagccattttaatttagtaacttagtctatcaaatagggaacttagccctcaaataacccaatctaaaattcgctcctaggaagatttgaactcataaccttacggtatagtgatctgtttgggggaagttattatctatagttagtttttatggtagaacccgttggacaggcttgagaggtagtggttttattttgtggaggatatcataacaccaaaatttgcaaatttgaagtctacgtgtaattttgtactctgtcactgaaaaatataaggcatgcatgtatttgaaaagttggtagttttaaatttgaaagttccttaatatgatgttaacttaatagtcattgattattacaaaagaaattaacaaccaaagtttaaagttgggactattttacacactaatatgtcttatatttctcgttggagagtaatcattaaatttataattattgataaaataaaattgtgcctagcacttcaagaaagtagatacatatacaactttcaatataacttagataaaaagtggaagaaaataactgtacgaatgcacagagtacctacccgccaggtgatggtagtagtaattcaatagaagtgtttgtttttccgtacgtacacccatttaatatatgcaaagttcacgacaaagatctgaaacattttactagtaagataaatcaacatatatatgacatatcaatttacaaatatgtaaattcaaattcaacttatagaaatagataataaaaataacaaatatcaattgccaatagtatgcactttttatagttgtatttattattttgcggagtaatatattatattttttagtaatatattatatattaatttatgttattacttttttaaaaaataatgactttttgggtggcacatataaccgagtgtacgctttgtcggctgaaaaaaataagtttcattcattggttatttccatatatgagcatgcattgtaccaccgcgactggtatgagacatgatcaactctgaaaacccatttttttatacatatggagtgccactagagtctggaccatgcaccgatgcacaggaccggaagcgggtagtggttatctgcctaggcatcgagcatgaattatactctctccatctaaatattactttttggttttttctttcaaaagtttaagatctatttgtaatatttatgagctaaattaaatcaaaatccaagaagttattttagtacttattggtttttatcacatggtaaatgagttaattatattttagttttggtgacaaaagaataaatagattttagacatttggatggagtaataaataaatgttctcctcctaactagacgatgaaaagcggtcgagtggagtggcattgagttgcatgcgcagagagccagatcaggagatcgagctagctacttcctctatcttataaggaatttaggtgaaattgacacatcataatactacgaatatggacatcaagcctctttcagtggcccgaaaggtctcgagaatagtatgtaaagtactccaataaaattacgggtgccatgcagtgtctccagcaggtgcaagtgcacaagataaaagagagaagtgaatagggtggcgcacgatcttgctagaatagcaatgagtactaggtctaatgctgagtggaggctatgtgccccagcacaaatcctaaacttattaaaccaagaatgcaaccctttattccgtcattaataaagctctctctttaatgtaaaaaaaaatgtaaagtactccaatggaatgcccagtccccgatcgaaatgtagttatcgcgtggttgtgcctgtgtcccgccggcagagcacgagcgacaccggaacgaaacgagaggcagcgcgtgtgaacagttgttcgtacgtgccgtcatgcgcaggtcatacctggcgtgatcacttcaacgttactttgggaggtttttgctaattaaccatcgttcggcgcccaaaaaggtttttaccaaagataatcgaattttactgagttatactgcggctacctagctacgcctcgttcggagtagaagtaaaacgcatggcccgcaggccatagccaggttgggcaaattatctatcgccaggtcaagtgcccaggtcatcactcctcaggtggtgcactggtgctcgatgcctcgatccaatgccagtacgggtatactgctcagtgcttgcctgtagttgagcatgcagccggccgctctgccaggctcattcaattgggtccggccggcgtgtcggctgacaagtctgcagcactgtacatctgggccagcttcaattcggtcaagagttgctgaactagatccgtcctgcgtttcggcctttaggcctgtcttgcacagacagaaaacccgtcccgatggcacaggatttatttggttatctccgactagatggcacagaacggcaacaacgatgtcagattagttttcgcacgacccgtttcacgagtgctggatctgttgcaagagtgaacgctataaatgtgctattgacgtactagaactagaagaactgcgtagtagcatactcataccattaccagtgacattctgggtcacccggagctaccccactcatcatttcatcaacaaatccgtaaatcttgatacggcacttgctcgattcaagaaatcaggagttcagcgcacaaggcacgtaggtttctatactgtagtcacgcactcccttttatccaataaaagaaaaagtcagtcgggaagtaactttgtagtctgatacacaaaaggttacaaggtcacatgaggcagcacggctcaaacttttctggaaagcagagcatgttttgtccataatttgatacagagctaacagcacagtgcgggcaactaaaagcaaaaaatgacactattaaatctaataatcgatggggcctcctcgtagaagagacaatcaacagatgcgttgtctgcatgaccgggcactccaacctcatgtgtagatgtatttcatggcatttcttcagggtgcttttgctgcagataacacattccattccaactctatgccaaacagcccaacataaacaggtgtatatacttacagatgcctgatgtccaccatgactcctagatacgtctcaatagcatcccatcatatcctggaagtaatggtgaaaatgagttcagtaaaacattccaatggagcaaactaacaatcacaaaattttgcactagcagaatataacaaggcctgtaaaaaataatgtatcgtcttcaccaagaaacaccccagtcgttctataatctggtaaaggacaccctgacacgcataagcatgaaatgcagtaggaaacgaaattatcaattgcaaacgtgcaccggcaatatctaggaacagatccttgcttgatgtcaataatgatgaagaaccttagtctgactggcatactaacaagatgaaggcattgctagccatgttcaaaatgaaggattttagaatagtcataatgaaggacttcagaatatcgaggcacaacagattagggttctgattttaggatatcgacccacaacatagttggcttctgacttcaagtcaccaagcactatctcgctaccccaatgagaacacaacctcctagcactcacaagtaatccccagtttagtcctacaaggtaacaattcaaaaatcttcgaatacttggtaaaagtgtcctgctcatgatatcaaggaaaatgaaagtaaaatggcatatcagaatatctggagaccacatgaacaatcctccatatgataaccctcctatatcttgttacttttttttctttttggcatcaaccatgccaagttgccaacagggttacagggcaacgtcaagcacatggtgtttactgcaaattaattaggaccagctcagtacataatccaggcaagcctgccttaacagaagtaaagctctgccctattgtgctgttctaacataagtatgtactagactactttacgaaaatgttttccatcctggtcaatccaaattgcctcatctcttatatcacaaactactgaaactactctgttcataaaccaaatagagtcaaaacaccagaaaacaattaaacttgacaagttaaatatagggaaccggtcagttggcctcaatgcctgaaaacagaataggagaattcataattagctattttgttggcacatttcatttgtagaatattaaatccccaatgttgtttccgttgatcaagaattcatgcatgttgcagttacatcatcgaggactggttaggctatacccatggatcaacaagccactactcatggttatatctataagacttcattgattaaaactaattggttatagtcatcattgatcatgtataataggacctcacaatacttttcacatcaaaaactgaatactggatatctttttgcaaaatttagtgccaactagaatataggttttcaagaattagagtatgattcaaagtaattggtcagaatgagcacaaaaaattaatacaacatgttgtttgatcagtcaaaggaatttaacagaatcacttgtatagcttgtaaaacagaattatgatcctttatctctgaaactaatccagaaacccataaatagagacataaacttaatataatgacaactgactctcacttcaaaattttctttagataaataaagtagccaactagtcatgcattagataaaacagagtagtttctggaatattgcgcatcacctatatgttggtagcaattctattccataatcacatcaagtggtttaagtggtaatttacctccccaaagtgtagagctctctgaagctgcctctctgatggtcagaatgagttcatttcaagactatatgtccgccgcttgagaagcacctgtgccgctgttcgatatggctcctcaaaggcatctaaaatccagctagctcctgtcgggccagcaacctcaattcctcccccttcccttagaacatcctcgcttggtctgattgctaccagtgtagcacccttaagcagttggcccccaggaagctcaatatgcggagcgtaccatagccgcatactaagtgctggcatgagtgtgcggtgcgagttcccagaagctgacacaggccgcacacgcagctcctgcagctgcctcttgtccatagtgaggacgccctgcccatcagcatccgtcaggtccaagctctcgagtgttgagtgatctgcgatgattggctgcagcaagtaatgccgtgccgaagcagcgatgagtgagctgatcgtccagacaacacggagcttaagccctccattcgtatagagtgactctgggatgttccctaattcatcgggctctctgctggaatcgggagaggcagccgagctgtctgcagcagttgggggcggcgcggccggtggtgggggtggcttcgacgttacagatgacgcgccgagtatgacacagctgccgagggtggaaccaaagtcagccttccacttgaggagcacgccgtcctcgatgccgagctcgccggtgggcagctcgatgtggaggcggcgcagctccttgaaggagcggaggacctcagacggcgaatggtgggagacgtccgcggcggcaggagccggtgcggcgggcggggcagcggagcgacgggagacggtcgccgcggccggggagaggatctgcccgagtgcctggatgggcctgacgatgccgccgagcaccaggcgcgcgagatgcgcgagcgcgccgcgcccccgcgcggcgggaggtcccccctccgccgccgcagcggcctgcgcggagcccgccgacgaggggggcgggtcgtcggatatgacgcagtcgacgcggacgaacaccgagtcgacgagggggacgagcgcgtggaaccgccgcgagacgagcgcgcatcgccccagcgccttcacgtcgccgatgcggccgaacacgtcgaggagcacctcgtcgggcagccgctcgaactggtcccccaacccctcctcctccccaccctcgtgcccttccatcctaaacaccggcaacagcagcagcggcggcggcagctcgcagatcgggatccggaggcttcggcgctgggcttgggggggggggggggggggcgtggcgagtgtgtgagcctgagccagtcgcgagagagctggagaggggaatttttttggtggaatcgagcgagggtgaggaggagttagccacgcacgcacaccacacgcacggcacaccaccggcccaccgcacggcacggcggctgagcgtgaggcgaggtgggggtttggctttggctcgtgtggtgtggtgtggtgggcgtgggcgacgtgtccgcctcacccgctgtgggctcacggccttttttcccccccggtgcgcgcgtactacgggagcacggcacacggtgacacagggcaccgcgtctcgtgggacgatgcgaggtttccaccgggaggaaagatctactagtggctacgtcacgtcgccttcggccgaaaattccgacggcaactgctccgtccgtccgacccaccgcgaccaattggggttgggtgttggatccgtagccggtgttccgtcgtgggctgtgcgcgcttcacatcgtcgacgtcgagccgcgcgaggggagcaagcaacgggtgatctcgcttctgtcgctcgctgtgtgtgttgttttgtggtggcgtgcaaggaagtacaactcgcggcaaacctgataaagcgatggagaccggactggacggggtgtggtcggtagatccccacggagccgtctgatctccacaccgacggggcggatgtacctctctctctgtgagaaaacaatttgtctgatgcatctcatcctcaggtgcttggactttcttcgcctggattggtgggaggagggattcttactcttaacagcgaagacctgattaaattaatccatgttgttgtcggaaggaaccatcagcttaatcatcggaagcgactagtggccagcttgcgagcatctccacagttgacgctgcagctcatcgctcgagtcgacctggcaacgtgctgccgatctctgcatccgtgcaaagccgattcatgcgagggaacagccgtcaaaaatgcttaccgctgcggggtaccggattaggcatgatttgggcgcacgagatgtgtaatcatgcgtaaatgtaatcgatggaggcttcggcgtcaagcgacctatagtaaaatggagtggatcttctttcttttcccttgtttttttttcttttttggcttcaggggtcaatcgtgtgcgtcagctcgagtgtgattggagcatgcgtccagagaatgaatgaatgagtgaatacttgattagatttgcctttggctgtgttgtgtcatctgtgtgacgcaacgcaatggcgaccacgccagataacttcccggacttatcacacacgtctctagtaccctactacagtatttctcaattttgcgaaagaaaaaaggtagaataggtgccagctttaattttgccaaacaaaaaggtagcaccttccaagcctctagcttatttctcaattttgccaaccaaaaaggtagaacaacttctcaattttgccaaagaaaaaggttggccaatttctcaattttgccaatgaaaaaggtagaacaggtggtagcttcttagtttggccaccgtgctacgtgagcagctattgtgccggtcctcatttgtaattgtaccttgggttggatctctcagccgggaagaacaaaattggctcaggtattctgctgcttcagtgtgaagtgaagtggcacgtcaacatgacacacaccacctcactggggtcatgtatgtaacacaggaaaactgctgcttaggcaattcccaaattttccaggcttaacatactcaaacgtgaattgtgaaacccagagctgtggcagaatttgaacatctaggccctacatgacaactcaaaatgcccaaatcgacattgctataagtaaagagcaagagagtagaatacagcttggaattgaggtaagaaatttgcggggaaatagcctaaaaaaataaactgattttcaacaatatgatgtgtacaggagtaggcaaatttccccatagcttcatattcattccaagtatcaaagctcaaagtgaccgaagtagcgggcttgctttttctttatatatttggatattgtagacacatcaccttgaataattgtctggccatcttccatataaatagcaccatcagcatatctgagttcttccagtcgatgggtcacccacaatgctgaaacctccccaccagcacctacagatttccttaccgccttgataacacccatctacaatttgatgaaagaaagagtagaacgctcattttagtcacagtgtcattaccagagcggagtaatacatgctactaaagagtacatattagaaacagaaaaatatgaatcgagatttcaacaaggggtaaagttgtgtttagccatagcttttgaggtatgatggccactcaacaaatgtgaataaagaaaagaaaattgcatttgtagaagcaaagctacacaattgtttagttgtttaaataataaatcgatctggggtttttcagtgatgtggttaatcattgttctcctcagcataatatttagttacctcgtgatcaattactacctctgttttttaatatatgacgttgttgactttttgacaagcgtttgatcattagttttattgaaaatttttgtgcaaatatataacaaattaagtcattcttaaagaacatttgacgataaatcaagtcataataaaatataattacataattttttgaataagatgaatgttcaaacgtttctcaaaaaatcaacaacgtcgtatattaaaaagtggagggagtatttgagtacaactgattagaaacaagaacatgcattatatttatacctggtcgtattcatccaagaatgtggtcagctcatccagtagtagtactttggatgcttcagctaaagcaccggcaattgcaactctctgcttctgcccgccactcagagtttggattggcctctgtgttggatgaaggatgtttgtgaaccttgtgcagacaatagattataatccaaaaggagcatgtcagctgcctacttgagagtagcttaacattcccacagcatccagtgattgtgatactcttgacctaacctcatccaacgaaaggttgagcttaccaagaccaaatgcaacatctgattccactgtcggcatcacaacctgcattcaaagaacgtaacttaatatgtaccagaaagcttgatctaatttgacatgaatgtgtcattaagcaatcttcctccaatgcatcaagagtcaaaaaaataacattctatagttgctagtaatatgatgcaaatacagtctagcaatatcttaatgaacatttatatgttcaaatttagttcaggggaaactcagcaaacagcacaactgtatagttttcaaaggaactaaaatatcaacaccttatgtatccaattagctataaaattcttagtccaaagagtttactaagttctgagttaggaattactttcacacccaagtttgtgaatgaagattaatgaggaacacagaactagattcattaagacaatcatgtagcacaaaatttcttgcttggtgaaactaaatctattatgggcaacagttaagagtgaactcatcagattacagtacaatttacgaattagtatgtctatgtatgtcgtttcttttcaaagacttatataatgttgtcgaacttagtaggatagttaactaagctctcaaatactccctccatcccaatataagtgcaacctagtacagatgtgacatatcctagtacaaatgtctgtccagatttgtagtcgtgggatatatcacatttgtactaggttacacttatattgggatggagggagtatgagtattaccttaaaatacataaagctggatgagttatattggtcggtgaagtaaagcctaaatattgcagaagtacttataaagaaaaactggaccttggtactttaaccgatgaatagttattcaacagggttactaagactatggccaacatgcttatacagtccaaaacgaatatgcaagcaaggaacattggaaccgagacacttcaatttgctgcagagtatcaataaataccagatagaaaagaacaaagattttcatgaattccattttctaactagcataatacacgttatgtgaatgcaattttaacattgttgtattccatttgagaacggagtgaaatttcagataaacactaaagcagaatataagtgacaacctggtgatcgggattttggaagacatagctgcatggcctgttaatatacactgtaccagaagaaggatttaaaaatcctgccaaaacctagagaaaacattcggttaacatcccattaaggagctgtactaagaaattcagaccaattttgatagtccggtagcctaattaggcaagtaaatattgtacagcattataataaaatttatagaacttctcctctgtcttttttactttctcatccagtcatcctatatcattctattctgggtgagcatatcacaaaaagttgctaatctgattgtgccatctggtccattcatccaaatagtcaaatgtgcttgatgctccactcctgagattctatacaatgctcactcactggttagcccaagatacatactagtggttctcgaattaaaacatccatcggctcctgacggtatacgaaaatttcctggagcaagatatcaaagaatgtggtccatgggcacaatctaatactacaactaaacttttgcctactccatgagcaaaaacgctcagggcacgaacaaaatacacatgaaaagcacaaggacgacgccctcttcagttcaggggggtaaagaagatgaagaaccttgagaagggtggacttgccgcagccgttggggccgaggagcatccagagctgacccggagggacgcggagggagcagtccttgagcaccggcagcacccgcccccgccgagtcgtcaccgacaactcgacgccctggccctcgatggccggcgtgggtagggacgacgcgaggacacggaggcggtggcgagggcgggatacgagggcggctcggccggggtcgtgggggcagcggcagatggcggaggtgccgccggcgaaggcgtgcgccatctctgcgagagaagtgagagcggtagatggaggcttgtggccttgggggcccggttctccagaagaccagaaggctataaggccagatgcccacaagtccattggttgatgggccgatttggggctttgggggcagagagtgcggataccatcctgtgctcct

SEQ ID NO: 8084 - DNA, 2823 bp, Oryza sativa
  unsure (1)..(2823): unsure at all n locations
cagttgatggatttggacggtggtgttcccgtttcacgttggtccgtgggccgcccgcgggcctcgtttgtgcatgccgtgttgcgtcgaaaacgtgcggtgcggtttggcggcgattccggccccgatagaaagtttcggtgcggcccggtttcgacacttcggcacaaaacttcaaaactacgatatatttcatctaattttgttagatgaaatatatcctactacgaatctgatatgctaaaatatatctcatacaatcaaaacttcttgtattttggaacaaaaggtattttggaacaaagggagtattgtagagcagaaatattatttgctaaaatgtggtctggtagatattagctgacatagtttctcctctttccaacttttactccctaattttttgcgtacacgttttcggatctatactacctccgtttcaaaatatagctacgtctaccgtgcatagtctcaagatgaagttatttcttcacctatcatctcctctcaatcaatcataaccattctccaattgattttttttcacttttctcttctcaatcaatcacaacctttctcatttacacatatttcaatacccatagacaactcagaatcttacattttagtatggatgaaatatttttttgcaaaaaaaatctatatgaaaattactttaataaaatcatatgaatctaattttcaagttttcttagctaatacttaattaatcatgctttaacgagtcaccctattttttgcacgggaaaaataagttctcaacctcggctaacaaacacagcctaattccacataaccgtcatttttgctcattaagtgctcgtagggtcaaaagtacagccctggtactacacttccctgcgatcagctggacaagaacctcttcgttggggcaacgacaataattctgggggacgggaaaacaaccagcttctaggactcgcactggctcgagaataagagacccgaggatatcgctccagctatcttggcggcctccaaacaaataaccaggactgtgcacgaggctcttgcccttaacacctggattcgggatattgacctactgcgtactatagatgcagaccatctatgctagtacgtttgtctatgaaccatgatacaatgcgttggccctctaaccgacctaaaggacctcgtcgtatggaagctgacggcaatggaatctactcttccagcacggcgtagaggctacaactccttggagcggcgggacgatttacaaccagaccatttggaagtgttgagctccacctaaatgtaagttcttcttctggctcattatttaaaacagagtctaaacggcggataggctaaaagaggtggtggccctgccanaacaaaataagatgcaatctaaatattgcgaataggggattaaacacaaaggaatagatacgattgaggtggtagatctaatcgacccggcaaatcaacacaccaattattaggggctctaaatttatagtcgccgactaatcaagcgaggacaagagacaagtgaatgacacttggcaaaattcaattaaacaaaactcaattgttctagagggtgtacatagacatttatagaagaaaatagatcaaaggtttagtgctaattcgtggaggtgggcctagtgtattacaaggtccaagtaccaagttcggtttcagcaacaacattgtcttgttttgacaatttccgtttactcggaatgaatttgtatatgaaaccggatgcgtttgaaaggtgacgagataagctttccatcaagtctaacatcacccgaatcggagttggcatgaagacactaggtccatttgaagtcaatgctgtctccggaggtcgaactggattccaaaactcattggagatgtatattgtagatcctccattcatccgatgtattcttgggcaatgttttatatttctcatgtttggttgtatacatatacttgatctcaacctattggcaaaatcctttaggtatgtttggataatgggaaatgaatggtgggattgggattgagaaattgatgaagggttttgattaaatagaagaaggagaatgaatggttaggatttaaagatgtatttttgtgggtaggaaattactttattatcccattagccaaacactgccttatactttagaccggaggtagtattcaaaagttgtttatggtaattggctgcaactcttttatatactctttataaaacaaaaacatctttgaatttgccgttaccaaaatcttcatcattttttttgaacggaaaaatcttcatcattgaatcctcaatgtactgctactgaacaatgtaacgcattttcattttgccaacaaaatggaaagataatgagtctgtgtaccgtcacgtcatcactttgttaattgtgggcctccatcagtttttgggcttaaggccttaacacctggaccactcgacgcaacctagctggaggcccagtacagtgccagcgccgaaaaggaaaaagtatacttcgattccctcgactatcacccgagtacgattcatatccactaactataaaaccagctatatcgactccttcaactattaaaaccggtacaaacaatatctctcaatgattttggagattgttttggctgacgtggcgcctacgtggtagtcttgaccaagtctttgtcgtacgtgacgcttacgtggcattagaataaaataaaaataaaaataaaacaaatatatgggacccatatgtcattcgcaaggaaaaaaaggcattgtgggacccacatgtcatcctccctctc

SEQ ID NO: 8085 - DNA, 8235 bp, Oryza sativa
  unsure (1)..(8235): unsure at all n locations
attgtgttggatgagtagaagcgcacctcgtctcaaaagaggtacaaaataataaagcagcaggttgataagcatcgacaaaggcatccagagtgacaattgcatcgtttacaaaatccaacacctgaaggaagttggatttacaacaatatagaaaaatcagatgaaaggacagcagacatatcataaactatgcagtataggtaaaacttgcctctgagaaatctttctgaagttgggtatatccactatcattcggtccagatgaagtgagcgcctaaaatgaatttattatggttaagttctttttatgcatagttctccaagatcttctgtaaactactaaactgtcatcagatcaggaaggtgtgaaactacaagatcaagtttatatcaatatcataggtcctcaacttttaatcgtggtgagaaaacatacttcaatctcaatttaggataaaaaagaaacagagacaaattaatagtaaacatcataatcgtcactttctatctaacctaccaagcaatgtatcatggttgttgaaaggaactgggaagaaagtatttgaaacaataacagatataacaagtaataacaagtatattcgtcaatagcacaaatgaataacctgaatcctttgcagaaaacgataaaagttttagcatatgcgattgggactacagactaaagtgaaaacagctgttataatgatatcatatggatgttcataccagataaaggaatacagaatcctataacagctatgtgcagtgatttatgaagaagatcacaaaataacctgtaatgatttcatgcacctctcctgcattgtgtggaaaatgcccaggaattggggaaggacaatattaatgccatccagaatatttggctggacattgatagcgttttcaacctacagatacagaaaatgtgcacttgttattaataaaattataaaagtattcatgccaatgaatagaaaaaggttatctgagactaagggaatgaattagaatttgcatttaagttagcatctgtctgcaaaatgaaaaggagaaaaacaacaacaataataaacacttcaggaaccaaccagtgaacttgtcaatttgcaattgtcatgcccataaatagcacaaatgtccaacaacttgggtaaatcaagcaatcttttctcctgcaggagggctacaaccgaacaacgtgaatatagtatatttgaaccaatggtcactatccattctgctctaaaaaaaggtaaactcaaacagtgatcatatgagtagttctaatctcacctgcatgctccttcatgctaagggattcacccctgaatgctccaggatccttgtttgaagatctaccacccaaacaagagccatatcatgacaaatctcatgtgaatctgaacagtgtgcattatcttatgaaaaatatgtatacaagaaagatagcgaaatggtataaatctcacatgcggtacaggaccataaagactcgacggcaaagctcaagctccccgacaactaagccagcaactgtccctttgggtgcacgatgaggcaagtcataccaccgatgcctgaattgtaggtaactgtccaggaactcatgcagggaagtattctgtgccactgggaaaaggtaacgataagcattaggaaaccattggtaaagttcaaatgcacgcggatttattcataagttaaattctaggagtgaaacaatggataatcacagatctaggcgtgtcctcaactcaagcttttatgttgactcatctactcgctcaattattgttcaggcttagtttgcataagaaaaaatgccaaattcctctgattgtagggtagttattcctgtcaatctgaagttcctgtcaatctgaagggactaggattaattccttcccattaaaactatttcaaaggatcataggtcatgatagtgataagaatatgattgcataggctttgctttgcttatgcaactactagccacttcaactgcaaatgtagtaataaatttaactgcacgcattttatcttgcgcttaaaagtgcaaactgacatttgaacaagcatacactagaattttacacataatccgtagccttagataatcacagagaccgaagcatcagaagatgcattcaacaaacacaattgaagcaaacaagcagtaaacaccgaacattaagtggttaactagttatcgcttccaagctttcagctctgatttcccaatcccaaaataacaattcacgccttccagctacacggtttcatgagcacagtaatgcacaagcgagcgtttcggttaccctggcgccagaactcgcggggcttagcgcggaggagcgcggcgagggcatcgttgaggaggtcgacgacggcctgcgactcctgggcgtcgggcccgccgagcccggccgcgaccacctcgtcgtgcggcaggtacgccacgaacccatcggcctctccgcccaccctgccggcgccagatgcagacggggaagccgatgatcggagggcggtggtgagcgtcggcgggggcgagggtttaggtgcggcgggcttggggacgtagcgctgctgcggctgcggctgcggctgcggctgctgctgctgctggccgtggtggtgcctcggggcggcgttgttgtggcggcggtggttgtaggagggtttggattgctgcggcggcggcgcggacgacatggctggatcggggggaggagggagaaggagaagccgtcacggcgtttcaggacagggagaggagtaggctttgtagattccggaggggtttcccggaattttggggagacccaaggtttcttgtgacaatgtacaatatttaaattgccatgtgacaatttccacctttaaaaattgtaaaaattggaaggggcgtatttcgatcatttttgttttttttttcgtctcaagctcttcatatgatttggtttatagtttgtattttgtctgttcaccctgtcgggtagaaaatcaaaatactaagccatgttttatgaaagagtgcatatctgaatattagtaggagcagtactactattatttaggcaaaatgtgctctaagacactcaaattttatagcctttgtcgtagaacacccaaaaaacgtgtatttattgcattacaaatttgtacttttcgctttgttggactcttctatcgagggagtgagaatggactaggtctggtttggttcaaacaaagttatcttacaagccgattgacacaagggcaaaattgtaacttttctcttggtgtaggtctgatccgaactagatctggttgggttaaaaagaaacatgcaccataggtaaaaagttgtcttttttgaaagtttctctctccatttagatccgatataataaaataatacgttcagcatccaccagctaattaccatgtttttagtggtgtcatgtaataaatacacattctttggatgtcatacaacaaataccattaaancctttgnnaaggggaaattccccccttnttttttttttttttttttttggggggcccctgatatttatggcgaattgaggataccttagctactagtaaggtttcttatgatggnacctgctntctnnnnnnnnnnnnnnnnnnnnnncnaatacccnnatcccnnnnnnnnnnncgtttaaaatagcaaactatgatgggatgagacccatctaagactatgaatctggacatgagacatgtccggaaggagtaattattttcactggtagcgatatacatgttgacagcgagtctatgatgtgcttgtatttatagctaattatttttagtggtggacaacgtaccatattacttgtggtgacttcgtcgaactcaaaatttgtaggtatatacagacaccagtggtgaccggtaacctcgtcaatcttaacatattactaactcaatcttcaaaagtattcattagaaccaaatgtacacgtgtgtattatataagagtgagcttatatgtctgtgatgttttcatcgagctcaagatatacggaccaatttttttagaggtgctcatgagataggttaagtacgtatgcattaagaacaaattcgataaatgaatgataaatcagcaaaaattaattatcaaaaaaagacactaatattacttcgccatttggtgagattgtggttgcatagagctagcgtagaagattaagaagcaataattcaaaaaagatgaataaataaaataaatttagacgattcaaaaaagatgaataaataaaataaaattagacgattaagaagtcaaaaattaattatcagagccaggtttcgatcctgggacctgtgggttatgggcccaccacgcttccgctgcgccactctgatggtgttgtttaggatgttaaacgtttctaatttaaacaatgctctataactaatcattcggctaagaacactaaggcatcgttcgtttaggggtgataggggagattggctctcgttttccgcgcgcacacttttcaaactactaaacggtgtgttttttgcaaaaaatttctataggaaagttgctttaaaaaatcatattaatccatttttaaattttaaaatagttaatactcaattaatcatgagctaatggctcacctcgttttgcgtatcttcccaatctcctcaatccccttctcctcaaacactccctaactcattcattattaggtataagaacactaactcatccattctcgaacactaactcatccattatccattctcgaacactaactcattatacattctcgaacactaactcatcattctcagtataataacttcactaatcattcggtattcagatataatataagaactttctatctcagattttttccgtttgtcaactgagcacagcctgcgatgtgtaacaatcgaatgctatatatctcccataaatgctcgaagaaaagcgaaaaagtacaaggacgatattacagtgctttggtatgttaagcatttttttatacaaaaagtcagacttcataagaatacaagtccgcgtaatttataactcagatagcaaaacatcgggaacaactagcactacagcaaaactaatactatgaaaatatagaaatctcagatgaaaaatacacttctgattctagccagctgttggctcctcacataacaattcgattcaagggttcaattgttcgttttgcattgctctggcctctggagcacacttaacatctatagttagaacacattatctactgtaaatccatcacttggaaattccaaggtgtggggatataggatgtcgtggagatagtaaccatctgattcttcagctcaactcgttaattgcatcaagatgagtatcgtatcaatattcacagtttacatcctacggttcaagctctttgttttcctgagttgatttcccagttttctgtgcttgactttctttcttgcgctgcatcgattattagagagaaaaaaaatatgaggcaaagcagaactcaattgaggtaatttgatctagcctaagctctatgtgcagaagttagaaaagcggagaacataagccacataaacaaataacaatggcaaaattggttctagagcatccaaagttcatgtgttttaattttaaagcaccgaaagttaatgttcactttaatagcactgaaaagttccctccattcccgctcttagcactcccgtttctttgggtgagagatggggttccagctgcttgatttagttgatctgaagatgtgttcggctatttcagttgaaaggaggatagggttggaatttcaggtgcttgaatgagtcaatttcggtcaaaactgacgtcacatgcaagaaaagaaacgggagtgctaagagtgggaacggagggaacttttcggtgctattaaagtgaacctgtaactttcggtgctataaaacaaaaacatgtaaacttacgatgctctagaaccaattctgccaataatttaataaaagatcccatggattcagttcatgcagcacagagagctaaaagggcctcaggtgctgttttatcaaatatatatatatgattaattctggtttaaaaaactgtggtttagttcttgaagtcacaggcacacagtggaaacctatctaccgctgtcgccatctcctcaatatcagcaatctaatggatgaatttagatatctcctcaatattagtaaatgcttatcattagtaaaacatgacaaactcttacaaagaactgctattctgccagtcatgtatcaaccaaaaaagaaaggtacaagaattttaagcaatagagacattaataactgcaaccagttaataacagcaagagattcagcactcaataacaagacagattaatctcccatcatctttcaattagttctttttttctcttgcatctataatgaactacagcatttggttcatggtgaaatatcaacagatcacttaatggaagaataatgatgaggtcagcagctccaagagaatatttaggggaaaatagcatcagaagtgtaacatttcattttcaaagtattagcatgtcggtgagcggcataccttcggaagaagtccttctgcagacatcagctcatataacttgcgcatgattgtttcttcttccacctgtacagaccaacattttcaaagtattactatctaaaaagttacttccaagacatagtgacgcctcatactccaatactctccatataaagctcacctgaactttatgcaactcgtgggacattgctcggtaagtttccattagggcttgattttgcttgtccaaatgcctgcagatcccttgtaagtagtgtaatgaactaaaatcctcaagaattaagggacggaaaagaaattcttacttggacatttcagctgaatgctttggttccattctcaccaacagcctgataccagttcctgcaaattgctttacattttaaaaatcatttaaaagcaagctagaaagttgaccgttattttatattaattgaggaattctgagttcacgccttgagggtgcagtgaggatggaatcgtactgctacattatgatctcattcaaaaaaaaatgaaacaaatatatgcaattgtatttgtttcttacgcataggagagctgccctggtaccctaggatgcaaggctcaattcagcaatgaacgacacatgaatgacatgattatttgatttgacatctaaaaacattgcacatatagtccgatgtcatcttgtcattctggttttctagaatcaagacacattttgttctctctttattggaaatttaaaagaactaagaaatagctaagatgaaaaaaaaaacaacatgtaatcaaatggacatggcaggctgctatttgacatggctatatttcaacggaacacaaagctcgttgaggtgctagagaacagtttacatactacacgggcccagtaaattttcgtgggggcatggacacatcacgagttattaacaccactgttcataaatcatagtagtatagtattattttgagaatatcatgcgtccaaaatatcctataggcacagttgcaatacaatctgcaggggcaatggcgggactaacatgggggcaatggggttgagatgaaccctaaataacaggaatcggcgtatgaaggggatgggctaattggagggaaactgggggaaaaaaaatcgatctcctatctacgcgacgctgactcatgaagtgggcgccgaggagggaggagggatacgagagaagaaccaataataccttagttcgattcgagcagcgatggaggccggccgtgcgcgcgaggaagcccgcacggggtgaaagcctgaagcaggctagggcgagttcaggaagaagaggggaccgtgctcaccgcgccgccgatctgctcgccggccgcggacacgatgaggcgaggcggagcaggtgcaccacggcgcggagcggggcggcggcgttgaagctctggctcaccgtgctcaaaagtcaagacaggcaggaggtcgattgtggggcggggccgtgcagcgctctgctaccgcctgcctgtgggtcatatgcacaggcccatgaggctggaaagaacaaatttttcatctcggaaaaagttcacctaaggtcccttttcttgacgtcgagttttaaaaccgttcctgaactgaaataccaaga

SEQ ID NO: 8086 - DNA, 10938 bp, Oryza sativa
gccgccgtcgccgctccccactgcgtcttcccccaccgccacagccgccgccgccgctccccaccgctgccgctgcctctccccaccgccgtcgtcccgagaagagagaggccggagggagagagaggaggagggatgatgacatgtgggtcccacaatttttttttcgaatgacatatgggtcccacatattttttttatttttattctaatgccacgtgagcgtcacgtaggacaaagacttggttaagaccgccacgtagacgccacgtcagccaaaaccaccgagaaatattgtttgcatggttttaatagttggaggagtcgatatactcggttttatggttggaggatatgaatcatacttgggcgatagttgggagagtcgaagtatactttttcccgtcgaaaaacaccttacgtgagtttggatttcctttctcggctgggccaaattctcttgggcctgaggattggaccagactctagagggcctaccagaaatggccgtacactaatagtctaattccaacactggtcaaaactctctaatggtcaaaaccgatccagcaactgtcctctccctctcaaagaaacagcaattatagcatatatataatcgcgtaagagcaaggataatagtagagctcactatctactattagcttattttatagccaacacatataataaattagttataaagttggctacaattttcttctcctatctctatctctcacttatacatttattatttttgttttggagcttgtgttaagctagcttttgcatgagagtcaatacctttgactttttttttgttacatctctcctccacataagtttatagtaatcttatagctcactattataattgctgtaataaaggtttgtttccaaaaatcgttcataccgcggcatccctctttttgctcgttttcacaacatgcgcacactgcaaactgcgaaagcaaaggaaaacgcgtgatcgtaagcaaatcgttctcccgttccgtgctactcgtactagagtctagtctagatacgttggtcaaccaggtccagatatgcccttcccgatatcaaccccagctgatcccgtacaagtcgcacgttcactcggatctgcttccgccggttcagagttcgccctctccccttcgcgctcccgcggaagaaaacggcggtatcatcttttcgaaaatggatcggtcataaacagatcatagttacttcctccgtttcatattataagactttttagtattgtacatattcatatatatattaatgaatctagatatatatgtgtgcctaggttcgttaacattcatatgaatgtggacaatgatagaaagtcttataagctgaaacggagatagtacatattataagtcattttaattttttagagcaattctacggttgaggagataccataagatataaatatttagtataaaatttggtacctcatagtataaaagaaaaagtggtacctcgtgtagctccttaaggatcgtaaaattatttttaaggttgtaataagtttacagaaatatatagcaatatttttaatacaaaacaaagaaactatcaacatatattcaatatgttagatttaatggaatcaatttagtgttataaatattactatatttttctataaatttggttaaactttttgaagtttaactctaaaaaattcaaaacgatttataatgtaaacaaatgaaataatgtatttttttcaatatcaatagcaatatagttgcgaagtgaacgtaactcaactggttagtttcctcgtggtggaaccaagatatactggcggctcagtttttcgaaggtgcttataggggtcccaggtaggatatgtgtatgtgtttatatgggtgagtctgtgtttgtattgtatttctcaataaaaaattagcaatatactccctctgtttcaaaatatttgacactgttgactttttaatatatgtttgactgttcgtcttatattaaaaaaaattatgaaatatgtaaaactatatgtgtacatgaaagtatatttaacaatgaattaaatgatatgaaaagaataaataattgcttaaattttttaaataagatgaatggtcaaacacgtattaaaaaattaacggtgtgcaatattttaaaacggagggagtagtaatgttgaaaggacttcaatttatgcaggtccagaattatataaacggcagaaaaatgatttcaacctatattccatttccacctatacggcgctcctagctttgggtagctaacaaacgcgtctcccctaccgttagtcccgcgtctcctcccccgcgcccccgcgtcgtgccgtgctcccgcggctaacctttaggctttagcctagcccgaccgaccggtaaacacgcgccccaccacatcgcccctctccccgcctatacacacgccaccaccaccacgcgcgacggacacgctccccctcactttcactccacacacacacttcacggttcgcgcgacgaacaaacgggcagaaaaaccctgccacgacgacccacgactgagccgagcgtacgcacgcacccacgcacgccatgggggcgctgcggcggtggctgccgtgctgctgctgctgctgtcgcggcggcggaggaggtggtggtggtgggagcgtgggggatgggctggtgtgggacgtggccctgaaggcgcacgcgtcgggggactactccgtggccgtggcgcaggcgaacgaggcgctggaggaccaggcgcaggtgttcgtctccccggcggcgacgctcgtcggcgtgtacgacggccacggcggccccgaggcggcgcggttcgtcaacaagcgcctcttctccctcatccaaggtctcgatcactgattcacttcctcatccatcctgatcaaacgcgcagtacgagtaaattagcaataaagagagatgtatcgatcgatttcgtcgtgcagagttcgcggcgcagagcggcggcatctcggcggaggtgctcgagaaggcgttcggcgagacggaggaggagttcgtggcgtcggtgcagaggtcgtggccgtcgcagccgaggatcctgtccgtcggctcgtgctgcctcgtcggcgccatcgaggacggcacgctctacgtcgccaacctcggcgactcccgcgccgtgctcggccgccgctctgccgccggcgccgcccacggccgcaagggcaagaacagggtggttcccgagcgcctctccagggaccacaacgtcgccgacgaggacgtccgccgcgagctcaaagagctacaccccgacgactcccacatcgtcctcaacacccatggcgtctggcgcatcaaaggaatcatccaggtaatataatcaaccaaacatcttttttttttaacgattccggtgcgaaattctattgatatagcagaagaaaaattacgagattataacctagaaagatcataaccactaatcaaccaaacatcgaatcatcgattctttctttctttctcgcaagatcaagctgctgatcgatgcatatgcaggtgtcgaggtcgatcggcgacgtgtacctgaagaagccggagatatgcaagagcaacccgatgctgcagcagacgatctgcccgttcccgctgcggcgaccggtgatgagcgcggtgccgacgatcaagacgaggaagctgaggccaggggaccagttcgtgatcttcgcgtcggacgggctgtgggagcagctcaccgacgaggcggcggtggcgatcgtggccgggagcccgagacggggcgtggcgatgaggctggtcagggcggcgcagctggaggcggcgaggaagaaggacgtgaagtacgagaggatcaggacgatcgagaaggggcagaggaggcacttccacgacgacatcaccgtcgtcgtgctcttcctcgacaagtgccgcggcaaggccggccgcggcgacgagatcgacggcaccgacggccccgtcgacgtcttctccctcagccccgacgaccgggaggacccgaccaggccagtgctccgttgatcgacggcggccggagcttcaattccagccgccgccggtggtgtgtgtacgtacatacgactgttcttggttctttaatttgctccccaaatcgaggtttgcatttggcgcgaaattggccgtttcagccagaaaggtttggttttttaagttgccagttgccacgcaggtctggtgttcatcaccctcaaatcgttttctggttcaaagcttcaaaattcaatttgttttggttggttttctagaaataatgctgcaaccacttcatcggagagaactacgtgtaatttagttgtgaagagtagacagtagtagtactgtagtagtgtcgtgtcttgtaaattctaaacataacaagttgctcaagcttctccattggagagaggcatccaaatttgttactccatctgttctgttagtgttcttgaatgcagccaagccaaccaaagcagacattgggtctcacaattcacaaaattcagatcgagaagctcaacgaagtccactgtgcatgcatgcaacaccgtcatcactcatcagcggcaaaacatgagtcatatagtcttgctgaaattttgcatgaaattttgaggataagagggcagccacaatcttggatcggttcaaccaacacttgtgagctgtgacttcaccggtcaacatgggtgctgtcctctcttccaaactgcatttatttgtagagatgaaaaagatatctgcgaagaaatggtagatgaaaaagatatttgtcaagcaagtgctttgaagatttcttggtagtgggttggatagtttccaagttagctgagccgtgaaagcgaaagcaaatttccagttctgcaattgcggttgctgatccattcaacgaagaaccatagtctaccgggttcaaacgcaagtcaaaagtacactagtgctataacgcgtaggactgtccaaatggcattttttttctttttaatctgaataggaatggaatccttattatacaaaaaacagtgaacacgaatgattcgggaattcctactgcttttcaatcctgaagtttctgaagaatctgatacagaggtgatggcgtagtttttagctgtagcttgaccaaatgaccatgtgttttgagtcctgagtccaggtctctcattctggtttttggcttttgacttctgaatcacttcattgcaggtcatcgcaggtggttagaaactttactactagcataattgcatttgcttatgatcaacttgactttgactccagctacaaggcgacctgacaaaaccaatggggcgtgtcagtttgttgtttccatgtgacttgttcttgcaagtcattttatttccctctcgacaacagttaccgggagacaatcatgcattaaattgctagttgttggtaccggtttacgccaaaatcacaccatcacgagtttagcctgaaaatatcagaataactagccggtacccccgcgcttcgctgcggtgagctaggaagattgctcatgttccagtaataagactataattaaaatcttgatataatcaggtcttgttgaatggcatgtattaaagaatgataaaaatatatagtgaacggttaatatttacacggataaatgagctagtgtgtcggttggacatcacatagcactattgcttatattggcagcactgcaataaacatactacatgaggtagatatggataaaacaatggttattgtttggatggttgtgtagcatttccttccccaagttacatgatgtaaacaactacctgcttgaagagctttcttctttcaggacaaatggaaggcataaatttttccaagctttatccctatctagagcgaactgctttcatcctgtcgcaaagctgaacgtctattaattgaaattgtagaagtcattgcggttgcctttcttcgaagagtttcaacctgaatatatgttgatcgctttgctacatgggtgctatatgcactaatgcatcataaaaataaactgataaccaccaatttaatactttgattccccatgaatcaatggaaacaaatgctatctgtccatgtgaccagcactaagaaaaaacacaaactctatagttacctgctggtgccatttaatttccgtggtacattgggaaataatttgttcaataagtttgacatcatttgatttaacataaacactaaaagcctagcacaagaacactatcatccatcatcagcactaagataaaatcaaaacatttactgatgctgaagacctctaaaatcatgcacttaatttggaactgaaatgctgcttaaacaggtattttacaattgtttttatgagcaggtataattaaagaaataaaaaatggcataccatgcattactctctattaatgctctgatcagggtgcacaaagccacaaaaagctggggtttccaccaactatatttggcaagtgcaataccaggatatgaagataataacgtttagcctgaaaaagatattagaacatatcccttgtttaagaacatatactaattatcaatctgataagaaagcaatgagaagaacatttagttttacctgtcctctatttacgaattactcaattattctatgcttgtctttggtaatgattattgatggattataaaccaacctgccaaaagtggaaataggaaaggaaacaaaccatcttgagtgagtatacaaaaagcaagagcagcagaatgaggctatagaaactgttaagatataaaggctacagttttgctatccaagattctaattaggacatgcttccaaaaggtttccctaaaaaaagtgctcccaaaagcttcaccgtttaacttgaaattggtcagaacacctgcgctcaaagtttctacttttaatgcagatgaagcccatagcagggaagagatccccattttaaaaaaggatatgaaagagaaagaggagcagacaacaaattgtaactgaaagaagctcatcacagcaactgaattacctccaaagacctccaataagtaaggagtaggagttcggcattcaaattagcataccaagatggcatctttaatacaaattggcatggaaatccgctcgtctaactgcaagaacaatggatgaacatataggaaacacgccaagctgagatcctgccagattacagtaccacattgtttaaccaagctaccattgcaaatcccttctcagcagcaaacaaatagacagagagaactgcagcaaaagaagtacatgcagaacatcattttaatagtataagctgtgaatttgctgatttgcaataactacaaagaatcaacctgctcctggcaatgcacctcaacagctacccaccgtcgaacagagcaccacttttgctccctctgagcttcagtgaaaaaacaaatttgtagatcataaaattgtgtggtattggcctattgagggcttcctatcgttcccaacatcattgagtggctccatcttacgtactctcaccaacaaaacagaaccaccaccaccagtaatgcatgaaagcatgagacagtgggccatggccagggagacaacgtgggcacatcaagatcagctggtcatggttagcattgaacaaaattagagaacataatctcccaaccatggtaggacacagggaatgcggtggaaacaaatgttgtataacaacacaatgaacgaataattactttactgaaggaaaagtaaaagcatacctagcctggtggagaaggaaatcaaagcggctagccagaccatagtgtggcagcggtttgagaaatgtcacactgttaacaaccaaatttggtaaattctatcactatgggcatcgaaggtgaagatcagatcgaagtggaatccaaaatgaagatcgttgcggaaacagagtaagaatcggctgcagtccaaatcggctaaggtcaggtcggcagagttcgagtcggacggggctagccgatacagccgattccgataatatgactcggcgtatgtcgtcgggttcaagttgatgtgcttcaaagatgattgccacgcatggatagagtcttgggaaggcaatcgtatctattaattaggatattctgtataatttccttagagatatgtttgggcaaaagtctgccgtaaagacttatggtatcttagagtttgttagagataatagtcgtgtccgttatggacgtatcttgtaattctcgggtataagtagacccgagccctatgtaaaaaaaaaggacacacatccaatacaatctcggcgcatcgccaccctttttgctttacttttcgacgagttcgtgctctcgggttgagctgcatcggtttcgatcttcaacaagaggtaaaacttgtcatgacgatttatattctcaggattagtgcttccatctttatgatactctaatcttgtctatataattcgtcgagttatcatatatctcacataatcttcgataatatctctatctaacctataaccggctaacatctgttaatggaaggcaaccgattaggttagacaatgatgttaacttagattatgtgatatatctaccactctatgaaacttccagcggcttgattgtctagacattgttcttcttttcatacttaatgttgcatcagttgagtttgatctattaagtcgtgcttagatttgcaatctctagcctgctttctggttgccgattagggtagtatcggagtttcagccgatcttatctgatttaactacttttattccatatgcttaatctatatgttaaatctgccctttatgttaggatcttgtcgcatctaggtatattaggcttctgtttggtatattctacttgctttaacatcttaatatagagtggtatcggagtattagccgatacatgctagatccatttgatcggctatgctataaatgtatataatcccactattaatatatatttcgatctaagtgatttatactgtctcggcaaggcgaccgatctatcccaatcacttgatttaagtatatatcgatataaggattatatatcattaatatctacagccgatcgagtagatttagttctgatttgcttattgatatttgctgatcgatgtacgcatgacatcggcttgaaataaatgatatgtcatcggcacctagccgatcggctatcatttataggattaattgcggtttctttgttctatttcttgttgattgcaggatcaaatcaattggcacgctcatacacccgaaggcgagttttgaacctgcactggagttaagcaaatctcccaggcctcgtgttttctgtcaacacacacatctcatcctgccatttcgtcaagcataacaaaattatacttaaatttaacatccctgaaatacataaaagcttaggtccttagagcaatgcaaggaacagggaatcgaaccaaaagctaagcacaaaaggcacagaagaggaaagagggaaaataagaggtgcagacgtcgtcgtacctgcggaagaggaggcaacgattggggatccactgagccgataggaggcgaggtcaccgctggcgctgaagatggaagggttcgcgagagggcgagagagggtaccgccgggaagcaacccatcgacggggaggccactcgccgtcggctcgaaaaagaggagcgggaagaaagaaaggaagaccacaatgacggcggaggcggcgacgacgacagatgcgcgtgcccgtgtacgggacgaaggaatcactccgcaagaaggcggcagcggcggcgacggccgggcctcactccgcaagatttggggattttaggaagggaggagccgtggatgtcgagatggtgccagccacgtcaattggttcgcctagcgtgtgtttggttctgggactaggtgggatgggatgaaaccatccccgatttgaggattgggatgattccattcggatgtttggtttgtagaataggacgatcccagttttttgtttggttcaaggaacgagggagggatgggatgagcgccatttgcaaccaccaacaacgccgtttgcaacaaccatggccgacgccgcctctgcccgcacctccggacgtggtcgccaccggcctccttgatggcgtcgatgagcggctgcggggggctcggcgacggcggcggtagacggctcgggcgacagcggcggcggcgggctcgggcgacgtcggcggcggtgggctcggcgacgacgacggacgggatgacccaaccgagcactggcggcgatggtgtcggccttcgcgcagagcagccgcggctcggcgatgacgacggcggcgaggtccgcgcgggagagggagagggagaggccggtggagaggagggcgagcacgaccaccatcgcggtcgggcgggcggagaagcgcgacgacgcacggtcggccttcgcgtagagcagccgcggctcagcgacgatgacggcggcgaggtccgcgcgggagagggagagggagaggccggtggagaggagggcgagcacggccaccatcgtggtcgggcgggcggagaagctcgaccacacacggtcggccctccgccgagttccccgccttcggatccgtcgccacaacctttcccatcggcggatccggcaccgccgcccttcacaccaccggatccgtcgccgccggcctccccaccaatggatccgccaccaccgagtcccccgccgccgctgtcgtcgaggccgccgccgccgccgtcgtcgagcccaccgccgccaccgtcgcccgagccatctaccggcggcgtcgccgagccccccaccgccgccgttgccgagcccaccgccgccgtcgccgagcccgccgccgtttcccgaggaaga

SEQ ID NO: 8087 - DNA, 20314 bp, Oryza sativa
caacccattagcaggcttatcctcaactacccccaacttctaactttccatcacatcacatctaaaacttttttacacatataaacttttaacttttattttaaacttttaactttttttttcaggaactaaacacagccgtagtaaacgttacaccttcagagagctaatagtgaacacataccttgctgccgacacagacgagcatactcacatatacgcgacattggatacccaacacacacgcagagacttttgacaacgtatctggccgttgtcacgtctctgtcaaccacggcaggccgcaactcatagatgccaatggtatcaccgaatttgcacctctaatgttttggaatgttcgaattgtttgcgcgcgtcaaagaacaattaacaaaccatgaatctcagctgcttatggccccgaacacacacacacacacgaggagaggacggtcttaacgcatccgggaattcagaatcgacatggcctctctttcaagctggtcagctaataccaaccgtccgaattaacaaactcccacgcaattggtaatcaaaggggcttggttaagctaactggcttttgtaaacacttacgcttactttactgtattctccagacaaaagcttggcagactttgctttactgtttttttttctcatacgagatggctgcagcaggagcagccatccacagtactctagtatagtggtctcctatcaattattatagccttcaaaaacaaataaagcagatctaatcatgacgccgttttattggaaaaaggaacgtctgacaaatgtgcctaattaggccgcttaaacgatcatatggatgagctattgacaaatagaagatgaaaccatgcgtgttgctacggaaaataaataaacaaagcaaaatcaatactaattgggtaaatacctacagtttgataggcaagaataaacataaactgtataaattagattgattggttgagttttcttataacgtggcctaacattatactccctctgtatcaaaatataagggattttggagggatgagatactttttagtactgtctagatttgtggtactagaaagtattacgtcactcaaaaaccaaacctcttgtattataggacggatggagtaagagtaaatgttatcaatgtgttgtatttatatagaaagaaagaacgcctaaagtacaacatgccgcctttcatcacaaattaactgtagtttaacttgccacattttcagaattgaatttttaaccctgatttgttttcccaaaatttagcgtgattacgaaagtgctgttcaataatacataatagagtatcagtttgacagcaactcttgtggctgacaattttgagcccgggcagggacaacagtatcctaggctctaatagcagaatcacagagccatcggaacctgtcgttgccaatggccggataggtttagtttttagcattaaaaaccactggagtagctaggagtgacatcgacttttatcaagaggagctaaaggcgaaaagccagtccaacgaccgaaagctcagaggatttctttttcttttttaaaagatgaatacttacggcttaagttactgattttagacgttaacaagatatcagcagtgatcagtgcaattagttgaagtgtgattcaatcattcaagggagatatatacttgtaggagaaaaaggaggcaattattgatgtgtatctgacagtatgaagcatcgcgattggagtgtcctcagcaagcaccgaaaactacagaacaaaacactgtacttacatttacaataaggcgatgttttttcttaaaaaaaaaagaggcgtcaaaaccattgtaaatcattgtgtgagtggtactcagagaacataatttgattttctaggacagtattaagtggctagctttggtcggcagtcagtcaatagcctaatagtataacttggcataatcaattttaaagtagcaactagcaagtgtccatacgagatcttttaatccccaactcacttgttccaatcttgataatctttttctgaactgttgagtggcgcctctgcagactggagtctgaacaagcacgtttcaggattgaggtttaactgagtttcgatcaaatcttcttcttctctttcttttagcaaaaggaactaaattttaatcctaacccaaacgtttccggatcagagcaccatcaaaaactaaaactagataggaaattcaagatgaaattgcaaacaagaaagtagtaataatctgaaacagctctgttcattcacataccccaagtatcatctaggcggatcgatacaagaggaggaatcgattactacatctcagagcccagtagtgagacggagaaaagaaaaaaaaaggaagaaaaaaaaaatcaaagagaagtcgcgaagagaagaggacgagctaagccacagccacaagcccacaagggagaccttctagaagcccgcgcagaggcagatgctctcggtccacggccgcggctgccggaaccggctgtgcctcctcgccggcggcgccgcccgccccgcccccgcccccgccgtgctggtgcggctcagcatctcccacatcacgcgcacgtcctcgtactcgcacgtgctcacctcctgcctcagcctccacagccctgcgaccaaacaaacccaaaaaaacatcgccggagttagcccccacgtacgccgcctccgcctccgccgcccaaccaaaaaccaccccgtctcgccgccttacctgtctgccgaaccccgaatcgggcggcgacgccgagccacgccctcctcaccggaagcacgacgcggtcccaccagtaccccatcgccggcgatcgatatcctcctcctcctcgtcgtcgtcggcgaccaccgcacagcctcgcctcccctcgattggggcctggtcgtctcggcgtcccgaatttgtacacgcgggttggggggagaaaaaaaaccaacccactgtaaccacaccctcactcacacactgacgacgcgggcccaccctcggaaagcttctgcgggcccggggtgtcagtggcagaggtaggtacggtggttgtggggagtttgttacgggggtgggcggcgtgcacgtgcctgaatgcggtaggcgatggcgcacacgtaggcgcggggatgggggttgcttgctgataaagtggggcccaggtggattcatgcgcagtcgtaactgcttggtatgtggcagttgagtggtggttacggcggcgtggcagtagacagtagtagtagtgtggaagtggacggagttaggtcacccgcgctgggttggggtgacgctgcgaagctactgcaccctgccatcatgatctatccaggtttagtatccgtgcggttatcacagatatcgtatgcggtaatctttttagtttttaaaatcatactatatcttacgataatcatcaaaagagtgatgataacttcactcaaaacggtttggtaaatttagatccatctctactggttctaaagtacaaaacacggtaatcttctcagtttttaaaattatagtatatcttgcgataatcattaaaccatgagagtgacggtaacttcaccaaaaacggtttggatccatctccatcggttcaaaagtacaaagcattttttaaaattttaagtacttataatagcagtgagccgtgattttttaatgatgattctgagtttctgactactcatattattgttgccgggtcagaaatatttcatctcttgtaaaatacaagcatttatgaaaactttagtacaaataaatattaagataagtattggttaaaatgaaaagtaagtagacaaattaaatgggaaagatgaccatcggttgaaatgagaaaactgatgcttgtattatagtataaattctaaattctaaaaatatttatattctgtaacaaagtgggtagcaatcagccaatcactacggcactagtcacctctcttgccgtcttctatttcgctttgagattcgtgcacaaagttcacgtcgcatttttaattatctggtgttaactcgtaatcaactggtgatacgcaaacatcaagctgatcgttgagctgagcagaggcagggaaacatttggttaaggcccggaaattcttgacgtgcgacgagatgaacggggcggcgcttgttgcaggtgagcagtcgcatgcacggccatacctttattgctaaaatgacaacttgtgcaaattgcgactcccggatcagtgtatataattctgaagaaaaagcctacaaatcgtcacgctgcttaggcaaaaagaaaataagaaaaggaacagatatctcgttaagccatatatataaatcgatgggacattttatacaggttgatctagacatgataacaattactcctaacaaacaagaacgtgaacgtgttaacgtgagagttgagaatcgcgtgcggaacagttttggtcgtcgagctgaaaggaagatcgatatatcaatcacgcattggaagaaaactccaaactcaatggagggaacttggaaaggaacaataagattgaccgtatagaaatgcaagggctagttggtctaattctgtctactgtctactggctcccgttccatccacatgtttattttttttctagaactccatccacatgctggaaacgaagttttctacgtactcctacttcaaaaagggaaaacacatatcccatatgagtggctaaagcagtagtcagatctaccaacaagtctcggaacgtgagattagactgactttacccgttgagttcgttaattagatggttttatgggtactggttagttggtgcagttcaccaagcctatatctgcatgtgtttagttgcagagtactagtaataccagaacatcaccccatatacatgtgtggttcctggagcctcagcgaaagcaagccgaagatgcaagttggacctttcagatttcgtgctggtctctccagaccgggcacatttcttactgtcaagttggctctacaaacaaaacagtgccatatggccaattgtaaccggacacccctgccctcttgtattctatttttatacctctaaggtcctgttcttttctccaacaaacgttggattaagattaagatttttataacacgctttttaaactgctaaacgatgtgtttcatgcgaaaactttctatatgaaagttgctctaaaatatcatattaatctattttttaagtttgtgataattaaaactcaatcaatcataagttaataccatctcattttacgtaaaaaacttcatcttcagcagattcaaacagcacctaagtctgataccacatacaaacagtatgtattgtatgaccataatagtatgagtcttaaaaaacacagactggttggactcactgtaggcctgtagcctgaccatcggtcacgcgcgctcgtgaccaccgcgaggccaaccgccgccccctggctggaccactccaccgcacccactcgcgattcatcagggtatatttaaatattcaacacttttaaatatacttcttccgtttcagcttacaagacattttaactatggtcagagtcaaaatactttaaatttaactaattatataaaaaatagtaatatttacaacactggtatattttcattaaatctataattgaataaatttttataatatatttgtcttaggttaaaaatattactattttttctataaaatcagtcagtagcttgattttaaccaaagtcaaaacgtcttataaccttaaacgaagagagtaacatttaataaaatatgtctatgttacgtgagttttggcaaattgttaaacaacgcatctaaaaaattcaccactccattactcctcatttatatgctatgaacggtaaacagtgcattaaccagggcaaacctgcgcgggtacgtttttgcagtagcggtacgacgaggggaaaatcccactgacaggtgggtccaggcgaatcagaaagcgctgcccggtcggtggaggcgagctgggcccacgccgcagtggcggcgtggctcccccgaaactaccgctccgctttttgcccggccaaaaggagagcaataaaataaaataaaaaaggaaaagaaaaagaaaaaaaaacacgctctctctccctcgagggccgcggcctcgatcgcacgcacgcactagccgcacgcgtttggctgcttgctgcggttgctcgcactcctccacctccaaaggctccaacaagaacaagaacaaatccaagtgaggccctcgcccacccaccgactccgcggccaaattccggcgagatgttcgcgagcaggccggcggtgcacccggtggaggcgccgccgccgccggatccggcggagcagccgaggggggtgctgatgaaggacctgcccgggatgcccgggacggcgggggggctggggctccgcctcgcgcagttcgccttcgccgccgtcgccctcgccgtcatggcgtccaccaacgacttcccttccgtcacatcgttctggtgcgtgccgcgcgtgccccccctctcccctcccccgtctctgtttctctttccgctttatccgctccacgtcagtattgaggtttcctcttttaggatttgaggttttgaattgttgctttagaaaggggggatatagttgtatgtggtggtgtgtgaagaccacacgttttttgccttattgatgatatctgaatgaacagagacaaatatttctgaaactggatattgtagattattagctcagcgatgagatactaaatggcttggctgactgtggtgccctgtgcaaacctgtgctatataatcgtccaattttctttctgttgtatggagtagttcactagtttatgcttgtttgcttaactccaatgtaaagatggtcattatctttagagtgcaaacttttgaacttgaatatatatgcatcatttgccgatgatgaagcatatacgtgatgctaaaaaaatgtgctatattatcaccaagtcagccgccatcaattgtttgaaggtttgttaatacataagcacgggctcttatcatcacaaatttgtttttagctaattagatgtgcaaccatactatcccatttcaaatactcccttcctttgtataccacatttatattttgtactttctgaaatttggataggggtacaatagctcataccattatcagaaagaatgacacatatatcccaagaacaatatcgttttcatccatagttctgagctcttctttagcaagttgcaacacaaaaattcaatttggcaaacacttggggacaagcagcctcacttagcatcttcctcggtagaataaaaatagtattgttgtgctgcattacctcatatattcagagatatcccgcttcaaatttggtggccatctttattatgtgctagtattgtgtgtgtctactattagtactggttttgagcctacatgtaaacctgtcatcaattcaagagacacacgcatatgctaataaacaacaaggacagagacaagatgctgattcgaagagactgttgatgagtaggaacagtgtattctgtgcaactatagtaattaaaagagccatatatattgtgttcagtatgactattaattaaagcctattaatggctgcgtagggtatacttactttctgatattccctaatttaatacctaaaccttcttcttgttatgtaggtttatccactcatattactcctatgttaattatatgaccatgtttgcccttgtttctttgggtggtgggggcatatgctctttacaaatgtttggtctttcttttagtcaacctcagttctattatactcagtttaattgcatgaataacagactaatgaattaccgttttggccagctttcttgttgcggcagccattttgcaatgtctctggagcttttcactagcaattgtggacatatatgcactgcttgttaagcgttgcttacgaaatcgccgggctgtttgtctatttgcaattggtgatggggtgagtgcaagctgtctgttatcctctttctactgcttgtgaaatccattcagtcagtataccttcatttattttctgtaagtaatggatatgtgttgttgataaattcattacaagtccttctagcagtcaacttgttcatgataacactagcatactatactccctttggtcactagaaaagagtgccctttgcggctgattccaaaagttcaagaatacaagtcgttttggttaaacgagtctcctacctgctataccttcaattaaagtcctacatgcatgcacatgcacttttactacaaaccaagagaagttgagaggcaacaacggaaaaaaacatggagagagaatgatgcataaacgggttgatggaccttaataggggtacaggcacctgaaatttctctccttggttttgtgcatagtgctgaaaactacttttattcttgactggagagagtactttactgtgactattcattcttctgcaactatagggtgcattgtcattgactttggtttttttgcagatcacagcagcactgaccttcagtgccgcatgtgcgtcatctggcatcaccgtgttgattgataatgatctagacctatgctcggaaaatcactgcgcaagttttgaaagtgcgacagcaatggcgtttcttagctggtttgctctttcgccatcctttctattgaatttctggtcaatggcttctggatgaatgaaaaccaaagaggaggttagagcttgatttttgaatgtatcatgtgcccaattcaccaattgtggttagtgagaattggatagcgtgacgcagctaattgtattagagttgaaagctgatgtgcggtcttgggatcatatgtttctagtataactctgtaaaaaaagaataggggatggcctgttttgcaagtgttcaatgtggaactcagtaaaagtctcttaagcaaggtgctttccgtataagacttccagctggttgagtttttgtgtgccatcatttatgcatacaacgtgttgattgtgctgatgaatcatacagccacagcaccactacataacaagggttgtgcctaatttccatggtacatttcagttgaaagtcgttctgaaagaaccactgaaattggtggagaaccttctatcgtcggctgacattcttgtgtgcaatacccatccatggctactggccaagagttctgcactcaccagggccaactgtggtgccgtaatctaccacactgacccatccgtagatggcactcttcttttttcccattgaatgttctttcgtagtagtacctttcaattgttccctcggtttcttagttgtttttttccttaatatgtttgtactatatgcaatggacaaaagccatgtcagataatgttctagatgtcagttatcacttgttaggagctggagatgagatgcactcctagccatgaaaacatcatcgttatcgtccggggagagacaggataataccgagatttcattcgcgtcgttacttggacttggctggcacatctcatcttcttagaatgtaaaaataaaacttttttttttggaatttgtaatactgtttgagattcactttggtccatcaaaagtacctcgagataccggtacctcacagtatcaaattgtttttatcattggatctagctgggcaggaaagacattattagatctaatgatcgaaaacgatttgatatctcgaggtaccggtacatcgagatagattggagcaaatctcactgtttatacttcagtgacatatactttacactgagaacgacttcgatcaaatcaattactcatctgtagactacaccagctttgtactaggactataccaaaaccttacattgaaatgagttcaaaatttgtgttgtaagttgtaacacaaatgatacatttacaaggttacatactaaaatactacacacctgaaatagtactacctccatactatcatgcttatttatgttcattgctacatagcgatcatgaaaaatcaaaagcaccatgaagacaccagtcatgcatgatcactttgatcaaggtctggttggtcaagaaatggagtgcctccgatccttgggcggcttcgtccgcaccctgccgccgccgagcacgtccgatcgcaagaacgggttgagcctcccgagcttcttggacatgctgttcatgaatccgccgctgcttccgccgccgccgccgcccggcttcttcggcagcggcggcctaccggacggcgggactcctcctgcggagaacgccacggatgggtctctcaggcgcatcttcatccggagcagctccatcctgagctcgtcgttctcgcgctgcagccgggacacctcgtcgggaacgcccggccggtgccggccgttgaagctcggcgtcggcctgtacgacagcgccggcgactcgccgccggcgtacgacggcgcggcgctcggcggctgcgatggcgcgcggaggcgccgctgctcgtggtacagcacctgcaccaccgtctgcaccggcaggcggtcgttctgcgccgcgtgcgcgcacgcctcgcgcgacagcttctggcagtccatcgccctgcacaccttcttcctctcgccctcggccagactcggatgcgcctatcgaatcaatccacataagcatttagtggagcgattaacgaaggattcaaccatttcttttagtgatcgatgttaatggtagcttctaaccttcaagtagatgtcaatggcgcggtacatgccgtcctcgttgaacctggcgcgctccgggatgagctcggcgagggcggtgaacttgtcaacggacaggttctcgtcggaggcgatctcggcgaggtagctatccatgagcctgccgacctgggcgacgtcgctgtgcggcggcgacgccgccgagctgaagtcgtcgtcggtggtgtagtccagccgtggcggcggatccgtggtgtagtccaggtcgaggtagccggccaggatcctctgcacggcgtcgatgtcgtaggccgttgtggcggcggcggcgtcgggcgaggaggacgggatgaggaggtcgtcgagcacggcctggccgagctgcgccgccattcgcttctcgaggtcgagccggcacgccagcgtcgtgtcgaggtggatcgcggcgcggagcagcatcgacaggaagctcaccgacagagtgttcctctccctcggcagcaggctcacgatcgtctcgagcaccacccgcttctcgtgctcctgcctcgcgcccatcttcttcctgtccctcccgtgcatgtcctgcaccacgaaccacgcgccatggtcagatgatgatccaagaaacgaaacgaccgatcgcgaccattgccggcgacgcgcagagctcagaaactaaccagccgtcgaagagatttctgggcgtagagcatgatgagtgtccccatggcgatgcccttgaagcccctcgccttcatcgcgatcatgacgcgctggaacgtgtcgatccgcagcgccgtcagctcgtcggcgcaccagtcgtcgacctccctcgacgccgcggcgcccacgccattgtagccgccgccgccgccgccgccgggggtgcccagcgacatgctgaactggccgtcgccgccgcagacgatggacgcgacggcgtcgatgcacctggcgacgagccgcgccttctcctccgacgccgggaggagctcctcggccttgcggagcacggcgaccgcgccctcgaggctcgccagcgccacctcctccaggtaggcctccgtcctgccgaccaggttgcccggcctgcactcctcggtcatctcgaggtgctcgccggcgcaacgcagcatggcgacgttgtccacggtgatctcgaagttgacgccgtagcagaacttgacgacgagctcgaacgacttggagccgccgggcatgccggcgatctccaggtgcgtcgccttgttgccgccgactcctgacacctgcttcttgatgtagccgcacctggatgccaatggaagctgcagtaacaattaaacacctgtcaaaaactcagtttttctttgctagaacacgcagtgaaaactgaaaaaaaaaacaaatttgggttgatgaaaatcaccttgtgcaggttgaaggcggcatcgtcgactttgatggtaatatcgcttgggagttcttgcgaaagtatcctgtagcaatgaagtgaaatttttgttcagacttgtgttcttgcatagttcggttacagtgttgtgatttgtgactccgaactaaaagcaggatgctaccaagctgtactgtgtgttgatttagggaagtttttgtgctgctcactttgaagcagcactatcacttctaattgaaaaacaaaacagtctccaactaaatgaagagcaattgaaacttttttttgacaaaattacagttcatatcagatagaaacaccatgcaaattaaacatgcaacaaccacaagaggaacagatgaactcgtagcaggaaggtgaggaggaggacgaagggcggcaaacgtaccagtcgctggttcgcttcatcgcaggcgagacgaaccgagcctcagcctgcatccctgaccttctctctctctctctctctctctctctctctctcctcctctcgcacgcagaagtcacaattttcacacaaaatattctctttatcttggcccaaacgcgcgtcgccgtcggaggaaatcacgggtgcagtgagtgacgcaggtgcggcaccctccggattgagccgcggttgccattggacccgcgtggtggctggacgccacacaatggcaattcgtacggcggcttgtggatggaatcggtcccgaatggcttgtgcttgctgctgccccacttgccctttttccgctgttcttttctctgtcagactcaaaattgtcttcggggagagggagacgggcgggcgggcgcgcgctgcgccttggagccatgggcctggacgaggtgggccgcgtcttaggagataaggggcgcggcccactgggagatcggtttcctgatggaataagttcacttttagccccttaactagtgaccgaatctgattcttatcctcgaaccgcaataccggatatctcgatcccctcgatgcaatctgattcgtatctcgccgcatcaactgaggtggaagcggagatatccagtattacggttcgaggaaacaaatcagattcggtcctaagagagtcaaaatgaatttattcctttcctaccgggtgaaatttccggtgacctactgacctccggtccggtccggtcacggttgctgagttgccggttacggcgccgttgggttgaagtaaaccttcccggtttgtttgatttgttccgtggagaagctggctgattgtcgtggtttgtaataattgaattaagattgttgaatcgtaatattttcctgataactaaagagtcatctttttacaaggagcaaggagccaaggaaacacacacaaaaaaaagtaataaataaaacatatattttgatcatgtactctaattcttattttgaaaatagttctcttaagacctgttcactttgatgctattttcaaccatatcttttttttttggcaaagttgctaaaaaaatatctatgtttagtttgttgccaaaattgataaatacataaaaaatcctactaaaattttggcaatattgctatcttgccatgctaaaattttggcattgccaaaacttggtaaggtttattttgactacaatctgaataggtccttaaaaatgctaataatggcatgtccacatgtgtacaaagataaaagaaaataataggagaaaaatattgtgtttgttcatttctttcttatattcaggagcatacgacaggattgtgttttctactcaggccttaattaatctgcgtgtcctaaataaccagagtatatgaatggataatgtccctaatattttttttactagcacttgcaatatgtgctgataaaaaaaatagaacgtgtcaatcatagtattagcatactgtacatggctgcctgtcattttgacgtaggtccaatacaggagcataaaatagcaagaaaacaattaaattaagcgtgaaaaaggaagggacgaagaaaaaggggaggaagaagagcaaagcggagacgaccaaccaaatccttgtcccgtccgttcggtcgccgcgtcgaggaggcagggagctcgcggcctcgcaccaccgccgccaccccgccatgacgagcgcctccgagctcttcaccgcccgccgcgcccgcgccgcccgcctctccgaccccgatccggacccggatccgcctgcggacgcgctccatgacccgcacggcctcgccgatcgccgcggccggcgccggggctgccgcccgcgccgccagctcgacgccgccggggacgtccgccagcacctgcacaccggggccccgccctcccgccgccgcgcttcgtacaccgtgagaagcacatccccccgcctcatcctctctagattttttttgttcatttttttattatttttgtgtggatgtgattagatcgaaatgatttagctcatactgataaaaatttgggaggattagggctcctaatttggcttgcgcaatcccgattggggtttggatgctttagattaggttatcctcgcctagtttatggtgaaatggggacaattgttagtgtggctagcctattctcttccatttttttttctgttactgcatcaattgtcacgttgagtactaatcaatatcgtcctggcaagtactagtacttgcacaaaagactgaaaccaaacccgatcatgctgtttggtctgttcaactgaggtgttcttctgctatgcacttgtagatcattacggtccccaaaggggcagtgataatatcgtgcagtgtatctcgagaattcgttgcatcctgtaaaggcttgattttcgttataaacattaagttgaaggagacccttatcttcatttccatagaaaatataacatatcaaaatggtgtgatggtgcctcatctttcttcactcactcctgaaaattgaaatggctaggatgtatgtttagaatattggctacgcttattagaatgtcaatactcagacctgtgcatttagtattccattgccttttcttcttcttctttttgttccagttccacttgaaattcttattatgaattgttatggatgaacattaaattatgacctaggatgcatagtggaatttataactgtacagcattctgatctatttatttcaactaagaaaacgtaaatttagattgatgtttgttgtttctggtgaatcaaatgaggatattcggtctcttttgttgtctacaggatcgtgtcttatcatacatagacaatagcaacattggggactctgcaactaggaggaaccgactggataggctgatgttcagaacaaatgagcggcttcctggtgctgtactgcaagcacaagcacgtgttctagagagactgagaggcatttctattggttcatctgtgtcaaggccatctatcacattggatgaattttcagctactgatgtgtttagaatcattgacttcgggaacagggatgctccatatgaagcaaataggtccagctcatcattggcccatccaagtagcgagtcagatgaagaaaggtcacccattgacaccagttccttaaaaagatcacgtgggctgagcaaggcggccttccttcggctacagatagagatttttgaggcaagcaaagatgacaacagggaggcatcaccagaatgctcgatttgccttgatggattctatgacggagatgagctcataaagctacgttgtgggcacaggtttcactcgaattgcctggagccatgggtacggaaatgtgctgattgcccatattgtcgaacaaacatacagtcacgatcctgactaccttagttctgcattggcagtttggcactctcattagaactgtaattaacagtaagatgtattgttgtaattcagtgttatgtgcatgcctgttacccggagttggtatgacatcactctattgaatttcattgttgccactggagttgtgctgcaaaaggattgagaattgtgtgcaatgactgatagtatatggtagtacattttttttcctttttgtaaatccgatgagaaactgacatacataaccaatgttgtttcggttgatatgagtatggcgtaggtatgaactgctgagatgctttgaaatccttgaatagtctggtgtggattgtgtcgtcaaggcagtatcatgatctttatatttgggaaattttcatctataccatcatcaggattgcaggtaacagcaaaacatgcatcagtgtagcgagttctcaatggtctttgggagttgggaggtagaggtatttatgttatttgaaggtattatacttttacacaccttctgattaacactacaagttatatatacatcctcatattttcctttttctttgatattttcctttttctttgtgaagaacaataatctagttattcttcttgtagttttcttttcttttcttttcttagaatattagtctagattttgtgtgaattcttttgtgaagcgtaacgttcttaggtatttttcttcttgtagttttctttcctttccttggagtattggtgttcaattttgtgtgtatgcttgcagctgttctgctatggcaccattctttcccattggatttctgctacctaattctttttttgtgctgctattccccaggataccgacttgtttaatgtttatgaatcgagaatactcctacgtcttttagagttttgacatccattgcgatccattgtgtaatttgtatatcatctgtaaatatactgtactccagtcaataccatgttctttggatggcaatatttcttttgtcaggaatggttcttgaagtaagggaagagtgcatccttgatgccatcctcctcccactccagctgctgccaccactcgtcgctgccctggatctcccgtagcttcagcggccgcacgccgtcgagccgccggagagcgtaacattggccgacctcgaggatctccagggccgggaagctgatcgccgggacgccccggcacaagcacgcaaggctccgcatcccgtgcaccgccagagtcttcaggcaagggaacgtcgtcggcgtcctccggtcctccgccgcggtgtcgccgccaccgtcgacgatcgcctccatgtcgtggcagtagtgtagctccagatgctccagcgccgggaggtgcaacacccagttggcgttcttgagctggaagcagttgaggatgttgatccgccggagcgccgggaggacatgggcggctgccgtcgtgtgccggaatcggatcgtctcgaggtgacggacgctcaggagacggagcctgtccagcttcggtaggcggaaagatcgacgcagctcgtcgtcggagtcgctgccgctgccgctgccggcgtcgatgacaatgtccttgacgccggtgcagctccggatggcgaggtgctgcagtctttccagcatgtcaaggcctcctagcgtgtccgatagcgtggaagggagcagggtgagcgacgccggcccggccatgtccttcaggcacagccgcctcgtcgagacgttggtgaagccggagagcttccggagtgcggcgacgctgctgacattgatgccgaggaacttgatggacgcgttcctcgcttcaagctcatcgaggctcgcctcggatgcggtggcggcatcgtcgtcgtcggcgttcagcctccatcgggtgtacctgctggcgaagacgtcgaggatcttcagcttctggaggcccaggatgacgttccttggtatgctgtcgagcatgttcgtgtcgctcaggagcaggtgttcgagctgcgtgaggtgcagcagctcaggcggcagagcgccgatgaaggtgccggacacgttgaggtatctgaggccgacgagcgagccgatctcgccgggcagcgccatgacgatggtgtcggagagatccaggtacgtgagcgccggcacgcaccggaggaagctcccggggatggcgcgcagcgacgtgttcatctgcagcatcagcgccctgacgccgcggcgggcggggagccgcgccgggagctcctcgatgaggtttctcatcagcgagacgcgctccgtcgacgcgcccgccgccgccggcgaggtgcgccactgctcgttcagcttcgacgcggtcttgatgccgacgccggcgcgcaccagccacctgttcctcgtggcgccgcagtcggaggcgatccagatggccatgtcgcgtatcatgtcgtgcatcctgacgccccgcgtgtcgccgacgacgtcgccgccggactccagaaggcggacgtccttcagagcggcgatgatccgcgcgcccgtctcgacgtcgtcgtcgatgctgctggagccggcgatgaggccgagcccgagccagcactcgacgagcttctccctctcgatcgagtaatcctcaggccagaggcagcacgtcaggaagcactcctgcatcgtggtggtcgggaggtagtcgtagctgaccttgagcacgcgcagcatgccggcgttctcctcctccatgccggtgatctcgtgcaggtgcgcgttcctcagcttgtcaatggcgtgtcgccacagctccgggtcggtcttggtagacagagccttgccgatggtgatgagcgcgagcggcagcccgcggcactcgccggcgacctccctggcgagcccggcgatcgccgggtgggacgtgacggccgcggccgtggcgttcatctcgaagagcgtccacgcgtcgtccggcttcaggcactccacgttgagaacccgatcggccttcatgttgccgcagacgatctccgacctcgtcgtcagcacgaccttccgcggcagctcgtcgccggcgctgccgtctggataaggaacgccgatgagcttcagatcgaagcattcccacaggtcgtctagtagcatcaagaagcctgtgttcttgaggtgctcggcgatcggcagagcacgttgctccaagtcggcgtccgagtgttcgtcggggaggctcgccaatggcaagccaagtttcttcgcgacgtcgtcctggagccgatcgattctgcattccttcgaggctactgcccagacgacgtggtcgaacaccttgctgctcacgcggcggctgccgcgcggtgggaaggaagctgttgttgatggcgcggaggagggtggtcttccccacccctcccatgccgcagacgccgatgactccaacggcgtcgtcggcgatgtagccgagcgcctccttgaggtaatcctccgtcccgacggcggccgccgcgggcgtcggcgccgactggtgcgtcgtggcggcgaagctgccgaccccgcgccgcgcggcgcagatcgcgccacgctcctgcacgagctgctgcgcctgccggagcgcgcgcgacgcgcgcttgccgatgcggtagcgcgcgacgaggcggaggcgtggcatggacagcgcggcgtagtccgccgcgacggcgttcccttgcttctcggcgacgcgggcgcgccccagccagttcgccgcctcctcggtgcaccccaggcggcgcagccggtcggcggcgccaccgtcttcgccgtcgtcgacgcccacgacgcgggcgtccacgatagcgccgtgcaagctgctacgctgcgcggcgagctggccgacggtctcctccaggcggcggacgttcctcgccacgtcgagcatgtcgtcgagttcgctccacaggtggatcgcgcagcaggtggacgtgctgtcggcgacttgttggtcggccggagcgtccatgtcgccgtcgccgccggcaatggcgtctgatcgtggccgagtagtcaggtgagcggcgatggcagtgtcgaatgcttccgtggacggactagatcaaatttgtgctagacatatataatggatatatgaattatgccgccttgatgataaatttcgtataaagataaactttgtgaatttgagaggatattgaacacgtgctagcagttggattgacccagtcacccagctactccctccgttttttaatagatgacgccgttgactttttctcacatgtttgaccattcgtcttattcaaaaaatttacg

SEQ ID NO: 8088 - DNA, 2985 bp, Oryza sativa
gatggctgaaaacaggcagaagtaccagaaaattaaaaaggtaatagacattattctttggattatcagcatggtccaacatatcactaatgttactatatcttactagaagtattataattctatgaatacaacctttttatataattttatttacataaactgtgccattttcagtagttaggtgtggcatgtatgaccttgtgatgatttgactcattgcaggaacctgcaaaattctcagagctccaaatacagtcgtacctgaaaactgttgctttcaagcgagagatagatgaagttcagaggggtgctgcaggcaggggtgttggaggcgtccaaacatcaaaaatagcatctgaagctaacagagagttcattttctcatcatcattcactggtgataaacagtaagtactagtcttcacatatagtcatttgttaactttgtgcatgtgagtgtgcatcacattcggtcgctgtacttgttaaaattcaattccaacccatatagatattgatgatacttatctggatcaggacattagcacaaagaggcggaaaggagcatattgtcgatagcattaaatcaaagagggaaatcaatcctgctgtcttcaaatccaatcccactagtagttctagctcaattaagcctaacaacagtgagcctttggggagttttggacctgatgttgagacatatcgtgatgagagaggaaggattagagtaagtagggtcaaagcaatgggaattcgtatgactcgtgatattcaaaggaatttggattttatcaaagagcatgaacaggtcagaaacagggggcatgactctgtagttgaaggattagctaacaatgaagagcctccagattttccagaacatctttttgaaggtaatgggctgcggagttctcttcatctcagcgaagattatgatgaaactgctagcgataaccatcacacatcatcactagtaggatctgacaaaatttctgagggtgattatcatggaagcaaagaaacaatagagatatcctttgctgacgatcaaacagaagtgaaggacaatgatgaccaaattttcttgcatttagcttctggagcttcatccaacttattcactacagaacagactgatggctctgattgcattacaaaagaaggcgtacttgaaagtgaaacacctcctatgcaagttgatgagaaggatcaccaagcatcactgatggacaatttctgtactgatgatgagatagagtgggaagaaggtggttgtgatgttcctggaggtccttccagtaatgaaaacgatcaatctaaagtaccgaaaggagatctagaagaagatgcccttgttcaggaagctataaggagaagtttagaggattttaagaagcaagaacatgaaaatgtgacccctgaagatttacaggcatcttttgaagacaaacctttgcaatcttatgatgatgttcctaagccagctggagctgcaggaaagacagctgataaaattgggaaggaaataaattgtgaagagaatgatatagtgcatggatcacttgtagttgatggacgagaaaacgagaatcagactcaacccgagaatagtgatgggcatgccgatatgaagagagcttatttgttggatcctctccctccatgtaatatgaccgccagtactagtgctgcaaaatcacctgagggctcagaagttcagcaccacaattcaatgttacattcaatcagaactcccgagtggcctaagaacgatagcgataaagttatgacgcaatacagtttgaattctgataattcaaagtgcaaaatagatgattcttgtactggagaaacctcgaggtcactccaaaatgaccttttgatggatgaactggttcctgacactgctgtacaaaaagaaaatatgatccagagaactacggacttatccacatctgagataaactatacgaaactgaacgataatgttggtatatatagtgtgtcagctagtaatctagaaaaggaattatctcttctgagacaggaacaagaatatctcggaaatgaaaggcggaagcttgaaagccacgcagagtctgtcagcagtgagatgtttgctgaatgccaggtttgaatacaatcaccttttccctttgagttgaggcaaggtttacctcagaattgagatttagtggaagtttgaagtaaatggttttagcagtacaaaatgttaacatatgtatgtcttgtattatacaggaattgcttcaaatgtttggcttgccatatataattgcacctatggaagctgaagctcagtgtgcatacatggaaatgactaaccttgtcgatggagttgttactgatgattcagatgttttcctgtttggtgcaaggaatgtttataagaacatatttgacgataggaaatatgttgaaacatacttaatgaaggtcaattttctttctgctttcaattttactctcatttttatttcattgccagctgaagcaatgggaagtccatgtccttgctggaccttccacagctaatattgtaatacattttcaggacattgagtctgagcttggtctaacaagagaacaattaatacgtatggcaatgcttcttgggagtgactacactgaaggaattaggtgatatgctaacaagaatatgtatcctgtaactttttttgcagtttgtataaaaataagatcagaacttcatttttcttgttgagttgcatttttcgttgaaaggaaatatgaactgaaaaacttgctgttccagagatcaagtgcatgctctgttttgttggacaaatttgttatgtatacagtcattaagaatacagagcattgtactttaattatgccatctcaatttcttattttgaaggggggaaaatgccatttcagtttctgttttgtccagtgtatttatttatatactgattatgcagtggcattggcatt

SEQ ID NO: 8089 - DNA, 10795 bp, Oryza sativa
ggggggggggggggtctagctgctagctatccctggcagtgacgctgcagtactgggtgccccggccggagtgatctgtcgtccagtgcaggtacacgacgagttccaactaagacgcaggtggctcgagatgtacacagtaacacactggtacgtcgtaccacctatccatcggtagcgagcacgtctccgcgccgcgcggtgctgcatgcatgtgtctccatctgcagccttgcaggtttttcgttcagatcaatcagggggggctgctctcccgttttccttcagggtgattgatcacactggccgtcgatttccaaaggttttcacaaagcgcgtattactattaccacgtgccgattggatcgagtgaacactagaagtaaaaactgctgtccaagtagggagttaagtaacacatcgcgagatccaatgacccaacaaaaccttgcagaggtttttgcagttgcatgcatgagtggcaattggctcttcggtttggtttgcatttactactatattcgcatcatcaaggattgacttcagactttctgatgagttgcaggtgcgtgcgtgttcatatacgtttattactgtcagttgattttctttgagatgtactggtctggttggttggaggaatatcgagtgcacttgatcgatagataagatagattggaggaatatcaagtgcactagacggatagataagatagattactggttacatcttcacagcttgtgcaagcctctgaacagagaagacgatatatggagttagaattatggaaaccagtcttaccggaaccatatgcgctttatgcagtgcacttaagttttaggatggaaaaatgggggagggaactggccgtagtaatgcatggtccctagttactgacaggatggtcataggatgcatatactactgtaaccgtttggtgcttggattgatccatgatacatcagtgagggcaggtagcagatcgatcagtgcatgccggactgaacaatgactgcaagtctctgcaactagcaagcagtacagtcgtacttcagtttcttttgtaattgaattaaccatcacataatatagcaagccccatttgcaattaaacactgaaatagtaaaacacgtgattttaatagaaatgtatatgcaaaacagaaaattataaaacacaacaagataacataggaataagaaataaccgtttaaatagaatatagaaaaaaaatataggaaccggaagagaataacagactagaatgaaagtttctaataggttgaacctctactgagatatttctgaggaatttcataggatttaggaagcttcaaccctatgtttcaaatgactaggtagaaaatttttctataggattaaaactctacaaagttagtacacattgtttccaaaatagaccgatagtgtattctgtagggtaggatctgattgacagattagataatgcatgcggtacagcacttacattgcaaatttgcaattagggccctatttagattccaatttttttcttcaaacttctaacttttccgtcgcattgaactttcctacacacataaactttcaacttttctattacatcgttccaatttcttcaaacctctaattttggtgtggaactaaacacagcctagctctaactctctgtgcgctcttcttaatcttaattaagtagccatagcagcgtggttgctagaatcgccaacaacatttatagaaaacatagaaacatgaaaaatacggaattttaatatgaatatataagtggaaaacataggaaaatctatgagcgactttttgaatagtccgcataaaaaacaaaaagaaaaaaaatcagataacatagatagactaaatttttttttcaaaaaatgaagctcttgctaactttcttcaaaatttataggcattaagtcatttcttaggaattttgtaggatatacatgaaaaatacggaattttaatatgaatatataagtggaaaacatcggaaaatctatgaacgaccatttgaatagtccgcataaaaaacaaaaagaaaaaaaaatcagataacatagatggactcaaatattttttttcaaaaaataaagctcttgctaactttcttcaaaatttataggcattaagtcatttcttaggaattttataggatataaaagcccaaatcctttgtttcaaagagctaaatagagaaaaaaaaccattaaaatttgaatcctataaaatttatatgtaaatccattgtttagagggggtcttaatcgatatatactaaggctgtattcggcacccctttttcccaacaactctccctcgttttctacgcgcacgcttttcaaattgctaaacggtgtgtttttttgcaaaaaatttctatacgaaagttactttaaaaaaatcaaattaaccctttctaaaaatagctaatacttaattaatcacgtgctaatggaccgtgccgttttctatgattactgttccggatgggagcaagaatgcccgaacacagcctaattgctctagtctagtgagatacagtatatatataactagataagcttggaacagatcttgtttgcaatttggagcaagtgagatatgcaactattcactaactgaattgtggtcctagcgagctcgggggtaaaccacaaagaaatcagaaaccacgcgaagttctatccaggcagcaaatggcgtgcatgtaatggcgatctggccagtggacagtggtcctctccaagatttctctattatatactgcacatcgatacaaatatttccttactcattgaattatttctgtaacaccggactgcgcacgatcacatgagtgacaattttgtaggctccctcgtagtgggatggcaagatcggatcagtaagacagtaatgattccaaacatagcaagtaaggcatggcattttcttgtagagaagtggtagtagggattttattagatttttttttgaaattattatttattttatttgtgacttactttattatatatataactttaagcacaacttttcgttttttatatttgcaaaaaaaaattgaataagacgagtggtcaaacattgcaatcaaaaacttaaaatcccttatattatgggacggaaggagtagtttttttaaaaggtacgaattaccctcttgaactatagtagtcgaccgaattaccctaaactcgtaaactcgaataccagccatttacaccctcgactattaataccggatgaataactccatgaacactgttttggacagttttgacttgagtttgcgtacataggcgttaacatggcaatccaatcaacaatgaaattattaaaaaaaacaatgtcatctctcccatagcctaatccctcccccctactctccctctccctctcctccctccgacccggtggccggcacgccatcccagcccctaacctcccattttagatagttatgccttgagtttgcgtacatgggcaccaacatggcaatccaatcagcaataaaattattaaaaaaacaatgtcatctctcccacagcctaatccttcccccctactatccctctccctctcctccctccgctcggtggccggcacgccatcccagcccctaacctccaccttgctgccccctcccccaacctccgccacactgcaccgtgctgcccccatccccaacctctgcctcgctgctctctcttcccttcacccgatggtcggtgccatccccgtcctcaacctccgcctcaccgcgttgccccaccccgtcccccaacatccgctgtgccatcccttcctccaatctctaccgcaccatccccacccccaatatctagtgcgccgtccccatccccaacctccgcctcaccgtgtggccctgcccttgcccccaacctctgtcgtgtcgcccttgcccccaatctccaccgtgccatccctgcccccaatctccagtgcgccattcctgtcccccaacctctgccccacccatgtgcccaatcttcaccacgctatccccccccccaatctccactacgccatccccacctctgatctccagtgtgccatcctcgtccccaacctttgcctcgttgttgccatcccaaccaccgtgaccgcgacacgtgagggtgtagcggatggtggccgtttcgagctcaacctccgcatagctctagcttcgctttggcccaccacctccgagagccagcttcgcgtgcccaggcgagcttgcgttgatccgcctcctttcgagcaaggtccctctctgtcctacttctctagccaaaggtgcacagagagagagagcccattgatttgcacctgaaatggggagtggggaggattggcttgaggaaagatatacaagtgggcccattgattttttttaaaaataattttattgctgacttgattgccacgttaccggctatttatgcaaactcaagtcaaaactactcaatacagtgctcagggggttatttgtccggtatcaatagttaagggtgtaaaatgtctggtattcaagtttaggaggtaatttgatcgaccgctatagtttaggaggataattcatattttttttcttttttttccattacacaaaagacgtgtatgcaccagcacaattataactatacatggtagtaaatgtttccactaacaaacgtttaaaaaaaaaggtgaaggccaaactacatgtccttgttctaactaaactttattaataatacaccgcatgtattccaatgactctacacactaccggtgctttccccttgacaagctaatttctgaaacaatgagataagggtttcgggatctcgtgaaatttggtcatatgattcaggaaaaaaaaagttgtttcccacaagaaactttaacatgaattttgatttttgagttctacagtccaaaagctattcgcatgtaaattttctataggaacttgttggagaatatgtgacacaacccagccttagcaaaagttggtacgtgattccattttaatcacgcctaaagtacttgtacataaagtttgataataagaataatcactaccttggaacccttatatcctcttaatgagatttttaaaaatcacacctacgtcgaaattatttgattaataccaatataatggttcattgcaaattaaacaatcgatttacctattaactattaaggtttaaatcgatggacaagattcacgcatttattcttagtctttgtctctttgtcatataaacgtgtattaaagagtgtgtatttgtggacatgtggccaccatgatatgcacatatatgtgttttgtccgattgaccaaataggtaaaaaacttttatgtatgtagtttgcatgaccttggtcatgtatatatcacacgttggtagtatggctatatctacgaattagaggcccggccggtgccttaaatattgtaaaaataaaattaaaagtacagttcaccgctgtacgttgctctttatactcgatgcctattatgggtggtgtgccatgtatccgcatcagaaaagtagctagcgattaatctaatgttcttctctttagctataccttgttattagacgaacatatttcaggcttttagcataatcgccgaaggagaaaggacagcttaaaagaaattgagtgaggaagttctaaaacttgaacaaattggtttggtgtggacctaaacaaaaattttagaagccctcactcattctgcacaccatactgtacaggcttgtttggtagcaacagacgcgcgtcgtggattacttgactagcgaagctagcagcatcagggacaaggttacaatacaagcgtcaaggttaagcaaacccgagaattttttttaataaaccttatgactaagctactcgacataatagaagataacatcataattcaaagtatatgtatcaattttaaacttctaaacttctcacatatgacggttgatctcagagtagagtggaactatggaccgaaacacagaagacacgtgcatacgtacaaagtaagacgagaggagagaagagcgagacctagcttgtcacacagcacgagcactaccaccagtagtatgctattacgcacgggagcatgcaactaggccagcggagcagcgcagagacgctactcgtgtgttactaaaataccttagagtatatttattaattttggacatctaaacttgtcacacggcggttgatcttatagtagtgtggagcatggagtaaaacacatataaaatgtgtacaaacgtatgaagtatgtgcggtaagacgagacgagaggagagcagatcctgcaagtcacacgacacgagcgttaccaccagtagtacattgctacacacgcgagcagacggctaggccaacgcagaggagaggcgccactcgcgtgtcgttccctataggaaaaccctctttatcaattttggacctctaaactttcacatatatcagtttatcttacagtagaaatagaccgtgaagcgaaacacacaagatgcatgcatacgtacagagtactcccctgtcccaagctataagggattttaagtttttcctacaacgtttgatcattcgtcttattcaattttttttaaattattatttattttatttatgacttattttattatctataactttaaacacaacttttcgttttttatatttgtaaaaaaaatttgaataagacgagtggtcaaaagttaccagaaaaatttaaaatttcttatactgtgggaacggagggagtacatgtggtgagacgagacgagagaagagccgagtcctagcagccatcacacgagacgagctttaccacgagtagtatgctactactactacgcacgcgagcacgcacgcagccagccaggcaggccagccgagcaccgcagagagcaggcaggcgccaactcgcgcgcgcgcgtcgccttctccatccaccaccatccaacccccccacgcggccactcctccacgcacacacctctctctctctctctctctctctctctctctattccaatccagtcctgaatcagtccacccctttccttcgctctctctctctaactgcagatttccctcccctttcaacgcgcgcgcgggtggtggggggaggcacggcacgaggcggaggcggcggaggaggtggtgggaatcgatccctttctgttccggccgcctcgatcgcccgctacccgcacgccgccttttcgtcccggtggatttctgcctcccttttctcgattctttcctttttcttcttcttctgcatgcgcggcgggctgtgacgccgaccatgggggacgcctcggcatccacctccgcgcccgcgacgcccacgtccacgctcatctgccgggaggatggcaacgacctcttctccgccgaccccgccgacgacgatggcggcggcggcagcggcggcgactgggagttatccattgctgacgacgaccatgtgttgctcatggaccgggacgatgagtacctcgcgctgatgctgtccaaggagaggtgtgccggcggcggcggcggcggcgagcgtggggatgaggaggaggaggagatggtggaggagtggatgaagaacgcgcgcgcctggtgtgtcggctggattgttaaggtcgtttcgcgtctcctcctctctttgtcgcccccttgacctgagattactctccacacggtttcgcggagatcggatctttgtattgactcttgttttcggagggggggggggggggcttcctcctcgctttgctggttgcagacgaacgcgggattccggttcagcttgaagacggcgtatgtcgcggtgacgtatctcgatcggttcttggcgcgccggtgtgtcgatgtaatgacgatcctccctgcttgccttgatgcgccgcctcactcttgttgtcgtgatgccgagtgcgtgttcgacgtaatgcctgactccgtattgccattttttttgtgtttgtgtgtgggggtgttttagagggacaaggagtgggcgctgcagctcctctcggtggcgtgcctgtcgctggcggcgaaggtggaggagcgccggccgccgcggctgccggagttcaagctggacatgtacgactgcgcgtccttgatgcggatggagctcctcgtcctcaccacgctcaagtggcagatgatcaccgagacacccttctcctacctgaactgcttcaccgcgaaattccggcacgacgagcggaaggcgatcgtcctgcgcgccatcgaatgcatcttcgcctcgatcaaaggtcgatcattccccccctctgctttcatttcaccgaatcggatcgcaagaatctcatttcatttccgcaatctcgtagtcattagctcggtggggtaccagccatcaacgatcgctctagcagcaatcctcatcgctcggaacaaggagacggcgcctaatctagacgagctcaagtcggtcgtgggctcgttatggcagcaactagacaccgtaagcactcccaactttctcttttgcgagatctcatcccattaggtttaagttcttggtagaaatgacaatgtcgagagtaaattctgcaacgctgttgttctcttgcaggggcatgtgtattcctgctacaacaagatgatgattcaagaggacaggtcgatgcaatcgacgacggaggtagcttcctcgggtgtctctgttgcccacattgggggatcggaggacagcgccatgggaggggccaataatgccaccaccttggaggcaaccccggacaagaagaggaaaaggttgcactcgcctcagcgccagtagagggaggagctggaggctggagctggacagcatgttggttggagtccagctctgcaatttttagttgatcattttcaccctttttcttttgtttcagctgagccctagtcagtgctcttgcaagttcagggggggttggccaaatggaggggccaacatttgattcttcttctgattatgcaattgttacagttgattgattagttagcaatggaaagattctggttttgtggagatctttccctggcccagaaaggtactagtgtaaagagcagaggaaaaggcctgaaaactgataaagagctcttgctcaaagtagggaggaagtcctcactgagatgtggagacagagagagggaatcccaattcccaagtattgagtagaagtcattttttgtggatactgtatggttatctgttactctctgttgagtcatgccattttggttcattagcaatttcctgatgctaaagccaaacagtggtagtacatttttgttgcaagaactgattgatagtagttggatagccagggggcaggggccatctctctcactgtacttcactctactctctcgtgtctcgtgtgcaattgctgaccatgagtggttgggaattgtttattgatatctgtgggacgaaaggaagaaatgcgtttgctcggtgcctttctgatgttgcctttgtgccgtgtcatcaaatcaccctgccttgctatttctcagcaatggctttgctgttctttgccttcttggaggtgactgccactgttggtttgtctctctcgcatgaaagcagctgtaacgctgccttctttagctctctctgaattgtgcatcatgcaatgcaaatcactactccagtagtagtacactccactaggacacgtggaacaggccaaaagaaagactcttcttcactcttcagcttcctctcaccagctgccgaggttctgatgaattgctcatcttggggagcatgtgagtggatctgcttctttcccctttccctccaattttttaactgcctccaagaagacagtgcgtgtagtgtagcactgtgaaaacctctgatgaaagtggagtacaagagctgctgtgttttgtgtggtctggatctttgaagtttttgaccaagggggtgtttgggaactagggactaaatttagtccctctcaaaaaaacataagtccctcaaacataagtccctaccacagggagggacttatgtttttttagagggactaaagtttagccccaatttagtccctccaactaaacaccacgcaaagaaacaactccccatgaatgatctgaatctgattcagatggctgtggatgaccaacccttgcactggattcctctagcccctggtgactcgtcgtgggcggtagcaactggcattgcggtcaaaacccaaaagcgctgcacaagcatgacatgagaaagagagagacatggtaaaattttttttttcatgtactgatctgttgtgttgggctgtcttgtgcctggcagcaaggtaaaaaaatgggttcaccgcggttcacaggggcatggctactggtggccgacgctgttggaattttatagtgggcagtaacatgcccagtcactggcttgactggtcagcagcattttgtattggcactggtgaagtggtgcagtagtgatggaagcacaagctgcctgttgattgtgtgtgtcaattgcatgcgatgtgtgaagagagaaaagcctgggatgccaaaaggaaggtaactgacagcctgccaggcccatgcaaccagtacatattatctgctgatgctggcatttggattgcaactgagattcgtggtcaaagttaaatgtgacgttatatcttggatcttggaaggtagcggaggcatttcacaaatcctactacagctaaccatgctgaaaattg

SEQ ID NO: 8090 - DNA, 12961 bp, Oryza sativa
agccccccaccgccgccgttgccgagcccaccgccgccgtcgccgagcccgccgccgtctcccgaggaagagcgcgcgagcaaagcggcggtttcacgccgtcgctcgtcccaggtgggacgagttcgtccgccagttttggccggaccgattggtcccggatctgagaggaatattcctctgtagggaccaacccatcccactcacccctgaaccaaacacccctaaaaatgggttcatcccatcccatcccatcccatcccagcaaccaaacactaccctagggaagcgaggatggaggggatcggggaagccatgtgggacggagcgatgcgcgtgcgaggtgtggatggttggatcaaaccaacgcgcggacatcggacggtgcatgcatggcaagggactgtagtactgtagcacattttcctagactgtggttcatcgaatcactgctggtagtggggtcaaaaaaactaaggatttaatatgatagggggaaacatttttaaactcttaaatgagatatcctcttgttcgctcaaataccatctaaatagttatatcaataattttgacaacattcttacttcaaactactctaaacttaactcacacatcaagaaataaaaaagacaaacccaatgtacgagaaacacccaaggatcttctggctagctccaaagttgatggactagacgacttagattcgaagcctcaccatttctaattatttggtattagattattccctaatattcacgtctatttttttcaaagtcaatgtataaatagatattgcattactatttgtatctgattttttttcttctcaaagtgtagatcgagagggattagaatccattcctaataatatgtataaatcgtgacatccattttaagagatattttgcagacagagaactccaaactctggaaaactagaacttccgaacatcagaacctcaaattacaacttcaaactgcaagaacttttgagtgagttttttaaatctaacagagagctaaatatttttgaaaaatcggacattccgatgctcttagaacttccgatctaagttggttagtttatggtagatttgaaagtgaattttgagtgaattgtaaataccggttaatatttagcagagtgaattgcagtttgagccaccttttctactctataattcaccaactcactgttacacctacattacccattcatcaaatccaacgctctgtatttatcgaatccaacggctccgatcgccccacgcacactcacgcagacgccggcgatgccccagtggccccaccctgcgcagatcgttgccgcgccgccctccgccgtcatcgcctccctcacgcaccgcaccttcgtcgtcgtcgcatcgctcccgcgccgcccctctgtgattcctcccctccgcgcggccctctcccgctctccgcgtcacccctctccgctcgagcccatcccgccgccagttcatcgtcgcacgccgcatcactcggatcaatgtcgccgtcgcacgccttcatctgcacatcgcccagatcggcactcgccctcaccgcatacgctcgtcctcggacagatgggcaccaccgccgtcgccgtcgcgctcattcctccccgtccaacccgcgggcctcgccacagccaaccctgcccacgaggtaaaacagcaatgcttacccttggtactttctttgatcagttttgcattccatcaatattcctgtatcatatagtctttattgtacctagaatcagcaatgcttacccttgccactttctttgtccaatgtaatctcctttggcaagtttttgatgtaaggtattgtcctgcattttgtttcattttttcagttctctgacaggctatgttgggtttggttttgaaactctatacagtcactcgctttaactaaatagagaaattactgatgcctaaatcaattgagagtttctggagttgttaaggagtacatccaggagaagaaattggagatcagtgattcttaattatgcaattcaattccattgattaatgaaaagactaaagtgaaacactccatctaagcacaggttgatgggtgcaaatgcacttaactgttagtaattgtaggacattatctcattccttttttgagacattgcacaaatctgaaaaactgtaactatgggcctgtttggtacagctcaaactcctaaatataactccaggagctgagtctggagtggagttgtggagctgcctaaacctagctccacaactctagtacattttgtgagagagctccacctaactccactcctagttctggtggagctgaaactgtttggctgagctccagctccaggaggggtggagctggagctggagctgtgccaaacaggccctatatcttggtgttaaacttgttaatatcatctgggactttgaaatgtgtgggatatgctagagcatcatactttgtttctaagggaacaataatgagtgaactgaaacaatgagtgaaggatgcctcaagcattcaaagtcccagacggtgcaaagaaagtgctggtatactctctaatcttctcttgtaaatttcactcttgctttctctgtgcactgagcatccctcttgaatttcatttttttctgaggttcccaataattttgttgatttgcctgtttcattatcagattgaaaactaacaaaccgatactagattgtgatgattgttggacggtagactgttatgagcactacaaactgatatgattgttgcaactgccgttgagaggggctgattcaagagataatttgagctctgatgaaacagcttggaagctggaatatgcacatgaatattggatcatgttaaccaggaggtatatagtgacgttataattttcatcattgtaggtgacatatctatgtttagctataagatttcttagttaaaggtcatcaaaataaatggtgcagatcctgccactaaacaatggttagaggttgctggtgaacttgcatgccattcttcagtgatgcggttgaagttacttggtgagttaaattctgaaccattcttatggttgacaaccatgcacatttaagaattcactaggtgcatgtgataatcctttgtgtcatctaggggggggggggggtactatttccctgtattaaatatgtaacataaggacttaatattcatctctttgtttgccttgtgccttaatccgattcatcataattgtattttgttttgataggggaaagtatttcttccactgttttgcacatatataccacatattgcaggtccttctgttttggaatcagggaagtaggagggtggagcaaatcttttttgaagcaatgttgtatcaacacctcgttattttgtttgctttatgctcatatgagatttcttaagccaatcggcatgctccttccgaacatactttgaatatgacattgttcaactgtttcacaaattgatggaaatgaactaaattgttttctaattcttaaattttacagtaagctgttacctattgacaatattcccctatgcttttaggaatatgagcaattggttagcggttaagaactacttattcatagtcagaagataatgtcctacataagatgatcagaagatgtgccttttttgaagtgtaagagaatgttctgctctgcattccctttcactctttatagcttctgttttgttaaatactaacattcaattttactttaaatttgagtccctggtttagctacaaccatatattgtaagaccatactgccaaggttagcaattgcttgtatttttcttctgcaaataacttgaaatatcagcaagtaattgacccattacatacccaaacctgatgatagttccagatgaagtagtaatagctataccaaataaattattattgtttattctatttatgtcatggcttctgtattctgtccatgtacttttgtattttgtaaaacatgcagccaatcactcatgataatttgatgtaggcaataatttcatcttgccattcatataattctgcccgacgagagtgtctgtagctccccccctccctttctttttgcttcttttgcagaggctattgtggtagtaattatgttaattgcttgattgagtaaagatgacacttttcatggtttcttattcagcacagttagtcgtacactcttattggcttaagagggaatggcaatggacagaaatttcaggaaggagtccagctagagtataggaaagatgtggaggaagcaacaaaacaaattgtctagctgaaagaatcaacattaagtatgcctgtgtagattacaagcctgtggtccttattgaccattgcatacagttgaattaacggactgcattatatgctgcgtctggtaactatattgatgacagacaattattgcgattatatcgacatatataattctgtctttatctgtcattccttttttacgtgaattttaaatctaccttattctatatttgattgccaaaacgtacattatattttgcattggttgtttaatttgcattgcaaaaatattgccataacattagcacatgtatatttgccattgaaagaagatgtccgcatgcatcgagagtatggagagtatgagtaatggataggatttgaagcaaaactgactggtgcttggatctcccaaatctgaaaacttaattatccacttttgcttgtaaatatatatcctatcttatattgattggattgtccagatatctagcccaatctgctaggttgatacctatccacaatattagattatgaaaaatatatgtcacaatgttgttttaaagttgtatttgaatttattataagtaaattattggagtctttggaacgaaggtcaacaaattgggtgtaaggccaacatataaatatccctgataaatctgtgcctgaataaagttgagtgagttatgaataaggtcttcgagttgtttgactccaaactttatacaatttaataaatttatgagtatatgaaattatttttaagccaaatatacacaaatcatttatcgtgctcacaaatacatgcatatctttgtttggatattcggtttttaaaatattttaaatttatattgtaaaaatatatatcttgttttggttgtttgatttgcattaataacgaaatttagccgttgcgttagcacggacatattactagtattgataaagttttacttgaactattatttgcccaacctttacacttttcattagctaattttgtctttattataatttggatcaccccataccacttcttcagcacatcaattatctcgagcacaacaactccggtgcgcccgcgaactccacctatgtgtaggcagcatgctatacctttgcctgaagagagactagacatggttagaggagaaagttaggttggtttaaagtgtaataaacgtgaagttaactagtccaaagtaaaatatatatatatatatatatatatatatatatatatatatatatatatatatatatatatatatatatatatatatatataaagtgtaatctaaaatgaaactttaacaataaaagatgatgagaaactgcaattcactctgtcaggcgctcttattacgccctatcttaactgcaaaccatgcatgcatgtgcgaattgcaatcgatttgccggcttaatttgagatccccaagatcatccttcttctcggcaggtggtgtataagctgtgtgtttgtcacggccacatgggaactcacaatatagtatccatggcggctcttgccattggcctcctaagcagtttgttctgctcgagtaacttgcccacaggatagtttaatcagcttgccatgtactatctgaattcctgctagtacagtagcttgggcctaaagttcatcttttttggggcctctttttcgaatttctttccccttttttttcctccgtagggcagccggcaacatggatgcaggatgcagaattaaaacatttaaactgtactcctcacttgaaggaccacaaattgcttttgctaattgcaatgtatcactcttcactttgtgagtgggaatggcactttcagaaagacagagaaaaagattggtttgcagaaacataaatcagagtttcagacttcagcaggttaattcagaaaataaaaaggattagtcttgactgctggataattttcagtttaacattttagcatcagaagtcgaaaattcgtgtgagctacttactataatgcagggacttcgttgaaagctgaagctagcaatggtagctagcttctaagctagttaattagccaaaactagtttaattagcagagtgaaatctgacgggtaggtttgtttagtgttttgccgggtagaaaggcttcaggttgggttaaattaggctgtttgttgggggattaacacttaacagccgcaactttagaccttagacacgccacccggcgaattatcagcgctaatgacatgccattagcgtttgcagagcgtggttaagtgcatgcatggacacaattatccagcgaaagcaactgatgccaaatctttgtcgacgcacgcctagccctagttcatgccactgataatcaaccttctgtcaattaagttacacaatattgtataagaaccagacaagcagaggaagcaggcagtactgattactgaatcctgaactgatgacagagtgacttgtctgattcagagagattctgctgttaattaggatctctgacactgttgccatctgctgaaacattcccaaaaattttagctacctcgtactgaatgaactggagtatgtgtttctgtaattctgtctttacatgcaggttataagtacagtttcaggttaacttcgagcatcagtaacgggaagagaagagagaagcaaatttgttcaggctgctgaacatatataaaaggacactctagctctgcactttcatgaaaagaagttaagaacatcatatatataatcctttgcctaattgactaattatatatcagcataacacctgtcccactacttgtacaaaaccctactcttctcttctacctcttgcacaagcacaagaacacaagaactcggaaatggagctgaacaccagaagcttgcagcaatctggtagcagcaagagcaagggcaagatcatggcgaagatcgtcgaggaggatgaagagggggaggaggaggaggaagaagaagaagatagccttagctcaggttgtcactgcttcttgtgcgccatcaaggagcctgatgctcgcctccgccgcgccagcctcgccgcgttcttccgggagttgccgtactgtgaggatgacgatgccggcgccggcgccggcgccggcgttgatggcggacggtcatgtggtgaggtggtcggcgcggtgtggagggcggccatggcggcgcccgacgacccggagctcccgtcgctcggcgcgatccggtgcatgtcgctgctcctcgctcgcgcgctcgccgacgtggagtggcgccgccgtggccggaacgtgtacgtgccgtactacgccgcacacgtcattggctcgtacaccatccgctcctccgcgcacgccgagctggccgtcgcggccggcgccgtgcggccgctgcttgccttcctcggcggcgccatgacgtgggtcgagcagcgcgcggcggcgcgtgccctgggccacctcgccagctacgacgccacgttcccggccgtggcacggcacgccgccgaggcggtgccgctcgccgtgcgcgccgcgtccacctgcgtcggcaacgtctacgcgagcttcgtcgcgctggcgccgagcaagcggccgaagtaccagcgcgatctcttgacgcgcgggctcgacggcggcggcggcggcgtggtcgccgacggcgaggaacggaaggcggaggagtgggcgagccagctccagtgctggtcactctacttcctgagctgcctcgcctccagggacgtgtcatctcatgccacgatatgccatgaccccgtcttcttgcgcgagctctgccagatgtggggtggcctcgccaacggcgactcgccggccggcgtcgggctgctccgccttctctgcaggagcacagccggacgcgccgccatcgccgcatgccgcgacgcgctctccggcctctgcgacctcgcgcggtcgtccgacgactggcagtacatggccatcgactgcttgctcctcctcctcgacgaccgtgagacatggcacgcagtcgccgacgccacggcggcgcgcctcgtcgacctggccgagctccggcacctcggcccaaggcgacggctcggcaatgcaataacagctgcactgcttcttgacgacggcgacgacgacggcgacattgtccatggccgtgagctcggcatggaagcaaaggaggcgatcgccagattgagagaagtgcaggtagagaggaaagggagagaagacgccatgtctagggatgagctgctcaagagaaggatcatggcgaaggagaagaagaggcaaggcaacgacatgttctggcacggcgaggtggagaaggcgatcgagctgtacaccgaggcgctggagctgtgcccgctgagcaggcggcgtgagcggctggtgctgcacagcaaccgcgcccagtgccggctcgcgcggcgcgacgccgacgcggcggtgggcgacgcgacgcgcgcgctgtcgctcgcgcggcccgcggcgaacgcgcacgccaggagcctgtggcgccgcgcgcaggcgtacgacatgaagggcatggccagggagagcctcctggactgcctggccttcgccggcgcgtggctcaaccggaaggacgggacggcggcggccgcggcggcggcgtcgcgcggcgggaacccgaagctgccgtactgcgtcgcgcggatgatcagtaagcagatgggcttgacaggtctcttctccgccgtggcgacgaacagtagcaccaccaaggtagatagagatgatcgcatgccgcattacagcgacggcgacggcgacggcggcgacagcgacgacgaggaagacgacgacgacgacgatcgtgatgaaagcgaggaggaggaatttgctgagaaaggaatgaagctttgtaggccaggtagtagtaattaattaacctctcgagcttaatttacctatgcaactactgcatatacatgtgttatgcatggttaatcttgattctgatccaaattggttaattatcaccgatgatcaaagtggctaatcttgtttgaccaggtaagggtttaccaatcatcacggacgaggcttggaggagattagctcggaggaagaaggcaacgagccgagtgttgtctcatgatcatcgattctagcttgatccattgaagaaagacaagtagacagagacagatagctacagttcattgatcattggtcgggatgaatgatcatgattcagcaattcgatcagggcttaatcgcagacttgttgtcattagctagagctgatgtgatgggggtagtggtttaatttgatgttgacgctggcttagctatactttctagctagccttgcatttgtagtttcactcacgtgatcaaatgatgttcccattgataatacttccgtatctgtgctagatctctgttatttcttgcaagttagaagttgtcaatgtgagaatggccgatcgccctatcgaattggtgaaagcagctaagctacttgattcatagaaatatcctattattaggtttttcataacttgaggaaatgtttcagttgagaatttctgaagaaattattagcttcctgccaaattaattaatctgatccatgtcagcattaataaaacaataattaattataggaaaaacatcggtagcgtggttatatgatttcactcatcaaatttaagcatagtgttaatgaatattacgcacacgttaatgcgctagctctcaatagaacttttgtgagcctaaggatttaccaatgatcttttttttagtgtgtgttagtggctaaggatttgccaattatctttgcatttttagcgtgtttggagggtgtactcgtagacagcattgtatgtacgcatccgtcttttatgtaatcggaaaaaaaaacaacaactcattgaaatactagggtatcatttttgtcctcttcacccgtttgaacttttacttaaacacctaaaagagaccaaacacacctaaaagagaccaaaccttaattccaataaattatatcttctagcaagacattcaccgaggattaatcttaaccagagaacctgcttaaaattggcaaatgaaacaaccactaacacattgaactgttgaactctaacaaagttcaacagtttgttaaaagcacatctacatatgtgtaatatttatgagtaagatttaaatcttagtggctggagccatattccatccttagatgcctcctccatcatactacctccgtcccaaaataattgtatttctaggattcaaaattcgtcccaaaataattgtaattctagagtactaattgccccatcaatcatctctcatttaaatttctccctattttaccctcaaccatcttcctactctcacataaacaccatttaatgaggggcacaatagtctttcttctcaaatcttaatatatgctaaacaacatagaattacaattattttgggacggaggtagtaaaacatttcttttgcgatcacatggcagatgtgcacgtatacgtactactatacatgcaacaccacactcacacacccacgaatatgcaccctaacaaatactcaaagagacgaaaatcaacggacattcctaatctcaataaattcctgttgaaagcacaattacacatgcgcaatatttgtgggcacttcattagtaaagtacttcactcatgagtcatggctccaccaccacatcactggtgctactccattataataataatagttgccctataataacttaaaatatatatctgcactagtaattactcactccctcccggtattcaaaatttatccaaaaagcttgttagtttagagtatattttgtcacatcaatcaccaccaatttataattttctctattctactctcaactatcaactatatacacaccatttgatggaggatattatagtctttttttctaaactttaatttttgctaaataacctagaacgataactatattggaacggagggagtaagcattaaggtctattctgactctgatttatttttcacattcctacgaaatttgaactcctatctgaaaatccagtgaagttccagacgtgggcatgaacagaaggatcggatgggatgagatgaacagtacatcatgattagaggattgagggagtggcgcgacgtacagaaggcgacaaggacgcatgattagccaagtgccgagcatgtcctgacccaataatcgactgaagaatgtggcggccgtacaggcaaattgagcgtatcgccaaatataaatcccgtgcaaaagctgagccgtgatgatttgattcgatcggcaggtggttactgggtactaagccaggactaaaagcggttagtgcatactaagacggtactactaaaagtaattatttttgtactaaaaagtgctttaagcgcgcacatgacgagcaaatgctagtggcccgtggccgctttccggatatagcaacctgggagcccaacttttcagtacagaatttacatttcttagcttagcctcctgtagaacagtagaagcatgcgaatagattatagtgaaaaattctggaaataattgggcggtatcacctttttatcattggttcttttgtaaaattgtatttgcagctttgatactaataattcatcaatacatcaacgtaagtcattgatcctccaataacataagcgccggcacctggcaacagtgatgacagcaacaggcataggaaaaaataaaatatctgtaaagtcatgtacataaccacaagacgcatgtgcgcagtgatcttgaaacttcactgtaacaacgatctactgttatctgaaaccttatcgatcagaacaatctaaaggatgaaaggaaagtgaagaaataaacaggcctaaatattaaatgcaacacagatgattaatctcaacatagatccacccacttccatttaacgatttcattttgcctcagcgcaccacatagttcctcaatcgtttctaatgcatactacacagagatattccctctgttctcaacaggggctccacgaactaaagtagttaaagttatcaatgatggacaggtcagatctcatcgtcttcggtggcttcatcatcaacagcagagctgttcccgttagcaggctccaattgcttgccattggaccctggggacttgccgttggacttattctttgttgttggttttttgcccttctcggcttgctgcagctcgaggcccttagccgacagcctccgcctcctctttgagttcacggcttcagctggttcttcagcagtagaattatccactgccagagaaataaaactaagaatgatgcccatgtttcagagaaaatagcagtataattgacggtggaattatcttgaatgaatacttgaaacaagatcctctttctgcctagaaatacattgtcatttattgccaatactttcaagttattctagtttgcaactttgcatatgatgacctgtagttttctttgaataacatggtttcccaactgtgcatttatattatacatatatatgaaatgagtaaactgctacaattttgttcaattaaactaaggaccaggttcaatttatatctcaccataatgactgcactacagtgttcccttgtgtgaagaaa

SEQ ID NO: 8091 - DNA, 22937 bp, Oryza sativa
acggcgccatctattaaaaaacggaggtagtagtatttatagcaaatccaaagaaaaagggcaaagacgaactcacctacagaacagtgtatgcaactaagcatggcgtgtgagttgtgacagtgactgacaggaacagcttaatggtaatgtgcctttgactaatcaggtacgacctgaataaacaaagtcaaccatattcactgtgtgacgcgccgatttataggtgcattatgaaagctgaccatatgttatatatagtaggaaaaagatgaataccatatcttcactaaaatatgctatgtagcttccagcttcttttagcaaggaagatggggtgttggggatttgattggttagtcaaagtcattttcatagccttaagtcgtatgcttattcacaattttttttctggatttatatataaagtttggacttcaaattttatccgatactttatgcatactgtatcaatgttgtcaaatgttggacaacattgctgacatactgtttgataagtggagatgtccatagtataatgtcgtgaaacatgtaacttctcctttaccttgatgacggcaaaaaaaaaaaagtggagatgtccaactgagcaagggcctaagtgccgaactgacacaaatcagaggatgtgttcaacagtgatcagaactttagaagagggttgtatgatgtcaaaatgacaaacttaccgtctaaacaatcaaaagatgggacaaagcttggctgttggctctaccctggacagttggctgaactgtttactgttctccattgtatgttaatggtctggctatgaattctaaactaattcatcagaagacatgaaacattttcaggccattttctattctttttgcgattgagttagcttcagtagtccacattttttactcagtaaaatcagcagtcaatactaagggtggtagtgcactacagcactagaactacagaaagtaaaatgaagtagatacggctgtgtactgagaacagaagggaaatacataccggccagtttcttctaaagacagtgccagaacacatttttctgaagacagcaccagaacatattccggatccctaaggaacaacaaccttgtcaactgcttttgcccacttcggtacacaaagcacaacctaacactgagtcttagacttgttcttgttgattacatcgcttctgctatggaaaaggacaaaaaaaacagtagggagagataaaaataagacatgaagaaaatggccctgtgctgcttgtttgttggatggtttggaaggaaagaaatgtgcttgtgtttcagaaccagcggcgctcagccggtttcctgtttggttcaatcaaagaggaagtggcgatttggaaggaagccggggttttcagaaatataggagagtagtctctcagtgtaatcttttcttttgggaggttgctcctgtgacaacttccattacttcgacaacttcttgttgaagttaaaactttgtatatttgtacatattcttcaatcttaagtaaatttagttggcctatcttggtcggcccggcaaaaaatagggcatgaagatcaatatgttgagcatatggtactgaacaaaaaagtcctaagcccctacctcaaggaatcttctgaaacactgaaatcgaacttctcttgaacttggctgccggatgcttctgttcactcttcaagtccagtcattctggaaaaaaaataaaaggattgatcaatgaattattcaaagtgtgctatattacatatgggtgtgaacatgggatctatctattacttgactctaaagaagatatatgagcaaactgggttcccattatgactgctgacttaacctggacttttcaagtgaagcttctccatcttttactagatttaatctatcaagaataaataaaataggtcctagaatcaatttaacataagaatacatgaattagaacttctcaaagtgcgagaaacggatccttggagtttctttactatccttaggagttaggaggcattcaaaggtaatgtgtattttagtgttaatcatgaggtataaaaaattaactctagggtgaatctctacctcttgataactcccaaggaccattgaagaaatcattatgcgaacgttaaggttagatcagaaaatgatcctaactgttgtgaaactagagagccctactgctttatgaacaactttttgaatccttgcataatgataaagctacctttgttcatacatgtgatcttcatagcgttaagcaattatcatggatgatgaagcaaaaatatgtactacatgaaactacattttggactcgcaaacattgtattatagcattattagttaaaaagcaccggtgctcactgctgattttgattttgagacatgttgttgccagtactcgcacaaagaagctggttaattatgcaaggcaagcagtactccatgtccatggcatgttaagtacgatttggcactagataattgagaaaatctaaggaaagataccagcataggcactagctcttgctgataatctcttgtcaccaagttaatcagctaagcaccaacaaaaaccaaaagaaaatgtctcatctataattactgcagtatgaactctctaaacatggaattcttaagatacagtgtgtgaactgagaagcacagatatctccaagcaacaaagcaacatgttcaaatccaagctcatgttctggcactatagtagaatggaaagtacttgcaaattactgaggtcaaagagcccattttgggtgcaactttgaattgaccacctccaactataataactctatgtgaataatgtgactagttttttttccgtcctcatctccaccggaacagctaaaatccgttttaaaggtacagaaaacatagaacgtgatacctaaaaaatactgtagatgacgagcggcatcaccatgactacccctgcaacgaaatgcagccatctaagaaggggaagagggaggatttaccgtcggtgacgcctgcgccccgggaggtagataagatgccgaagccctagcggctgcagacgcggatcgtacggcagcggaggtcggtgccttcgcccatggagtgcaggagacggggggttagggttcggaggggatttgagttgaaggagaagttcgtctggagccattggaggaaggatccgagctcgccggcgccggagatgacggcggcagccacggtgttcgacgaaatgcgcggctgatgttgagggagcttgagatttttgcaataagacccctgatcgtcgatcaggaccgctaccaatggtaataacggtcgttgcttttcagatcgacgttttaagaactatttttttccaaaaaaactttagggattagggttagtaaaaactgttgaattttgagtttctgacagaagacgaaatgggattggatctataaactagaataatcatcgtaatattctttgtgcaatttataaaattcggttcaaaataaaaatgacgataattatatatggcattaagtgaaaagatgagtctagctctagtttaatatgaaactttgataaatacagacggtccaaagtgaagtttctcatgattttattacttgtagcattagaggaagtttaatagtatagccaactactagctccaaatcatctatagccaatgtaattatacaatagttgcttactatactattaatacctgatcccatctgtcatacacacattacgttttggagtccgtactgcaactggctacagatttatagcccgctgcttctctctctatttatctctttaaaatatgtttatagctggcttatattgtacatgctcttacttgctcccttggtgctgtatatgtggatacttttgtcatgaaactgcatcagctcacactatatgagcttctctttatcaacttctgtattatgattgggtacaaaataatttgcctgtctccatacttgttgaattgcacaaaatatgaatagctaaaacattttcaatgtgaatgatctatcaggctctacattttgtgagccaacaggtgactgaaatgctacaattcattaccatgattgccaataaatgcttgatttttttttaatttgatagcctttactctccttatgatcaattttttacatttcgggttactctaactgttaacccataccttaatttgcctaataaattaagtattgtacatggcttcgttttccttctcaagttgttgttttgctacaatttggattgtaaattaagctgaaattatgagaacctaatctacaaagtttgcaagtacccaggtaattaaacgaacagttcaccaagctgtagttcagataatatgcagttcgaataatatgcattgaaataaagtatcagtttcttgttaaaggtataaaatgttgagaatataggcatataatgatttaatatattccataaataaatcatgacattacagatgtatactagcattaacgcatcattatatctacacatgtaaactaagcagtaaaacatgaacatatcaaatatgcgcaacatgtcgaacacgtaccgaggtggcggaaagaccggttgctcggcaggaactactcgcggttgcgagcgtcgacgaatgcgcgcagcatgcgagcggagaggaaggcgagccgtcgcggacgaacagggagcagtcgcgcgaagcgcttcccaaaaaccttattgccgccttctctcggtgcaggatgtcgaaggcagaggttccggagacctgctctcccgatcgctggtgcacgctggcgagcgggatggagtagtctacgagcgacggcgcaacacagaggaggaggcaaaccctagattgatttcgcgtgtgttgcgtgaaggcggcggcacggtttaaatagagataggtcgcttgatcagggcgcccgcatgatctccactctgcgtaaccgagccggataagtcgcgcgtaacttatccggactccacgggcgcccgcacgatctccactctgcgtaaccgagccggataagtcgcgcgtaacttatccggactccacgggcgcccgcacgatctccactctgcgtaaccgagccagataagtcgcgcgtaacttatccggactccacgccgttttcacgcaccggatttttcgaaatgtttccaacaacaaaacaaatccgaattttcctgcagcaaaacaaaactgcaaaaggagactgcatatgcgcaagggtgaggagccaattttgcgggcggaccattcaacgcgtacgtcgtgcacgcgcgccgcctgccctgccagaccaggccagtgagcgcgcgcgtgtggtccccctcttctctccaccacacatgcttcaagtggctaggagggcatccttccttttaaggaggtcccctctcctagaataagcaaggtgctactaaactccatatgcatgccatctcatgaggtgggcttttgtgattttccaaagaattaatcttcgaatgggccttagcccatctattaattccaacataaaatatacggaagaatctcctctgacataaagttagatggacatgtaaagttaaaaagatttgggtccggggcccaaacatttgttaagaaaaaattgtgagtgttagggattgaatattggaccatcaagtgcactttgaaaccatacaccatttgccactgcactatcaagtgcatctccacatatcattatattacaaagcaaaccatttatcttttgtagttccattttttttgtgaagtatattattgtcgatggaattttaggtgcataactcatgtttccctgtgtgcatgcataggtgatttacagtttttgcttacattcttacgtaactatttacatggaattgcctgttcgggcccatggtagaaaaaacacagtaatgcatgtaatgcatatgctaagcttaggattgcgaaatgcatgagcaacacaagaatttggccttggattggatgaaaacccagaaatgttttaaatgttatatttgtatgacacagaaagattgacattaccctgaatcctggatctttggaacgaaatttcctacaaaaatatataaattcatagcaatttttcaaaggaatgggtaaggtgaatccaacagtccagttcctctgcaattccccggttcttcttttggttcattagaaaaatgttggaatttcacatgagtaataaaatcctccaatacagtacagataggaacttttttttaaaaaaagaaggaaattccaaggtaagaacaggcctgacttgagtactcagttttccacgctagtaaacagtaaactgtaaactatagttttccacccagatagtagctactaagagaaggaaaaccaaaaccaaccaccgcatgcactataatatgatgttgacccactgatggtgatgctcgtttacctgctaatttgtttcttttaagttagtgattgtcattctataacactcatctctattatactatctgctaatctgctatatccaaagtctccgttgtcctcaagtccacctcggcgggcttcatgcaagctgcaagcattggcatctaaatttcacccaaaaaaagaaaaaaaaggaaaaaaagcagagaagttagcctggcaagtgacaagctggaaaaagagcaatcaatttcagttgaattccgttaccgaagtgtttaaacttgctgaaagtttagcttgcatggtcagtagttggtcgctggactggagcaactagaccaaaataagctaagccatggcggagctggtgccgcaggtcgtcggcgccgtgagccgcagcatcgccggccgcctgctcgccgacatcgacctcgccagcagcgtcggcacgaacgtcgaggacgtcaccgacgcgctcacacggctgacgtcgatacgggccgacctcgaggcctccatggggaggctgccgcagcggcggcggccggaggaggtcacggactggctgtcgcgggtggacggcgccgagaagcgggtggccaagctccggcgagagtaccagcgccggtgttgctcctgcggcggcggcggcgccttctcgctcaacctgttcgcgagctacgccattagccggcgcgcgtgccacgagcgccaccgtctcgccgcgctgctcggggagtgcgacagggtgaggagcctcgccgccggggcgccccggccgtcgtccggcgccatggtcgtgccgtccacggtggtcggcatggagggctacctcgaggaggccctggcgtgcctcgacgaccgcgacgccggtgtcgtggccatctgcggcatggccggcgtcggcaagagcacgctgctgcgacgcatcaacaacgtgttcgtccaggaccccgacaggaggcacgagttcgactacgtcatatggctcgacgcgccgggcgactgcgccgccgtgggcaagatgcaggacgccatggctcaccggctcggcctgtgcgcgctcccggacggcggcgcgccggaccaccgtgcgcgtccgatctttgaagtcctcagggactcgagcttcttgctgctgctcgacggcgtaaccaagcctgtcgacttggtggacatcggcgtcccgcacctcgtgcacgacgatcgccggaggcagaaggtcgccatgaccacccgaacaaggggagtctgcggcaggatgagctcgtcgcgaaggattgacatgcaatgcttggacagtgaccattcatggcgtctgttcagagagatcgcccgcgacgagacgatcaacgctgacccgaggataccggacttggcgaaggaggtcgccgggaggtgcggcggcttgccgcttgtgctcaccgccatcggcggcgccatgaggtgcaggaggcagccagaggagtgggtgagcacggtgaccgcgctcaggaacttggagctcgccaagatccccgggatggacgccggcgagaagccaggcgccatgctgcgatcgctgcaagagagctacggcgacctgcgccatcccgtgctccagaagtgcttcctcgccacgtccctgtggcccgagggccacgccattgacaagggcgagctcgtcgagtgctggatcggcctcgggctggtgggcgagtcgctgccgatggacgaggccgtgcgcacggggctcgccgtcctcaacgagctcgaggaggccaacctgctgctgcccggcgacgccacgggcgaggtgaagctgcacggcgtcgtgaggggcgcggcgctgtggatcgcccgtgacctcggcaaggcgccgaacaggtgggtggtgtgcaccggcggcgtctccctccggtcgaggcagaagctagtggagttcttcgagcgcgcgcgcgacgcggagcgggtgtccgccatgcgcagctcggtcgagcggctgcgggcaatgccgccgccgtcgtccccgtgccggagcctctccgtcctcatgctgcagcacaacgcggcgctgcgtgacatccccggcggcttcctgctcggcgtgccggcgctcgcgtacctggacgcctccttcaccggcgtccgcgaggtcgccccggagatcggcacgctcgcgtcgctgcgttacctgaacctgtcgtcgacgccgctggagtccgtgccgccggagctggggaggctgcggcagctcaggcacctgctgctgcggcacacggcgcgcctctcggcgttccccgccggcgtgctgcgtgggctgccgagcctggacgtcctcgacgtgtgcccgagcaggtacaccgagtggtgcggcgcgggaggaggaggaggaggagcgagcctggacgagctgaggtcgagctcggcgttcgtccggtccctcgggatctccgtcgcgacgctcgccggcctacgcgcgctgcgcggcctcgacaacgtgcgcacacggcggctgaccgtgacgcgggtggcggcgaccgcgccgtctgtcgcgctgcgcccctccatgctgggcctgctcgaggccctgcacgagctcaccgtcgccaagtgctccggcctgcaggagctggaggttgtcgccggcgaggaggacaacgcatggtggcgccttccggagctcaggaagctcgagatcgatgagctgcacgagctggcggccgtgcggtggacgcggacggacgtcggggcgttcttgccggcgctccggtgggtgaagatctcacactgcaacaggctaaggaacgtgagctgggcggtgcagctgccatgcctggagcagctggagcttcgccattgctcggagatggttcacgtcgtagacattgacggcgacgacgaggagcagcgacgagagcacccggagacgcgcacgttccgctgcctcaggaggctgctgctggtggagcttccgtcgatgggcagcattggtggtggtgcagcgttgagcttcccttggttggagaccctggagatcgccggctgcgacagcctcggagagctacctgttgagctgcaaaaaaagttgaaggagatttgagattatgttagccaagctgtgaatctgaacattgttcctagcatcttaaagcttaagaaagaaagattcactcaagaagattagtctttcatataacacgcgaacagtgcagaagtttcaaacatcgcaatacatttagctaccccttatagctcctttaattaatagcctaacaaacgtaatgccagaggcatcaaaattctaattctagagccggatagcccgggctagcttctgattgtgtggcaattgttctagcatcttacacatttcacttcagaacctattctcatggaaccagctatgaatgaggggttcagaagatatatttcacaaaggaaattccaccactcttccaactttccaaagcgggccctacacggtgttgcatatgtcaacaggccatggtgaggatcaagatcttgaggtgcatcatgcaggcagcacactgcatttccgatgacatcctgatgcagcacacttctgtacagtcaatgcgataagctgctccagtctgatcattcttcatgcctcagatgcctgttcaacaccagttatatgagctatgcaggcaaaaatggtagaacctcgcaagctgctgtggtgaggcttctatggaaatcatgagcccatcaaaaggtcaccaaattttcttgaatacacacatgactgcaaggtagagtaaaccgtaaggtataatagcaaatgaaaaactgtagaaggctgtaacagaaaactgagaaaatcggctagtcgagagactccaggattgttagtgccaataaaaagttacaacggtgtgtacactaaaaaaacaaaatgttagacctaacatgccagtataggacagttgcaccaaccggcgaatgcatgagcaacagaaaaatataaaaagaaaacaatatggcagcattgtatcataatttattcaggcaacattttggatgagtgcaataagactatcacaacattaaatatatttagtaaaccatgctttaaatattgaataataaaccaatccatagtacctcagtggttcagtaactagaacaagatgtcaattgacaggctaactggtcattcaaagaccacaactgacaatactaggctttgttttctgtttgctcgtccaatgaaaatgaaataacaaacatgtaacaattaacaaacttacatattaagagggcagcaactgctaacacaattaattgaacaggacgcccataccgaattcgatatcgcgacctctgcagtcgtctatgcagggctccaagacaaccataaagtttcttattgtatgtactctcatcacaagtacttacacaactcttgcttctttcaaagcatctatccgatccctacagaaggaaaggccctacagcattagagaactagaatgtattcaaatgaaagcattgttggacaatgaatatttgcactcctcaaggatgccatctgtacctgacccatctgagaactgagagggattgtctcttccacatcttgttgatcaacagcggcccatttcacagatccaccttttttcttcgttctaggcttagattgcaaggcactcgtcagtgcacatgttttcactatcttcagcaaaggttcttggtgcttgtcatcatatggtaggtcagcagaactctcgctctcatttggacataacatagtccatgacccgatatcagcatgggcactagcagcccttctgtgcccacgatgcgtttcttcctttactcttgctgaactcaactcagcggagccagaatccttggagctgtcagcatacatatcctttttaaccattgctgcattgttgcccacatcaatatcaccaacagatggaattgtaactactttgtctcgctgttgaaaagagcttgcagataggaaggtagcaagatcattccgttcatcctcatccaaatcaatccagcttagggcaccccttccctctgcaacattggattctttcaaattgttctcaacctcaagtatgcgacaaccgattgccgcaacaaagtcatcatgccgtgcttttgtgtcctttccagctgagaaaaccttgtcgtttgatctaattgcccgctccaattcatctagctagaaacaaaacacaactattagactcttttgccatcaattttcaatataaaatccctgaaattgaaattaacacatatgggacaaattggcttctcatattcacatagatcagataggaggggaactacattccacttagggctcaaagcaccttaaatgacatgatctacataaatgcaggttttgtataataaaaaaaaaagttctcatttaccacaattcgtaattggtaaaaaccatgattttcaagaagcaaacatcagtggctcataacaacaaacaaatcataccacgttacgtgtcttcctgctctaagcaatgaactatgtttctaggtatcctaataatttagaaaattaggggcaaaaggcattcgtcaaccacagatcaccacgacacagaagagcaattaccgccgatcgtgccatggctagacgctagtatacagcagagaaatggatgtcgagagagcaaccaattcacctgccacttggcggtgccgagcgcagtgtgcagctcgcggcggagctcgccggcagggagccctcctccacccacggcagcagcagccgccgccgccgccgcctccgaatcgcccccactcctgtcctgcacccatatcctgtacaccgactccatgctacagagacacaccgagaatcaccatcagatccatacgaacgcgacgaacccccaaccgaaaaaaaaaacaaaacgggggaggagacggcaacgcaccggtcggcggatccctgcacctcctcggcggcggggaagaaggggtccttctcccagcggtcgaacgacgtcgccattgcgagcgagaagggggagacgagggcaacggaaagtcggaaatggccgagacgagacgagacgagactccctcgcgttttttctcgtggtggccagggcgcgggacgctgcctattattaactggcgaactggcaaagaagaggggatttcactgccggtttctctgaaaacggcaaaacgcttacgctttttcctctgaaaaacggcgaagcagcaaatcccaccaggaattgatctgcgcgttactacacgggaaagctcctcgtttcgttgaattttattggcaacatttaggcaaaggtgcgtggttggagactgctgttgccttgttggcttattgcttagtgctcgccgtgtcgttttatctcgtgctgtagcatttatccgttatttattaagcaagggctgtgttttttttttgcttagcttgtcatacagcaggtcagcaattgctgatccatggatatcttccaagttcgacatttgcatcacgatgagcatatgctgtctctgtattgtgtagatttgtagctgatgacagcttagggctatctatggttttccctggtaaaccaacagattgaagataatttgattgttacaatgcagtgccttctatatcaaacgaattgctggttcggatgagtgaaggcattagatggaagacagattccctgactaggatttgacaggcggacgacaacaaggaacacccaagtttgcatgttattatcagataccggacgaaacaaaaagacaaagttgaactgtaatcactaaaaaaaggtgagtcgaatagctgcactgactaattcttgacacgcatatgaaaacagttctgcaatcacgacatcaaagaacatcagcagcttgtctgagaacccaactggtcaactcacatgatcacatcttcagttctgtcgtccatgttccctgaacactggggcgctttgttacgtgtctggttctcagcttcaccactttcctgcccagagaattccttagcctggtagcttgcaatagtatgtcctcgggcgctaaatttcggacacaaacaactcgctcattatgattttctgcacaagaagaatgttgattagaaaactgaatgtcataagcttcgtttttctcaaaaacgaatttgttgtagccatgtaaacacaaccatgaagaaacattaataatggaacaagaaaaacagtatggctgtttggttcaaagaataccctcattcctagagtcttatcagatcctacatgatcctgtttggttattagaacgggaacatgtgaccaataaaaatttgtttggttattgcaatgggattaacctcattctttggattgaaacaatccaaaggtggatgagattatgaaaactcatggaatgcagttatccacaagggcacccattcatccaagatgggtgtactaattgtggtcaaaatgcattcctcaaattacaggcctcttaacaaggttccttcggagaaaaatcacatagtacaaccataatgatgtgtttaaaccaatgacccaatgtccggtcatcaattcacagataagacagcggcctactgatgttttgcatcttgtcaaacaggcgagactttgggtagacaactactcctatagtatggcattttactcagaatggactcaaagatgtaattcagtaccagaaagtgatatccttatcagtaacagcaataaggctcctatagagttcctggtaattttacaatggttggaaaacaagggagaagatcttactgtaaatgcccttcaggttaggatgctgtccacggactaactctgtcaccacctctaagtgggggttcttttccttaaaagctggaagatgcgcctccataaaagccctgcaattccaaaaatcattttcatgaaggagcaaccaaattaaaatatctaattgttcagacatcaacttccaacaacacaagtattggcaaaatgacaacttccaaatgtgtaagctgggaaatcatacaagtaatacttgaattatagcatattgatatacacaaagagaggatataatgtgaaaattactgtccagaaaaaaacaagttctcgaatgtcggccatgatcctaacgtggcaacgagcagcttataattggctctaattgtgaccaaactgcctaatgtctagctctgatttctctcatgtctcggtatgataaatgcacatcaatttaacttgcaacaattgaacattttcccaccagggcaatatgtatgtatagcccttcgttatgctttatccacaaagaattgaacgaaagtgcaaacctatctccgacgcacagcaaagactactcggggtaatcgaagacaaaaagaacagttcccggatctaaatcaattcccggcaacaaaggaaatccggaccagatcatctaggaggcccgtagtatcatcacggatgagagctatacctgatccccctgctgctccctccccaatcgcagtagttcaccacgagcttctgcagctgccaaacgcccctcagcgccatccctgccgccgccgccggggtcgatccaaaccgggagctacacggggactccgcttcgctgcacgcggaaattcggagaccccggatgaggaagacgaggatgcaagcggacgaagccaatcgatcagtccttaccttgctcgccgccggcgcgcgagttgggggaggagacggcgaacggaggaggagacgacggtaggaggggatacgcttcgttgctagggtttagcccagcgggagatgcaaagagtggagctgggcctcggtaggccgggctaagaccaggcccattttatccactagcctagggctttgggctttgggccatgggctgtacagatataatgtatcctaacgattctgtacaattatttagagaaaatccaaaaaaatcattgacaagcacttgttccaaggaattgttaccaacgagtacgagttctatgaaatagtagtagcatcattttagaagtgactttgtccaaaaaaaaatatcatcatcaatagggttccgttagtagttctcccttaggtgctatagattatagaataaatagtgtatttaacgatgcgggatggtaagaaccctaacggtgatatcatttctaagacaaaattgcttatacgatggcatattatgaaacttgcatttgtcaatgaaatttcttagattttggtgtttattatcaatagtatttcttggattttctctgtttttaagtggacgattccgtgctgtcgcttgaagttttcccgaaatgaactggctggtactgtgcataccagtcatgagcgcatggaatgatgcaaataaacattatctctgaatcttttttgaaaagagattatctctgataatctgatttatagactcggcactttatgatgtgtttcaaaatttaaggatgttaggcaccgctcagcagcaagcggacctaaggcgcaacatgctacaacttttgcgttgcctcagtagaatagaataaaacaaaggagcaaatctgcaacagatttccagtgcaatccaacagcagcagatggcgttccgttcatgttacgttctcattctgcagtcttctgctgccctcacttgttcaaagtagggatgcgcctgcaggggagacaaaaagcagcatatgttacagacttgcgatccagggtccaggccaacaaactgtttgcaatacatatgctcgaccaacagcaagttaagcctgtgaatgaatagcttgacaggaaccaaccatagcttcacgagcggtcagcctgtcatggtggtcgaagcgaataagtttatcaagaaaatcaatagcctgcacaaagattggtgcgacgtttagtcctgtactcctgatagagggaaatgggatatggaaaagaaaaatcataggacgagaaggaaatgcatataacctctggagagacaagatgcctattttctggatttataaacttagaccaaggtttcctggtatgcctgtgtgtagagcaacaacaaatgtatcaagtaattttttttttactaatccaaaatgtgatatgaagtgaaagcatcagaacaaatattctacgaggtaatacctcccaatcagagcctcaagctggggatcaagtgcaatcctgtatttattcaggtaagcattaagctggtctgtacctagaacctgctcaggtatagttcatcaatatgctaatgcctgcaatattttcaggcagaaagcagagcagacatatacagatacaagtgcaaatgctcagcataaacacatgcgcatgcgtctatgtgaactgtagcaaaccttggctattttgacaagctggtcatggttatcgtggccatagaagaatggttccttgcgaaatatctgcatcaaaaacagtaaataaagcataacagttgctatctttctatacgcaagtaatttacagaagtaaggccatggcaattttgataggttattttataatcataggagggcaaacacaccattccagcaaacatacagccaaggctccacatgtctaaagagtagtcataactttggaagtcaaccagcaattcaggccctttgaagtatctggataaagaaaataagtttgcagataaaactatccacattttcaaatataagaaaacttatatagtcttctaaaaccaataaatttgctataacactggtaacagaggatggattctgcttatccataaaattagcaaattcaaaataattattttgctaacaaatattatgcagaataaaggtaacaagcgatggcataaggctatgtcacttcagatattttttattgaaataacaaacgataatccataaatatgaatatgaaactaataggaagctaaactagtcccaagcactctataaataatgttctataatggaaatttagatatcttcttggggttaataggatggggtaaacatttaaataaacaggacaccatcaattgacggagctacagaatcatgaaggcatattttatgaacttgccttgaggcaacccgaacattgtactctttctctggaaaataaaactcagcaagtccccaatcaattaagcgaagcttgcggagttcatggtcaatcataacattgtgaggcttgacatcgcggtgcataattccttgagaatgacagtaatccaatgcctggaaggtaagcaggacggaatttagaaaaaagataacaggagattagaaataagtcctggctactaaatcgacgaacaccgaacaagcccaactgaataacggaagccatagaagggagattattgaaactagtaactaaataagaatataatagaatgttctgtaattaccacatatcctttttgttatcagtacattcacataaacaattaggtagactttctatgttaccgtctgacatgaaagaaacaaactttataagtggaccatatatgcaagactaatcaagcagaacataaagttgcaacatttgtttcagcctctaattcaaactactgtaggccatagcattaatactaagtatgctagagagtcaagttaatcaatttatagattaatgcatacagttctataagacattcaacattgcaataaacaacaattgcatcatagtcactatctaccaggcatagcctttccataatgccatcgtgaaatatgttaagctaatgccacttggaacaaccacaacccacaactccacaagcacaattcaagagcttgttattaagtccatacatagccaatggtcaccatctgaaggggtatgtacatacagatatttcaaactatcattgttagactaaagcacaaaaactgatttgtaagcgtgaacttattgtagcacaatggatttgggcaaagtttagcttaatatggtgtgataggaacaatcagacccaagtattgacaactatattcatcacaagagctgaaattttcaacacttctactaatgactaaattaaaacagaagcgctaccttaagaagttcataaatgtagaatcgaatatcatagtctgtcaatgttggatacagaactttgaaatctgtgctgtttacatattcaaatatcaaacttggagtttttgattgttgatctctgacaatattgtgaagtttgacaatatttggaccaccacagaggttctgaagaatttttatttccctctttatctgcaaaagaattaaactgctcatatataatagcacagagaattctaataagcacatgagcaaacagagaacagttcggaagaaaagatatgaggttaaatatccaacaaatgagcaaaagtgagatcgctcattgtagtggaaaggagcacaaaaactaaataataaaaactgtagttaataataatctaacttcttaagtaccaccatccatacaatctagtaactggattcaatgaagtaactgaattcaaaagtaccaacagccataaaatctgaaaatggcacaaatggacttgaacagaattaggatgttaaaatttagctgatttaaccaaggaacaagtcagcgtttagagaagtaggcaatgcaggtttgatccatcaaactgttccaagtattgagtgtgtcgcgaggaataatttaagcagaacatccatatatgttaattttcaaagaaaacaaggataccttctttttcttaacaggcttgagaattttaatgatgcagcgctcatcatttgtcacattaattccttcgaagacttcactgtatttccctctgcctacctttcgcacaacctcgtaatcatcctgctcactgaatggagaagaacaatccattggtaacagagcataactaaaagaaaataaatagtttgatttttttttacttcacattcccccaagttgtcaattaaaacagtcaaatagatattagcaaggtagaagaacattttttaatcatgataacaatatatggtcatgtaaatgctgtctattatccagttaggcatattggttggtgcaaatctagtttatttcaccaaaacctcctctggccatacattgagataaaatggtttccctcaatgaatatatttgtgagtgattttagtagtgtagaatgtagttccctcaatgcacacacagctcacatgataaatctagtcagatgacccaccaaaaaaaaaggccatcaatagtattgaagaacagtgcccatttgttcaactaatatatatatacctccccaactacaattaggaaaactttagcaactaatccttcctgtcaaacttcaaactatcaccgagatgaaaggaattgtatgatcatagcttggtaacaaaggtttcgaaatatacagtatcaaaaacagaaggtccaactctaaattggcaacacgatgatgaccagacccaatagccacatcgagcgataccactgccgaacaacacaccgatcgacaacagctagttcgcagctcgcacaatctccgcagttcaatcgtacgatctatccccaaccctccagcaacacacacacagtcacagatgcaatcatctcgcatcgctacgttattctaggcgacgacgacacgagtgggggggggggggggggggacaatcacacggtagcacggcgaggcgtaggtgggaaggaatcagttcttacccccattcgacggcgagggcctcgtagtcccagtactccctggggcggtgcacgttcacgtcggcgtagacgcgggccgtcgacatggccgccgccgccgctaccgacgccaccgagcgggcgcgggggagggaccccgcgtgcgcccccgccgccgcgagcgccgcgacggcgcctgtggcgagggagccgacggtggcgaggagggaggggagtatggcgctcgtggtagcggtggcggtggcggtggccggcgcgcgcggcgaggcccgatcggattttttttttccttcttctgggtggggtcgggtgctctggtcgggtcggaacgcgacggggtcgctatatcatatcaggtcacggcgaggggagcgggttgttttggcggtttcccgctgaaaaagggggtgtgcgccatcgcgcagcacgccggtttctgaacaagagatgcgtgcacagctcctgcagcaacgagttgtctgtttttttttcccgaacacgtaaaaggattgtaggattgtaggttatttctgattgcagtaattggaaccaggttttagctaaccggttgaaaactacgaaacttcaaggtttcgagattggatgaaagtagattccgggtagactttgaatggtgttgaagaatttaaatttaaattttaacgaaagatgtcgtatagctaagatcggaatccagcacttatgatgcttctctctcgtggcccgatattctagaaatgggataactctcgctttgatcaagtgcaacgtttgcgacgtggctaccaaccagaacaagtccagaacgccgtgcaatcgctagaccacaaatgatgtcgtaccaaccgtaacgtgcggttgatgatccctacaatgcaaacgagagaacactgcaagaacaaaataaaatgcaatctaaatattgcgaataggggataactctcgctttaatcgagtgcaacgtttgcgacgtggctaccaaccagaacaagtccagaacgctgtgaaatcgctacaccataaatgatgtcgtaacaaccgtaacatgcggttgatgatccctacaatgcaaacgagaaaacactgcaagaacaaaataagatgcaatctaaatattgcgaataggggattaaacacaaaggaatagttacgattgaagtggtagatctaatcgacccggcaaatcaacacaccaattattaggggctctaaatttatagtcgccgactaatcaagcgaggacaagagacaagtgaatgacacttggcaaaattcaattaaacaaaactcaattgttctagagggtgtacatagacatttatagaagaaaatagatcaaaggtttagtgctaattcgtggaggtgggcctagtgtattacaaggtccaagtaccaagttcggtttcagcaacaacattgtcttgttttgacaatttccgtttactcggaatgaatttgtatatgaaaccggatgcgtttgaaaggtgacgagataagctttccatcaagtctaacatcacccgaatcggagttggcatgaagacactaggtccatttgaagtcaatgctgtctccggaggtcgaactggattccaaaactcattggagatgtatattgtagatcctccattcatccgatgtattcttgggcaatgttttatatttctcatgtttggttgtatacatatacttgatctcaacctattggcaaaatcctttaggtatgtttggataatgggaaatgaatggtgggattgggattgagaaattgatgaagggttttgattaaatagaagaaggagaatgaatggttaggatttaaagatgtatttttgtgggtaggaaattactttattatcccattagccaaacactgccttatactttagaccggaggtagtattcaaaagttgtttatggtaattggctgcaactcttttatatactctttataaaacaaaaacatctttgaatttgccgttaccaaaatcttcatcattttttttgaacggaaaaatcttcatcattgaatcctcaatgtactgctactgaacaatgtaacgcattttcattttgccaacaaaatggaaagataatgagtctgtgtaccgtcacgtcatcactttgttaattgtgggcctccatcagtttttgggcttaaggccttaacacctggaccactcgacgcaacctagctggaggcccagtacagtgccagcgccgaaaaggaaaaagtatacttcgattccctcgactatcacccgagtacgattcatatccactaactataaaaccagctatatcgactccttcaactattaaaaccggtacaaacaatatctctcaatgattttggagattgttttggctgacgtggcgcctacgtggtagtcttgaccaagtctttgtcgtacgtgacgcttacgtggcattagaataaaataaaaataaaaataaaacaaatatatgggacccatatgtcattcgcaaggaaaaaaaggcattgtgggacccacatgtcatcctccctctccttctcttcttcctccccctctctctctccctccggcctctctcttctcgggacgacgacggtagggagcagcggcggtggtggtgtcagtggggacggtggcggcggcggcggtggggagcggcaacggtggcagtggggagcggccgcggggcggtcgggagtagcagcgatggtggtggggacgaggcagtcgggagcggcggcggcggtcgggagcggccgaagcaccagcagaccagctcct

SEQ ID NO: 8092 - DNA, 8939 bp, Oryza sativa
agtctgagcttggtctaacaagagaacaattaatacgtatggcaatgcttcttgggagtgactacactgaaggaattaggtgatatgctaacaagaatatgtatcctgtaactttttttgcagtttgtataaaaataagatcagaacttcatttttcttgttgagttgcatttttcgttgaaaggaaatatgaactgaaaaacttgctgttccagagatcaagtgcatgctctgttttgttggacaaatttgttatgtatacagtcattaagaatacagagcattgtactttaattatgccatctcaatttcttattttgaaggggggaaaatgccatttcagtttctgttttgtccagtgtatttatttatatactgattatgcagtggcattggcattgtgaatgctattgaagttgcacacgcatttcctgaggaagatgggctccaaaagttcagggagtgggttgaatcaccagatccaactttactgggaaaacttggtatggaaagtggtagcagctcaaagaaaaaaaagtctggcagaaatcattcagacggaaagggaaacagccttgagcctgaatacgctaaaggttctgatgacagccaatcttctaatgagacccaacgcatcaaggaaatatttatgagtaagcatgtaagtatgttgtctttatagactgaattgtcaattgctgtaattgcatggtgattatagatactgctttactaatatttcttttgcacttgttatcatttatttatcagaggaatgtgagcaagaactggcatattccttctacttttcctagtgaagcagtcataaacgcatatatttccccacaagttgatgattcaacagaaccattttcctggggaagaccagattcaggcttactgcgcaagtaagctttcttgaataaccttatgttctcatggatgcgagcaaacaataaaagataccgttcatttcatttccctgcacttttttgtattgaatcagtttttaagagcagcaatgtttttcttgctggaaagtggtggacaatgtagtccaacatattggcagtggcattaaccgctcaaaaacctaaaatatatccgatatgccagcaccagcttgtttctggtaggtgttcagactggtaccgtggagcgcaaaaccctagacaagttttaccagaaagcagagtgttctgttacttttagctgcctgatatgttataatcaatttgtttttatgatgtggaatgtgctttttagctccttatcattaccttgacaatttgttctgatctttttcttcacaagttagttctgtttcaaaactaaggattatgattatgaaaaaacacacatgctctatttcttttctttggcgcaacaacagaagatctaatgttgagttccttcaggttatgttgggaaaggtttgggtggagcaaggaaaaggctgatgaactgctaattcctgttttgagagagtataataagcacgaggttagtctctggaagactgtaactattatttatcctattatagaatggtttgatgtgataatatgtttatggataccattgaattctgttccctaaaaaaatgagttactagtaagttagttttacggtttgagaacatcaattgttaagatgtcagcatttcacctctattttacattttttttggatcggctggtgctggtttgccatgttctgcaacatttgcattttaggcatctgtaaaaagcaagtttttgacaattcgtttcattgtctttaagttattttcatttaggaaatcgctgccttttgaaaatagaataggcatgcttttctgcttggatttcatttaactaagagtgatttaaccggaatgtcagcaatccaaagtctgcaaaattgggttatttaaattttacagtttcatgtgtcacacacatgcagactcaactacgcatggaggcgttttactcattcaatgagagatttgcaaaaattcgtagcaaaaggattaagaaagctatcaagggtattacagggaaaagctttctagagacagatgaacttgatcatgatagtcccagtactagtaataccagcaagaagaaagagagaacctcctctggtcgtggtagggctaaagggcaaagaaccaaagatgttgggcctggtaacacaggaaatcaggactatgacattgctgatagcttagtagatgcaggtgaacatactacagaaaaaagcacgtccagtaagaaaagaactgcaaactcctctggtggttcaagaggcaaaggaagaagaagcatgaatgctgcacatgtgataattggaaatggggaagattctgatgtctctaatttagcatctgatgaggattcccatattagacataccaacgactatgaatcagagggattgacattacgcagggtaagtactccttatggttttctgcacttcttattgtatggttctttctcatgttctctttgatgctgttattgaaggtctccgtactgtaatattgcccactaatttgatgtgatctaaacctttctggcctagaaaattagcttccatttattgctagctgtttagcatatgcttgtagtcctcaaaatatcacacatgcttgtctttgagaatcaattcttttttgaagtaaagaatcagaattgtttatgcatttcttctgatctgcacatgaagagcagtaatatttgcactggagagtaacattattatttttttcatgctgatgttgtttctgcagtcaaataggaagcgtaagcaggtcacatacgcggaagatggtcaggaagctgatgataatgatgtttccatacatcaaatcgatgaaaatcagggccaaggttctttggaggaggacatgtgtcacatggctggacttgacacacaatctaatctgctccatcaggatacgagtgaattaaacatcgatcaaacgcatacagatccctctgatatgaacgaagatccttcgggctttgagttacccgaggattgccatacggacactgcaccaaaagactatctcttcaccggtggtggattctgcatggaagagggtgacgagcaagatacgggagtggatcaatctggtgcagaaatggagcatgaaacacgtgatgcctgtgagggtattgacgaggtttctgaaagtcaaagcggtaaaagcatgagctattcggcgactggagagggcacagagaatgcaaatacagaggcccgaggggcgtcttcatcgcagggacgcaatgcaagccgtggttcaggtgccgtgccgaagcttacaaagcgtaggagaaaatcatgactcatttgcagcagatcatgcctcgcacatcatgccgttttgttcaactgggcaaggtcacgtttcgatttgttcggcagccaatgagttgcgggcttgcggcgttgtcgtctgtaggccaagtctgaagactgaacaaaatgcaggtcggcattctgcacaccgttttcaggctttttcaggtttctgtccattgtttttctaggacagttatcgtatatcggtgtaaactgattgaagtgaacatttaaacctgacgtgattccttgcatcaggatgtatgtgtaacgcaggcttaccaacaaaagcaatgcacccgatgaaaatactgataaaattgaaatacacccaaaaaaactgacaattgttctctatctgaatatgtttattttttcatcaataagttcgattatacagtaatactatttgtttgtttttttaataaatgatgttgttgacttttaaaataacgtatggccgttcatcctattaaaaaattagtgcaaacatgctaagtataactcacatttaaagttttttaatgatacaataagtcaaaataaaataaataactttgatataaattgtttgaataaaactaatggtgaaacattatactattaaaaattaacggtatcatctattattaaaaaaaacggagcgagtacgtcagaataaaaattaaagtgcactactgtcgcgtggatcccgggcccggcccactggcccagtcaactaatcctcccgctccgctgccttcgcgggccgtccccttccactccgacgagctcccgtaaaccaactcgacggtcgccaccgtcgccgttgccgtcgtgtctcaggccctcgagggttcgtcagtctagtactgtgtgagcggtgaggtggcggcggctggtggatctcacgggagcctgaggtatggtgcttggcgctcgcctcctcctgggcctcgccctcctcgccgcgctgctcgccgtcgtcctccagctctaccgcctcaggaagccggtgcgttctctacttctacttctcccgaaattttccactggcttacctgtgagtttgaggttagatattgcgtgttttttgttatctaatgtgtggaagctgcctttgtgcttgcaactgatccggaattctggatccgaaatcgcccgcaaaatcagctggttgctagttgctattagtactagatgttcccagttgcaacttcgcagatttctggtgaaattaatgatatgccccgtaaggctgtaactgtatggtgtatgctggactttactgctgctacatatttagatttactactaccttcgtcccaaaatataataattttttactatgaatctggacacacagttatccagattcatagctaaaaatgcttatattttaggacggaaggagtatctgttttaggcttttggctatgttccttttgatattgtgaatagtaaaatttgatcgtatagtgagcactattttctcttcttcctgtgttatactcggcagaggttgtggaccaaggaagagttagcagtgtacaatggaacggacgagagcttgcccatactacttgggattttggggtattcacacttatctcacgtatgcctgcaattctattaacacaaattatactagtattgtagtggcttcaagtggcaatccatgatgcgaagtttgtcctctgttgtttgtggattgtaatacctatatccatatcatagaaacttattgtgttcagttgtaaatgcaaattcttataagcccgttcgctgtttttaagttttgttatgcattatggattcacttagttgttctctgttgtattttccattccactgcatggactatttacaaacttatttttcccttttgtttgataatgcagctcggtgtttgatgtcacaaaagggaagtcgaattatggtcctggaggtggttatcatcacttcgctggcaggttattatctttcaaggcctttggaattctcacaaggagcaatgcaatagcaatgctttaggataattctcaaaaggagttaacatttactagcagtattaagccttgttaggataattccagagaacttatctcatcttgctgatactaaaacagcatttccataacagggatgcatcacgtgcatttgtttctgggaattttacaggtaaatctgctatcttattgcttttggcttgcatagtaataggtttacatagttgatgttcatttacattacccacaagccacactctatatcattatgatatccactgtttattgcacagtattaggaataaattacactggctgtgttgatcattttagctaaatttaggacacctagatctttatcgaattataaatgtttactgcagacatcataaaacattgcttcctagcaaagcatcaacaacatacatctacatatgaaaacagaagtaggtagcacatgggtattgggtacatttaagattgatttgtgtcgaagctgtaaatggggcttggatacataaaatgcagttggtcaggtgcgatgaagagtaggatacataactttgactggtttattttcattgttgaagttcttggaagctcgccaaatttcaatttctgccagaaattgatgtaataggatctgcatccacatctttcccttcaagtatgttcataattttattgagggtagtcgagatgtgaagtcgtcatggctatagaagttcatatggacttacattagaatatcctcttttttctaattcaacaggtgatggtttgacagattctttacagggcttatctagcatggaggtacgacaagagaacacagttctcatagtttatttatatttataagtcttgtagaatctataagaaaaattgtaaagtttacagctagatggtcaagaataaattgttgagagaagaccatacataaaaggcgcaagcataggaatattgtgaatttcaattagtttggtctcttgctcctcgtaccagctaccaacatttttataatttggaagttcatatagtaactaaatcttcatcttatgtagtcatgtcactagtgtgcctagcttgcatcacgatctgtagaaaatgtttacattgatatagtgatcagcataacactgtaaacagttgaagaggtcattagcatattgatctcatgtatatttaaataactaatggaaaccttaaacttactacctccatcccataatataagtgggacggtgggagtagtaaactgaagataacacatcttgtagttatgagccacttctgcagcttatatttgaacatatgttggaggttgctctgttatgagccacttctgtagcttaaaagcccaatctttttttttcctgtttccttgttgctgaatttttcataatcagtattatgcctgtgtgttctctaaaaaaggtattattggttttgtaacttcctttcaggtaaacagcattgttgactggagaaaattttacttcgagagatacatgtgagctgctttttcttcattgatttgtcaagttacttccatttcatttgattacttgtcaatatgaggacttcatgtaggacatcttcatgctcttgaatcttgatgttatttctcctgatgtgatctctctatcctgatgaatgctttaaatttcccgtgtttttaaatcatgtttatgtggtattcttcatgttagagcgcaaggtcctatatgctatgtgaaactcgctaaagttatcatgcaaattgtggatcgtgtaaaagaaaaccttgctagatgatgtgtcttaccataatatttctgtgaacctgtaatgcagattcgctggtaaaatcgttggacgctactacgacgatgaaggcaaccctacaaaatatctcaagggtatagagatgaaggcaaagagaggtgctcagcttcttgagaaacagaagagtgaagaagctaaaatacccaactgtaattcgaaatggagccagcaagagggtggtgaagtaagtaccctcatatcgattttcaactgctgctgttttcagtttgattttttattagaacatctcatgaaaaaattaataatgaaattaaacctcgcattaccaattgtcagattcacacatgaaaattgaactgaattgtgattttccctaatttgacacacaaaaatcatgtaagttgcactgttggccattgggagtatgctcacagttctccatacagccattcgcccattggcagggcagtagtgcactgttttgtactaggatttatcattcttctagtgcactagtcttctcaagcccatttttggactggttactaatgggtctttgcaatctcgatgagcattagcaaggattatgctctatccccagaattcaaccctgctaattactgatgttcaacaaagctggcaagtggcaacaaaataaatcatggagaaatgtgttgtagccagaagaaaagcaaatgaagcaacgctattagggcctgtttagttcacgaaaagaaaatttttaggtgtcacatcggatgtttgactggatgtcggaaggggttttcggatacgaatgaaaaaactaatttcataactcgcctggaaaccgcgagacgaatcttttgagcctaattaatccatcattagcacatgtgggttattgtagcacttatggctaatcatggactaattaggcttaaaagattcgtctcgcgatttcctccctaactgtgcaattaatttttgtttttatctatatttaatgcttcatacatgtgtgcaaagattcgatatgatgttttttggaaattttcgcgaattaaacagggccttaatgaaagtccggaatggagtaactattttctcttgagcaaagcaataatgtagcactaacttgatgcgacttgttgagattgctcgaaaaccagagcctttggggtgctgttttctgatctttcccctgcacttttgtccttgcctacctactgtaggaatcatatctttgatgggtgcttggcagtggtattccagcctctgagatagcatcatagcagtatatactctctatacctaaggactacggctttcctgggggtgtgctatgcccgtaaggccttaaatttgttgatgcttgacatccatagatcgagttgaactaatatttgtctattttgttagtacttcttaaaaaaaaagagagtatattttatggttactcctcgttctagagactgaagtctgaactctagacaaagcattttggcttaacaaatttgcctaatgtgaaaccttctttaaaactctgctatgtgttaggtttggtgcgaaacaggctatccaagattagtcagaagaccaggtgacatagctctgacggggcaagttagccagcggtgtgcctgttacaaggaggaggagttggacaaggctggcctggttgtgtacgaagggtgtgattatttgtctacatcttgcaaagtgagttaggatatgtacatctccttctcttgcccatgtagttgtctacggctgcccactgcttatctgcaaggctgctaatggtaatcatacacgaaaagc

SEQ ID NO: 8093 - DNA, 7939 bp, Oryza sativa
agcccgtggagaagcgcgtgcgcgggggcgtgcggcgggagcgcgcggggggcggggcgggtggcgcggcgatggcagcgaccggggggaagaagtcgctggtcatgctggggaggctgcggcgtgaggccgtggtggtggtgggcgggctggacgcgctcgccgagctccaggcctcggcggcgccgcccccaccggagcccccggagagctgccgcggcgtgtagtacccgtcctcgtcggaggagcccagcgttgcggcgcgccgcagcggcgggagcgggcggagctccgggctcgggtggtcggcgtcctcgtcgcggctcaccccgcgccgcgcccgctcgctgcgcagcttgcggtacggggaccccacgagatcggcggtggtgggcccgtggtggcgcgcgggggtggtgggctccaccgtgccgacgtagaggaagtcggcggcggaggtggcggcgctgcgatgcgcgccggcacggtcggggccgagcagcttctgcgagtcgccgcggcggcgggcgcggccggtgatcaggaacgcgcaggcgaagccgagcagcgcgacggcggcagccgcgcccgccccggcagcgactatggtcgccttcgtagggccgcctccgtggtgtcccgagccggaccccgacggagttttcgagacgtcggcggcgacggtggtcggggagggagtcgttccggggctcgtcggcgtcgtcgtggtcggtggcgccggagggaagaagtcgccggaaggcgcgtcaggcgccggcggagtgctggggtcggaggtaaaatccggtgcaggcggcggcggcggcgatggtggaggagtccactcaatggggaagaggggctgatgcagcaccctcctcgcactgccgccgccgacaccgccggactcagcggccaccgcgacatggccacacagcaacaccgccgcgatcgcgacgaatcgcgcgatggcggggggcattgacagcagaagaaaagaaaaacaaaaaattaaaatcgagccaaccaaggcagctgcagcagctgctgctgctttctagagtgagagagagtgagcgaaggggagggaggggagagagaggaagaaagccgccatttttcggtttcggagttgtaccatatgcaatccatcggtggagatcaacggtctccctcacacgtggcatcagaatctgctttccgttttgcttcttttccctcttttcccctctctttcgcagcatttcctcctctttttatttgtaggtacccactcagtcactcactcaccaagaaaccatactttagattagatggacctttatttttcttctttaaaaaaaactcaacattatgtagctggtagtgtaaaaaacttagatggtataaagatatcatgtagtcctgttgcctctggagaaattaatgagttaaacaattaggttgtggtaggttggtgctcagcgaaggaaagaaaatattccacacaagacacattctgaactggaatcctatactttgcgtaccaaccatccagttgatgtgaacatcagtgtcgccgaacagcattccggtggcttaaactaatcaggttgcgttcactgacatgtggggcttcccggttaaagcctgggcctttcctaccgtgtttgggtcgcgcgcgcaatgtactgatttattactagtacatttttatttaaagaggatgtactgattgacaatgcacaaagcaatccgtcgttggatgctgccctggggttgcttagtgcctgcttcttttctctctttacagaaccattaacaatctgtatctttctcttgctgggattggatcttcaaataccaatctttattttttttcctcctttgttagtgctcgattagctttagtcgaaagcgttttactgtgggggctgcatgtctcctgcgtatcgtatgtactgaatcatcacgcagtactacattaggaagaggagaatataatttcatagaggagtattttgttttcccatgttgggtcccacgtgtagcatggtctgctggtcgcttggccttcggcttctcttttgtccgctttccagtcctcttgcgggtagatggatggaatggatggatggttttgtatactctaatccgcacgtcaagcatctgctttgccttggctcgcgccgtcacgtgcaaagcggccccgatcccggagcggcgctcggtcgtcccgcgcgcaccgcggctacgccacggcacgaccggtttggttgccggcgcagcgcgcgcaggttgtgtaggagtacttccttccacttgcgtggtggtggtggtggtgagaatgtgagtgagatcgtgcagggggatttaccggtagaattagaaaacggagggggatttttcaggcgtggaaacgtgggcaatgacacgctgcgcggcaggtcccgcgtggtggtggtctcgtgctctctctcctctccgcggtccgcgggccatcgatcgggcgcaattggtcgcgcgtgtctggctaggcgaataggtgtgcgtgctgaggaggagacacgggtaggtccggttaatcccgcttctgtactagtctagctagtgataaacttgggaaatgcgtttagcaagcaccggctggctgctaccctggaccctgaacaatgtcctcaattggaaagttggcatgagttaattggtagcccgaacttatggacatgtatataaatatcaacgtgtacaccgtttctcacgatggtaccgcagaacaaaagggggtggagttcacataaacaaaccattcacaaaacttggtccagtgtgttttaaaaattttggctacaggtgaaacacaaccatctttttgtcaaaaattaaaattaatttgattattttataaaaaaaacttctgctaaaccgagtagtttgtgtcctcgagctggaccaagaaatctagttctcatgaaaaccaacaggttctcgttagttttgtaaatccttgtagggagatatgtgatcggagatcttaggactcatttggattgaagtgatttcaacacaagtttggtggatctcaattgtttgggaaaaaaatcctatcattttatttgaaatgaaggaatatgattaagccattccctaatatccacgtcttttttttctttgaaacgaaggaatatgattgacaaaaaaaactaacaatttgcttctcataccaaactaaacgaattcatacttcatgcttttatttttatatgagaagccccatgcattctctctcgcgcacacactcataaaaaaacaatttcttctaaatttctatatttcatttcctacatatcttccaaacacaaactctttaattcatgtgttttataaaccacacttcaagggagatctaattaattaatgtctttatagtccattggttctcaacccttccaaattccagtatattggcagtaaaattttgcactaccaaatcgttgataggggtaaagttttgttgtcaatgtttggtttgttaacaatattgagccaaatcttataatagagtgaataaagttctaagaccctgtttagatgggactaaaacttttaagaccctatcacatcagatgtttggacactaattaaaaatattaaacgtagattattaataaaacccatccataatcttggactaatttgcgagacgaatctattgagcctaattaatccatgattagcctatgtgatgctacagtaaacattatctaattatgaattaattaggcttaaaaaatttgtctcgcgaattagctttcatttatgtaattagttttgtaagtagtctatatttaatactctaaattagtatctaaatatagagactaaagttaagtccctagattcaaacaccacctaaaaattgtgtcaaataaagcataggcattaccaaataggagtagttgacatcaaaccaaactatcacatttatgatctgagctaccgataaatttatagggtatgttttggcatcaatctaaaacggtcatctgactgactgaacccattttgaaatgtgattttctttccaagtctttcttttttacaaaattcgtgtgattcaaaagaatcctagttttgttggttcatccgatgtactccggagtactaaagaggtggttaggagcaatatgcattatttctgcctacacgaaataccagctagtagatgccaattccacaattcccatttgcattagtcccagaaagggacagtgcagaaatgtcggtggccaggagtactactacttgtactatcaacagtgcagcatgactgacgataccgtggcactgtggcagcctatgcctgcagctcgatcctgtggatcggccgtgctactagtatgactactgtatatacgtcgcaatctcgctaattccacgcgtttattatgccatccaagaaccgacctgacgctctgacacatttatgcgtatgtggacagtagatcggtgagcctcaacggagtaatcgctgcttgatgccatgtcgtattgtctttctggtccttgcatttaagccacgtgtttcgatgcgttgcttggtgttcatgcagtagtatgagtatgtgggatggatgatgcctcaggttatcttcaggtacgatgctttgaggcaatcttttcatttctgaactttctatcagtatgcctttgcttcgaaattctgctcctattaaccagtttatgcgcccaaacatactccaaagcgtgccccccaatgagaatgacgtcctgaagctccagctccttgtcctcgttgtcgtttagtactattttttagatcagtccagcaaattcaacagacgagaagtttgggccatctgattgtgtagaataactttgtcttggttggcccttggcccttcggcaggttgttaccaaattgtaaaggaataagttcgttttgggtctctctatttgtcgcccagtccgatattcgtcccttagaccgcaaaaccgggtatgacccatccccaacttacgaaaaccgggtagacgaggtccctcggcggttttggctgacgtggcgcctacgtgacttgtttgactagttctccgtctcacgtggcattaacgtggcgcttacgtagcaattatatcttaaaaaaaccgtggacccacctgtcagctacacacaaaagaataatttaaaaatagcaaggcccacgtgggcccacatgtcagtctaactcaccctcctcttctgcttcctctctccccttctcccctcttcatctttcttgcgctggaggatgcggccaacgatgacgacggcggtggagatggagaagagtggtcgccggtaggccagggagctcgcctagccatcagccgcccttctccccgatggccgtcggcgggagaagagggagcggtgcgcgacggcgtcggcggcgggagaggagggagcagcacaagctctccgccgcaacccgcctccaccaccgtcgtcgtgtgcgctcgtggcggaggacggcgagagcggtggccgtggcactcacggcggaggccggcaaggacgtagaagctggagcccttgtgcgcgacggcagcggcgaggtcggtcccctcctcgagggggacacgacgaagacgacgggcagcacggcgggtgcctgctctagctccccgtggctcctctacggcgggtgcctgctcaccgtgatgctggccggtcctggcagcggccgcgtgctggtgctggagcggggcggcgcgcccacggagttcccgccggcgccgctctgggagagctagtaggaaagggaatgatatgtgggcccacgtgggtctcactatttttaattttttttgtgtgtagctgataggtgggcccatggtttttattttttttttaagatataattgccacgtaagcgccacgtcaatgccacgtgggacggagacctagtcaaataaaccacgtaggcgacacgtcagccaaaactaccttcaaaatcactgaaggatctcgtgtgcccggttttcgtaagttgggggacgggtcgtacccggttttgcggtctagcgacgaaaaatcgaactgggcgataaatagagggatctcatgtgaacttattccaaatgtaaatgcaaagcccaacccattcgtttcacaaaattagaagaaactgggccgaggcggactcgccaagcaatgatgggctgggcctttctcctggtagtgcacgatactgcacatgattgcatcgatatggactaatcggcgcaatcagaacgcgtgaacgctgaacacccaatcgcgagaatcactacttcactagtacagtacccatttaagcctggcagtgacatgttttctactacctccgtcccattataagtgcagccatagttttccgcgtccaactttgaccgtccatcttatttgaaaaatttttgaaaaaatttaaaaacataagtcacgagtataagtcacgagtaaagtactatttatgttttatcatctcataacaataaaaatactaattataaaaaaatttcaaataaaacgaacgattaaaattggacgcagaaacttatggttgcacttataatgggacggagggagtactttctacgacatgtacatagcattgccttctggccattgtcgtatccgttaatgtaatgggcagctcgtgtggctcaagtaagcgcgtacgcgcactgcatattctctcctcttctgtactctcgccatcctcatgcacctcatcttcaaactgtactgaaaccttcattcaactcacgcacatgtactggctggctggtaaaacgtggtacaaaaaccagagaaaaacttgacattgtccgtgagaaaacaccgatctgtcgaacacgtacacgatccggccggcccgtctcgcggcggcgcgcgcacgacacgagatacgtatccgtcgctaacttccacacgcgcacgcagccgctccacgtacaggcgtacagtacgcacaaaaccaacaggtagatacccttgactatactaccttgggggtgcatgcaccggtgtagcgaccgtacgtacgtacatgcaggcgatcggagaagcaaccgcatgtgttgacgcctgcacggcacactcttcctcggctataattactcgtgttgtaccttggttgcctggccttaatcgggctttggccttaattggggttgctagtttcatcggatcctgctacagtatacgtaggcagtacacatctgacgtccctagctagaataaagaaacaatcttaattgacagcaagcgagaagccagcagcggcattgttcagatcgattaggtccaaatcgtgtagtacctgttgaaccaagcagcgacgagacgacattgatcgtccaaatccaactctgtccgcctgccaattgccacaaagtccccaatccgccaaagacccagatcatcacgaccctgttggcgcgtcgactagcacaagctcacacaactcatcacacagccaagttcgcgaatcaatcagcagccatctctggcctctggcggcatcgcacgagcctcctatcctaccacgtaccagaaaacgccgcgcgcatatgctaagctccgagcattattcttcggaatcgctccccgcgccgcgcgcgacaagagaaagctttggctttggctcgagcccgcgcgcgtcgcgtcgcgtcatgtcgcgcacgtacacgtacttcttccctcgcgaacaccgcggttggcggcgtggtgaccgactagctccggcgtgcgtgcgcggtgcgcctctcggctaggcgcgcgcgcgccacctgtgaccccgtgaatcatccggaccagtcgtcgcagctggtcacgctggtgccgtacgcgaagaaatgcgtagccagccacggccgctacgaggggggggcgggggccggggggggggggggg

SEQ ID NO: 8094 - DNA, 16141 bp, Oryza sativa
aaccaaagacaacccaaacttaaaaccaatccattttacccgcttcaacccaacctattaaaaaccaaaccaatccaatccatttccacatgtggaccaatccgctccaacccattaaccaatccattttacccacttcaacccaacctattaaaaaccaaaccaatccaatccatttccacatgtggaccaatccgctccaacccattagcctcctcagcccatttctatccaaccaaagacaacccaaacttaaaaacaatccattttactcactttatcccaacccattagcaggcttaaacgcatggctgcacccatgcatgcatccgaaatatctgttcatcaccgtcaacctcgacctgcctctgccgggccctgtcacgtagtatgcactgggcgccgtcacgaggccggcagctgctgcctcctgactggtactgaaatgaaatgcctcgctgatgttgaggccccaacagcaagtcacagccaccgtctctctcgtccattggcgcgttgcctgggcgtacggcttatgcatacgcacgcctgtgcctgcgctgctgtgcagccgtgcaggtgccactgctgctgggtatcggtgtctcgcggttcgcggtctcgcgcgcgtcggcgattcgacggatccgccgttggttggttggatggtggacggacggggccgcggcgtcgctttcggttttgcgcccctggttccggtcacgtaatggccgtcggacgggctatttttttgagggttttttttttctggtcctgcgtgaacgttaccgtcgggcctaattaattgtcaatattgtacccattcgtcatgcgtggcgtgttacagagaacatctcagaccatgtcccgctcgatcgatgcatcgtgctcctcacttagtcgtgaaaaagacatggaccgacggctatgggctgtacttttttctgaatgaagggcaaaagtttcgccactttggtcctgtttagtttgcgaaaaaaaaaattaagtgtcacatcgaatgtttgaccggatgtcggaaggggttctcggacatgaatgaaaaaactaatttcataactcgcctgtaaaccacgagacgaatcttttgagcctaattaagctatcattagcacatgtgggttactatagcattttatggctaatcatggattagttaggtttaaaagattcgtctcgcgattcccatgcaaactgtgcaattagtttttatttttatctatatttaatgctcaatgcatgtgtccaaatatttgatgtgacatttttgggaactaaaccaggcctttatagtgatagagcaggaataaaatggtaaagtatttacagagagtgggacaaaaacaaacgggcacgcaaaattaaacaataaggcgctactctcctgtagggattagctctgtgatttttatcgctcccactgtgatccaagtatgcgcctcctctttgattttggcaatgatggtggtgggagtggaggcaacatgcctaaaaatcttggcatttcgttcgcaccataattaccagcagctcatcgtgcgtgagattttgtactaccgttattcaactgtcgcacatccgtccgactcttgcaatcggagatctgctcctgtccaccgttatatttcagcctagattcttctggacagtatgcaattggaactttacacatgcaatctagggagggtgggccaatcaacatttcagtccagattcttttggacagatccggtactttgcgacaaagggggcaaatatgttgattggcccaccacctcttttagcctatccgccgtttagactctgttttaaataatgagccagaagaagaacttacatttaggtggagctcaacacttccaaatggtctggttgtaaatcgtcccgccgctccaaggagttgtagcctctacgccgtgctggaagagtagattccattgccgtcagcttccatacgacgaggtcctttaggtcggttagagggccaacgcattgtatcatggttcatagacaaacgtactagcatagatggtctgcatctatagtacgcagtaggtcaatatcccgaatccaggtgttaagggcaagagcctcgtgcacagtcctggttatttgtttggaggccgccaagatagctggagcgatatcctcgggtctcttattctcgagccagtgcgagtcctagaagctggttgttttcccgtcccccagaattattgtcgttgccccaacgaagaggttcttgtccagctgatcgcagggaagtgtagtaccagggctgtacttttgaccctacgagcacttaatgagcaaaaatgacggttatgtggaattaggctgtgtttgttagccgaggttgagaacttatttttcccgtgcaaaaaatagggtgactcgttaaagcatgattaattaagtattagctaagaaaacttgaaaattagattcatatgattttattaaagtaattttcatatagattttttttgcaaaaaaatatttcatccatactaaaatgtaagattctgagttgtctatgggtattgaaatatgtgtaaatgagaaaggttgtgattgattgagaagagaaaagtgaaaaaaaatcaattggagaatggttatgattgattgagaggagatgataggtgaagaaataacttcatcttgagactatgcacggtagacgtagctatattttgaaacggaggtagtatagatccgaaaacgtgtacgcaaaaaattagggagtaaaagttggaaagaggagaaactatgtcagctaatatctaccagaccacattttagcaaataatatttctgctctacaatactccctttgttccaaaataccttttgttccaaaatacaagaagttttgattgtatgagatatattttagcatatcagattcgtagtaggatatatttcatctaacaaaattagatgaaatatatcgtagttttgaagttttgtgccgaagtgtcgaaaccgggccgcaccgaaactttctatcggggccggaatcgccgccaaaccgcaccgcacgttttcgacgcaacacggcatgcacaaacgaggcccgcgggcggcccacggaccaacgtgaaacgggaacaccaccgtccaaatccatcaactggttcctcctggaaacgcaccggttttgccgttttcgccttcccctccctcctcccttcctagctgtctcccccctctcacgcggtcacgccctccgcaccgcacgccctcgagtttctcctcctcgtcgacgtcgacctcgcttacggcttcacccatccgcagccgccgccgtcgccgtcgtcgtacgatttccacgcgagccgcgatgccgcctccagcgtgggggtggggctccaacccgctggagcccgtcgtccacaccgtcgcggccttctcccgccgcctcctcattgcccccgacgccgcgcccgacgaagcacgcctccgccccctcctctccctctccctctcccctccgcccaccccgccgtcgccgccgccgccgccaccggaggtcctcaaggtaatccctccgtttttttttttttgccttcattgcgttatctctccgttgctgtattgtggcggagggggtttctgaacttgtgttgttgtgggggtgaaatgcgcggcagaaggattcgaaggcggcgcccctgaccaaggaggaggtcggcagggccacgtggatgctgctccacaccatcgcagcgcaggtgctcgatcttttgcctctgtgagtagcacaacagagcatatgaaagctttttatgtacttacctcgcactagtaagttctgtagcatcaggggtgaatttagagcacatcaacgaaccgtgactcatttgttagattgattgacatacttgtgaataggctgcaagttgttgaaagtacgcagtctggtattgactacggttaactcgtgtttgtatttgtgaattgtctttcagtttcctgacgaaccaaccaggcaacaaagacgcgatgcgagagagctggtaagcattaagcaggataaacagttagtgatatctctctagagtttgggtggaagtatggtaaagtcccttgttttgattttgggggaaacatgaggaccttgctgtcgctacccactcgtaatttgtcacggctaactacaggattgttgaatcttagaaaaggcactttcttgatgtttatcttgggggccttgtattctcctgcaatggatcctgtttaagatatagcttgtatttaatttattctttatgtgccttgaaatattcaagattactttaagactgcacagtaaagttccagcatggtaatctcgtgattttgttgctacaggatgcaggctttgttctaggtgttctcctggttcattccccgctaactttgagcttagacatttttagaaagtgttttgtgcttttggtctagcacagttatgaattaccactacattgcttgacaaataaatgttatactttgcatcgttgaaaatgggtggcagtatgttacgactactgctaaggtttcgtttggaatcgactatctcatttgattgaacctcatttagatatatgggtgtttggctagctgttatttttttttctcaatcatggtgcatacagatgcattatcatcatataaaacatctgagttgaaatttgatggatgagtctaccaaattggataactgagttttacaaattgttccatgaaaacttaaaaaataagcataggccagcacaacaactgcaaattgagcctcaatccatgatgaataatgggaagttcgttcactggttttttactcgctttaacgaagaggaattattttattatttcctgaagaattacatttttctgcatctcattattccttttgcttggttacttggttcatgcaaggtcacatttctgctgctttttatgttcagatggctataatatctagactctatccttgcaaagaatgtgcggaacacttcaaagaagttttaaagtaagaaatgctctccaaccactagcataaattatagtatccattttgatagtttgattcctcgagatgtgtttctgtgtgacaggactatgttttgttgaaatgttggtatgtaatacattatcaacctttatccattcattgttttagggcgagatataacatcatgtaggaactataaattctttgtacttttgcattatgaaactgtgcttctggatcttttatattctaaagctatgcatccacaaactcgtttaaaaactttttagttattttacaccatctgtaccttttgggaatatgatttacagaagctatggtgataatgggatgtgggaattggatgtaacaatccatttataagctcatttctcttatagctatttttcatttacttttatggttataatgtcgtttttgctgtcatagtttattatgttccagttatatccagctgccaatttctgttgttctgtttttttcttgtgctgcccttaaattttcatgtttgtgctcaatgtagcaacaataaactgtctcggcacaatattgaactgacttctttatgttctttttgcttagagcaaatcctgtgcaggcaggatctcaggctgaattctctcagtggttatgctacgtgcacaatgtggtcaatcgaaggtaagtccatattgtcaagtttgaactgttgacttgccattccgaaaggaactttcttaaggtattgcattgttaatttgttcgtatagagttgctgcaaaaataaggtctcaaagccaaaaagaggaaaattaaggcacccttttaccataaagggggtatgtgttttgaagtatagatgttttcattcacaacatcatgattttgctgaatctcatggcctcctgccctcccatgatgagattattcacaatatctgagcgttttgtggttgtcttttgcagccttggaaaacctatatttccttgccagagagtaaatgcacggtggggtaagctggattgtcctgaacgctcttgtgatctagaaggctccaacgacatcatcccgaatagatgacattagatagggatcgtttagaaattctggaacagtgacaaagtttaaaccatcactggatgggcagcatgaagagcatatgggaaaagaattataacgccgtgccggcattcttcctatacccttgtaatactagtgtatcaaatgtgatttcattttgttatttacaagcttcagctctgaagatttttgctgaggttgtcatttttgtggatttatatacttcgttctgatgctttgattcaactccctgtactgtcaatcttgcagtcagatttctgtgtcccctgtatctgaagtttatgagggcctgtttggtacagctccaactcctaaatttaactccaggagttgagtctggagtggagttgtggagttgcataaacctagctctacaactctagttcattttgtgagagagctctacccagctccacttccagttttggtggagctgaaactatttggctgagctccagctccaggaggggtggagctggagctctgcctaacaagccctgagcatcgaaaaacctggacatatgatactcctgcgctactgtacatgttgcacggttggcaattaatgcgaggtgctggcaacagaggaatgcatggtggccattttttctgctgctgctcctcggtgttggcgagaccataaattctgccgtcttatcacatcaatttttttaatcatgtactgacaccttacgatcaatgcaaatgaaatcacatcacgcatggacctttcgttatcttttgaaagaggaagcagcgagaggaggaaggtgcagaagcatctgaagttacggtgttgcaggggagatgaagatgaagcgtcttcctctgttggttttgctactctttgcatttcttggaggaggaaacatgttgctagggatcgctttggatgcaagaagaagcactacgacatcctcaggtacacaaagaaaacgatggctctctctgctctgtctcttgccctctttgtgtttttctcctgtcactcacttggttcgtgtggttcctgtcctcttttactttgtcttgattggttgagtgaaaagtgatagctactgtacctttagctttagcggttatatctgccattggttcttggttcatgtttgatgctggatctctgaaaagattgtgaatgagatgtgatgctattgacattccaacgttcttaggtaccgtaggcgtaggtaagattcattctgcacttcgaatgaatgtttggatttccatcagttgtacttgggtttttgctgtacccacttctgttcgttggctgcctctggttctggtttcttcagtcctttgtatgtaggctcatcgttttagcatttgtttgtttagattatgtggtggcaataaacaatgtactgacaatggatgacatttttgctacattcatagcagatcatcaaacctatggaagcattgagctaaacggcaggagattacaggtgtgcactttcagtttctggcagaaaatggaaaacatactagctgtatatatttcccttgatgttgattttattttcttattataagaaatactaaagttagttggaaagttttctccagttccataatggcaatccagtacttgtacttctacataactcgtgttccttcatctatctttctcaggaaagaagactttcttctactaaccgaaagacaagggccttggaaaatgtcaggatcgatgactaccgacctgttgatccaagtccaagctccaaggcgactatcggggcaggtccaattgagcatggcactcctctccttccttacgtgccgcgaccgaagccgcctcctgatcatcctgcccaatctcctgccacctaggtgaaaactgaaattctcacaatgcactggatagtatctctagaaccactatatatatggccagaatctgctgttttgttctgctattttgttcagatttgctaaagtgccatatgccttaaactttgtttccatgagcatttgagtactgcatgctttgtgctgtgtatcaatttcatgataagaagcaatgtttcactcttctattttactttgctagtgatggattaggtaactgctcatttgctcaaaccttgaggatatatgtttagtgaacttttaggtgtaactgacatcgtcatgttgttgtcactactcacaactgggactgaacttttgtgtcctagtgagcgcagatgtccatttttctgaactttgaacttgtgtttgtacgcctcaatttctgatgtgcgtcatcaccagaaagtagagaggtccttccttaggcgacgactattgtaggtggttgtgcaaacatgtgcatcattctgctctcctatccagtcactgaacagataatactgaaattttattggttaatggagaagttcctggatatttcaatacgtagcataatattaagttatttttcatggtaagattaggactttaggagagttaaaatttcggtcagtatgattagaagtatgactactgtagatttgtctgaacaaaagccactttacccttcagcttataagccgcatttaaatttaaattttattaattttagagttaattttaggaattgtttttcatcgtaatttttttcactgttttcttttaaattgttaacaacatgtatatataagtttcatgcacaaatcatatttttgttgctaataaaccgttattttttagataatggaagctttatttagactcagttagttatatcaagatgatacaaacaaactgagtcatccccggcctctgcataaaatgcacacagccagaaaagaagaaagaaacaactagaacatctcccaagcataaaagtttgacagaaacatatatcttagtggctatcaatccgtaggctaggtcgccacccatgctcctgggtaaaaaaactcctgtgccacctggtccaactgtcgagataccaccgtatatcttagtggctatcaatccgtagactagaccgctacccatgcttctgggtaaaaatctcctgtgccacctggtccaaacatcgagataccactataatagtatcccgcggtcccagttggtggaggatagcccaggtacgtagccaccgggtaactaaggtgataacctgcaaaggagaagacaccattttgttatcaaaaattactccattcctgcttagccaaatggaccaacacagagctgttgcacccatcaaaagcagattcctcatttctttggggacacatgatagccaactcccaaacatatgaccaacattgcgaggaggtttcagattagaagccaaatgaattacagaccacaccaagcgagataagcggcattgaaagaataaatgttggatagttttatccttgtgacagaaacaacatgtcttgctgcctttccaatttcttttagcaaggttgttcttggtgagaattacgccccgacgtaaacaaaccgttatggcttataatcaacataagtgaaacgatgtctgtctttgttccgctatacagacatgtgctgattaaattttgcacgacaacctaccaatctaccatacccttatacgtattttatgacatcgtatttagcacatgttggattcttatattctttgtttggcttagacactacgaatgatgatttaatcagaaaacaaagtgtacacctttctaccgtcttcaggtcttttcattgagaactacttggaaaattgttgcatgtgacaatacaatacctccaagctgcatttcaatatttgatgtaactgcaacaaaacttagtttgtcaagtcaagttttgatttgactccatatattctaattccattgacgaacttgagtagtattctgacgacattgaataaaggaagaaataaagcacggttagcttctttcttaaataatcgtgtcgaaataaagcaagtggttggtaaaaagggggaacaacaagacaggccgtggacaacagttccaatagatcagtcgaaagacttgcaagacctctacctcgcaggaacgagacaagtgttgggtgatgggaagaacaccaaattttggttggcggactggttgccggtggggagcataaagtcgagattccccttgaacttcagccatgtcgagcgctcgggcttgacggtggcacgagggcttctgaaccacaggtgggtacgagacatcaagggggcatcctccaatcgcgcaattggggaatactttcagatttgggacgcggtccagggggtgcaacttcaagatggggaggaagatgagacaatctggaagtgggcaccaaatggataatacactccctgctcggcctacagcatattcttcatgacaaacacggtggcgcgatgtggtactctgatttggcaaacaagagcgccgtcaaaggtgaaattctttatgtggttggcagaaaaagggcgatgcctcacggcggataatctaagtaagcgtggctggccgcaccagcaggtttgccaactttgcttggtgggtgatgaagattttgaacacctatttgtgtcttgcacctacacgaccagggtgtggagaatgatcaagggctggattggggttggctttctgctgccatctgagtcaggcttggacttgggcgaatggtggttagcgatgcggcaaaattttcggaacaactacagggacgccattgacagccttgtgctgcttgtttgttggatggtttagaaggaaagaaatgcgcgtgtgtttcaaaaccagcggcgctcagccggtttcctgtttggttcaatcaaataggaagtggcgatttggaaggaagctggggttttcaaaaatataggagagtagtctcttagtgtaatcttttgcttttgggaagttgctccggtgacaacttccattacttcgacagctttttgttgaagttataactttgtatatttgtatatattcttcaatcttaagtaaatttggttggcctttcttggccggcctggcaaaaaaaaaaaatcgtgtatccagattatcacttgaaatattgtttagaaacaagtgttagcttatacctacctgatgtaatgtttcaatttcttagagctgttagttaggattttcatattgcttttaacttaagctcggacaggcagaacaaactaatagtgatggtttcccttgttgacaatttcctttcaagcttttattcgcactgatataaacacgagacacacgacaaacaatattagttaggagatatatatgtcgctgtttcgtctcagtactgaaatttgtcaagagcaaattaattagaccacgacttgttttgaaacgaactttgcttgtccaaagcatgtctctgttaggctggggaacatcctaaactaaaagcaagcagaacgaaacattctgaacacctgctaggtaggccgctagggcaaatcctgatcttagaaaacaccccgttttgattcacattgcatacaaaagaataaaactattatcatcaacttggataagcttgattgacatgagacctaatcaccaagcatcactggcaacaactttgattaccagtatgatgagccatggcatgtatgttccttctgtctcaagccataataaggccatcagcattctactgagaaatccacaccacaacatgcacccacttctacacaaatctttgtaagcatcatgcttacaattatgcagagaaatctgccactaatttctaatcctttattcatctactaggcagtgaggtttaattacctctccactgacaacctccatctggattaattaaagaactgaaggtaagccttcagtggccatattatgctctgtaggtgacacttgctttcaggctttcagagatgggcctattactacaaactaacaagcatcattagtagacaattgagtcagtgatgatggactaatgccggtgtaattaagactcagcaatcagctgacaccttagctaatgctgaagcttcattagaaagactgaaaaccggtggtggtgtttctttcagcggtacacagattgttcagacttcagaagctgttggcatagtgttttgcccttatcttttggggaaaaaaaactgctgctcatatatgatctatcacctgctacccttcgacagaattcttgaataatctgcttatcagatctgaaaaagaccctcctttcattttttaaaattaattagaggaaggttttcttggttattgacttgctgtaaacatcagggtagcaccctctgaacattctgatacgggcttttgattaacgccgttctgtaactgaagtcaaaatcggcttctgtcaaagcagcccgttatgttttcactttctcatttctgtatcatattagtactgtagatttggatgacatccacacttccaatgtcgcgttcaaattaatttagtgaaaatttatggggctgttcagattgatgtcattttcataatatcattttttggcaaagttgcaaaaaaaatgtttacgtttagtttgttgtcaaatttgataaatacataagaagtcttgccaaaattttagcaatattgccatcttgttaaaattttggtaatgccaaaatttggtaaggtttattttggctacaatctgaacatgcccgtacgataagtgtacgataaaaaatactactgcgtattagtctttttgtgctcaaccaacaagaactgcatcttcaaggctgctaaagtttcataattccgttgtttcaggatagctttataaaggaaagtagtgttccactttgacaaattcctaagtttcaaatgagaatagattatgatacaagtgaaacgctatatggtctactttccttcggccatttgccaagcaactgaaattgatcaatgctttgagtgtttcattccctcgtataagcaaagttgttctgaaaactggaaaactagagatttccttgccgaatgccaataagaaaaatgggcactgaatcaaatggccaaataaattgaagttcaagctttcgaaacgttagtgcgatgttatcttcatatgaagaatcctttgaattaagcatggaatatgaactaacaccatgaagcaagcaatgagactcttttattcacatacaaaaatattctttccagggaatgcacacacaaaaaagaatttcagaacaatccattagtcacgattgcaatccaaatgttggctaagcataatcatgaatctttatgactgatggacgtcctctagtgataacagccaggaccgctccgtttatcttatttttcgtaattatttctgactcataaaaactggcacgtgaaagactactttgaaaaaaacttctaatgtatatccacagctcttcatgtatatacaaaatctcgaacataccctcataccttacatcagttacgattcattgtattttctatagtactactataaaagacgatagtggtgatggtaactttgccaccgactcactgccactacctttacacgttttataaatcaatccctaatttgttctgatattatgcaacagtctaatatttatttgattcaagtgaataacatatattgaaataagcacatgcattttaccttagtaaaatacaggtattttgttagttttcagaaaatcattgccaattgcatatcctcccagcaatgcactcagtttgattcaaagcagtgtcaagttcagctggatgctgcatggaagtgtgagcaaacaagtccagttctgggcacaagcttagctgttccatacttccattccaaattgagttgcgccttccttatccgaaagtcacgagcaatcgtcctagtcacgccagtgttgatgcaaaggcatcataaacaattatgccagccatgcccaggttagcaagggttttgagtatgattacgcatacatgcatcccagtatcccacagatcttttcagcagtagtcagtgttaagtcatgtaaagataagtagcagctcttgatgcttcttttcctagatgcttcttctgattgagtgttaaaacttatgagctataatgtcaagccacttctaattgttgggtgatacgcaagacatcaaacttaaatgcttctctctacgtacatgtatttaaatacagctgaatactgcagtgtaccagttgccgtagtaagcagcatctaagtacagtacagtacttggtactaatacatgagttgagtaaaagcctcaaagcagttgccgtaagggtccatgaactattcatctttcttcagtgttcttcaatgttagatattcagagtaaccaaagtcataggcagtaataacatttcagtacttcccagagactaatcactgcagcaagaaccctgcaataatctgcaaatcttgatgagctagtcagtgatcagtacttacaaaggtccagctcttctaaaaaagatgctgccactttactgtgtggatgagcagaagtcagataccagtcacacctttgtacactagtgcacatgcacaagcacatggccaaatggtaatgtgataagagttttttcttcagtggctaatactgagaaaattatgttcatgagaaagtagatacactgttccaacctgtaaattaaagaagagaccgtgtgaccccaggattgaataaaagagaataaaaagggagcaagaacctccttagaagcaaaggaggagaggacagggaaaggtatttagagagggaagggaactgtatgagggggctcacttagcttaatctgcaaataatagctgcttttaagggcactaaagctgcttcttgctgggttttggaggctcttttcttaagagatcaattgagcagctggtctgggaggctgcagtttcagtcacctgctaagcttctcccaacctgatcatctgtgggaactctgcaatctgcattgccaactcaggtactactgctaaaaccttctcaacatttcaaagttcagatttgcttttatatcgcagcttttgtgtttgattcgttctcttcggaatcttgagatgccctctgggctctgatcttcttttttcaatgacatttggcattgcctgttgttgttcctacttctttaatgcattgcatttaaaccgcatcctgtctgcgtgacaaaattgttcactgtttcatgctaagcttgatgacgagttagccaataagattcccaatagatgctctgatcattcgaccagtttagaatgacttccaagttgaggttttgattagtattcagaatgttcagctgcatttccgtattgcagcagaattcagagagggatcaaattaaagttcagactaaagaattttcacttatcaacagcaaagttcattcaaaaagtactaaactactaataaccaataaatcttctctttgggggaaaaaaacaacataatcattcatgcccaaaatagcttcctcagaaccactcactaaccaactcgcttacatgaaatctacacgtaataatcacaagtcccagtgcttatatactcccagcagctggtgtcctggcgctttcagaacgaggccgatcgatcggcgtgtcagcagcaggaacaccgtgatgtgtcgctcgcaatctcacatgcaaaaatacggcgagaagcaaacggctacgtgcaagaggctaaataagagagaacgcgcgaagcgtccagcgacgctcactcacgctcccaaatcgttgccgcatccctgtcgccgaggagcgtacatacgtagttttcatgtcgtcatgtatgtattgtatgctgctaatcgccatctgaatagggaccttttgttttcttttctgaaaccggtattagcttctccaagtactgaaaaaaaaagtgttgcgatatctgggggttttttgcgttgaagttgcacctcctgatcagcagaaattctcttgcagatagtcatctgtaacttaaaatattcttttaagataatggctctaacttaaaatgtagagtgatttgttagttcttaaggaggtatatca

SEQ ID NO: 8095 - DNA, 40476 bp, Oryza sativa
attccagcctctgagatagcatcatagcagtatatactctctatacctaaggactacggctttcctgggggtgtgctatgcccgtaaggccttaaatttgttgatgcttgacatccatagatcgagttgaactaatatttgtctattttgttagtacttcttaaaaaaaaagagagtatattttatggttactcctcgttctagagactgaagtctgaactctagacaaagcattttggcttaacaaatttgcctaatgtgaaaccttctttaaaactctgctatgtgttaggtttggtgcgaaacaggctatccaagattagtcagaagaccaggtgacatagctctgacggggcaagttagccagcggtgtgcctgttacaaggaggaggagttggacaaggctggcctggttgtgtacgaagggtgtgattatttgtctacatcttgcaaagtgagttaggatatgtacatctccttctcttgcccatgtagttgtctacggctgcccactgcttatctgcaaggctgctaatggtaatcatacacgaaaagccccagtatgggcagaatacatcatgatcatcgattttgcaagtagtggatcgatctatgtctgaatttctggatatacagagcaatcgttttgcttctgaattgaagatacgcaattgattggaagactactcaccatcaaaccatatgatggcaatacagtactgccatgctttatacatgtagcgctgcgaaatgcagaggccgcccatgatattcatagccgtgggggcctggggggccttggctatcgattgatcaacgctagcggctagcttgacgatgcagtcaaggaggccttggctatcgattgatctgctgtttggtcttcatgatccttgcacctcgagttcttgagaggactgctcaggagttattaaagtctgaagaagtatcccacgacagatccagatttggctcacgtgagcaagaaatcaactaaccacaatgcccgcaagtcctaccgaattctcatcttgaacgatcgtgttgaatcaaatacgggatttataattgatcatgttgagtagaactacatcttttgttttgcatctccttacttatttcccaagcaagtctttggtagggctccaatttctaaatttgaagcattctgaacccaactctatctctttagtatatttcgttcagttcgcttcactctcttttcgaatgaaattgaaactgtttggctagcatttttaactccagaaaagtttagagttgaagttaaagctacgcccaacaaacccactccctccgtcctataatataagggattttgagtttttttttcattgtttaaccactcgtcttattcaaaaaatttagaattattatttaattttgtgacttactttattatctaaagtattttaagcacaactttttgttttttatatttacataaattttttaaataagacgagtgatcaaacaatataaacaaaaactcaaaatccattatattttggaacggagggagtagaatttagagtcctggcgcacaagcctttcttcttccattaccaccaagcacctctccctctctctcgttattgcaggtggtggcaaccagtactaccaactcgcctaccgaaattattcggctgggtgtgcatcaacccatcgtcccatccgcgcttttctccgagcgaagcacgcatgatgcgtcacgccaccatgggcagaacccgcggaagcgaagcgtagctagcatatggcagcgcgcctcctctgctccgcgatcatctcacccgccaccgctttcctccgtttcctcagatcacacacaccacgtcgcaggcccctgtttttttgtgtgcgcgcaagggccatgatgcccgatgccgatgcctcgcttgccgccgcgaaaggcgcgacgcgatgtgatgtgatgatccctcgcgtcgcgtccatccagcgtccacagggagagctgagaactcccatcccgacgctcctctggtcggtacggcccccgccccccggctctgctctcgccgagacagcaaatcagagcaatttggcattgggctgtgcctgtcacactgccacgactgggctgcatctgcttgtgtgtgtctgtggtgtgcatgattctcccgtgcaagaaaacatatggatccactcagggttgttgccaaactttcaatgcgcactagaagtactcccccggtcgtcagattcggatacctgagcatgatgcgattcggatccacccagtggaaagagaaagaaaaggcaaggcgccgtgttggcattattcgtcctctgcgatccggctcccgtcgaaaaatcaaccaaactctcgatggtaaggaggaaaagtagtttctgaggcttccgaactctggtgttgatgacggttggcgcgaaagttttgatcgggcaaccgaaagttttgatatatgaacacggatcatctgcagtattgcatctacaatagaagtggttgatagtatcgcagacaatctccactaatgatatacctagaaccaataaaaaaccattattgacgagttatgccttgtctacggtatttgtagagtatggagatcgttagtatcaggacatacgcgagattacggtaaaaatagatgggtgacaaggatttttatacaagtttggacaccccccctaactagcaggtaatagttgtactcctattggccaaagccaattgcagcaaaagagacttcactatttgtctaactatttgaatctatttgtatcgaactatcatccgatccaattgtacaacaagcttacaactaatcgtccacagccccatcaacatcaacgatcaaaagcgttcatgctaagtactagcatcggatcctcccgttgattctgtaccaaaccatcgactatcggctatcggctaacacatgcttttgacacactcgagactcgagcttgcaattgtcatcaacgttcgtgtctccaactctccaacagccgattgttccaccgtgtcagctagtcgttgctacatcgacatattgtcagttacagaatcaaactgactggcacgcctgcacctcatcaagatctataatccagcactaaatcttagtcgatctccggggcctcaatgctggcatgattgacacacatctagtacgtcaagcggaaaattttgcgtcaacgcattgaagtaacaaaaaccattgagaaaataggtgaaatgcgcaagggcataaatgatattatttttctttagttagcaccgctatatatgttatcttcacggaataaggttacatctaatcttacctgaccttagtttatttggtgtaaaagttgattattttggaacatgtgagatgtttcttgatctaagagcaggtacagtagcatgttataagtcagctataaacatattttaaagtgataaagaaagagagagaatagcagcggtttacagatttgtagtcagctgtagtacggactccacgacgtaatgtgtgtatgataggtaggaccagatattaatagtatagtaagtaactattgtatgaattggctattatattagctatacataatatgaagctagtagttggccgtactattaaacttgctctgatgttttgatgttccttatcaaactcacaagtgccaaaatttgatgacatgtccaaagaagagccaggatcttgtcaaacacgcatgattgacaccacggagatccagcacgtccgggctaacgtcggtctccagcacgtactagtagtagtcctccactagcttcgcagcagcagcgacgacgtcatgggcacgccctggacggcaaccaacaggagaggagcctccgcgcggtggaccgccacgaaaacacaccgtaattcctcctcacctcctctgcatgcgtgcgagtggacggacggacggagagctcgtttcacccgcctacggctacgtacgggaaaagggggagggaaaaagcagtggtggaatatgtgtgtgcggcctggtgaaaatgccctgccttcgtgaagcgcaacatcatcataggttgtcgcgggcagagcgagcaagggcacgcatcaaaagactggcacccgagggctatcatgaggttaccgcccacgcgctcacgctacgcagtaaatccccaccctagctacggacgtaacggacccccccactgccatcatccgccgtccatccctctctacgacggctaccactgtaccaggctaccacgagcactggcacggtagacggtagaagtagtagtagccgtgtaggaagcgctagctgttgaacctgaaaccccggccaatttcgtgtgttacccaaagaaaatgttacttcctacctctcaaaagatcaatacaataacaagactataaaccagctctaaacatattttaaaaagataaaaaaaaaagagaaaagtagcgggccatagatctgtagccagctgcaacacggactccaaaacataacgtgtgtgtgataggtgagaccagatattaataatatagtaagtaactattatatgaattggctattactcctacattggctctagatgatttggagttaatagttggctatactattagacttgctcttatgtagcaatttaggatgtgttcagaacccagggtccctaacccctttctatcgtattctgcacgcacgcttttcaaacggctaaatagttcattttttgcaaaaaaaaattatatacgaaagttgcttaaaaaatcatattgatccattttttaaaaaaaattttagctaatacttaattaatcgcgcgctaatagaccgctccgttttccgcgcacactgtttcggatgggaacgaggtggtgcgaacacagccttagaatgggatgagacccaacctaaaactatgaatctggatttttatgtctcatgtttaaattcgtagtcggttgctacattatgggacgaagggagtagcgtgttagacagagcgtgacatgatccaatgtaatactctctccgtcccataaaaatccaacttattatcagatgcgacatataaccaagatatgtcacatctggttctaatttgttttttacaggacaaagagagtaatgtattacagcgctcttctgttccataaaaaagttaacagtaggtattgaatgtgacacatatgcagattcattattatattagcatgtgtcacatttaattttagggttttttttttacttgagggagtatacccacagcttcaccgcgatgtacgccccgccagctcacggcatcgtttcgcgcccaaaggccaaagcgcgcggccgtccaagccgcgggtggcgcacggcacgggtcgtcgtcttctcgtcgctggcgacgcgcgtgcggaggcgagacggcggccgctaggcggctcggcgacggcggataaagaataggggaagagagggcgagggcggcggggcgcatgggtagcaaaactcgaaaaggcgggatagctttatcgatcggaggcgcagattattagccatgcgagcccctggttttatgcgatcgatctgggaccagaggaccagcttacgtgtgtaagcttgtactgctacgtacttactaccgttttctaataacacagcttccttttccccacttgttcaattatgtgtgtcaaatctcttcatccaaaataacttaacctcaaatcctaccataggttatatggagagagtagaaagtaggagtctggagcgtcccggtcaaatcgggtccccgtgcaaaatattaaaataggccctagtagcctagtaaattttttatagtaaaattaaaaatgggcgtgacgattaaccgatcatcagcgatgaagcagaagcggaggccggagagaactggggagaggagacgaagcggctgcggcatcaggacttcggcgatacgagacgacgcagactcttggacgagagtacgatggaagatggatcgattcaccttatgcagcgttttgggccttgtgtttgctactatttggactgcaaattaataaaattaaagcctctaatattattatatatagggcatacttaatattttaggggtccttaaaatttgggggccctattcggtcgcacggcccgcacgggccccctggacgcccctgtaggagtatatgtctaagcctatcccaaattatcatattgagctcaacactaagagcatgtttggaggggtttctggcaactgtaacttctcctacaatcagaaacttcccaaacagttcaactttttgtttaatttttgagaaactgtagctgtagattcataaaatgaactagaagctaaaaacacagctttttttaattctcagaatctactccatccttctaaaaatcttagacctatttcattatttggtttttcaaaaaatctaagtcttatttgtagttactatgtgctaaattaaattgttgatcaaaaatcaagaagtcattcgtacttattggttgcatgtccattatttttgccacatgatgtatgagttaattgctttttggtattgatgaaaaagaaataggtctaagatttatataaggagggagtacttcctttgtcccacaaaaaacaaatgaatgtgacatattaagactgtccagattcattatactagaatttgttacatccagttttaaatttgttttctatatgaccaagggagtaactacctagctgctgcttatcttaatcttgagcttcctcaaacagccagcctcttaacttgagttcattttgatagttcagctagaggagttggcggctttaaaaaaaaaacaaatcattagcacataattaattagattagatattgacaattataacattacgaatatatttcacttttcttacaaaactatataaactatcttttaatttataaagcataccgtttagctgttaggaaaatatgctaatagaaaacgagaaaattaccgtgacttcctctttccaactcagccttaggcccaagaccggtccaattcgagcagaaccgaccgggttcaggccgggtttccgtcagttacccggcccaagcccgaagaggacgaggacgagcgcacgcacgcacggacacggaggctgcagctggaaagacggacaggtaggcccaccccatcaccccccatactgtgccataaacattacgctgcgcgcgtacctaaaaaagcagcagagaggaagaagaaaaaaagagtttgggctgaaaaaggcatcgagagccacgcaccggcagcacgtcgccggccatccgtcctactaccaccagcagcaacagcagcagcagaggcaggctggaccgcggcgagagagctttctattcccctctcgaaatcggcagcgaaagacgacgtcgtcctcgtcccacccgcgcccgcataaacgctacagtggtggtggcaccctgcaccgcccaacgaacgccaaaagcaggctgctcatttcaaaggcggaggaggaggaggagaggagacaggaaagccttccatccaaccatcgctgcccccttgccccttcttggcctcttgcggtgagcctctagcttactcctcctcccaatctctctctctctctctctctctctctctctctctatctctctctctatatctctttcttgttctagcctggtcgactcgtcctacctcactgcagcaacactactggcattgcgagggtggcgtggtgagctttgtgtgggcactcgaggaggcacgctggcccggcttcctgactcctgggtgctgcggccattggaggaggacggagtacaccaccctgcaaggccactgaggttaattgccacaccgtcttttctcacaagcatgcacgcttgacaaagctgaagtgagcgataaagagagagagagacatgcacatgtgcaagcacacggcggatggatggatggatgcgcacacttgcgtggctgcatccgggaggaggaggaggctggaggcgccactcgtcttcctgaccagttcttgggttgagattgaggaggaagagtagaggagaggggtgggtctcactgttcctctttccccggtcatggctgatgctgccctttagctttgcctttgttcgtgtgcgccttgttgcgtaccctgttttgttgccttccccgtgttagctataaaatctcgatgcctcctcctcccacatgcctcctctccctcatggctgtcacattgtggccgcgcttgctgtgtgctcttcgtttttaattctccccctctttcttttcttttcttttttaaatttctctagatcatcacatctcaccgtatatactttctattacgcatcctctcgtgtcatcgcgatctcaggctccggcacaaaaactgtgagatcttggcacattggtagtaaaagattccccacacaagcacgcacgcacggagccagagcttgagagagagcaagtggccgttcttggtctctccattgcctcccacaccttgcattataaaagatgctcggtgtctcctgctccaatgcgtgataaagaaaaaaatatatactgacccttgtgttttgccgttgttgttgctgcagagatttgtagtagagagatcacctgcttggggaacagtgttggtggagaggaatgtggactcgttgtttatgagagagcggtgctgcattggacacaagatcttgcgtgattcttggttaattaaaacaaagttgggcgaggtggaagaagggaattatactaatcgcctctcagatcagcaaggacaggcagcaattaacaggtagcagcaggaggaggtggggttgtgtcagctttgtgctttgtgggtgttgtccctcctggctccttgcctccctctctctctctctctctctcttcatataggagtagtttacttccattgaggtgcttgtgctcctcaccattcttgcctcattgcctacgatagcagcagcatcagcccgcataagtaggttcaacttggagtgtgcttgaagcagcagtttgagtgctgtgctgctgttgctgttactggcttgctgctagccgcatcagggcctgctactatctcgtagtctgttcttgttttccgttgtacgaacgatctcccgggcacgttgcaatattcggtcgccgtctcagccgcagccaccagcagggtgcagcaagttgttctgctccttgtacttgtttgctcctgggtactagttgctgttcatcttgtgtagataaatatgggctagtagtggagttgttgcattggttgcagcgttgttgttgtgttagtggtggtggtggtggtttgtgtgtttgggcgtcgatcaggagagataagatttaagatcagcgcgtgtgcgtctgttctttgcctgtttcaagatgaaattcatgaagcttggatcgaacccggatacttttcaggatgatggcaatgaagtcaggtgattgttcgtcttgtcttgttcagttcctttgccttgttcttgtacatgatcttaacttgtcaactgttctcttttttggggggtttacctggtagtagttttcatcagttcttactcttctctgagtgtactactgttgaacgtctgaatatgtccaagaaatgtgtaatacatcctgtttggtatgatcttgaataacttacaaaatgcagatgttaaataacagagaaatattctcctgtttggtttagtactgtaattatagaaactatatttctcgatcccattatataggcccatttattccaaatagcctagatgctagatgcacaaaatctactgttcatttaggcacaggctgcttgttcttttctcgtttcctgacttatcacttacgagaactgttccatctttgcagcattgtggcaactgaattagtgagcgatgtcactgttcgcatagggactacaaagttttaccttcacaaggtaaaaatgtccttcctttccattcatgcagcttttttttttcagagaaatgccttcataaaacttattgcaatagtaatttcttgtggttcagaagataatggcctcatgtaaggtttgatatttgcttgctggcatattctcttctctaaatgctaaaccacttataactagagcaaatgcttccattttttcttcttttgtggtttatctgtttattgaaaccttaagtaatattttaactttatgctacttttttttccttgttctttcaatgtttaatatatacttttctgagcgatgtcactgttataagtttatgctactttaactttatgcttccattttccacccgtgcagttcccacttctgtccaagtgcgctcgctttcagaagatgatcccaactactggtgatgaaaacattgagattcacatccatgatattcctggtggcgccaaggcttttgagatctgtgccaagttttgttatggtatgattgtcacgctcaatgcctacaatgtcattgcagcccgctgcgccgcagagtacttggagatgcatgaaactgtcgacaagggtaatctcatctacaagattgaggtcttcctcagctcaagcattttccggagttggaaggactctatcattgttcttggtactacaaaggctcacttgccttggtcagaggatcttaagctggttagccactgcatcgactccattgcttcgaaagcctccactgacacctccaaggttgagtggtcatattcatacaatcgcaagaagctcccaactgagaatggccttgatttggaatggaatggagtcaagaagcagcagtttgtgccgcatgattggtgggtcgaggatctcgcagatctcgacattgattcatacaagcaagtcataacagcaatcaagaccaagggtatggtgcccaaggatgtgattggggaggcaatcaaggcttacacatacaagaagctcccttccttaagtaaggtttcaatggtccatggcgacgcaaaagttcgggccatgctagttaccatcacatgcttgttgccatcagagaaaggatcagtttcatgcagcttcctcttaaagctactgaaagcaacaaatttgctaaaatgtggagagctctgcaggaaagagcttatgaagcgtattggacggcaactagatgaagcgtccgtgtcggatcttctgattcctacagtggatggggagaccacagtttatgacattgacatgatactcagtatagtggaagaatttgtcaggcaagacagtaagaatgctcagaaacataatggtggtgaagtggacagtcatgtccaagcacctagtgcatccatgatcaaagtggctaaagtggttgatgggtatcttgctgaggttgcaaaagatccaaatacacccattttgaagttcattcatctagccgagacaatgtcgataaattcaaggccagttcatgatgggctataccgcgccatcgacatgtatctgaaggtactcttgcaaatttcaacttccaatcaaaaatgcactactcataggacatgttcacaagcacactgaatatctagcacatagtcctaatgcatttcagctcgtgacatttttgcttcaactcacgaatttattcatatgcattgctcatataaattcttctgtatttacggttgtacaaaatttgtttttaagtataacatctgtttatttttcttaaatgagcaggagcacccaagcttgggaaagaatgagaagaagaagctgtgcagcctcatggactgcaagaaactctcaccggacgcgtgtgctcacgcggtgcagaacgagcggctgccactgaggaccgtggtgcaggtgctgtaccacgagcagacgagggcttctgcggcggtcaccatccgagccgacagcatctgcgtcggctcgtacgagagctcgaggtcaggcgccaccaccaacacggaggacgagtgggacggcgtcatggtcgtggaagacctcagcctgtccaccaagaccaccaccaagctagacggcgcagccaatagccattgcagcaacggcaaggcgaagaaaggcggcgcgtcgacgccgaagaaggcggctcaccggaggacgacgacggtgccaaccggcaaagggcagtccggtgagcgcagcagctcggactcgtcggacagtgcgatcttgcagaagctggagcttcccaagaggaccccctccaggagcacgaagccggctgctgtgtagcgttagcttcctgcatgaattctcagtggattcgtaaggatcgttaggttcttagctgctgcttcttttctttctttcttcatgaatgttgcatagaagcaagaactaatggtttacacgtctgttggtagggatgttataatgtgaggtctgcttttaggtgatcttgttagtagcattgtaggcttgccatgaaacctatgaaaatgttggttgctactttgaggttttatgccatactcagaagttagtagctgttatgaaaaaagtttagaactttgttagaacttggaagcataattcatctgctgctagcctgtttatactggtatagtggtatgatctcagttcagatcgtgcaaagtcttgtgtaatttgtaattagacaatgctgtcctgagccaagaataacagagctgcggaccaaatagggatatcttgttgaaaggtagccagtgatgttcagtgttgtcgcaactgggctcaataggcattttgcagccattgttacctgagcgacttgggcctttttagtatttggattatacctctaaaaaagaagtatttggattgtagtatagtacgtcatactagtatcagctatgtcaagcgcatatcgttgtagagagttaaaattagtgctccttcgttaaaaaaaaaagaaacagtactctgaatatgtacacacttttgtaagaagcataatgtataatcctgtgaacgcatatgcaggaaaggaactatttttaaagtgtgtcttattgaacatagacaattacatcaagatgatagtataactatacagagaatatttttagcctatgtattgcaggaaatcagctaatgttttttatacttatcaaggaatctcacgcacgacaaactgctcaagaaaagacctgaagtcgatgatcatcctgatcgcctaggaattatgatgtgaatggaatgccatattttttaatttttttaatacatcttctctttttttaaagaaaattcataaccattcgagtgaatagttttccagaagttagaggctagtagcaaacaattagtgcaaattaaattatctctatccctaatataccatttagcattcaatagtagatttttttaagataatagaatagaatatctcggctttgcagcaaccaatagtagatactcactagtttgagaattaacgtggatactgtaccccccaacacagtaaaagatcatatccattgaattgcttttctgatccatgtaggaccggctaacagatttgactcggaccatgatccataggctcacctcgtccttcttgcttgcaaatcacttcatcgtgcatgcaaatcacgttgtctggcttgcacttgcagatcacctgctgggacccgttgacgcttctcgtttcgcatcgcatgtcttcctggaattacgactgcacgttagaactgcatgtatttttaaccattcaattttatgatcaatggtccagatcaatcactacagtgttcactatatagtactctaaacaatattttatggtacattacttttgctacagtagacaagctaatccttaccgtcagatttagatccaaagtagcagctacgactgtttaagttgcagtccatactactactcgtcttcctggtccgtccatcacctaacctgttcaaatggctgttccaaatgggtaggactggtacacatacggtttcccttctctttcaatggtggaatatatgtccggtcggtggctcggtgcacatcatcacggaggtgaaattaattcattctacaaataggtcaatgacacttgcacctaggacctatgtgtaaatttttaattacaagtatgttctttctattacagctaggtcatttttgaaagaaaaataaataggccatcgtttatgatattggtgtcgccgtccttcacattaatgatttagcttttattggggttagagggatggaaccgcagtaccaataatgttggtgccgtgaaaaaaattatttatagaataaaatttttagaggtttacttgtagaatatgttttttaaaaggattgaaaaatccagacacacccctgacggctgatttgaccagctacgcgtgcaaaggatccatgcccaagaaatcagtactacagtaggtcaaaggaggtcaaaggagtgtgatatgcctgcaacgactgactgacacaacccataccctgcacaatcatagtaccgcatctcatcacatcgaaagctccgccacaatccaggtcctgttcagaacaacaggaggttaaagaattgtgcctccgttcaagttccgtaccatcaaccatcacgtactccgtcgaaatcgtgtcgtgccaggcgaagaagcacaaacgagctactacctccgtccaaaaatgtaatatttctagcacaatactttgtcttaaaataaagctatttttctacctaccttctcctctcaaccaatcacaactattctttttcacctactttctcttttcaaccaatcacacaccttcttcaattattctcacatactttcttaatactcgtggcaatcttaaaaatacttacattttagaacagacgaagtatcaatcgatctgaactttgcttgtcgtcggattatccagggcccgtccttctcatcggcggcgattttgtctactccttgtcgaccggcgagagcatggcgagacgacgtgcccccaaatctgcaatgaccaatgagctttcggtttatctcaccctggcatgcatgatgcatccatacatgcctcggtcttgggctcttggccatttggatcaactcaccaacagccaaatgctgaaactacgacagttcaagtaatagcagatgctagctgctggcctgctgcctagtactccctttatctcataaaaaactaatataatactgatgtgacacattttaatagtataaatttagatatatctttatctagatttatagatttattgtaatagaatgtgtcacatttagttctagattttttttttatgatagagtagactgaacggacatatggtcatataccctgtgaaaatgcaggggtcgaatggtgcaaagcgtaggctggctgcatgagctttgttgattcttccttatccactcaatctgggtacacacgtacttaacttagccacctaagggcagccacaatgtggccataagaagaggccataaggttttatagtgaccatatacattgtgaaacaaagccataagacattaaatgtaaaagaaaaatttaagcttatggcttgaccacaagcaataaaataatagggtaaaatgaatgtgaggatgaaaaattggcatggctgataaaagaagtactagaatagtacattgtgggatccatcttaaagtttactcttatttcagacattgtagtaataaccataagaatagtgggacccaccttaatactactcatggtaataaacattggagatacctatagtgcaacacctaatatagtgcaacacccaatttgtgtgtgtccaatgagtaagtaccaatgtgattaagggagtagtagtaaagcgtaacacaaacatcaattcgtgcgtgcaatcagtgatgccaacatgatcagattgcaagtcaacgaggttggataatctgctttgtctgctgagaaatgtaagagtagtactgatatgaagaaatgagctcattttaatcctgagattcttaacaggactatttcgttgcacctgtcatcattgtcgctcgatctgatatgtagccgaatgcaacggacaaattgaattattataccacgagaattccaatcattgtgcttcatgtactacagttattaccagtaccccgatcgattggctttccctgttacagtacgtcgctgcaaagcgacgacgagtcgacgacattattcattgcaccatttgaaaaaaaaaattcgcctctgcgtaaacgaagcagctagcggtgccggtgcagagccactgcacatatgcaattctgcatgagtcgaacactactagctcacatggaatcgtacaacacgcggcactgcacagtggtctcgcacagtacacaccgagcgaacgaccatattgcctgcctgccggtcaaaagagcggaacagaagcttggattggaatcgtcagaacgaaaaccccatcatcagacatcagcaaatgcatcacgcacgcatgcatcgctgatgctggtcattcgaccattgttgcacagtgcagaaactcgaacggcatggcgaacatgagccatcagcatgtactctacagtacaggataatcagttgatcacttgttctagcaacatcagtaatttggctgtatttttatgattattaatgttactgtgtactgtgtaaaggtgaagaagatgttagtgcctgattttctactattgacaccgcaacattttggcaaaatggcaagttagatgttttagtaaagtgcttgatttgatacgaaggtttggtaaggttatagagccccaccacacaatctctgcatttccatgttagagctcgggcgggccacgtattctgtcagccgtcacggcacaaatcattacggatagcagcatcaacaagataagagctctcgatattgctatcgattccggcttttttccgattataattagggcagtgtatcctacaaaaactcgattgcctcccaaaacgaaccgtgtaaaaggctcacctaaaccaaaggagaaaaataccgagatgcagaagagaaaaaagaaaagggtttagatcgtacggtctagctacactcttgactctggtcgccgctgatttcttttacttacacttctctggggtcaacgaagatggagaggccaggaggtgacctggcccaatcccagccgtccgattctccgacgcggcccagccgcttcatgcaccacaggtcctcggtgcacgagaggcggcgccagtgcgggatgcggcggcggagcgggtcgcaggccgccacctcgacggccacggcggccgccctgccgcgcgccatgttgacgaacgtcgcgaacagcgcctcggcggccaccgcggcgtcggggccgtcgccgccgaggccgtacacgaaccacccggagaacgggcggaagaagtccggcacggacgggacgcgcatccacctcgccgcgcggtccagcgcgcgcgtcgcggccgccgcggcgcggcgaaggcgcgacgcgccgcgcagctcgaggcggaacacgcccccgcagtcccagaggctcgccagcgcccacgacgccggcggggacgccaggaagcgctcggccccgcgccactcgccgtggcgccacctcccgtcgtcgtcgatgacggcgaggaacgtgccgatggagagctggttccccagcacggcgccgatgtcggcggggaagaactcgacgtgcgcgaacctgccgtcgtacagccgctcggcgtcgcgggcgccgaggcggaacacggccgcgcggcgcgggacgcggcggcggtgcgcgtgcacggggtgcaccagcagcgacggcgtccggaacttggagtagccgcaccgcaccgtgaacagccgcagcgacgcctcgttggacttgtcggtggccatgtacgcgtactcggctcccatccgctcgaaccacgcttccatccgccgcaccatccgcagcgccaaccccatcctcctgcacacacagccaggaaaaccccccgagcgaatcacgcgccatttccctttcccgaaacgatacgccacgccacgcgacgccgcgcctccgcggacacaagaaacgaccaagtccgctgctgttacctgtggctcggcgcgacgcggagtccgagaatgtagccgacgctggcgacggcgggggcgcccgggcagctcttgccggtggcgaccgacttcacggtgcctctgatgatgccgacgatgatccgtccgccggtggcgcccgacgtcgtctcagctacctttccatcccaagacacaacacacactacaaaatgaaaacacaaccaccaaaacagcgtacgtactgacacgatatgatcgtagtacgtaccaacatgaggtagtcaggggagtggcgaatgcgggcgacggggtcgccgagcaggtcggcgtggagcgacatgccgccggtcgggccgacgtcgcactcccggtcgacggcctccgtgccggcgcggtctctcgatgggtcgtactcccggatgatgatcaccaccccttcctcctcctcttcatctctcatcatggcatatatccgatcgatcgatcgatcgatcaatctcgcaaccgtatcgatctctctctctctctctctctctctctcgactctgctgctctgcataggaatgtagcatatatatatacaggcacccggctgcagtggggttccggccttctattttctcgcagggataacaataaaactgtgagatttttttaaaaagttgtaacgcacggacgtaatcacgcagatatcgcgcgaatgcacttccttctctgagccctctctctctctcccctgaatcatgtgggcgcggttgacgggagagggaaagtgcgcgcatatacgcgcgggcgcatatgatcggccatgtatgcaagttgcagcaacatcgatcgatcgatcaattcattcaattggcaagaagcatatgaagagcagaggtggcagcagaaaaaggagaggccgagatcgatccaaccgttaattcggcggccgtttggctttgtgattccttctcaagattttatctgcgtggcgttattcagctgaattttatccatgtcgatatcgcttatgttctccgttgctgtaatagtgttgcctatgatcttgccaaaataggcgctagttgggacccgggtcaatccatcgtttggatcgactccttccagaatttgtaaatgcctttgtggttcgtgatatcactaaacctgctgggtgaataaaaaggcatcgatgaagttaaaaaaaaaagattttatctgcgtggcgttatccatccacgactccatcaaaaaaacagttattattggttcaatttaattatgggttgtgcgatgaattaacttgcgtcggctgggagtggagcgtatgattggagtggtggggagaaattaactgcgtgcatgcatgcaccacagcaccactggatcttttcttttgctgtggattgaggcttaaaaatcctgccacgatgaagctcttttgcttagcttttaattaccctgttaacatgattgggtttgtgaatccacctgtgaaaaagatcgataattgtatgcggtgatcagacaaaaggtcggccactggtggcgttacaaagatttgcaacactaaccgtggtcggttttaccatgacgtttccgttgcagagggaatggatttccgagtcagtcaaaaatcaaaagcggcagtgcgatctctctcctaggggagatagggcccacccaggcgcccaactctccaatagttaagcttatccggcaaagttagaatacagtaacagcattttagcaaactgttcgagctagcgttcttctcaacttgtggatcgatccatccattttgcatgggattaatctatccttttctgcgtcaatttgtgccgatacaaacacggttattagttaggcgatacaacttgtcggatgaagggagccaagtggggaaacatttccctatttttctgttctatcctaaatggagcgtgaatttctcaatcgaaaggattatggacagtataaagccacgcctaattctaattggatagtttgatccctgaccactgcacaattttctaagagagctcgaggagatgccccggatacatctctcacactcatgccaaatgcacatgcgtgccttgtgctgtgttgtgcaatgcacccggccctatatgcgtttcagatcgagagttatcgagagaccaaaagcttcgcggaacagggggcgagctaccatgacattttgccctaaacctgcacgtattcattcgcacttatctagcattctacaccttaacaaagtctaatatcattgatctgaaccttagcaacagaatgcaattgatattccctgcagtactgctcactgacatgtggacctaagaggctgtgggatccatatatcaatgagcagtactgcagacgatctgcatcccacagactgatgcagtaactagggcactaggtgtacaagctaatatatatgcacaaatctttcggtgacacagaaacaccggagctccaatgaggccatgaccgaaaagtagtaaagcagtagtgtagaaatcttgctcaaataattccctgaaaagcgatcctgtctgtaagtggatgagcatagatgtgactagatcgatcaccagaaatgcaccgttgaacagtagtcgaaaacaaaccgcatcgtacgtcctccttgtcacgacgacatgcctacggcctctactgttcgataggagtatatcgcgccctccctagctacgggctaccactcgcgaaaggacatgtgaggcgagcgaggcaagcgccgcgcatgcacgaatctgatgccgacgtacgcgcgctcgggcgctcgctcggctccgcgccacgggagtacgggacacccggccccccagcagttaacggcaacagcatccgcccccgcgaccgcgtatccgcgccgaaaacgacgtgccgccgcgcgctcggtgatctctcgtcgtttcctggttgggcgcccagccgggcggcgcgtgtcatcggcggctcatgatcacaaggcggggcgtgtacgcgtcagtcgcccgactcgagcgcgcgagacgcgaaacagctggtggttacccgggacgtaacgacgcgacgtacggcggaggcacggcgcgcgggggtgggttttgttgtgggtggggggtgtgtgtggccaatcgtttcggtggcgcgcgctgttttttccgccgtacaaaccaggggaaaaggccccactttacacagtggaaaggcgagccgtgtctgatagcgtggagcggtttttggcgacgacggtggtgtgtgatttcaatttcgcggtccggtcacgtgaaatgacccacacctgagagcttggctttagcacggatccgcaacccgatcgatcatgcggtttgagtccataacccctttgtttgtgcgtcccggattgggcataggagcttgtactacaaacgacaagccaagctacgtaacctgatctcgatcggtaacatgaggtaaaacccgatgtggtaaactgatcatcagacagcccgccgccggtgcattaaccgtcgaggggtgcaatcaagaagatgcaccgtacatgacacaggaactgacggggaggtatggagaggcggcggcgcagtaggccaccaccagttgccccccacccccccccccccctatacatgcatgggccccaactgctgggaatgtaccagtacagtattcttatcgatcttgaccgacaatgctacagcaaaatcagtcaatcatcagcacgcttgacaccccaacttttggtactatagtagtgccactacacctgttcggcccaagtgcacgtacgtggctgctctctccgttgaaatgaaaggtgagatcaagtttctcagacagttgacccaagatattactagtactgtactgctatactcgatagtggtagctatagctgctagctgctggtggtacgtggacgtagttgtcacgagcatgtccaccagagaaattatgcttgccatgacaggaggggaagcccaaagccccgcatgcacagcgcaggcttccgtgttgtacattctgatggtgacacggccgatcgagccgtgagaaagccaacgccggctcactcagcttgctctctccggccgggccgcgcgtgtcgccgtcgacaagaggtatggaggcgcgagagctgattgatatcagaagcaacaagcgcaagcgatgtaatcagaggcgccgccacctcaaaagagaaaaacagtgccgtgacgagcgcacagagacgaaacagcagagatcgacacaaacacacacagagagaggatagaagcagcgatcagagtcgtggcgaagttgtacatgcatccgcacgcccgcacgcatgcgcctagctagcttgggcaggtgcatccttgccaaagatggtcccaggcagcaagcaagatggatacaacggctcatgcgcatgtctccaactctcgccatgccggctttggcacatagcgagctagagatactgatcgacacacagagactgacccacaggcacctggctagctagatcaagtaaatgcacgcccgtatacgtaggggaccaatggtgccaaactcgatctctcgcaaaacgctgcagtgtgtcaaagctgattggaatgtcagctgtcaagtcctggatgcatgcaccttcatatgggcaatgcggccacgcacggatcgtgaaagcgtacaatcgtgggagccacacggggggatatctatctccaagcaagtgtacttccatcttccatgtgctgtttgctactactagtactagccagttcattgttgtttctatatcgactttgcgttcatttgtatttgtatcgtactcactgtgttcatattcggattcggattcttccagcaacagagatatgcgtgattgtgacaggttatatatggtcgtttaattgccgtttggaggtcatcaattatcaccatggtcagtcgcttgaggctaacttgcaacgggtttgttcagatgagaggaaagcagggtaggcacgagctcaaccgggtcgatcgaccatgcaagcatgcaaaccgcttccaacgctttccaggtgtcgtctccgtcatcagttcgttgcagcaacagaaataacagaacacgttgctttggacgaagtaacttctgcggttcagtactcccaatggagctgctctgatatttccaaatggcatattgtgatgggctgatggcatattggcaggtacaccatgctgttgccgttgtgttacttgctccatcctcgggacaaaagggaggtgtggctcaaagccaaaacagttcagctgaattttcttcagaaacagctcagctcaactgacggaagcaagacaagactcgtaataaagacaacggacaggcagatatttgagatggcgagtcgccgaatggactgggatgccaattttctggagcgtcgatgctctggtctactgattgagcgattgtaatgatgatcaagctaatgcattacgactagatcagaaaaaaaatgttcagtctacaggtacttccagtataattcttgacatgaacttcagatcaaatctttgaatgcttcttttggacaaattgttagaatgtaggataggtgggtcaaaaaagtgcacacaacgcaaggccacgtttttgtagtccaggtctctctgtaagtcttcctttctcaattttgaatgctttttaaaggagcttgagagtggtgaagtctactcgaatcagagtctactctatgcatagacattgtgcagtctactcgaatcaaagtctactatatgcacagacattcggtcgttggcatggagacctgtctgatactctgatctcacagtccagaaatgtttacgaggattgctgaagtgctgaacacttgagtgaaaggaggaaaaacttgaaggcagaaagagtggacttgcgcggttgctacggcaatatgtaatgccgtccaccagaaaaataccacttgggaaggaagactcgggaccgtggatttgtttttctagaggaacctgaaactttgtaggtttggattgtgaaaacggtgaacctagctgaagatgtaaagctaatgcctgctggcaagcaaacttgacaatgccagaattcagggggactgcagccatcccagatcgagctgaagacgttgaagctcaaggcctagaccatccaaaccgggctaactcattctgttggcccaacccaactactgagttgtgacgcagcgtcggtgtgtggccgctgcatgcagagcccacaaatctgcaccggcggctgtggcacatgcacacgccacatcccggattcccagtatcccaaccgctgtcccgccgccgccagcgacggcctcctaccagacgcaccggggggacggtggcctgcgccaacgagagcacgagggggtgctgcgcgctggtcggctcgcctgttcgcctcgtggtgttcccgtcgctctcaaccggaggcacccaggcagttggtggatgcaggcggctgctgccgcggcgcctgcgtcatccgtacgtgggcatgcaaaacgggggcgccctgacttgacggtggcgggttggtttccgcgacatgtaccatcgccgatgatgtgacgatgcgccaaccgaaacctctcgctctcccacagaaccagggccttccatttacggtacgtgtaatcttctcatctcctcggatttttctttaaaagtttttttttgaacatttttttattttaattttaaaaataaacccttccaaattttattttcaaaatctgaaccttaccacgtcagtctatctagcgtggcaaaacaacattgatacgccatctacagcggacgtgacatttttatcatgcgatgcccagaccgatgtgaccaaataacaatcacgccagcgccagcgagatcggtgtaactaaataacaccagtgtaacaatattgttttgccactccagctcagttgatgtggccaaaaagttcgaccgatatggccaaaaagttcggatctaaaataaattttagaatggtttatttttaaaattaaaaaagtttaaaaattaaaaaaaaatctcctcgccctcacgccgccaaccaagtctagactctgcattgcacgtctcaaaatgaaattttggatttcagtgtagttcaacatgtaggtgaattgtgtgttctagggacttctcggaatccccaaaactaaggaccaatacacgtcgcacaaggcacgactcaacaacagcaatcacaacaaggtttagtgcgctacgaattagttccaggataagcatgagacatacatataacgtctgtatactgccccggagcaagttagaatgaacaacttgcatgttaatttgccatgaaaacacccgtatcaaactaacaactgtttccattccagaatacaaaacaccaatcatcaacacgcgaggcacgcaacacagcaaagctaggcacgcaaacgacaagcttttttcatatctacagaaagctcatccttggtcaacactaggttctctgtatacatccactgcagcaactgttgcaggtaaaaggggccatttctatggtgatatgcactcaaaaaattacatgaatcagctacactcggtgagatcaaagcagattaggacacacttcacacccaacaaatggttacagcttttattacctgtagcacagtctccagtgtgaaaagatgaggccgtgtgatgttagttgaccaccaatgtggcaagacaaactgatctacacccgtgtctggctctgcttttgctttcgttgtagcatatgagcttgcaagctacactgtttaacctgtttttcaaatatataattaacacaatgagccaaacaacaatatacaagggtacaatcaaataaaagtattacagaaattctccatacatgtattgctgcgaccatggacaagagatctcttgattgatccaacaacatttgttcttgtgttgcaagtttggcaagctcagacaccacagagcttgttccttccacctgaagaccaataaaacatgattcagaggttgccacagcaaatacgccatgaattacatgaaatgcatgcccatgtaagagtcgcctcattgtccaaggccttacaaatcaagtaatgttcacataacaggcaaacacctgcagtacacctagcttatgtttacagacaaatcgcggttctggttagccagcttatattcaatgcagtgattcaagttcgatataaacataaaaaataggcatgttttccttgggattctaggattccaactttccataaacctgtaaatacctcaatagatttgaatgcacgctggatcaaatatatcattcatgaaagatttgcagttgttagctgtccactcaggtaattggccacaaggaaattgtcttatctctcagattttatagctacaaaaatatatatgccggaagagtacacaattatgtatgaccatagctacccatcaggatggacctaaagaatctacgtactttgcaatttagatatgaaaattacattcttgataaaagagatatcaaggagaagaaggataggacatatgcaccttagacaacaaagtacacattgaggatgccattgtgtgcatcacgtccaccgctgagttaacagcttccttcacaccttgggcatcagcctgctcagagagaaacattaaaactatccaaaggggtatatcaaatcatatcagataactatattgtattatgaaaaaaatcctaaccttcgcaccaccaacaactggaagacggagagtactagccttcagtgcttcgattgctgctgacaaagcacttgaatgatgtttttcaatatgagaccactcgtctagatagtatatctgaacatgtcaaatagaagcacttagatacaatcaactttgccagaaatgctaccaaatcctagtgcaaactgcataaatagctaaaacaataatagatataatctcttttacctgtcttctaagaatagcgaacagtttgagcttttgttttagaagctggagtttgctccttttagaactgacattgtctcgtaattttgatatttccttccatgcactgtgcagagttttctgaaaaatagtgaaataagcaacattagttagaatagtagctcaaccctttttagattttcattctatggagcatacagctcaatgtattaagtgtcagaacaaatacatttgaaaacaaatggtttattccaatgtacacagctatcaaagaaaaataacaaaacagtgcaccttcacataaatccatatctggaatctaaaacaatacatttgattcaaaggcattgccaaattggaaccaaagatggagaaatgtaaaatttggtatctaggctgtttctctcattaatcaaaggcagtacaaggacctaggtgatatatcccagatgactttattgaccaagaaataatttcaatcaagttatcagccgctaatagtgcaataaagttgacaagtcactagactacgatttacgagttaagtcatctaaatcctgacactgccaacatccctagcaacatcgcgccagtatccttttgtaacctaacagtacagaaacaaaggggtatgggtccaaccattcacactaatactaaaagaagtctccttgggcaaatctgccataacatttctttgaaatgtaaggcctggtttagttcccaactttttcttcaaacttcaaacttttccatcacatcaaaactttcctacacacacaaacttccaacttttccgtcaaatcgttccaatttcaatcaaacttccaattttggcatgaactaaacacaccctaaagctactgaatgcgattgaaatgcgctacagcactggttgtttgaagtggtacatacagaaaaaaatggtttaaataaaataatcaagacatgactgcggacgtgaaaatatcttacagtttcagtatatttgatgtgaaccaagtaattaaaggactactgaaatttatctatatacaatatagagtagattctctcgtaatatgacacccaaatgcccatttgcccaccaaactaagtccactacaagcactgaaccccacagtgctatttttattaatacgcttcatgggacttctgaatggatcataaacaatcgataggtatgggttgaaggtgaatattcaaaactcaattcttcaaaatcagggagcaagtgattagcagctccattggttctcctttagtcaagatttgcatgcaacgcttgcagcataacacaccctagtttacaatgcaactatcgtgaggactagtaaataagcagctaaccagtcccaacctttttagtagtctacaaataccaacttacttatcaggcttctacagtcctcaaagactaatatctcacaataaaaatggaacttttgtattctttcctcgtctgcgagatataacaaatactatgacctcagtaatcatattgatcaagcacccccattgagttgtaaattgttctgaattcaaacaaataatgaaacagaatgtgcagttgctgattacagataccccagaggcccaaatgtacccccacacatttgcatttaggaagtgaaataaacacaataataaaagtgaaactagtagaacattaattgttttatacatagagtggataattggatactatgagtaaccaacagtaagaggattttggaatgttatagcttaaaaccagataggtcaacataatttacctcagcattgaagctctgcaccaggagagctgcatctgtccgagcattgatgcatcgccactgcaaatgtcgattatcgagcagccgcagcctgtgtgcctcctcaattctgttctccccctttttcgccctcctcacctctgcagcaaagctgatgatagatggcgcatttgccggcgcctgcattgtgtgaccattgggtgatgcctccccactccgccctcttgctgggctcgccatgcccctgcttccgcggcttggagatggagagcggccaggcagtctcggtgacatttgactgtctgagaacgatctcctgccagaggatgatggtagcggtagccctggttctggaagccggcgaaggcggctgttggtctcctgccagaacctcgccggcacgctgatgccgcggcgtgggggatcaccggcccccgagttgctgccggatgaaacgctgtcggtgtcggaggatgcagagaggtcgtgggccgcggcggcggcggcggccgggtccgaaggggagagggatgtggtggagtcgaacgccatggagcggcggagcaggtggacggcagccaggatggagtccttgcggtccaggctgcagtcgaggctgcgggcgagggggtccgacgccttgggcttcgccgccggccatcggtgctgcggccgcgtgttctcggcctcgggcaccgacgacacgctcttccgccgctccggcgtgggcccgcgccgcccgcctggggacgacggcgacgccgcccgcggcgcgcgcgacgtctggtagaagaaggactccccctggaacgacaccgagaggctccgcatcgtggtcgccgtcaagccccccgaagccaccgccaccgccgccgccgccgccgcgggggccggggtgggcgacgtcgagtgctgcggcgggggggtggacgacctcgcgcgctgcgcggagagcgagcggcggttcgacgacggcgcggacgacgacgacgtcgacgacgacgacgaggtggaggaggtcggcgacgcggccgccgacaggtagcgagacgagaccggcttgctggagcgcgcggggcggcgcgcggcgggggcggagttgggcttgtcgagggccggcgtgagcggcgggcgcgcggggtgcgccggatctggcgcggtagccgctgccgcagcagccaccatgccgctgccgcggccgtccaaggaaggaggcacaggggggaggagatctagctacccgctgccctcccgcggcaatgcaggtcccctcggctccagattcgccgcccccgctcccactccggctgctgctgcggcggcggcgtcggcggcgagcggcctccggatcgacgcgcgcggccgcctgcgaggaggaagaggaggaagacgagcagcagcagcagcaaaactgggtgagtggttgatggatgcggagaagcaagcagagtactagagtgaagtgggggatttttctgcgtctttttttctcttccaatgtttttttttaattttttttggggccttttgctgttgtttttacttctactcgttttgtaatctgcctttggctttgtgttgtgttgtgcagctctgccgctgattcttccagccaggttgtgtgtgggtgtggcctccttctggttagtgtggctgtcaagctgtcccagaggagagaagagtgcctttttctttctctttgatctttctaaagtgatgttaattagaacattttacagtatcaaccatggggagataatccttctgttttacaattcgataaatttagttaagcgcaggaattagacaggagtaggttacatgtttgtcttaaaaaaaagtcagcagaagctactctatctataattatgtacgtcttttttttttaaaattacatggcacaacgtagaaactcacaacgcacgcacactcacctctataaacacacgagtattgaaataggagaagataaccaaggtaaaactatctaagaccgttaattttacacgtcttgtattatctaagaccgttatttttacacgccttgaatttcaaaatgtggggaatgtaaatgtgattttttcccctcaaaatagattccaacatttgcctcattgggttgacatggaaaataatactgtaactgaagatttaagaagtgggtgatatgaatttatggttttgttttatgtattcccgttggtagctaaggtttaatggaaaaaaacaaatatgggaaattaaattttctcaagaagtaaaaggtgattggtcgtgtcaatttgttacttgggttggacaatgacatttgtgcggacggttgaagcaaggtggccagtataagattccatatatgatgatgattcaatggtagcgtttttacttgaaaaaaaaacttggtaaatgcaatagcgtgatgagaaatgggagccaggagtgaagtgcaagggtgataaataataggaaattggaatacatgttttctcaacttataaaatatatattgtatttgaaatagataaatcaaacgtgaagaagaaaacgatcaataagggacaaattttggtgttggaaagccaagtactggctgagaagatttgggtaggttagctagactgaatatgtctagtagtacttcctttagtttaggatgttagcgaacgaatcgaaggacattttgtcctgtttatattgtttagtaattgggtgtttgtgcgtgtaacttgcgggaggattaggcacacgtaccggattgttttttgcttttttaactttatcttgttcttcaatgaaatgatgtactcctaattcatttccaagcttaaagaagttgagttgcccaaaatgctatagtacaatccgtgctgccttcatttaatatggataataatacatgacctagatctcaaattttgtagaaaagttaagatacataattctccattatggaattaataaacatttttactgtattggctatatatgcttgacttgatttcctacctcgtatctacaaacaaatagccatcctgctttgtttgattgctacatgcaaaaaaaaaaaaagaaaataagaaaacataatagtgttttttctaggtaacaaaaagttaattgaatgcgtgacagggcgatattgatgcaaacaggaaggcaacgttgttataaacgcggacaccaatcacaccaaagaaaaaaaattatcaaaatgctctgcattgttttgttaatttttttttctttttttggttgctgaaagagaaagtgagaaacacctgaaagctttgagccacgatggttacgcaccttatgagtttgactaagatcatcagctaatcaaaagtaaaagtagtggacatatagatttttttcaactagagatatttacgcttgaattaattttgatggaggagataacacgagttcacttcaaggcttgaaccgcatgttatgtggcccggttgtgaactcgtgtgatggctacttatgatcttcgttgttgggactgatttagttttcttcagttaaacgtcacaattattgatttttatcacacctctgattaaacctaaaaaataatagcaacaatatggatgccccaccagaacaactctttagtagaaaagttcagtgtaaatggctcgacgtataaaaattgacatgagcagtttctccgaaaaggattacttaaacaatactagcaagaaacgtatagtttaatttttttctcttttgataaatagaaagagtgatggatagcacacaaaaggtaaacaggggaaagttgtttcctttcgctaaaagaaaggtaccatctccaatttcttgttggactttctgtactaaatctccaatttcctaaatggttgtaccaagaagtaagaacacaccttaaataacaagtcttttgaaatatgattgcttatgtgacccattagaaagatcaatcaagaaagtctgaatattaccactaaactagttagttggtttctttgtgataccaaaactgtaaagtgatataatcattcgtgtctataatgatgagaactttactacatgtatgagtaaagaaaataaaatcaaataatttgacctcaaaacttaattgtttatatttgtggagaataattgtctagttttccgatgaagggaaaattgcaggatctggccaaacacataaagttggatgaccgtgtatacttatacttcttagtctaaaaatgctaagaaacatctatttatttttatattgaaaatcttgtttattatttaaaaaatatgttgaatacgttgtaaaacattgactaccaaacatttttagggtacaaattaatacagaagaatagagggagtgataatctataaaaaacagttgaggtactccttttccacttgctaatggatcaattagcacagcacacaaactaccaccttcacatatttgattaattaatgtcattttcttcctttttctctggtttaggtaaacagtgcctttttaaccacagctagctgagaactgcatgtactttgaacatctggctagctttgttcccatctcccctaacccctccgttatgactcacatcatcatgttaactatagtatttttcgctaagtagtccttctcacaacgatgttgtggcctcgcctttcttctcctataaatctcattgtttgcttgacatctaaccttcctaatttgtttacttgaggctctaatttgttttccgtcctgtcaggttcaggagccactacagggcctagtaaaacctgccaattgggaaagaggcctcttcatcaagtgacaataattctcaagccctaaaaaaggcagccatatattattcagaaggatattttcctgacatggctggactcatttaaaattttatggcgtgcccaaaaaatgttagctaaaaaataacaccatttagtatttacacaagtgcgggacaaaattcaattcctttgttccaaactatgccccggtgcttctatgtacttcctccggtcatagatataggatggttagaataagattttatcaaacttttaatttttttcataattagaacattctttaaacgcttagtttaaaatcataaaaaagaagacatcaatagatatttgtctcgataagtgctatcataatataataagaaaaatatattttacaaacctatattctaatatataaagttgattgtctgaatttcaatatttcgatctaatcttgtattaagcaccaaacatttatgacctgagtatctaaagcatatatattttctcgatgaagagagatgtataactgtcggttgtttaattagttgtgtccggtatattattgcatcaatgtgggcacactagttctctgacagatgttattttaaggttcagagaggagaacaagcaagcacactcgtcattttgggaaccacaacatcacaaggccgtctcgtaaacgaaaacaatatgctatgggaacctaattgccaatcacatgtcaatttctttgccaaactatcgagtctatatgatcttgaaattggtcgccccataatatattggagctcatcacatggccactggacaagtgcgtgaggcaacttttaattaattagtgtgtgacttgttaagtaacacgggctaattaattggcaaaaaaaacaagcccctaattggatttgattgatcatttgaacagtggtcaccgtacgtacatacatcctgtacatctctgtgtgtgccatggtcagaacagtacgtgcttataattagcaaacactataaatacgtcacatgcatagaagcagtactcatgctccaagttaatcagatgggtagttagacaagcatagttcaccaaacttggcaataccatggagaaaatatacatgatcggtagctcagctgtgctaagtagcagagctatctcatcagtcatgttcaagcaaccgccccaactaaatggcgccaatactaattaagcacccgtccttagtatcggtgtcatccgggacagtagagtatacaaacgtaaacggatatataatgtgttcttgtttcaagaaaaagtcattatctaaaaaaaatctgtatttggaagtattttttgtatgacactaattttgtggttgctgataatatattataaaataaagtagtgttcaaagtggtacattgtaattgcgtaaaaaccttatacgtctgacatgaccatataattagttgattgtcttttcctcgttaatcacggttagttgtattgtatgtcaaagtcaatatatgacaaatgaaaagtgttagtagtatttcacagattaagaactgagcaggtaagtatttttttgctttgtacataagctagctaaccatgtgtccatgacgataacaatctttttaattcgtctgtatataatatggggttgcttgaaccactaaagttgcttagcttagtctgcagcgactgtaaaattaagtacactgcactgtacactttgtagagttgctgtacgtgtaatcagtgatgctgtgcatttgtcaagtcataaataaaccatgcatgatcaccggaaagcaaagctaattgcgttagtacgcaaatttaatcggtccctacttgcacgcaccacctacgcatgaagctacatgtcacgtcgataaaaatgttagtatattgctcatggctagctgctacgtcgcctaaatcaccaattaaatgttgatagatacagagaatttacgtctgagtactcagtcgagccagatcggaattaatgaatttgttgaatatatggatcgaccgggtgaatgtgccaaacaacctgagagggaagttcaactggtcatacatgtatgtgccaccaccggtccaaccataagtaccaaaccactccattctctatttttttttgtttatttttctaaagaatctcatttcacagtgtttccgttttaacaaatcccatactgatcgcatttcgtcacatgttcaccttttgcctacgagggttttaggtaggaatgggaacggtaacgtctttttcgaaagcgaatctcggtcaatcaaaaattacatatttacttttttatttttacgaatgatcatatttatcagtttaacgccaatgacaatacattactaaggggaattagaaaaggaaatccaagtttatatatggctagaattgtatcacttatatggaaatgatgcttgatctatcgggcatgactttcaggtgcaaacagctgttatgttaaaattcctatagactctggttgttgtgttcgtccagccgaaatctattagactactactcctagtgctgcctgcctgcctactgaccgtgaaacccacaggctcccgtgggcgaggctgtaaagcgacagcggccaaccaagccaccggggtccggagcacaccatctcacattctcaccctcctcccctctcgcaacgcactttgcacagcgatccgctgatgcgaacgctgtagtagttgtacaccctctggtctggtccctcggcctcggtctctcgctgtggataagaaagaaaaaaagaaagaaagaaagaaataaagaaagctggtgtgaagtggtgctgcctgcagcctgcccctgtaaagggtaaggtggcattaagaatcatcttctttcgaggcacacactgccaggattggaatggatggatcagtatccatctgcaggcttcaggcacagcctgaaatgaacgggattgattggcccatgccaatgccagccacgctagcacgatcccttggccgcagtggcgtttcggcgttgcattcaggggaccaaatcaaccaaccaaccaacgaaacgaagagccgcgggtgcacatgccgcgccgcggacatctcatctcgctcgccagcgttggcacgccgcacgctggccatcgaggcaggcaacggccgcatgcgcggtgcagcgaagagatctagaaacggaaggcgcgcgtggtctcgatcgatcgatcgggccgggcgctaggcgctagcacggcctggaccacgcacggcaccggccggcctccatcctccacacctcacacttgaccggatatgatattgcctgcttccttgccgttttctcctgtacgtactctctgtcgtatccgccaccatcggtgcttgctatatctggccctcctttctgtcgcaggtgcctcggcatggcttctgctggatgcttcatctagtacctccatctcaaaataaaccaccttacgaagtaagcgtaacttaattggttatttttttttaaaaccaatccatccatattcaagtccaaagacttgacacatatactcgtatttatagttaattattttttcagtggttggtgacatatccatcgacagcgagacgtctgtggtgacttcgtcgatctcaaaatatgccagtccatgcacctgtgatgacttcgtcgatctcaagatatgtcggcctagtctttcggaggtcttcataggggtagggtgtgcgtttatatgggtgagtgtctatatttatggtgtgtttctaacaaaaattaaccttagatagatatcttacagtacaacaaatctagaaaagaaaaccccgcacgcagtaacgttcatgagcattttgaaaccacatgaaggatcaacatggctcgaccttattggacactaaaaaaatcgtagcccctcctaacacacgagcaaagaaaaaaaaacgatggatcttttcagaaaattgaacatttgatcccctcctaacacacgagcgaaaagtcggttgattttttttcttcagaaaactgaacatttggtttctgtatgaacagtgcgaaaacactgacccgttaacctattggcctgctgagtctctgtcggggcagcagtgcagaagcagaacacaataacaatgaacatgatttgtcatctttgtttcactaattatggatccatgtaggcagagcccagtttttggccaagtacagtgaaccaatagtccactgacaaatggggggtacttaattagaagcaagatactccaagaaagattccatcctcccatgcatggatggagccatgcaatgtacggagtcataaacatttacatattcccccagattttggactagaacggatttacaaatccaccccaatcatcagcactgtttggttatctttgagttcaatttgactagagatggtgtgtgatgatgtcaataagaggcacgagatcagacaagggaagcatcagtaatcagacgcccatgatgattgtacatgtttctgtctactactcagggttccaatcccgtcatgcacatgtgtaacatgtggaattgctaaaattactcctatttgtaaagtactcctacatctacatgcagcgtaagataatgtcgctagtgtacaaaagatactcgatccactgtggcttttgtttgtgctctgcatggaaattagtagagcttgtgtcaaattttagagccaaatttgcccctcaacagattaccttgcgtccttgccaatggcacgcaggactctgaatcagtaacgagtggtttagcatggcaaatcatcaaatccccgacctaagtacatggccaatatttctcctaaattcctcccaaacctaaaagtagagggttttaggtgaaaaaaaattgttccaattgatccttagtagcatgaccaacaccctccttaatctaataactagcatgatggcccgcgcagattgcgccgctagtatcattacattttctctcatataatagcatatatgttttctcattatattattaaaatatattaaatgacaacataattttaaattttgtaataactttacgaaactactaatgtataatatttatattgtattttatatatgtattagttattaattatttttaatatcaaattttagttatttgtaaattatatatatattcctatatggacactagactcgtcttttaatatttctttttttaattctaaatttttattatttctaattgtatttctatgtggactctaaactcatctttcaatattctttaatttttaatttcaaatttcaattacttctaaattgtattcctatattgactttaaactcttcttcctatttttttcttaatttcgaatttaagttatttgtaaattgtatttttatacggactctaaacactacttttcattttattatgtttattctgatttttagttagttttaaattcctacatggagtctatactctacttctaatattccttatttttaaattccgaatttctttttttttctcaattgtatttctatatggactctatgctctacttctaatattccttatttttaattccgaatttctattatttcctaattgtatttctatatgaactctatactctacttctaatattccttatttttaattctgaatttcagttatttcctaattatatttccatatggactctagtctactcttctaatattccttattttttaatttcgaatttcaactatttctaaattgtatttttatatggactctagtctcctcttctaatattcattattttttaattctgaatttcagctatttctaaattgtatttctatatggactctgctttttttctctccgattaatgtgagaatttctaggtcataaaagcgaacgtggaggctcctttttattccgaattttagttagttttaaatttctatatggactctatactctacttctaatattccttatttttaattccgaatttcaattatttcctaattgtacttctatatggactctagtctcctcttctaatattccttattttttaattctgaatttcaactatttctaaattgtatttctacatggactctagtctcctcttctaatattccttattttttaattccgaatttcagctatttctaaattgtatttctatatggactctgcattttctttttctctgattaatgtgagaatttctaggccatgacagcgaacgtggaggcttcgttttctattccattaataatataatagattcccaacttgtcttccaataatacaggttcctaactccggatatctcgttacccacttccggcgatcgcccaacgatcagatccgcccccctcctcccacttcttcccttccttctccccttattctcttcctactacagtacaccacaattttttttaaaaaaacaaaagttagaaaaaattatgtatagaaatactatatataaaaaatttgaattcaaattcaaatttgaattcaaattcaaatttgaattcaaattcaaatttgaatcgggtatgtaaacttttgacttaaaaactttggatttataaactttaggtgtataaacttaagatgtatagaaatactatatatagaaaatatttgaattcaaattcaaaattgaatcagatataattcaaattcaaatttgaaacgggtatataaacttttgacttataaactttaggtctataaactttaggtgtataaactttagatgtatagaaatactatatatatatataaaagtttataaactttaggtctataaaatttgaataaattcaaattcaaatttgaataaa

SEQ ID NO: 8096 - DNA, 43406 bp, Oryza sativa
  unsure (1)..(43406): unsure at all n locations
ctatagggcgaattcgagctcggtaccctggatgcggcaacaagatagccgagaaatggaccaaaagctggagcacacacgcgcacacagtagccactatcatcggataaaaaagagtgtctttgctaagttgctaggccacagggatgaatcagattcccacgatgtgttatccatctccctgatcatgactggacacttacaacctgatccacatgtgtgtatgcaccgcactgtgcaccaggtacccttgggattttgcttcagcttaatttcggtttgtagtctaacctctatgaagcaattggccaagctcttgtgattgatgtcttatctaccccaagcactgccttaatcattcattttgtcgaataatggttcccgtattaaaaacgtgcatatagtttggacttaatcgttaagctattcgttcctctcttttttgggttagtggaatgtgatctttgtgtcttatactttggtgccaagtatatatatattgctagttcacctggaagtttgcactttgcactttgaggacgtgctgtaaaatccctctcctgttttttgttgggaaaaatataaaagccactccaaatattatcttaggtttgagattccctcctataagacaatttgttgcaaatatctccttcctaattcccttggtttgagattctcccaattaaaccttgttgggcagtgtgatgagtctccatgcttgaacatcatggttatcggaagatgggctgttgcgcttgcctcatgaggaagggcgactggtttctcagcaaagacgacgaaaataagttttggtgtgaagctgttttgttgagaaagatgtgctaaggcctggtttaattccctaatttttttttctaaaaacatcacatcgaatctttagacatgtatggagcattaaatatagattaaaaaaactaattgcacggttagagagggaattgcgatacgaattttttgagcctaattagtccatgattagctataggtgttacaataacctacatgtgctaatgacggattaattaggctcaaaggatttgtctcgcggtttccaggcgagttatgaaaaaaaattttcatttgtgtctaaaaatcccttctgacatccgggcaaacattcgatgtgacaccaaaaattttcttttcacgaattaaacggggccaagttatataacacatacagaaagaaggaaaaagaaagtgaacctagggaggaatctcaaactaaggtatagtttttcaaaaaaaaaagaaaagaaaaaagtttgcatcgtgggttttgacttctggcaacatctttgcattggatgaaatttctcgttcattcgttgaatatctgtaaaatatttgcagcatcaaccagaaggagaagttcatggtttccccactaacaaaagagcagatgtgttggtcaacctgaaccccacgagttgacccaaagtatttccatgctcaacccaacccaacatgcaccaggatttcctctcccatcttcgcatgcgcaatctgcaattctccccctccttttttttcccatcaagatattgttcttgatttgttagttccagttttgtcttgcagccatcatgaggcttatcttcaaccatcatgtttttacataggatgcacaaaaaaggctagagcttcctggaggctccatcctctcttttgtaccctttgttgctgactttttggccctctaacctgcactactactgataccagttgcaaagctcttgcctccagtttacattgggccacgtgtgccaatgccttgtcactcctagtcagcacacttctcccactaaccagagaagtccaagcacaaaagttaaagcctctcaaatcgcgcgttccgtgcactatgcaacctcctaatccatctaaattatgcacaggcatcttcagtcataagcccgtaaccaattttgaattttagtatgagggaaaagttcttttcattattatttttgccactcaactttggttctagaagttagaacaacatggagtataaagtttatcataaaatccagttttaccaccaaactattttccactacgtcgattaggatccccagcagtcatcatcttcaatctctcttgggggtgatgaatgttgtgaaatcccatgaattccattcaaaactcaacaagggaacggccgcaatgaaattcaaacagttttctgaatgcagcaaagccgcagcctcaaaaaaaaaaaacgccttgccatgcataaataaagtccaatggacacttaatatctgcacaggagatcagaggctcacgtcacccgatctgtcatgaggagccagagtcctttggtcctcagagcaagtttaatagtataccctattactagctctatagccaatctaataactaattcatacaatatttgcttactatactattaatatatggtcctacctgtcatacacatattgcgtcttagagttcatgctgctattctctttaatcttttactccctctgttttttaattgatgatgtcgctgactttttctcacatgtttgaccattcgtcttatttaaaaattttatgcaaatatataagatacaaatcacatttaaagtactatgagtgataaaacaactcataacaaaataaattataattacgtaaattttttaaataagacgatggtcaaacatataagaaaaagtcaatggtatcatctattaaaaaacaaaacggggtagtatttcattaagggggtgtttagatggggctaaaactttttagtccgtgtcacatcgaatgtttgacgctaatttggagtattaaacatagactaataaaaaaactaattttataaatgaaagctaatctgcgagacgaattttttaatcctaattaatctataattatgaaaagtttactgtagcatcacattgtcaaatcatggtgtaattagactcaaaagattcgtctcgcgaattagcccaaggttatagaatatgttttataattagtgtatgtttaatactctaaatttgtgtataaacatccgatatgataagtcctgtttcccaaacagaccctaaaatatacatgctctcaccggcgagaacacccgtcacccgtgccgtcgtccaattattgggcccgtgtcccgtcagaaatcccgcacgccacgccagagagaaccccaagccgcacccgcgcgtcgacacggcgacgcgtcgcagagccagtggaacagaggcacgacacgaggttccaagcccgtgtcctgtagcgtatgcatcctccgcgacgcggggagacaacgatcggtgcagcgccagcgcgagcgctaccgtttcgcgccggtggtggtggtactacgtacgttgggacgtacggcgcgtctcgtactcatcgtgaaaaaaaatggcagggaaacgatggcattttccgcccacggcgttgcgttttttcttcgtgttgtgttgacggggggtgaggctgtaataatgctggtaatgttgacggtttaggggcgtacgtgtgcagcgctgcagccagtcgtgagggcctgaggggcgctacccgagcattgtctggtgtgttacttactgattgggcaggtctgggccccggtgtttagtagggcttgggctcggatggtaagctttagtttgggtagaaaaatagggtcactcactctgacttattactatcttctagaagtgcagattatcatcggagtataaatgcaatttctatactaacgtaaaaagtagtagtggtggtggtggcgctaccaccatcctactaccatatggaacccataaaatatgatataaaactttactggtttcttagccttcatatgttagacctggtcgaaaataaaatatgacaataaaaatttatagaatttttcatctttatgaaatgatggcaaaattatcacaatgataatatattagagaaaaaaaccattgcaatgcatgggcattatactagtgatttaaagagttaaaaagtggcgatttcaagagttcgataatttcatattagaaaagtttcgtctatggctacataggagagggttaaccagatctactacctccattcgactttaaatataagcatttctgattatacaagctttttgtaccattttttacattgaacttagtctgggtacttatccaaacatttttgttgaatgaaatcaacatgagattgtgctatttttaatatagtagaagagaaatacaacccctgagagtaagttatgcagaatttagtataagctcccgaagccgatttgctccaaccgaagccatcttcttgctttctcctttattttcaccagtaggctaggtgctcgaaaactcgctggtttctctctttccagatcccaaacaaccaagagaatcagggcacgcaggtctttcttgggcacttcttttttgttggccagcatctcacaccaggctcgaacgttacaactgttgatatgccacccaggatgctattaggcttcgaatccttctattatatctatattggacgagtatgtggcatgctgactttattaaaacagattcacccatataaatatataattaagctagtgaggaaaggtgaacaatattattcttatctgctcccacttgtttagcctacaaactcttcctttggagcatgtttcgaactcaagacatctttttcgaaatgagaaaaatatggattgctaaagaggaacttagcaacccggccgtgcacgagagggttcgaatcgaacacaggccagtccaaagctcctgtagctctcataccactgtagtacgacaccgtcttcaacagcgtgggtctcatgcatgaacgtaaacagctgatcagaagggttttccagatggtgatgttgctgttttattgcacgctctatcacgcaagcttggacttaaaggtttacgagaagaatcgaaacaactgacggatgcagagacacgcacacgtacaaagggctgatagcctgatattgtctgcgatttgtggactgcgtttcatcaggatcacattctcagtgtcagctatccctggatggactgctgcatgagcgcttagacctaacgcattggcacaaaggcccagtgagggagagagcggctcgcgcacatctcctaacgtggacaaagaatatcaccaataaaatgagagagagagagaaataaaaatataccaatatgcggcttaagaaaattttgtggtgataaggatgtccctaatgccgacacctcaacaaccacagcaacaaaaaaagcaggcttagcattcttaactagagctctccaatcaacagcttaccagtgtactcttggccaccttctcttttttctttccccttttcatttggtcagctgtgaactgtatctgaacatatcttggtatgaggatcaaagggcaatttatatatcctcttctatcatcatgcatgcataatatgaatttcctaattagtagaacatgttgataattttaccaaaacggcttagcaattttatattgttatatgataaattttacggtcatcgaaagttataagaaggaatcatattttttgaagtacaaaatttggtgtatctagcctcggttcatctcaagatatgtaagatcactcacatatgtagagtatttatatacattaaagaaagtaaaacggaaaggggaacaagtttatgtcttgcagaaaagggagtgtgtgctagtaataagatggttcttgacaaaggtaccggcaatgcttattcgaagtactttcgtactatatgatggataaagtagaagtagtgagctttagtgctctacgacttttatgaggattgaagcaaattgggtctttgcatcagtagttggtaacatcagctaagaaagaatcaaatcacagatgactcggatgaaaataactatcttatccttgggccatccacctattgttttctttcattattgttgtacctcccagccgtagttgtctttgatgagatggatgtgatggattttttctagtaatactggagtcctaaattattctaacttggttttacattaagctaataagcttaatgctatcagacgatcatcttccagatattgattggccggatatatcctgaatacagagtctggattgatttctattatcagaaaaaaaaaatctgccagtttttttatttctagtaggtgtcagagcagaaagagatgttttgaaggttttagaaaacaaatatttctctttaaagaaaaacagcttgtcttgaaagaaaaagaaaaacaactttctgctcaagccaacgctacttgacagccgacatataggttccatctttaaaatggttcacaataggattattcggtggtgtccagttgctttcagcagaattttccttcagataacacaaggctggtggtgtagggtcgccacattcacctgttatttaactcattagcctcttaatttttgtggtggataaaatcctattttaaagtataacataatgtgctagtctggtattgtttgtagtgaaaatgttgtgtgaacataattgccatgtcccccacaaatcatatgattacaaaagatccctgaaatgtcaaacagtcagtgcactgcataaagttaatctaattaatccaaatcacagtctgtcctagtgtccttcaactaaattaaggttaattataactctagatatgttttcatttacttgtcattcttaacccatgttaatatttttagaagaaattttcatattttgttgaacacacatactttgttaatatgctgtattttcaaatattttatgaatcgcattgctcaaataaaattgtccaaaaagttgaatgcgaatagtgtctgctgacaagtatttaaaaaggagcatttcaacaacgatcttgctaaagccttgaaattaagtgtgacacaagtactataacatcaaccaaccatgtaagaagcacggtttacaaattaaactgtacggttgttgtcgtggttatcacgtgcggtgatcttctcagtttttgaaatatacctcgcgattaccgcggtaactgtcaaaccatggggtgacggtacccacgtcctacatggtttggtaaatcctgaccaaatttaagagtaatgttctttaaaaaaaaaaggctgcaatgccacccccaaccccaaggaatccaaattacaagtcccaagatgcctgcatctctcttcagagttcagacagacaagccgatctctgatctatccacgagaaaacgaagcagggaatgcaggattgatccatccatccattcatccatggatatatagctttcagtacacatgtgtagagataagaaggcttgtagggcccgggagggatacgacatatgtggagcacgagccagcgttgtgcattgccctcgcccccgggatctttctcctttacctcccgatcgattcggtcggcaagccgtgtggctgaaggtgtaaatcagtcaaaagcttttggcatatggtgtgtgtgtgtgtatatgttctttgcaaatattgggtaaaaattcctgtgcccacgggcttactctaacctcaccggaaaagaagaagaagaaaacaaatagacgacgacaacaatagacataccataacccatgatatgggtttggaagtacaaaatttggacaatgcgattgcaagatccaaacaggaacttcaatcaaattgatctaaacaaaacgaaatcgtgatgacgatatcgtagttttgtttgctagcactgacgattgacgaacaatttgcctattggttcttaagattaaacaaaaaaaaaagggggccacctagttggggtttggaaggtagcactagctgggcaaagcttggagagcatcagcacgcgaagctacacgccaatacatgatgatcgatcagaggacttcgttggatcacagaaacaaatatttttggcttatctttggatgaagctgtgtgaaggtgcgacccagcaacaaatgctgttgcaattgagctcgcataagctcccattgatcgacggcgacgtgccaatggtttcacgtgggttatgaccaggacaagctcgtgggttcttatccgtagtcgtcgcgacacactgcctttttttttctcggtgttcaatggagtaatggaccatgagctatagcttctttgtcttcaacatattatacacctttcgtgggctccttggaatagatgagctcacgcgaaaattctacaaaattcatgtgttcattttgaatctaattagataattatttaatggatgaatctcaatatagaaccaataatatgagaaaaaccaagtgaagctctcttcaagatgtttagcgagatctttaattcattagtatcagaaatgaaccgcataacagtgttcgtgcggtagtttgtgtgtatgatgcatcttccatgtaattgaaaaataaatgaaaatttgtggactcaaagaatcaactgaattattcaccaatcgagataggatctttcaggattgggtgtctggtccatggaacttttcacccaatgaacttgcaactagttcaagtctcatccaatgaacagcaagtctggccgagcgtgagcggtccaagaaagcagctggtttaggtaaaccgttctctttccattttatgtggctttgacaagcatagcgcaccaggtgatatttttttaaataaaaccctataggaaaatcaccttatttactagtgaatttggttacatactaagccagataaaaaccataagaatcggtagcatctttttaaaaatgatgctcgattggtcgagaaatgatcatattatcaatttttatatgtagctaaagatagttcgattggaaatggtaccagcttcatctctcaaaaaccactcatcatgcttggaagaatagtcttggatcgtagtgtaccaactcagattcagattccagagaacatgaaaaacttggtaaagaatcctgtatgattgtaccagacggtacggtatgaggtgagtacatgctaaacagctacgcgtagtaggagtactagtcatttgtgtgcctaaattatgctattccctccatttcatatcataaattattttatggttatattctctccgtcccattttaaacgcaaccataagtttctttgtgcaactttaatcgtctgtattatttaattttttaaaaaaaataaaaaacataagtcacgtataaagtactattcatattttagcatctaataacaataaaaatattaattaaaaaaatttaaataaaatggacgatcaaagttgaacccagaaacttatgggtacgcttaaaatgggatggagggagtactaaatcaaatcttcttaagtttaaaaaagcaacatttttaacttggaataaacttgtaaatatactataaaaacatatcgaacgatgaatttaatgaaactactaaatgttttcatctgtttttgattaagatatagattttacctcaattttcgttagcacgcttttcaaactattaatcgttgaatttcgtccgaaaactttcgatataaaagttgctttaaaataccagatgaatctattttcaagttttaaataataaaaattaaattaattatacgctaatggttttcttgttttacatccgtgtacttaagttttatctacatcactaccaaaacattaccttaaacttgttataaatgttgctatatttttctataaatttggtcaaacttgataaggtttgacctatgataaacttaaattaacttataatataaaacggagggagtcccaaaccactactcactaaagtataactactttcaacagtataaattctatctaaaatataactacttctctacctactccatatcttaactaatcatacatttaactttcttcacttaattctaatctctcatcatttactctacaagctgatcagccataaaaaataaatgaagcaattaaaattgatctatggataaaacttgtatatctttgttcttagtgcttttaaaagtcgatcctgaaaattaaactacgatgcaaacaatctcaaaatcaattctaaaattaaattttaaattttagctattattaataaaccaacaagcaaaacaatttgtttacttattttctccacttatttatttttttaaaaaatatataaccattcctcattcgatttcacaattatccatggtctccgtgaaaaattctaaagtgattacatgttgggaaggaagtaaagaattgatctacgaatcatattttttttagataatagaatgaaatagcatcccggtctttactcaaaagagctacagccaattattacaaaatagcactctgtaagagtaaaatccaaatagaagcaaacacaccaaccaaactagacaaaataacattattctagtctattggtaaatctccattcatgattggcaaacagttgtataatcttcgtttcaagcttacgacatgcaacaattaagaaatctgtattttcatcacacttttgtaactgtgacaacagatgaagccaatatgttgccttgaaaatgacctgcatataagtaacagtaagtgatttatcaaaaaccctatcatttctactcagccacagagcccaacacaaggcagaagctccaacaagtatcagtttgctctttttgtttatgactccctgaagccaatcatcaaaaatatgagatatgctagtaggaatatataaaccaaaagaaaactaaactgctctccaaataaactttgcaaaatgacaatcaatgaacaaatgttggatagactcatttttcgtacaaaagcaacatcttaaattaccattccaattccgtcttgctaaattatccttggttaacacaactcccttaagcaaataccacataaagatcttgatcttaagcggcatcttgagtttccaaattaacttatttctgtcaatgtaaccattattaattaaagctaagtacattgatctaactgagaattggtcattctgatgatagttccatctaaaacaatcagaagtattattcaattgaatatgaacaatagatgcacacaattcatgccaaagtgttaaattctgaccaactaaagctctcctaaaagaaacattgagcggaacagaagccatcacactagcaacagaagaacttctccttctgacaatagcatataaagatggatacttttctctaaaggccatatttcctagccatctatcttcccaaaatcttatttgttccccattattcacaatccaagaacccatagttaagaaagtgtttttgacattcatgagtcctgaccaaaaatgggagtcaccttgtttcctgtcaacttgggttatagacttattataaagatactttctcttcaataggtcttgccaaacaccattttcatttattaacttgaacaaccatttactcaaaagacatctattttgaatatctaaattatgaacccccaaactcccctgttctttgggttggcaaataatatcccatctagtaagtctataatttttcttatggtcatctccttgccaaaagaaacgaaatatataataatcaatcttttgaagaacccctttcggaatctcaaagaaagatatcataaacatagctaaacttgaaaggacagaattaatcaaaaccagtctacccccaacagacatatgttttcctttccggctgctaaattttttctctattctttgttcgataactttccaatcattattacaaagctttctaaaatgaattggaataccgagatatttaactggaaaagatcttaacttacaaccaaagatattagaatattgctcataacactccttttcctgaccaaagcaaaataactcacttttgtgaaaattaattttcaagccagataatttctcaaagatagacataatcaattttaaattctttgcttgttgtaaatcatactccagaaaaatgatggtatcatctgcatattgcaaaatagacaaaccatcatccactaggtgaggaaccaccccatgaagagatccattatctttagctcttttaattagtaaagctagcatatcagcaactaaattaaagagaattggagatagaggatccccttgtctaagacctttatgcgtttgaaaattattaccagtttgatcattaactttaataccaacatgaccaccttgaataaaagaggcaatccactcacaccatttagtagagaagcctttcatcctcaaagtctgttgtacaaatgaccatttaaccttatcataagctttctcaaaatcaatcttaaaaattacagcacttttgtttttacgatgtaactcatgcaaagtttcatgcaaaataaccacaccttccataatatttctcccaggaatgaaagcagtttgagtaggactaattgccttttgggcaaccgtcatgactctatttgtggcaactttggtaaagatcttaaaactaacattaagtaagcaaataggcctatattgctggattttcatggcctcaacatacttaggtaaaagaatgatcgtaccaaaattaagagagtataaaggcaaagtatcattatgaaattctttaaaaagatctaataagtcacattttatgacattccagaaaacttgataaaattcagcaggaaatccatcaggacccggtgctttgttatgttccatttggaagatcgcctcattaatctgtttttcagtaaaaacatgcgttaaagcctcattctccaactgagaaacttgaggaatgtcagcaaatttattctcatcaaactgaagagtagaatcattaggaggcccaaataaacctttataataagtggtaatatgcgatttcaaattcgcatcaccatttattaattggtcaccatcatgtaattgaaaaattctagtcttcctatgttttccatttgcaaccaaatgaaaatattttgtgttagaatcaccctctaaaatatccttagatttcaccctctgataccatttaacttcctcttctctcagaattgtagataatctatttctacaaaaccatctaaaatccaactcctcctgactcaaaagcatagtttctgcctttttatctagcaaatccaacttatctaaaatctccttttttttcttttttgtacaagccactagtatgtttagaccaacccctaagatgctgtcttaaacgacgaattttcgcctgccaccgctccatggcagaattgcgttcatcaacactagaccatatctcctttaccatatcaacaaagccatcacgtaaaagccaaccaaattcaaacttgaaactatgttgagcattactcaaagaagaagtgtttgtatttaaaagtaaaggagtatgatcagaaatatctctattaagagccaccacagaagataaaggaaatttatgttcccactccgtgaacattaaaaccctatcaagtttctcatatgttggattcactaaattgtttgcccaagtaaatttcctaccagacatctgtaactcccggagacataacccatcaataatagcattaaaaaggaatggccatctatcatcataattatcattattcttttcatcagggctacgtacgtagaatattaaaatcaccaccaataagaattggtaaggtttcatgactgcacatattaactaattcagcaaggaattgatccttaaattcactttgtactggcccatacaccagaactaaagcccacttaaacttatcaactttattacataaatgaaacttaatgtagaaatctccctcatcaatcaaaccaatatcaacattaattaaattgatgcccaaaagcaaaccaccggacctacctctatgaggcttgcaatgccacaaaaattatttgccagcacacagatttttaagaacagccggactaaaatctttcttaatagtctctgacaaagcaataaaatcaaggtgatgttcctttgttaaatcagaaataaacttatgttttttcgggaccttaaacccatcacaattccagaacaaccctttcatttaaaaatattctttttttttctttccccttttagtctttttcttactattaggagaggtatctaaagaatataaagtggtctaagaataattatcatccacaccactaaaatccatcacctcctccattaattcaccacacaaatgttgaagtagagaattatcatccacctgatcatccaatatctcgctatcaacatttgaagtatgtacctgattaacagaagaactaacatattcacttaacatcttttcctctatactctttaaatcatttataacatcatctaatatgtctacaacgtttgctgcaaaaattcccttaacgctgataatcaaacgctacattacagacactaacagcgacgttcttagcttgtcaaaactctcaactacgagtaatattaattgcagtggcatctctggttgggattgtgaagtcaaaaaaaaataaaacaaaacgataagagaaaaaaaaacttctcctgagaaaaaaaaatccagagaattataggtgcctcactgcctctcctttttatctgctgtggattggataattggacatggagacaaaacccaaacacccccctaaataactgaagcaatcacacaccttctctgcaaaaatcccaatctaccaccgcacccaacgaagcttaagacagtggaataaagcagagagagaaatcaaagcaagaaagagagagaagaagcgaggcaagagtcaagaccatctcccatggccagtggtgatagtagtagtagtagtagtatataaaaggggagcgcgccacggcttgccaatccgccgcgctggtgtgatgctgcgatcgacgcatccgccgcccagtagcccgagcagcagcagcagcggcggcggcgggggcggggggtcgtcggcgtcgtcgagctcggagaagacgatggtgggcggcgggggaggagggggaggagggagcgggtcggcggcgccgagcggggcgaagctgctgcagatcctgaacgtgcgggtggtggggagcggcgagcgggtggtggtgctgtcgcatggcttcgggacggaccagtcggcgtggagccgcgtgctgccgtacctcacccgcgaccaccgcgtcgtgctctacgacctcgtctgcgccggcagcgtcaacccggaccacttcgacttccgccgctacgacaacctcgacgcctacgtcgacgacctgctcgccatcctcgacgcgctccgcatcccgcgctgcgccttcgtcggccactccgtctccgccatgatcggcatcctcgcctccatccgacgacctgacctcttcgccaagcttgtcctcatcggcgcctctccccggtacgctcgcttccactgatgtgaatcctttctcgctcttaaaattgaatctgatcgggggcgatcggggagcacggacatgtgtgtgcaggttcttgaacgacagcgactaccacggcgggttcgagctggaggagatacagcaggtgttcgacgcgatgggggcgaactactcggcgtgggcgacggggtacgcgcctctggcggtgggcgccgacgtgccggcggcggtgcaggagttcagccgcaccctcttcaacatgcgcccggacatctccctccacgtctgccagaccgtcttcaagaccgacctccgcggcgtgctcggcatggtccgcgccccctgcgtcgtcgtccagaccacccgcgacgtctccgtcccggcctccgtcgccgcctacctcaaggcccacctcggcggccgcaccaccgtcgagttcctccagaccgagggtcacctcccccacctcagcgcccccagcctcctcgcccaggtgctccgccgcgctctcgcccggtactaatccaacgccccccgcacgccaccgcggcgcgccgcgcgtgcgcgtagccgcagcgacgagtcaaaacgaaggagaaaaaaaaaaaccaccgcagctgcggctacggtacgtgtggcccagtagggggacacgcatccctctactgtttttttttttttaccgcgtcggattttactgcatttttaccctcctcttctcaggcctagaaaatatttcggcgcgacctgccaagaccgagagtgtactgtagcattagtgctcgatttttacctaccttactctattggaaaaaaaattacattactggagtgcttcgtgcatacaattatttttctttgtattttttcactcgccgattggtgatggtctgattgatggacgacgccgtgggccttctcacggcgagtgttcgcgacggcgcacacgggttcgtttgtttgtttcttcttcctccttgtcccggcttgacgtcttgtcgtttcatttgtcaatatctagccgcagtaattttttcttcgtagtactaatatgttcaattaatttaaatcgtatcattatttgttattaacaaatatataacgatatttactttgttatatagagaatttagcaacatcatatttaatttatcctatcaaaacttaataatgttgtcaatttatcaaatttttgataatataaatttttgaaaatgtttatttaggcagtaatttctactgctgctgtagaaattacccttcattttttgtacggttaaaacgtctcaaggaatcgtcggttgtgggagcggtagcagctaagcgatggcaaatcattgtcaacgacatgcatggcccatcttatcgccatttatatcgccgataaggaggttgaccctgccatctaaccgcagcctacggccccccagagaaatcacaagtcgccacgtgtaccaacctgattagtcaccagtagctttgtctgccccagttggccactactctctcggtcttaaaaaaatccaatctaatataaggacggacataatctagcacaacaaatctagatagtcttttgccaagatctagatagtcttttgccaagattcgttatgttaggttacgttacatctcaatcctagcacaacaaatctagatagtcttctgccaagattcgttatgttaggttacgttacatctcaatcctatgttagttttttttggtacggtccatacggaggaagtatgttcttgctgagagattcctatgctctaaccttacctacacctgccatctcaaaaatttggtagcctttcacacggataaaacgagatggataaaaagattgctctataaaataagagcgggtacaataatgaacggtattagtttcacgtaggattttgtgatgaattggaggagaggggggaagagagagcgcccacgactaatttgtcgccgcacgcgctgcttaaagaagttgtggggctcgcctgtagatgaagaagcattcctacatcagccatggtttgcgttggtgctgctcctcgatactccatggctaacgcccttgtccatcgtgtccattggactgtcaccctcggcttggccggcgccgactcccgcatctaccctagccgccatcgtctctcgcgttcaccagacaactgagctcgtctagcccagctgtcaccgtctttgcgtccgccgcacatgcaccgttaccttccgcctccaccacacagccgcctttgtcttgcacgacaaccactgtctcttgcgtccgccagaccgccgtagtcacctgcatccgccagatcaccgtcatcgtccatcctcgctgactgctcaagcccaaaatcgttgacgaatcgaaggtaagaaaaggagaaagagaataatacaggaaatgatgaggtatgaggaagaaaaaagatggtggatcccataaaacaataaaatatttatgttataatattcatattataggtattagttactatgcttactatagatgacacggtcagctaataacatgctatcttaaccttgctctaagtgaggaatatagatcgagacttgttgggactataattaagttaagtggtaattttttttatcttataagtaattggttgatatatttagaagaatctgctatatttttgaacggtctccgttaacgatgtaagtacctttaaaatttgtacacgaaatttataaagtattctatctcctttcaaccacctatcactaaattctcgtcgaaccacaggcttcagcctttcatcttgtctaatcagaagatggcaaccgcacttgaataagaggcatcaaaagtcttttattttccttcttaataatgtcataacaatcttagaaatgctctacacacgtggatggactatggagggagtagcattactatctgaatttgattgtcgtgtttttttttctttcagacgatgtgggcaatcttgacactgttttaggatgctctacggtgcgcgtctgtgtgtgagagtggttgtgtgggctgtgggtgggggccttgatggggagccaacgtgatgatctgcgtgatgcctagcttttgatacggtagttgtggtgttgttagctggccaaaccaaagcctttaagcttgtggacaataatcaatgctgatggataaataacagttgatcatggagtattagcatttggcctatctagtagtccgcatattcttatccacaagtgataagtatggattatgtctgcaatcagcgtcttgctagttgctactatgaacgaaccaagccaaactaatccaatcgagttcgtgctccgtaatacagtttcagccaattgtcacgtaacgccaacttttgtgagccccatcgaagccacatcaatcagtcacacacacatgtacacacgagctgtgagcacaccctggttatccatgtagtatgatccatggatcatcttgctggatgtgttgcggcagagaaaccagcacagtgataagcagtgttacaactttttttttttttgcggggaagcagtgttacaacttgcaagcctgttgctacagtgcactttcattatttcatatttgttggattgaaatcaagcctagctcagctgggtagtttcgttgactcgttgtggacttgtaacctgaccaccggtatgatttagcgatgtgtaaatgcatggacaaggggggtggcaaagaaacgaagaggataggtgaaaaaggaaaggagagggattgggaaagacgacacatggccattttggatgagaccaagttgcaatttggtgcatacactttcgtctaaaaaatcaacttctaatcttctacagacgtatatggacaaatatttgttcagatatatctttgtgatgatatgaaacaaagaagaaagtacaaggtaatttttttcatctcaatatatagtaacttagaaccggatgaaactataaatatgaataaatcataattaggagtagatatcaagccagctcgcctcgatctagctcgttaggataacttatccaaacgagttaaaaggttgactcggttgccggctcaagccagctcgtttagcttgtgagaccgaacaagatatcgaaattaggatggagcaagatacaactttttttttgaacgactcgcacgagacggtgcgaagttctattgatagaataggaaaaaaaatacaggattaaaaccttggtagatcgtaaccaagaaaaaaggggaaaaataccatcacccacacaccgacagcgccaacacacaggtccaggagaaggctgacaccggaccggtcgccactacgccaacaacgaatcatagacgagatcgccaaaaaaacacccttacaaccaacacaaagcccaactctatccacgtcttccagatttagggagagagggtgagagagaagaacatctgtccccgcccctaggctctccgacgtggcaaatttgtagaaactaggacgccgccacaagaggatgagaatctagagcgtgcatgcaccaattgttcgagtggttcggcaaggggatgcctaaacgacgtctccaaggagagaagcgacgaaaagccgctgacgtcgtccgtcagggtctcaaaagagccaagactgggctttcacccggcaaccacccttaagggatgagacagcacgacaacgctctcaggagagggaatgacaccatcgttgtcagtctggccaaggccgggttaggttttcagccgccgctcaccacctgctccaccaccgaccgatgctccaccatcacccaactctgccgacatgtcggaccacttcaccggcgccccccccccccccccccgccggccagccttcgtacgccgaataccgcgccacacctaccggcagctcctcgcaccatggtcacctcctcctccgtgagcaggccttatcacgctgcgccgacctcctccaccaccggacgcgccttatcgcgccaatccggcctcccaccaccgttcgtgtccctcacgccaagccggcatccaccatagtcgggcatgcttctcgcgccatgccggtctccactgccatcagccgtacctctctgtgccgaggaccagcctccgacccctcctccaatcgctgtcacgctggccagatgcggccgtctgccacgcccccgactagccattcgagaccgtcgtgcctccttccatcgcaaccacggtcgccaccgccgtgcctcctcccactgcagccacggtcgccacagcagccgatgctgccgtcggccagccacctgctgttgccgctgttgccaccgtcgccacaagctccgcgccactgtcgccgctgcgacggcctctcccgccacgagttcaccccgttgacgctgacgctgtcgccacgagctccgcagcaccgccaccgccgcaagctcgccccacaccagatctgccctcaggagggccggatccgtccagggcggctccctaggttacccaagcgtggtcccgccggcgagaagcgatccccgccgccgccatccttgcagccgctgacaaaagccggcggccgctcaggcggcggcgaggcggaggagagaggtgggggagagggggtggccggagctcgcctccctagccatccccggggagggcgacaggagaggtggggttgacgttccttgattaattccaagatacatcaaattcataatactatgccatcatatatggggagagtgggagtaaggttctctgctctctagcctgctctctagagcgggccccctctccgttggggtatcgaaggaatcccgatccctgtacgcgataagatggggccatgccatgaaccgggtcggcgtcgtgcgtgccgcgtacgtacacatcgccttggttgtgcctagttgccctatagccgcagcttatcctccccgtcgtagaggcgacaaccgacggcgagccatctctcgagtccgaggcccttccgcttttgtcgtgcccggcgcgacgttccgtgccacattcatcggccgcacgtcgcgctacagcgggcggcgctgtgtgcctgtgttggctcgcggccaaaaagcccaagagaggggaggctgggagaggccccccatctccatgtcgagtcgccacatgcagtgaccagtgatacagtcatatgtacagtagggcactatgcaagtatgcaggtaatgtgttggaggcacacgcgcacgggcggcggagccggcgggaaacactgcaaggtgcatgagattgatgtgagagacggcattttgatccattgttcgtgaatgtggataatttttaccgtaattttgacaatttgacccttttaaaaaacttattttgaaattgaatcatcccaaaaactaatttcaaaattaggccgttttctcagcgccatatagattagcgccgagatgtcatccgaagtgtcacggattttacacgtcatccgaggtcatcgccaaatactctttgttcaatttacaaatattagttatctacaagcttccattgcacacacaaagacaagaaagcttggtgaactctaggtgctaaatactgcgaggtaatgggttcgatcctcagccaagcaagtataagcatcttttgctgttctatttaaaaatctcacatgcttttcaaattcattttatttttaaatatggatgttttttaatttattttatttttaaatatggaaggagcaaaattatgtatgtggtatttatagcttaatagttggtataaaattacatctttcattttttttcaccctctattttgctacataattatgtatgcagtattgatcctaaaaggaaaaaaaagaaaaataagaagttacggggttcgaacccttgacctcttgttatgagaggcagcccttcaccaccaggatagaccttccataaggctagaatgtacatgcatactatttatacaactataccatggaggttagcaccaaattctttagcgctgacatcgcatcgcatgacgtgtgatttacgtgacacgttggatcgcatctcaacgccaaagaaagtggcgctaatacgttgtagctcagcgccaagtacgatggcgcgagaaaatggtctatttttaaaattagtttttgacacggctcaatatcaaaataagttttttcaaagggtcaatttatcaaaattacggaaatttttactaggcgtatatactagtgtgctataagatgtaaatcatgtaatgtactgtagctgccagtacaagcgctttttgaacactagcactgaaactccaaagtgattagctagctagtaaagcgactaaagcgatgtcagtaagatcatttcttttctgattaaaacgtagtaagggttgattgtgtccgattgtacatcgaattcgacggtctgaaggctgaagcgatgcggaaaggctaatccgcgcgctgccggcgcacacgctggcccacaagaccaagacccatgcacgcgcgcttttgcgcttctctcttttttttaacgccgctgtttctttttttttttcttttttttcgccgtatgttgttcctgccgtacggataaaagaaaaaaatataattagtttagattagtttcctatttttactagtggttggtttactagtaatttttaaattttaactttaaatttttcaaatttagacatgaaaattttcaaatctcgagctgaaagttttcaaatctcaagggagagagggaggagaaagaaggatagatagggtcatagggatgacatgtgggtcctataattactttttgtgtgaatgacaaatagggcccatatagtttttaattctaatgctacctaagcgccacgtcagtaccacaaaccaagtcaacatcgccacatcagcgccacgtcagtaaaaccgccgtccaaaaccaatgagggagtcaaattgcactggtttgaatagttcggggagtcgtcttatttggttttatggttgagggtcacggattagattcgggtcacttttaagggagtcaaagtggacttattccaatgcacgatgcacgaacgactcaagccaccggttggttggaccgagcctcgctgcgaggcgctcgggttggtcccggcacaccgtgcggagtggaggcccgtcaccgtgatgcgccgttcactttccggcctttcccatcgcagagaacgacgggaagtccagaacacgcaacgtgtgcgcgtgggggtgcagaccgtgcagcgcagtggtgggtggtctcgtcgtttccaccaccttccccgcggagaagacgcggtgcacgttcctatcaaaagcgcggtccttcagtactccttcgcatatcgtcgccatgacgttgaccctggaccttgagagtcctgctaaaacaggattgagatcctcaacatttgagtgcaccgtgactttatcactaacatgtgaatccggagatcatcagatccacatgtcaataataaaggcacggcgcagtcgactgcaaaagattatgttccgctaaaacactccccgaggaaaaggagacaggaactggtgtactatgtcgtcattgacaccttgtaattgtttcctgattgtctctcagatttgccgtacagggtatagatgcctgtggctgtgtagttagctcgccttggagtttcgaatataggccttcccaggatgaggagggggagggggaggcctggaggccggcccccctccgaacgcggtgatggctcgatcgagtcgccacatgcggggagccacatgcagtggatacagtcatagcgtgtttggttacctacacatgggttggctcacaaggagcgcgagtttggtttctcgcacgggctcctggacctgattccacttgtgcaaacctaccttcctagctaggcccgagggaaacgctcgatttgagcttcgctcgccatcttggctgggcgcgtgcacgcgcgggtgcaagaggaggcggggatgcatggatgcatgaggcagggagggttgaagcatccactcacctcctgctcacatttggtccttgaggccatggggtgagtgtagattcggggagaggggcagtgacctgcgtgccaccggatgactggatctggcgtggctggggacacgagcaccgagcggcacggcgatggagaggaattgcagagcggaccgcactgagtagttgactagcgacgagatctactagagtagtacatccttaggctgacctctccacttggccgtcaccgcacgatgcctagatctagcagttggttggctaccttcatcgagagccaagggtgtgacgtggcgggtgcgtgacgcagagacagagctggacatgttgctatggttccacttccacctgatggatgaggagatggagacgtgctgcctctccgtgcatgccgccggctacctgacccccgtcctcatcatcacctagatattgtttgggcgttgggagtggtgccaaacctgtctagtggtgcactacctatgcatgcatgccgctggctgcctgcccccgtccccatcatcgctgagacgttgttagggtatcgggggcagtgcctcttctgcatgcgcgaccgcaagtaccccaatggatcccgccccaaacacacattaccgagttgctatgtaccagccaccgtcagcatcggcagtggaatctgaattaagggcatagaaagggtagagacaaacacatagagaagggggagatgggtgtgtcactaacatgttagggccaccacctttttttatttttcctaactaaaatgtcacataggccgccacttaggatgaacccgtcatcgaaaccacttagggacgctaatcgatctggtactctccctatatctggtatcgaggttcatgacagtattcaaactcgacgtgtggacgagatatctaaaatgaacttattccatatgtcgcggacctcccgttcggccgtttggtctgggcctacgaccgtgcggagggaggcacaccaccgcgggggaacgaccggctcgttgaacgcacgaggcacgacacggaagaggagtgggtgggcgcgtcgcgtgggcgtggtggcctcgttgtttctttccgcctccccgcgccccgcggagaagacgcggtgcgcgttcctctcgagcgcggtcccatttgcgtcggacggcgacgttgaccgctggacctggattccggctaaaatactccgcgaggataaatgggaatcggtgctctaaccacattttcctgtgtccttgtctctctgattatttacagaataagtaagatgctcgtatggtttagctttgctttggagtttccaatttatgcattcccgggagtcctgtcctgatctcctggaccctctctagagaaatgcgaagtcattttctatggtagttgcacgtttacgacgacgcggattcgaggacctcatcaggcgaggattgtaaaatcgtgccatcgtgggaccatgttctagttacttgaggccccgtttagagggttcaccttttcctctgtttcggtaaaaatcaaaagttgtttgccacgagaaatagcgttcagccttcaacttatgtgttctctctctctctgaagactttatgtgttctcttcaataatattcaatgttaggcgcgtccgcacatgaggctagagagccggtaaggaatgaattttccgttggtttttccaatttgcacacttctacgaaggcaacacctcgcgatgacacaatgatgacaatggcacaaatattgcctacaagagatgctcaagtaatgctcaagtcactggaaagttgaaggaaacgtttggggctttctcatccggccgtacaagagaccaaaaagaccgaacgtctctcctacgcatgtacgtacgtgcagcagagctgcatggaatgtcttgaaaagttgccccccaagactcggttcgagttttgacccctgaattgccggcgcattgccagtagcgaacgaaataggagagaggagctgcccctgcatgcgcgcgatcatgcatgcacgcatcccctcccgctgctgctccctcctcctcctcctcgcatccgtcaggtcacttcctaaaaaaacacaggaaactacgcaaaaactcccatgattccgaccagccgaacactttccccacaaaaaaaattgcgctgaagttgccgtcagagagtcgccttcacgaacgccattgtgcgagttgacgcgtttcttcgcggaagaaaccaatgcccgcgttggctatatagaaagggtttgggttggcggtggggaggagatcggaggagggggtcgttggattgggacccaattgaaagggaaaggttgaagaggcgcaatggagagctacctgaaggagaatttcggcggggtgaaggcgaagcactcgtcggacgaggcgctggggcgatggcgcaggttggtcggcgtcgtcaagaaccccaagcggcggttccgcttcaccgccaacctcgacaagcgatccgaggccgccgccatgaagcgatccaaccaggtaactgccgccgcattcaacgccgatatatgttatgttcgtgtgttgcatcggcgtcgtaattgccattgccattgccaccgcttttcttggcatacttcggatgtgtaaactatcgtaatatatatatatatatatatataatgaaaatcattacgggctggggctgtcaggccttattagttcatctgtaaattactgagtgtaagctgcaatttttaggccgttcgattagattttactgtttcagatgtgaacctgattctgcattgatcaagaaaaaaatatttttaaaaaagatgatattcaaacgtacctgtttgactgtttaatctttatccagtttgaatgtttcactgttatccattgagctgtttgtgaagtttgtatcttaaaaaaaagatcattttaactgaaaacttaagattttgtttagcacctcccttgaacatggtaaatttaaaattttccataacctctggcaaacaaaatttatagtgagtaacatgttcctctgttacaaacttacaataatacaatccacactatgtttcttctggcaaaatcgcaagtataaagtataaacacgttacacgtctgctgcaagtctgcaacacatatacacatgtaaaaggtgcagcatttgtgcagtactgaagcttccacaacagtttccaggacaaagttctgcatcactttgtaaaatcaagtagtactaacgcgattaattaagtattagctaattttttttccagttaggaacccctcctcccatgcacgcaaaacgatgcttgcattaacgcgtgattaattaagtattagctatttttttctaaaaatggatcaatttgattttttaagcaactttcgtatagaaatgttttacaaaaaaacgcaccgtttagcagtttaaaaagcgtgcacgtggaaaacgaggaagaagtgttgggaaaattgggtgccgaacacattgcagttgagcatggtggccgtgtttagattcaaacttttttcttcaaactttcaacttttccgtcacatcaaatgtttggacacatgcatgaagcattaaatgtggatgaaaaagaaaaccaactgcacagtttacatgtaaatcgcgagatgaatcttttgagtttaattacgccatgatttgataatgtggtgttacaataaacatttactaatgacggattaattaggcttaatagattcgtctcgcagtttacaggcgaaatctgtaatttattttgttattagtctacatttaataattcaaatgtgtgtccatatacttaaaaaaaatttggcacatgtactaaacacagaaactcagcctgtgtcctgcgtcagtgtgcgtgttgacaaaccttcagccagctcgactattcattgtgtgcaatctgctgctaaaactgcacgttctttgagcactggaagattaaacgccagcaaactcatgtttttttcatgaattttcatgcaattgttccactgtaaaattcacgaggcttaccatcaatgcacatttttctgtaccgatttcaggagaagctgcgagttgctgtgctagtgtcaaaggctgcacttcagttcatccaaggtatgaacgatactgataccagttcacaatcacatcccagaatgaaatcaacatttttttctcttttccatggagcccaatcatgacattggcacgatcctgcaggacttgctccggcgagcgagtacacggtccccgacgacgtcaaggcggcgggctacggcatctgcgccgaggagctgagctccatcgtggagagccacgacatcaagaagctcaagtcccatggcggcgtggaggccatcgcggcgaagctgtgcacctcgccggaggacgggctcccgaagtcgaggcgccggcaagccgtccgggaggagctgttcggcatcaacaggttcgccgagacggagtcgcgcagcttctgggtgttcgtctgggaggcgctccaggacatgacgctgatgatcctcgcggcgtgcgccttcttctccctcgtcgtcggcatcgccaccgaggggtggcccaagggcgcgcacgacgggctcggcatcgtggccagcatccttctcgtcgtcttcgtcacggcgaccagcgactaccggcagtcgctgcagttcaaggacctcgacaaggagaagaagaagatcaccgtgcaggtctccccgaacgggtacaggcagaagctgtccatctacgacctcctcgccggcgacatcgtgcacctctccatcggcgaccaggtgcccgccgatggcttgttcctgtccggattctcgctgctcatcaacgagtcgagcctgaccggggagagcgagcccgtcgccgtcaatgccgagaacccgttcctcctgtcggggaccaaggtgcaggatggttcttgcaagatgctcgtcacgacggtcgggatgaggacgcagtggggtaagctgatggccacgctgagcgagggcggcgacgatgagacgccgttgcaggtgaagctcaacggcgtcgccaccatcatcggcaagatcggcctcatcttcgcagtcgtcacgttcgccgtgctcaccgagggcctcttccggcgcaagatcatggacgcctcgtacctgagctggaccggagacgacgcgatggagctgctcgagttcttcgccatcgccgtcaccatcgtcgtcgtggccgtccccgaaggcctcccgctcgccgtgacgctcagcctcgcgttcgccatgaagaagatgatgaacgacaaggcgctcgtccggcacctcgccgcctgcgagaccatgggctcggcgaccaccatctgcagcgacaagaccggcacgctcacgaccaaccacatgaccgtcgtcaaggcctgcatctgcggcaagatcaaagacgtggagagcgcctcggacaccaagagcttgttctccgagctgccggagtccgccatgacgctgctctcgcagtccatcttcaacaacaccggcggcgacgtcgtcttcaacaagagcgggagtcgcgagatacttggcacaccaaccgagacggccatcctcgagttcggcctctcactcggcggcgacttcctggccgtgcgcaaggcgagcaccctcgtcaaggtggagccattcaactcggccaagaagagaatgggagtggtcatccagctccccggaggagcaatgcgtgcacacagcaagggcgcgtcagagatcatcttggcatcttgcagcaagtacctgaatgatcaaggcaacgtcgtgccactcgacgatgcaaccgttgctcacctgaacgccacgatcaacagctttgcaaacgaggcgctccgtaccttgtgccttgcctacgtcgatgtcggtgacgggttctcggcgaatgaccagattcctgaagatggctacacctgcattggcattgtggggatcaaagatccagttcgtcctggtgtgaaggaatcggttgccatctgcaggtcggcagggatcatggtgaggatggtcacaggtgacaacatcaatacagcgaaggcgattgcgcgggaatgcggcattttgactgaaggtggcattgccattgaaggaccggatttcagaaccaagagtgcagaggaactgaatgagttgataccaaaaatacaagtaaagttttcgttgcttttgctggtcagtttaactgaattttctggatttcatttgctgatgtgttctggtttcatgtatcaggtgatggctagatcttcaccacttgacaagcacaccttggtgaagcatctccggaccacttttgatgaagttgttgcggttactggtgatggcacaaatgatgctcctgctcttcatgaagctgatattggacttgcaatgggcattgctggaactgaggtgattttcctcaaagatagttgatagtgttccccttgcatgaacaatataattaatgaattgcatcacttcgatttttttagaagtgtatttttgtggcaatttagccgctaatttagttgtcttgagttgtactaccatccatttcatgccctcatagttctatgcactttttcactcccaaaatttctcactgtgctatctgtttgcaggtggcaaaagaaagtgctgacgtgattattcttgacgacaacttctccactatagtcactgttgctaaatggggtcggtcagtgtacattaatattcagaagtttgtgcagtttcagctgacagtcaatgtggtcgctctgatagtgaacttctcctcagcttgcttgacaggtacagctaaatgttgatgttttttacctcattctactgtatagaattgatagtttcgttccgattaaaataacctttgatgttggtttcttgtaataactgcactgctgatacatgttcatcttttatacttctccttcaccactgttcctagtctgctgcctactgtttctaagttcaaatactgtttagtgttagtgcagcagaaatttttcgttagatttcaaatgagtggcagaagagatgtgctaaaacttaaaaaaataaactaacataaaatttattaatgtggaaaatcaagaatttcctagtttgtttcataacttactcttgactgttctttgtacttctgcttggcattcagggagtgctcctcttactgctgtccaactgctctgggttaacatgatcatggacacactaggagcactggcattggcaactgaacctccaaacgatgaactgatgaagagaactcctgttggaaggaaagggaacttcatcagcaacattatgtggagaaacatcctgggacaggccttctaccaattcattgtaatatggtatctgcagacagaagggaagtggctatttggactaaagggagaaaattccgatctagtcttgaacacactcatcttcaattgctttgtgttctgccaggtaatttgaaagtgcttgtcacatctatttagtgtctaaaataattctcttgcatacatttttgcaaaaatagaccttagctcttgaataatatgttggcaaatatgttttccaaggatcaatactcacatgaatgtagtacttcagctgtaaaatgatgaatgaaaaatttcagactatattttgccaatattagtgtgcagtttcattaaaattttcattgttgtgcaggtgttcaatgaggtgagctcaagggagatggagaggataaatgtatttgaaggcattctagacaacaacgtgttcgtcgccgtcctcggcagcacagtcatcttccagttcataatagtacagttcctgggtgatttcgccaacacgactcctctcacattgaagcagtggttcaactgcattttcatcggtttcatagggatgccgatcgctgctgcggtcaagctgatcccagttgatttctaagtaggaaagcagaactaattcaagacacgggactgaagtcggtagggattagaggcagtaccatgggcataacaaagttctctttatgcgcttgtttagatgtgaacctctgccccccccccccccccccctttttttcttgcagagtatgatccaagattgtatggtgtttaatggactcgtgtagatctttccttcatgtcattttcctcatgttctttccttggaatgttggaacttgcaattgtatatggatcgcttgataagtttgacatttgtttgattctacacccttgagtccttgacagggtgtatgaattgactcgtgtaagtttcttcccttgttgccatcctactgtttttttgtggccaatctgggactgtagcaaagttacttgcaataaaatcaatcgatttcattgtactggaaactacaatctttgttctttactcattgtactggaaactacactctggttgtcactaaaacgtgctttactggactgcatgtctgcagatgctatctttggttgtgtcatgatctgccatgttctcattcattcgacatactccgtattacagtcaggcaattttcagcatggttagctgtagtaggatttgtgaaatgcctccgctaccttccaagatccaagatataacgtcacatttaactttgaccacgaatctcagttgcaatccaaatgccagcatcagcagataatatgtactggttgcatgggcctggcaggctgtcagttaccttccttttggcatcccaggcttttctctcttcacacatcgcatgcaattgacacacacaatcaacaggcagcttgtgcttccatcactactgcaccacttcaccagtgccaatacaaaatgctgctgaccagtcaagccagtgactgggcatgttactgcccactataaaattccaacagcgtcggccaccagtagccatgcccctgtgaaccgcggtgaacccatttttttaccttgctgccaggcacaagacagcccaacacaacagatcagtacatgaaaaaaaaaattttaccatgtctctctctttctcatgtcatgcttgtgcagcgcttttgggttttgaccgcaatgccagttgctaccgcccacgacgagtcaccaggggctagaggaatccagtgcaagggttggtcatccacagccatctgaatcagattcagatcattcatggggagttgtttctttgcgtggtgtttagttggagggactaaattggggctaaactttagtccctctaaaaaaacataagtccctccctgtggtagggacttatgtttgagggacttatgtttttttgagagggactaaatttagtccctagttcccaaacacccccttggtcaaaaacttcaaagatccagaccacacaaaacacagcagctcttgtactccactttcatcagaggttttcacagtgctacactacacgcactgtcttcttggaggcagttaaaaaattggagggaaaggggaaagaagcagatccactcacatgctccccaagatgagcaattcatcagaacctcggcagctggtgagaggaagctgaagagtgaagaagagtctttcttttggcctgttccacgtgtcctagtggagtgtactactactggagtagtgatttgcattgcatgatgcacaattcagagagagctaaagaaggcagcgttacagctgctttcatgcgagagagacaaaccaacagtggcagtcacctccaagaaggcaaagaacagcaaagccattgctgagaaatagcaaggcagggtgatttgatgacacggcacaaaggcaacatcagaaaggcaccgagcaaacgcatttcttcctttcgtcccacagatatcaataaacaattcccaaccactcatggtcagcaattgcacacgagacacgagagagtagagtgaagtacagtgagagagatggcccctgccccctggctatccaactactatcaatcagttcttgcaacaaaaatgtactaccactgtttggctttagcatcaggaaattgctaatgaaccaaaatggcatgactcaacagagagtaacagataaccatacagtatccacaaaaaatgacttctactcaatacttgggaattgggattccctctctctgtctccacatctcagtgaggacttcctccctactttgagcaagagctctttatcagttttcaggccttttcctctgctctttacactagtacctttctgggccagggaaagatctccacaaaaccagaatctttccattgctaactaatcaatcaactgtaacaattgcataatcagaagaagaatcaaatgttggcccctccatttggccaaccccccctgaacttgcaagagcactgactagggctcagctgaaacaaaagaaaaagggtgaaaatgatcaactaaaaattgcagagctggactccaaccaacatgctgtccagctccagcctccagctcctccctctactggcgctgaggcgagtgcaaccttttcctcttcttgtccggggttgcctccaaggtggtggcattattggcccctcccatggcgctgtcctccgatcccccaatgtgggcaacagagacacccgaggaagctacctccgtcgtcgattgcatcgacctgtcctcttgaatcatcatcttgttgtagcaggaatacacatgcccctgcaagagaacaacagcgttgcagaatttactctcgacattgtcatttctaccaagaacttaaacctaatgggatgagatctcgcaaaagagaaagttgggagtgcttacggtgtctagttgctgccataacgagcccacgaccgacttgagctcgtctagattaggcgccgtctccttgttccgagcgatgaggattgctgctagagcgatcgttgatggctggtaccccaccgagctaatgactacgagattgcggaaatgaaatgagattcttgcgatccgattcggtgaaatgaaagcagagggggggaatgatcgacctttgatcgaggcgaagatgcattcgatggcgcgcaggacgatcgccttccgctcgtcgtgccggaatttcgcggtgaagcagttcaggtaggagaagggtgtctcggtgatcatctgccacttgagcgtggtgaggacgaggagctccatccgcatcaaggacgcgcagtcgtacatgtccagcttgaactccggcagccgcggcggccggcgctcctccaccttcgccgccagcgacaggcacgccaccgagaggagctgcagcgcccactccttgtccctctaaaacacccccacacacaaacacaaaaaaaatggcaatacggagtcaggcattacgtcgaacacgcactcggcatcacgacaacaagagtgaggcggcgcatcaaggcaagcagggaggatcgtcattacatcgacacaccggcgcgccaagaaccgatcgagatacgtcaccgcgacatacgccgtcttcaagctgaaccggaatcccgcgttcgtctgcaaccagcaaagcgaggaggaagccccccccccccccctccgaaaacaagagtcaatacaaagatccgatctccgcgaaaccgtgtggagagtaatctcaggtcaagggggcgacaaagagaggaggagacgcgaaacgaccttaacaatccagccgacacaccaggcgcgcgcgttcttcatccactcctccaccatctcctcctcctcctcatccccacgctcgccgccgccgccgccgccggcacacctctccttggacagcatcagcgcgaggtactcatcgtcccggtccatgagcaacacatggtcgtcgtcagcaatggataactcccagtcgccgccgctgccgccgccgccatcgtcgtcggcggggtcggcggagaagaggtcgttgccatcctcccggcagatgagcgtggacgtgggcgtcgcgggcgcggaggtggatgccgaggcgtcccccatggtcggcgtcacagcccgccgcgcatgcagaagaagaagaaaaaggaaagaatcgagaaaagggaggcagaaatccaccgggacgaaaaggcggcgtgcgggtagcgggcgatcgaggcggccggaacagaaagggatcgattcccaccacctcctccgccgcctccgcctcgtgccgtgcctccccccaccacccgcgcgcgcgttgaaaggggagggaaatctgcagttagagagagagagcgaaggaaaggggtggactgattcaggactggattggaatagagagagagagagagagagagagagagagaggtgtgtgcgtggaggagtggccgcgtgggggggttggatggtggtggatggagaaggcgacgcgcgcgcgcgagttggcgcctgcctgctctctgcggtgctcggctggcctgcctggctggctgcgtgcgtgctcgcgtgcgtagtagtagtagcatactactcgtggtaaagctcgtctcgtgtgatggctgctaggactcggctcttctctcgtctcgtctcaccacatgtactccctccgttcccacagtataagaaattttaaatttttctggtaacttttgaccactcgtcttattcaaattttttttacaaatataaaaaacgaaaagttgtgtttaaagttatagataataaaataagtcataaataaaataaataataatttaaaaaaaattgaataagacgaatgatcaaacgttgtaggaaaaacttaaaatcccttatagcttgggacaggggagtactctgtacgtatgcatgcatcttgtgtgtttcgcttcacggtctatttctactgtaagataaactgatatatgtgaaagtttagaggtccaaaattgataaagagggttttcctatagggaacgacacgcgagtggcgcctctcctctgcgttggcctagccgtctgctcgcgtgtgtagcaatgtactactggtggtaacgctcgtgtcgtgtgacttgcaggatctgctctcctctcgtctcgtcttaccgcacatacttcatacgtttgtacacattttatatgtgttttactccatgctccacactactataagatcaaccgccgtgtgacaagtttagatgtccaaaattaataaatatactctaaggtattttagtaacacacgagtagcgtctctgcgctgctccgctggcctagttgcatgctcccgtgcgtaatagcatactactggtggtagtgctcgtgctgtgtgacaagctaggtctcgctcttctctcctctcgtcttactttgtacgtatgcacgtgtcttctgtgtttcggtccatagttccactctactctgagatcaaccgtcatatgtgagaagtttagaagtttaaaattgatacatatactttgaattatgatgttatcttctattatgtcgagtagcttagtcataaggtttattaaaaaaaattctcgggtttgcttaaccttgacgcttgtattgtaaccttgtccctgatgctgctagcttcgctagtcaagtaatccacgacgcgcgtctgttgctaccaaacaagcctgtacagtatggtgtgcagaatgagtgagggcttctaaaatttttgtttaggtccacaccaaaccaatttgttcaagttttagaacttcctcactcaatttcttttaagctgtcctttctccttcggcgattatgctaaaagcctgaaatatgttcgtctaataacaaggtatagctaaagagaagaacattagattaatcgctagctacttttctgatgcggatacatggcacaccacccataataggcatcgagtataaagagcaacgtacagcggtgaactgtacttttaattttatttttacaatatttaaggcaccggccgggcctctaattcgtagatatagccatactaccaacgtgtgatatatacatgaccaaggtcatgcaaactacatacataaaagttttttacctatttggtcaatcggacaaaacacatatatgtgcatatcatggtggccacatgtccacaaatacacactctttaatacacgtttatatgacaaagagacaaagactaagaataaatgcgtgaatcttgtccatcgatttaaaccttaatagttaataggtaaatcgattgtttaatttgcaatgaaccattatattggtattaatcaaataatttcgacgtaggtgtgatttttaaaaatctcattaagaggatataagggttccaaggtagtgattattcttattatcaaactttatgtacaagtactttaggcgtgattaaaatggaatcacgtaccaacttttgctaaggctgggttgtgtcacatattctccaacaagttcctatagaaaatttacatgcgaatagcttttggactgtagaactcaaaaatcaaaattcatgttaaagtttcttgtgggaaacaactttttttttcctgaatcatatgaccaaatttcacgagatcccgaaacccttatctcattgtttcagaaattagcttgtcaaggggaaagcaccggtagtgtgtagagtcattggaatacatgcggtgtattattaataaagtttagttagaacaaggacatgtagtttggccttcacctttttttttaaacgtttgttagtggaaacatttactaccatgtatagttataattgtgctggtgcatacacgtcttttgtgtaatggaaaaaaaagaaaaaaaatatgaattatcctcctaaactatagcggtcgatcaaattacctcctaaacttgaataccagacattttacacccttaactattgataccggacaaataaccccctgagcactgtattgagtagttttgacttgagtttgcataaatagccggtaacgtggcaatcaagtcagcaataaaattatttttaaaaaaaatcaatgggcccacttgtatatctttcctcaagccaatcctccccactccccatttcaggtgcaaatcaatgggctctctctctctgtgcacctttggctagagaagtaggacagagagggaccttgctcgaaaggaggcggatcaacgcaagctcgcctgggcacgcgaagctggctctcggaggtggtgggccaaagcgaagctagagctatgcggaggttgagctcgaaacggccaccatccgctacaccctcacgtgtcgcggtcacggtggttgggatggcaacaacgaggcaaaggttggggacgaggatggcacactggagatcagaggtggggatggcgtagtggagattggggggggggatagcgtggtgaagattgggcacatgggtggggcagaggttgggggacaggaatggcgcactggagattgggggcagggatggcacggtggagattgggggcaagggcgacacgacagaggttgggggcaagggcagggccacacggtgaggcggaggttggggatggggacggcgcactagatattgggggtggggatggtgcggtagagattggaggaaggagatttttttggggggggccccaaacccaanggncnnggngnaanttggttntngnnggngngnancngngngngttgggggcccaacgcgggttgagtgcggagggttgaggacggggatggcaccgaccatcgggtgaagggaagagagagcagcgaggcagaggttggggatgggggcagcacggtgcagtgtggcggaggttgggggagggggcagcaaggtggaggttaggggctgggatggcgtgccggccaccgagcggagggaggagagggagagggatagtaggggggaaggattaggctgtgggagagatgacattgtttttttaataattttattgctgattggattgccatgttggtgcccatgtacgcaaactcaaggcataactatctaaaatgggaggttaggggctgggatggcgtgccggccaccgggtcggagggaggagagggagagggagagtaggggggagggattaggctatgggagagatgacattgttttttttaataatttcattgttgattggattgccatgttaacgcctatgtacgcaaactcaagtcaaaactgtccaaaacagtgttcatggagttattcatccggtattaatagtcgagggtgtaaatggctggtattcgagtttacgagtttagggtaattcggtcgactactatagttcaagagggtaattcgtaccttttaaaaaaactactccttccgtcccataatataagggattttaagtttttgattgcaatgtttgaccactcgtcttattcaatttttttttgcaaatataaaaaacgaaaagttgtgcttaaagttatatatataataaagtaagtcacaaataaaataaataataatttcaaaaaaaaatctaataaaatccctactaccacttctctacaagaaaatgccatgccttacttgctatgtttggaatcattactgtcttactgatccgatcttgccatcccactacgagggagcctacaaaattgtcactcatgtgatcgtgcgcagtccggtgttacagaaataattcaatgagtaaggaaatatttgtatcgatgtgcagtatataatagagaaatcttggagaggaccactgtccactggccagatcgccattacatgcacgccatttgctgcctggatagaacttcgcgtggtttctgatttctttgtggtttacccccgagctcgctaggaccacaattcagttagtgaatagttgcatatctcacttgctccaaattgcaaacaagatctgttccaagcttatctagttatatatatactgtatctcactagactagagcaattaggctgtgttcgggcattcttgctcccatccggaacagtaatcatagaaaacggcacggtccattagcacgtgattaattaagtattagctatttttagaaagggttaatttgatttttttaaagtaactttcgtatagaaattttttgcaaaaaaacacaccgtttagcaatttgaaaagcgtgcgcgtagaaaacgagggagagttgttgggaaaaaggggtgccgaatacagccttagtatatatcgattaagaccccctctaaacaatggatttacatataaattttataggattcaaattttaatggttttttttctctatttagctctttgaaacaaaggatttgggcttttatatcctataaaattcctaagaaatgacttaatgcctataaattttgaagaaagttagcaagagctttattttttgaaaaaaaatatttgagtccatctatgttatctgatttttttttctttttgttttttatgcggactattcaaatggtcgttcatagattttccgatgttttccacttatatattcatattaaaattccgtatttttcatgtatatcctacaaaattcctaagaaatgacttaatgcctataaattttgaagaaagttagcaagagcttcattttttgaaaaaaaaatttagtctatctatgttatctgattttttttctttttgttttttatgcggactattcaaaaagtcgctcatagattttcctatgttttccacttatatattcatattaaaattccgtatttttcatgtttctatgttttctataaatgttgttggcgattctagcaaccacgctgctatggctacttaattaagattaagaagagcgcacagagagttagagctaggctgtgtttagttccacaccaaaattagaggtttgaagaaattggaacgatgtaatagaaaagttgaaagtttatgtgtgtaggaaagttcaatgcgacggaaaagttagaagtttgaagaaaaaaattggaatctaaatagggccctaattgcaaatttgcaatgtaagtgctgtaccgcatgcattatctaatctgtcaatcagatcctaccctacagaatacactatcggtctattttggaaacaatgtgtactaactttgtagagttttaatcctatagaaaaattttctacctagtcatttgaaacatagggttgaagcttcctaaatcctatgaaattcctcagaaatatctcagtagaggttcaacctattagaaactttcattctagtctgttattctcttccggttcctatattttttttctatattctatttaaacggttatttcttattcctatgttatcttgttgtgttttataattttctgttttgcatatacatttctattaaaatcacgtgttttactatttcagtgtttaattgcaaatggggcttgctatattatgtgatggttaattcaattacaaaagaaactgaagtacgactgtactgcttgctagttgcagagacttgcagtcattgttcagtccggcatgcactgatcgatctgctacctgccctcactgatgtatcatggatcaatccaagcaccaaacggttacagtagtatatgcatcctatgaccatcctgtcagtaactagggaccatgcattactacggccagttccctcccccatttttccatcctaaaacttaagtgcactgcataaagcgcatatggttccggtaagactggtttccataattctaactccatatatcgtcttctctgttcagaggcttgcacaagctgtgaagatgtaaccagtaatctatcttatctatccgtctagtgcacttgatattcctccaatctatcttatctatcgatcaagtgcactcgatattcctccaaccaaccagaccagtacatctcaaagaaaatcaactgacagtaataaacgtatatgaacacgcacgcacctgcaactcatcagaaagtctgaagtcaatccttgatgatgcgaatatagtagtaaatgcaa

SEQ ID NO: 8097 - DNA, 51714 bp, Oryza sativa
gcctaacgcagcagcctccccagcatgaccagggacttcttccccccggtcgctgccatcgccgcgccacccgccccgccccccgcgcgctcccgccgcacgcccccgcgcacgcgcttctccacgggctccacccccgacaccaaacaggtgacctcgccgtcaccgcggccggtgcaaccctccaatgcacccccacctccacctccaccgccacctcccccaccaccaccgccaccgccgaagttgaatacagcgccgaaaccacctccaccaccaccaccaccaccatccgtgccgtcaaacaacaatctcccaaagccggcggagccgccggccgtgccgacatcgaggcgccggttgctcaagcctctgccacccgaagggccgcgcattgccatgccgatgccgatcaccgcggcgacgacggtggacaacaacgggagcacgtcaatgcgggaaggggacaacgccgccgccgacgacgggggcagcggcgagccccggccgaagctgaagccgctgcactgggacaaggtgcgggcgacctccgaccgcgccatggtctgggaccagctgaagtcaagctcattccagttgagatttggtccacactactgaatgccgtgattgctacaggtttggtctttgaattacgcgtgtgacgttgaggcgttcctttcaggttggacgaggacatgatcgaggcgttgttcatgaacaactcgacgccggccgcgccgccgagagaggtcgggaggaaagccgccggagtgccgtcgttccggcaggaggagagggtgctcgaccccaagaaggcgcagaacatcgccatcctgctgcgcgcgttgaatgtcacgcgtgaggaggtctcggatgcactgttggatggtgagtacttagttcagtttactgcttttgacattgcattgttaattcagcgtaccacgatagaatcatcatttcatttttgttggtaatagtagtcgctatctgatttgatatagtatttggtaatagtacttagttgtgtttgtttagcacatttgttgctttggtaggatgttttattcagattttgttgctcggtccgtactttcgatgatattttgttttgttttcttggtggcatgcccgtttgatagtgctaggtacttaggagctgttgaattaacagaaaaagtcaggtcttgataataaagacctcaacagaacttacagtgacttggaagtttgaaacatccatcatatgttacattgaacattatttttctttatgtcgttgtcgaggtaatagtaatactactctctatacagtatacagctgcaaaatttatcgagttaataatattgacaacatcaacggcagctagaaaactatcagttatcttggttgtgcctgttttaaattcgaattgcacaacttttcctttggaaacaaaacaaattggaaaactaaacttgttgtgtttcgtgaatcctaagttctctcaagccatcggtgtttttctcattgttatcatatttcatcttttctaagcaatcacattcttaaaaactacactgtctgaaccaaaatcttcctcatcctcagaagtcagaacaatatatgaactactccctccgtttcacaatgtaagtcattctagcatttcccacattcatattgatgccaatgaatctagacatatatatctatctagattcattaacatcaatatgaatgtgggaaatgctataatgacttacattgtgaaacggaggtagtagtttttttcattgcggcatactgtaaatctgtaatttagtatgccatctctacatgagggtgtccagtgaatatgtgtaatttctattgttcttttgagcaggcaatgctgaatgcctggggagtgaacttttggaaacattagtcaagatggctcctactaaagaggaagaactgaaactacgagactacagtggtgacttatcgaaacttggttctgccgagcgctttctaaaggctgtgttggatataccttttgccttcaaaagagttgatgcaatgctataccgagccaattttgagactgaaataaattacctaagaaactcttttgaaactctggaggtatgctaagtcttttagttttccatgttgaatatcatcaccattttcaactattaaacctacaattagctgacatttcttgtcatgtttttactttttaggctgcttgtgaagatcttagaggcagtaggttgttcctaaaactccttgaagcagtgctgagaaccggaaaccggatgaatgttgggacaaataggggtgaggctaaagccttcaagcttgatactctcctgaaactagcagatgtcaagggcactgatggtaaaaccacattgctccattttgtcgtccaagaaattattcggtcagaagacgcaaaatctgaaaaagaaagtgccatgattagtagctctaaagatgaccgtaagcatggtctcaaggttgtatctgggctcagcagcgagcttggaaacgtcaagaaagcggctaccatggacttcgatgtgcttcatggttatgtcaataagctagaaacaggtcttgaaaagatcaagtcagtcttgcaactcgagaaaaaatgcactcaaggccagcgattctttatgtcaatgcaagactttctgaaggaagctgaaagggagatagagagagtcagaggtgaggagaggagagctttggggagagtgaaggacatcactgagtacttccatggcgacaccgcgaaagaggaagcgcatcctctgaggatattcatggtggtgagggacttcctgtcaacgttggatcaagtttgcagggaggttggccggatgcagcaggacagaacagtcattggtggatcggctaggtcattccgcatctcagcaacatcctcattgccagttctaagtctctatggacaacggagagaaaacaactccgatgatgatagttcatcgtcatagggtaagaaggataaggaacatactgaattttggaatgaacatagacgcacaaacttttacagcttatagcagatgcagcaaatgctacattgctgctacaatgacgatgacaaaggaagcacatgtgtaccgtggggaacaccatgtttaggagagatcaggggtttatacacttggatcatgtggaaattcttttgtacaaaagaataataattataacaaagctctttttgttgagtaatttgcaatcagcaggctgagaaaagagtctcacttcagtagtatcttgcagttgcttgcaagataactgcaatcttcttatgtaattattatattcatctagtttgccaactagtaactataacctggagaccattcacagatggtaatctttagtctgtgcccataatctgttgttgtcttaaaaaaatgaagcaacttatattcaggccttctctgcacttccctctttcagatttgttggccatatgctgggagcctgggacaatagcaaatctctctcatttttcgacaatactcagtggatgaatgccttacatcaacatcacaagtactgcataacatgggctgcaatggccatccttccagatatcttctagcaaagcaaaggtaaaaaagaaaaagtaaaccatcactatgtttgtgatggatgtaaagtagcagtcgagtgaataataactgccagcaaagcgaccatcataatctgctccatcgccagcgcccagccttcttcgtcgctgtcacggcctttgctctgcaatgtacaggagatagtagataataagtgatgaatcgagcatgccatctttgcgtagaggtaaagaaagcaatgtgggtcagcatccatccagcatagctacggagaaagtatccatctgaccatttttcccctcttctcgtgagaatgattccaggactcatgatcgactttgatgagtccctctcgtattcttgtctgcagatgaacagaggctctacatctgggagagaaaacaaaggaagcatgccattctgcaacatagggaagcaatgggcaatgggaaaaagaaggcttgatgggtccatttcgaatggtggtgccatgataacctaccctttgaagtagtaatattttagttgtatatgtgggtgtaatggattggaggggatttacatacttgcgctcattgaggaaagtagtttgatgcttgagtatttgattacttggtgtgttcttttcaaaggattagaatggtggataaattcactcggttctcgagttactaaatggcatgattttttttatttaaatttattaaatatcgatttaagttatattttaactttacaatatttaatttgatctatgtgttaggccgtgaggagtaatttagtaagggctatagccactaacaaactatccgacccaacccataacaccgcagctaaacataataggaataagttcacttgaggattcttatcttgttatcgagttttaaaatcgtccctgaaccagaataccagatataacacatccataatcttataaaatcaggttatattgggtcccaagacaatattaaggtgactttggatgacgtggcgctataagaaaaataaaaacccatgtgagatttgtatgtcagtgaaacaatatagtattcttcttatttctctccccatccttcgggtctcgagtctcggcggcgacagatgtggcggcggcgtgcggggtgaggagatggcggccggtgtgcggcgtgcctaacgacggcggcgaaggaggctcaacagtcggcggaggcacgccgcatgcaaaccgagcatcgacgtcgctcgctcttcccgcggcggagtggaaaggaccgcgaccaacagggagaggagcggcttccacggcggattggaaggcctcctagtctcctcctatggcgtgctcggtggcggccgaactaaggagatggcaaagcccatgccacgcacagcggcgaggaggacgtacgtgcccatggcggagacgctgaaccgcatcgtggattggttgccggactatgacgcgaaggggaagaagtggaggcggaggacgagtgtaagttattttagaagacagagatccctataaggattgtgaagcaatggacaatccaatttatcttttactacctccgtttcaggttataagacgttttgactttggttaaaatcaaactgcttcaagtttgactaagtttgtacaaaaataatagcattttcaacccaagacaaatttattaagaaaatgggagcgaattttccaggatttaatagctttgtgctttcagtggtaagtgacgtacctgtctacagcgaggcgtctgtggtgacttcattaatctccaggatagatttgccagcccagtcttcgaagatggcaagatgctcataggggtatggtttgcgtgtgtgttgtgagtatctgcgttgtaccatgtaattaaaaaaatattaatttaataaaactaatttaatattataaatattactatatttgtctataaacttgtatttgaagcacaatgatgtgaaaatctatgtctcgggaataatgatgagaaaagcacaatggtgaagcaacgcaaagctgggatcaatcgccctgttgaaataattttccgctaacaaagaatggattctttgctattgggtacactgtaaaacagattctcgcaccctgtaaaaatgatgatttttatttttcattcgatgtgtaatgggctagtctggtaccttgattgggtacagttatcattggcatagacgtcacccaacatgttcttcactgctgatttgtcgtaattctgaaatctgactttctgaacattagccgatctccctgatgcaccatgatataccacctacgttttagcagaactcgttagatcatcatcctggttttgccaaatcacaagcacaacgcgtcctgaatttattgcaaatactttgcaacatcacagccaggtgatatcagatactccctccgtattttaatgtatgacaccgttgactttttaactaacgtttgaccattcgtcttatttaaaatttttatgcaaatacaaaaatgcttatgtcatgcttaaagaatatttcatgataaatcaaatcacaataaaataaatgataattacataaattttttaaataagacgaaatgttaaatgtttgttaaaaagtcaacggcgtcatacattaaaatacggagggagtagtttgcatcatcaacatcacaatcagatataaggagtattgtaagcccagtagtgttaactttgcgatatttttgtctcgttttttgtcactaataacctgacttattacccaagtttacagtgtttatggaccattgtgttaggccttgatcgaggagtaatttagcgagggcgacagccactagcaaactatccggcccagcccattagaccgcaattccagggatggatttcgaactcggggacaagttgagggatcgaaagttaacttattccaaaccgtaatactcgcacgggctttaacgctgtttgggccacggcccaaacatatcccctggtgggtgcgactaccacccatttcagcagcaactccggcgatcgatgccggttgccctagccgccgccgccgtcgcccgctgtaatttccctctccatcctggctctacgttcgccggatcgatgctctagcggcttagcggacaggtattagttcgttttttttttgtcctttcctgggcgtgttttaaattcatcttttgctgctggttttcattttttagaatatatgcatcgatgctctctgcgagttctgcaagaaaacacaagagagaagaagcaacgatcttcttctgtgattcaaagcgatagaagtcaatggaatctcccttcttttcttggtttccgaggataaatttcataggttttcataagcgactgcatgcaaagagcttagtggatttctttaatatatctcgtagtctgtcatgttgcctcacaaaactctttctatctacgacaatgttttttgaagcagatctgtgtcaactactaatcagctgtgaccagttgcagcaactaattctgcatctttgtaaacttcgggattcgtcaaagctgaagttggatatgccaaattcaaaactccgcctcgttgaactctattcgtgcagtatcaagactgtagagtttctctgcctccctaaactagagcatctattatgtgaatcttggttcttttcagttgcccctttatcttttggtgtgattccatgtcttgaggggttaaagcttgtttgtgctgcgtatagtaatcaatcagggttcaaattgactgatcttatgtgcggtgcttcaaatgtaaaggatcttactttggatttccaaggagaggaggcaagttattttattacatgcaaaatcatcgtatttactgtcatgtggtggtggctgatagccacatgtttatatgcaatttagactgaaactgaaagagcattttaaaagcaccttttatgtgattagatgttgatggcaactactgtttaacttctttctcttgatcaaatttcaaatatgtaatacatgctctcagattatcttttagagtatatttgtgttattactatcgcgactagggttattgagtacataatgattggactgattaagagatttttgtgcttacaattaattccttgtttattttgttaattttgcatagatttggattaaatttcaaggaaaagaactacgcaccgccttgaacaagataacaaagttgcttctgcatggcatctatgtgaaattttttgaacgactcacacgagacggtgcgaagttctattgatagagcaggaaaaaaaagtataagattacaaccctggagagtcgtaagcaggaaaagaaaaaaataccaccacccacatgacgacatcgccaacacacacgcccaggagaaggctagtaccggatcggccgccgctaagcgtggccgaccgctagtagaccaacaaaggcacggctggcgcaccgatgctccaccaccgcacaagctttgctgatatgtgggacccctgcaccggcgtcccccgctggccaggcttcgtgcgccgaagaccgcgccgcacccaccggcagctcctcctcatacctaggtcgcctcctccaccgccggccgcgcctctctgcgccaagccggcctcctccaacggacgcgcctctcgtgccaatccggcctccctccatcggccgcgcctctcgcgcccagccggcctccatctccgccgcccgcgcctctcgcgccgagccggcctccgctgccatcggctgcacttctctgcgccaagccggtctccgaccccttcaccgaacgatgccgcgccggccagctacagccgtctcccatgccctcggttagtcaaccgaggccgccatgcctccggtgaccgcaaacacggtcaccaccaccacagccttggttgccgaacacccagccacctcgcccccgactccttccccgccgccgacgtcgccactgcctccagagtcataaccgccgtcgccgctgccaccgacgccaaccgccgcctctgcaaatcgctgctccgccgtcgccctccaccaccgaacagctagcagcccgacgccatgtcttccgccgccgttgccagatgacacggcagccaccacagccgccaccgccgtcgccaactgccatcggccaactaccgccgctgccgtcgccacaccgtcgtcgccgtcgccgactgctcccatcctccagatccagccgagaggcacggatctgggggcaccgctgccgtcgccgccaggcatcgagccaccggccacagcagctgcgcctccgagcctgccgctgctgcccgtgcttgctccgccgtcacgcctgacgccgccgcccggccgcccgtgcctgcgccaccgtcgcgtatgccaccgcctgtcgcggccgccagcgcccacgcctcgccgacgccgtgcccgcgcctccgtgaccggatccagctgcgagcgcgccagatccggtggtggcgacgccggatccgccgccatgcgcctcgacgccggcgccgctccggtcggccaccgcctttgcgtccacccgcgccaggagctcgggagatggccgccgcgagcccagccgccgccgtcctcgcgagccgccggctttgccggccgctcgctcaggcgacggcaaggcagaggaaggggcggggaagggcggcggcggcggcggctagggttccgccgcccgagtcgcccgacgcggggggcgacgcgggggccaggagagagttccctcacgggacattcattcatgagaaaaaaaaaatctatgtgaaatttaatctcctatggacattggttctacttgaatctgcaccatctgttaagatttttggtgtcaaggtaccttatatcttttttcattgtttatttatcatgatttgatttcagctatgttctcattaaagtctttttgatgataagtatgcatgacgtcaaatatttaattcttctcatgtcttgaatttaggtgtggaaccattcatgtgaccaggatactgtggacagagaaatattttctgaaagaagaaatgatttgtgggatgttgcacagttggatagctcggtacattataatcagctagggaagttaaattttggtgggttcaatccaacaataaaagaacacttggatttggtaagaactgtcattgagcgtgctcccaaattaaagtcagtttttttggaagatagagaaccctgtaaaggctgtgaagcaatggacaacccaatttatccttcaacaatatccatgtttccacaaaatgaagatgagaaaagcacagtggcgaagcaactcaaagctgggacctctcgccctgttgaaataatcttttgctaataaaacatggattatttgttatagggtacggagtacgaaaatgctttatactttcccatgatgcacttgaacgacatgcatgactgcgtgagcaagcgcggccactctgggctggaccgattttgggtgcaacaaaaatagtttttcattttttcaacttatagtttttcatttttgtataccaaatgtttatgtgtataaagtttctatgcaaaaattttatgtgtataaagtttttatatggaaagtttgtgtataaagtttctatatgaaaagtttgtgtataaatttttaagttgatttttttagttttgcataatgattctgggtggaatttttttattcatgcatagtattacagtgtaaactttttaattccatataacagtgttttttatgtagagtatttatcactagaagttctaatctagttctatattagatatatatagagtttcatggtgggcttggtgtgcacaatgaacatgggcataggcgattgtgtgggttctaggagtgtgacgggctgcgtgctaggagtcccctacggagtacttgtaaaacatatcctcgcaccctttaaaatgatggtttttatttctatgatgtttcatgtgcttgtctactacattgatgattggtcacaggccataataattataaattttgacttgtgtctgaacttatttccccggtagcccattagccggtcttcctgaatccacagcaataatctgatcgatgatctgaatcaaacatgactcttgtttctctcatagcccattagctggtctacctgcatccaccgcaataatctgcttgataatctgaatcaaacagggcacatgttgccttgatttaccttataaacttgcacttcgtttacagtttaaatttggcttgagagagagcttatcttgaggttctgtacagattttttgtgatactacatatgccaaaaaactcgtgtcttgagactctgcacagatatgtccatgcattatattcccaaaatcgacgtcgaggcaccttgtttaagccatggcacaatattttccaggactatgattacccaaaattttgacaaactaacccttttaaaagaattgtattttaaaaaaatgaatcgtgccaaaaactaattgaagaaatgaatcgttgtcttgatggtgcttaactataacgttttagcgctacaaatataggcactgaatggcacggttcattattaaaaataactttttataaggatcattgtggcaaaatttcagctaagactacctttgtcactacaagattcatgcggtcatagtttcatgcagggcggatccaggaacaaaaaaattggaggggctcagttacatagtatcttcaatctctagccatttaagaacctttactttatcattcacggtgaaaaaatcgaggggggagtgttccgggggtatccatagattttatgggtgcaggggggaccacgttggatccgcccctggtttcatgtcaatatgccatgctttcaagctatgcacaatccaaagttccaaacttctgaggggtaacgtccgcaaatttgtatcacaactaagcttgccaccatagcaaactgaaatctagctagtacactcaataaaagtacttatctacttcgtactttgcatttcacaagaattatgatcaatagtgataatacagtcaaacaatgacacattactgatgatgttaatgtatgctcagttacagagagacgaccgcaatcccccccccccccccccctcttctctcctctttcttctcgaactcaaactgctgcgttttggcactcacaaaccaagactcgcaagtcgcaagagctacatagctaagaatattaacgcgagggcagtttactaccgcgtacaaatgatttttgtttgcaatttggttgctgggtcattcttggcatctggattctccatgttttcttcatcagagcttatgttgtcacattggccactgcctgcagcacctcacgggcctctgccaaagcagcagtagtctggaccaatcctagagcatcttaagttctatcagctgggctgacaaagtatgaacctgggaggaacatatgggcacgagaacctaaccaaataaaataacattcagcaaggtcccaaatgtgtgacagcatgagggattaataataaaaaaatctcgggcacaaaatatattccaccaaatacatgaacatgaaaaataattgaaaaagagctaaatgtacctgaaattgcatatcgacgaaccaaggggcttccatgctaaaggagattctagcctgtgctgatacctggggtatcagccaatctaacaagagccacggttcagaatttcagaatgacaaattaaccgaaggaacaaggatcaaataacaatctcttcaggcttcactagttggaaacaagtgggtttaattccctaatgtattcttcatcactaggattctattcaacatttcaggtgctaattccagtaaaatagtgtttaaaaggcttatgataattcatctgataagaaagtgttttctagtttctgactaaagatggaagctcttgaaggaatattttgatatcatagataagaatgggcattaacttcgtaagttttgtattggattaggtatctaagtagatatcagtaaagtgaagtatgccaccactgaacctgcaagtcccagtttaagttttggtttagcagacttcacaactcttcagaagcatgcaggagtacgaattcaatgcattgatgcttgctaatatcaagaaaaggaggaactcatcactcactagagatcagtttccataaaattaatgtgatttaattttcacgtaatctgagaaatgtgaagattaccaaacaaaagaatctgatgcaaaacaacaaaagaatatgtgatagtgtgaagtcttacatgctcacatattcataatgcacatttatgcagtgtgaagatttttccatgatgagttctgcgggctttgatttagcacacattccttccttacacactgatgacaaagattccatatatgtgttcagcttctgattcatggcaatttagccataatctggggaaacgagatcatcaccgatgtgctcaataagaatacttgcaggttgctgcaacaaacaacattatagataagaacaagatcatcggcaaaacttatttgccattttgccccagtctgcccatcccccatatttcatagatgccaacatggttaaaaggcacttgctacactcagacactcagggcattaacttggtttagtttaggatgtaatgctaaatttactggacttacacctgcttccaactgatccatctcataaattataaaggtgttgctaccttttatcctcaatgaattatggtactacaaacaagctaaatatcatcagaaactggaagtaattactaaattgcctgacagatcatcataagtagtagctacttttgttgcagaacggcgttcaactcttgcattcatctgcagaacaaaggactagaagtaagtagtagttgctagcacaaagaagctactctattgagccccttaaaatttcttgttatatcattttcttttcggtgcaagctagatggactaaaattaaatacaaataagtaattttcatggcattactgttcccgacattgctttcctatacgtccaggcaaagcttgagcaatggttaaccatttcttcggtccaagtttgtttaccatctgaacaatgatctcatcttcctgaaaaggggaacatgtcattgtgagtataagatgactaaccaatattatataagaaatgaaaataaatggactagcatgcttacttctttggaccatggccctttgaccaattcagggtgtagaaccttttaattgccacctgtgcaagcattgtacatcggttctattcgcaagctggaaaattagaaggtcctctgtcaaagcttggatttttaacaatatacaggaacctcatcaacagggtaggaaaaagaatgccagagaagcatgactagagtgtaagctaatgaaacagcacaatgctttactgtacatgagttgtgatagcatcaaagaggggaaaaaaatgcttgcgtggcttaagatatcctactgcactgaagtactaaacaattgtagcgcaaggtgggcttgagaacaatatggtaaaaatgtattatatatcaagtataatattgtgaaatattactcctgttacaacctgacatgtattgacatataactgtatgtaatcacaaagctaatgtgtaaaaattaaaaaaaaaatccaagggagtccaacatatgcatggtaggctatataaaatgcagtgatatagataccaaaggtcacacttttgaaggtgctccccctatgttatttcatctctcaaaaaaaatcagtaaaatgatatatgaattggactttagaaggctattttgtttatattttccagcatacaaaaaacaaccgcaacaaagttgaagaaaaacaaaaaatatgacagctaaaagatagtagaaatactatgataaagagtaaggacaaagtatgccaaatagaaccaatgcactaatagaaccaatgcatcccattgtatgtctgaacagctctgaaacgcacctaactttttcccaattcttcccattgcatgtctgaatagctctggacaatatggcagcctccattgatcagctaaaagctaaaacaaatggtatggtttccactctccatttgtttctacgacacgacctacattttagctgaaatggagaccagctgcagaccacgttcaatgacttcaatcagctaatcaatgaagacaatcaattatataattgtgagcattgttcaatctatccatgtcatcctgattttgccaaataacaagcacaatcagatatccagacaaaagatcaaaacttttgccaaatcagaagcacaatcagagtccaaagatcaaacttttgccagatcacaagcataatcagagaccaaagatcaaacttttcccaaatcacaagcacaatcatatatccagtagataggaaatgcatcacgaaggttcatcgcaaatacttcgcaacattcatccattggtagcctgagacagttagtagtacgatctaagcctcggtaccttctaattaagcaacactagacgatagatagcataatagcatccctaagcaaacattgactataggcatcagtgatcagtggagttggccgttgacgtagtggcggtgggggtcatcggcgcggacacggtcatggagtcgcgggcgaggtcgtcgacgcggcgggggcgggggcggtcgatggggcgagggcggcgccgatcgtcgcaggggcgggcggcggcggggcgtcgtcggcggctggcgtgtcggcgggcatcttcgccttgaccttgtcgaagatcttagccatcgcagcctcctccttctcggagaacacgacgacctcatcatcgccctcgtcgtcgctcgcgatcccggcctggatgcgcttcttcttgtcatcgcggatgatcttgcgatgcggttttccctggacgccactgaaacgatcgaaacgcaacaagggttagcagcccgcgaaaccagatgagatctagagcgctcgcgcgcgcgcgcgcgaagccttcttaccgactctcggcgctccgggaccactccatcgcgactccggcggcggcggcggcggaagaatggaggcggcgcggtcgggacttggacactgctcactgctctccgtgtctccctgctcggaccagcaactcgaggtagtatatatagccatcgtattgggccggcccataaaccctgggctggaaatgttcgtatgggccacactaggcccaaattttgggcccatgaggcgatagaaaagcagcccaaccacgagttcgccggcgacatctgcttccccgaggatcgactccggcgagtaaccatctttctcctcccgttgtactccctccgtcccataagtgcaatcataagtttccatgtccaactttaatcgtccgtcttatttaagtatttttgttgttatgggatgataaaatatgaataatatttacttgtgacttatgtttttaaatttttttaaaaaattttcaaataaaacacacggtcaaagttggatgcggaaaaccgtggctgcacttaaaatgtaacggagggagtaataaaggatcgagttatccgcatccgtattcctaagctttaacagatttacgtatccctgagaaaaattacttataaccatcctggtttttgaacaaaatcgactatccttaaaggtcacactaacacttgcactatcacagagatgggtgtagtgcgcaagcaccattgcagagcagctactccaagtctccgaacactactacttgcccctccagaattgtaacagctggagtacgtagataagggagaagtgaattgtaaatggtccactcaagtattcaaatcccattagtatgtagataattgagaactgaaaaataaatgatcggaggtttcagcagttccacaaaacatccgtgattaaaatgtgattagatattgatgctccacaaaactacctgtcggcaatcaatattctttaaaatattatgggtgtttgtttgtttgttgcccgagtaaataaacccaatactgtccttacgtatatttatatttgaagtatatactttcagtaatactcgcactaggggtggaaacgacggctcggcttgcagtggttcgcaacaaaactaggcttggcttggcttggctcggctcggttagggaaacaagctaaaacttgagctcggcttggcttgtttcctggctcgagccagctcgagctggcatgcaagtcttcctgttgaaacacctcttcatatatattttgtaactattaaaaaaacaagaacaaatcatcaacttgtaaaatttaaataagtttatatattcaattcttcaaaatcttaaagaaaaatttcaagttggcaaataataactccataaaaaaataaataatcgatataaacacatgatggcctaagctcgcgagccaaatcaaacggctcgcgagccagctcgggctcggctcgtttcaccaacgagctgaaaaggagacttagacttggctcgtttggcttacgagccgagccaagtcaaccaagctcacaagtccgagctttttttcccacccctaactcgcactgtcgcacatcaaacgtataagacgtaagaaatacttcagtaaactagcaaactatccggcccagcccattatactacaattaaaccgtaatagaaaaaagtacaccgaagatccctcaacttgtcatcgagataaaaaacgtcctcgaaatgcaaaaccagatatgcggggtcccttaactatacaaaaccggtcacccgaaattcttcggtggttttgaccccggttttgttctatgtgacggctgagtcagcaagagacccacgtgggacccatatatcaggtgtccacgtcaccctctctctttcccctttcttttttttctcttctttttcctctcctctttgcggggctgagcggcggcttgcgagcggaggcgcggaggaggaggcgggaaaggaggagggcggcgccgcgacagcggccgccagcggcggcggcagtggggaggcggcgtgcgggcggcgccgttgtcgtccccctcgtctcctctcctcttcgttggcgtcgtcgtccctctcgtccccgccagatcacgccgcggcgcggtggccggcgtcctcctcctcctcttctacgtggcggcggccgttccatggaggccgacgctccagtctaagccggcccggccttatcctcggcttcgccggagtcgagctctaccggcaaggcgctagcccggtggccgtctttcggtcggccctggtgggccctcgccacgaccgcctccaggtcggagccatccaagcgaagcacggcctccatgcgctcttcgccttcaagcccgaggcctcctccggcggtctgcgctccttaccttgaacctcccgtcgctgttccccctgcgccgagcagcctcgccgactgcacgacggcgaccatcggcgcgcccaacgcctcgtagcgccgcgacgggtcacgcacgtggatggccgctaccagtgtgatgcaggcgccgccctcctccgcgcctctgcttgcaagccgcctcttgcactaagcacacgctgacacgcataagttaacagtttaggacttggcaacatcagctagcagtagagcacacgatcagatggcaatcacaagcagattaagcatatacatggacgaacgacttaatcattacagtttttttggttgtcacgtaccacgaagcataccatatatactcctacatgatgatgccattttctttcttaccatgattttctagctagctagctaatcgatcagctgcttgattgatcagtaggcagcagctgcggcggcggcgcactcaatgtcgccggccttgtcgtcgacgaccttgccgccggccatgacggtcttgtacgagtatctggtggcgacgaccacgtagaagacgaggttggcgatgccgatgcatgcgagaagccagtagaagaggtccagcctgctgttgttcaggtccttgccgaaccagccggcggcgcggccgccgtgcgaggtgacgcggacgagcggcgtgagtgggctgccctcggggaccctgtaccggtagtggcgccagccggcgaggaagacggcgagggagacggccacgacggcggcagcgccccagccgaccttctcctggaggtagacgatgatggtgacgccgagcaggacgccggcgcagagccctcctcctttcccgcctcctcctccgcgcctccgctcgcaagccgcctcgccggccgccacgcgctcgcaagccggccgccgctcagccccgcaaagaggagaggaaaaagaagagaaaaaaaaaagaaagggaaagagagagggtgacgtggagaactgatttgtgggtcctccgctgactcagccgtcacgtagactaaaaccggggtcaaaaccaccaaaggacctcgggttaccggttttgtatagttaagggaccccgtatatctgttttacagtttgaggacgttttttatcccgatgacaagttgagggacctttggtgtactttttccaaccgtaatattcgcacgggctttaactccgtttaggccacggcccaaaactatccccggatgggtgcgactgcaacctatttcagcagcaactccggtgtccggtgttcgatgccggttgccctagccgccgccgccgccgtcgccgtcctctctctcctgtttcctcgttcgtaggatcgatgatctagtggctttgcggacaggtagttcgtatttttatcgtcctttcctgggcgtgttttaaattcatcttttgctgctggttttcacttttcagaatatgcatcgatgctctctgcgggttctcaagaaaatacaggagaaaagaagcattgatcttcttctgtgatcgaagtgatagaaatcaatggaatatcccttgttttcttggtttctgagggtaaatttccttgtttttccaaggataaaccgattcgacataagttaattaccaagtcggtttttcaatttcagtatgaatccaattcgagcatatacaagtaagtgccctaattcgaatcaggctctgaggctggtgaaattccctttataaataagctcgacaataacactgatctcatatttgcataccatccgagtggaaaagccccattgtcagtagtcatgcagtccaatagcatccaaagctatgtaagtctctttccctctctctgttagtaatttttgttagtagtttttccagtgtaaataaacctaataccatcctttatatgtttagtatttcttgtaaaattaagagaacattttaaacttcagtttaaatgattgagcactttattggtgtaggaccaaggtagattcaaccaattgccggatcatatcttactctctatcctagaaagagttgatatgcgcacagttctaaggaccagtgtcctgtcgacacggtggaagcacctgcctcttttgctctctgatgtcgacttagatgcagatgaattcatccaccaaaattcctcaatgtcggccgatgaagcgatggctgttctagttaaattgatgagcagtttatttggttctcctcggagcgaatctatcattaaaaagctaaacctcaggttctgcttgctcactgatttggagacatcattagattatttgtttaacatcggtgagctagtttgcaatgctattgacagtggtaaagtaaagagcgtggagcttgcgatcacaactgagaagcggagtgtagattgcacgtctagtgatatgctgctgcatgcaaagagcttagtggaattttttaatatatctcgtagtctgtcatgttgcctcacgaaactcctcctgtgtacggcaaggttttctgaacaagatctgcatcaactaataatcagctgtgatcagctgcagcatctaactctctattattgtgaacttcgggattcatcaacattgaagctggatatgccgaattcaaaactccgcttcgttgaactcaactcgtgctatgtcaagaccgtagagtttctctgcctacctaaactagagcagctatactgtgactcatggcgcttatcaggggctcccctatcttttggtgtagttccttgccttgaggaactacgccttgtttgcgacgtcacgtatccagtcggggttcaaattgactgatcttcttcatggtactgcaaatgtacaggatattgctttggatttccaaggagaggtggtaagtaatttactaatttaattacatggaaagtcatctttattaatgtcatatggtggtggctgttggctacatgttgctatgaaatttgcactgaaactgaaagagcattttaaaagcttttttttttttgtgtgtgatttgatcttaatggcaggtactgtttgatcctttttttccccgaccaaatctcaaatactcagattatcttttagagtacaccagggttactattggcaccagggttattgagtacacaagtgttggcctgattaagagctttttgtgcatagaaataattccttgtttattttgttaattttacctagatttggattacacctgaaggaaaaaagctacgctccgccttgaacaagataacaaagttatttctgcatgggatctatgtgaaatttgatctcctatggacattggttctccttgaatccgcaccatccgttaaggtttttggtgtcaaggttatgctgtcattttttcttgtttttttatcatgatttggtttcagctatgttctcattcaagtctttctgatgattagtacgcatgatgtcaaatgttttcttatatctgaatgtaggtgtggaaccatgcatgtgacgagggtactgagaatagaaaacaattgtatgaaagaaatgatttgtgggatgctgcacagttggatggctcgatacattatttgcaactagagaggttagaatttggtggattcaaccaaataataagagaacacttggatttcataagagctatcattgagcgtgctccaaacttaaagtcagttattttagaagacagatccctgtgaagactgtgaagcaatggacaacccaatttatccttcaatatccatgtttccacagaataatgatgaaaagatcacaattgtgaagcaactcaaagccgggatgaatcgccctgttgaaataattttctgctaacaaagaatgtatttctatgctattgtgttcctgtaaaaatgatgattttttttttcgttatgcgtaatgggctagtcagatacctagcttgattggtaaagttatcattggcatagaccactgagcatgttctactgttcttcagtgctgaactggtcgtgatagtagttcattagccgatgaacttctcacgtagtagtagttcattagccgatctccctgatgtacaatgataccaagttgcagatccctttcaataaattatataattgtgagcatcgttcagaatctgtatataccatcctggttttgccaaatcacaagcagatactatgcaaatactttacaacatcacaaccagatatgcaacttcgcaaatcgcaacatcaacataacaatcagataggtacttggcaacctaacgatcagaaatcaatctgatatagattggaaatgcatcgcgaaaccagatactatatcacaatcagaaatctgacatatattggaaatgcatgaaaccagatactatatcacaatcagaaatctgatatagacaggaaatgcatcacaaaacagatatatcagatacttggcaacatcagcatcacaatcaggtatatcacttggcaacatcatcacaaccagatatctgtcatagataggaaattcatcgcaaattgtacttcgcagcatccatggatcgataacctgggatagttagtacggtagttcctaagcaacggtagctcctaagcaacataagactagcatccctaagcaaaattagacaatagctgatcgcatcagtggagatggggattcacgcagtggcgatggcggtggtcatggagtcgcgggcgaggccgtcgacggggtcacgggccgggggcgatcgcgtcgggggcgtcggtggggacgggggcgatcgcggcggggacgtcggcggggacgggggcgatcgcggcggggacgacggcgggggcgggggcgatcgcggcggaggcggcagccttcttggccatggctctcgcgtggatcctgttcatggcggcctcttccttctctgagaaggggacgtcctcgcgatccacgtcgccctcatcgtcgcttgggatcccggccttgatccgcgtcgcgtccttttgcgagctgtcattccggtacggcttccctccgacgccactgaaacgaatcgaaacgaaacaagggttagaagcctgcgaaaccagatgagatctagagcgcgcgcgcgaggccttcttaccgggtctttgggctcgcccaccgccccatcgcgactccggaggtggacgacggcagcggcagcgggcgccgcggagattttaggtttagactttagaggaatggaggcggcgctgtcgggacaccagtacactactgctctctgttctcacacgggccagcacttcgaggagacgaggtcttactatatatatactcttgctattgggccggcctgtggtccggcctttgaacaggtcccggcccattagtttgttccctgtgatattttgcgtgatcgttgcggttgaatttaaattgatttatgcataccagaaaaatccgtcacgtgattatattagtactagctagtttgcaacgatattgaattattgctagtggtaaagtgaagagtgtggagagattttgatacgctgattgctgttggcactatacttgtatgtgctgcaaacatgtgatcagccatgattcatggcaacaggatttccaagccgatgcatgcatcatgccaccattactttggacttattttcagagccctgagtgatgatggtgttctaagagatgaaaaacagtggacgatttgttagaacgtaactctcctgtgtcatcagatatattcagacacaatggcgccggctcatcacagccactaatttttctccctttcacgtttgaacctgaaaggtcgctattcaccggctcacagctgctccatcggtgttgaagtggccgctggaggtggcgacgccgacgacgacgttgaaatgaggtttaggatttgggctagctgcagctggtaccgacgacaatgtgcgtacttctttggctgagatccctccggtgaccgatgccggccgatacccgattcgattgccctggccgcgcgcggccgctattgaaaaccgatacgtcacgtcacctaacacgtggggtacaccgtacacccagaaaaccgatgcactgtccgtctatatggcggatgcgggcacacggtgcgcggcgaccttagcggagggtttttccggcagaacgtcgcactgcttctgcggcgtctggggtaccgcgtagctatataggctggcccatctggatcattagcacagcattagtcacatggcttcgagtacctttagcaccgggcctcttagctgacgcaaatgattaatgatttataactattcttcaccacaagaaactagagcaacacagatttaactttcatttatgagattcaaactttgtattctgtccgaagctacaagaaatatgatcatcaatagtttgattccacatgctatgggtaaaatatacgagtagtaatcataaggatgcttcaaggcatcgtatgctttggccgagtctagaccacgtcaaaaaaaaatactgtcacatttacagttcccgcaatgaaaaacgatggtgaaaaccatcaactaaagccctgtcaatccttgcatatgcttcttcatcgcacggtctctccggtgatggttatcccggccaccacctctccttccacctctgcctccacgaggtgcaggccctcctcgagcgaagccctgtgctgcatctggatcttcatggtcctccgctggatggtcatggttcctgcctcctcttgttgcgccacggccaaatccacgttggccattcgggttctcgtttgcctctggctggttgccgtgatttctgccccctcttcttccaccacggccaaatcctggtggcccgtttgggttctcgccctccggcggtgggtcgccgtgatcccttccacctcttctgccatgatcgccacggggatatgagcctcctctgcctatgttggagcctcctctgccgaagttgtttgcattgctaccctcctcttcctccatgtctctgtgttgttgcctgttgggaactccaagaggtacatttccaccacggccaagaccatgaatggtatctttctgaacattgcgcaggacagccgcttctcgggcactagatacagcaactgaaccagcaaccttgtagctgtagttcttcccgtccttaacataaaactgtgtcttcttttgtgagctccaccgtgggccctgtgaggaactctcggcatcattggcaccatcagtttcctcataacttgattctaccacactgaagccaagatcatcgaacgagtcatcatactcatcatcatattcatactgggattcaagcacagctgatctaacagcatcttttgctttctgtgagtctagagttgcagagtcaggcacgtcgtcattggtcttccttgtaaatctaccttgcgggactgatggtacagatgaggatggtccctgggatgctgatggaactgaagaagatgaagaatgttcaacatagcgatgcatctcagtattaaccttatggggtttgttcataatttgaggctcagtctccacaagtattcctttgcccttatctttcccaacagtggctgcaggctttagctgcggcatctcttctaatgaagtatccagagctagaagatcttgatggagggttccatctaaaatcctttggataacttcctctgggttctggttgtaggcttccaggcatgcagcgaggaaacccttcccataatcaggaaagaggtcccttatttgagtaatcttggactcagtgatggcagtatcctcattcttatgttgtagttcaccaccataggaagagacaggcaaatcaggcacactattccaagatgtcagagtagatccacacaagcgtgcaatgaactggaactgctcatcatccatgtgtatccatcctgtttacgattggaggaacatattgaatacatcaaccaaaggttttggcatcaatataaaactatgacacaatcaataaacttgagataacaagaaaatacagcatatatgtcaacagaataatgctgacagtttagcaaactctttcagtcttcacaacagaatctagccaaaacagaaaaagtgatgtcttatgaacacaactcaaaagtgccagaatgatcaaacgcgagcagaaataaaatcaaatgtagggtaatacgggaatattattggtgaactttatgagaacaaaacaacagaagctagagcatcttttccttttactagccaaaagtccatgcgttgcaacggaaaacaaattgagtttctagttaagtcaattaagcacatagttaatccaagtagtacttttatgattttccttattgaacaagtaggtgattcaaaatttggggagaaccagcagtgaaataggaggacttgttggagggtgatgtaatagtatagattgtgggacccaaatgtcagtggtaaggatggtgtggcagaacagacaccaccacgtatacattttaagtagtatagatataaatatagataagattctgttttggctctttctctttccattcattgagatcaatatgctggatcaagctggaagttttaagctttctaagaaccactcatgcatagatggcgagagcaggcatagtaacagaatatagaatcataggcaattcagtacatatatgtagaataattgtatgacaacttctgaataaagttcctagatcgtatatgttgtttatggatgaaaaactaaagagacaattttggctgaaataataatagtgggatactaaggttgtgtggaattttacaaacatgaaaataaccaagcatttaattgagattttttatcatttacctttctttcgaatatctccaatccggttcatcaacttgaactccttttcaagagcttggaggaatgtctttccaggatgatcttgtgaaaatgtggcttctctattgatatccttgagtgtttgaattatgatgtcacccctgatcataggatcttcgactttagctggaaacatctttgtacaagcttcaacatcacgctccacaagttgattgttcaaatagcagaactccaataatctccatccgaaactgacagttctccttgacagcatccttataccaagaactatgtcactcagtataatgtcagatgcagtctctccattgctttgggaactggacataacttgaaacccatgaagcaaagatggcaacaatgagtcatacaatcttggaagagtgttcagtagttcctcaactccatagctgcaaattaagtggtagataagcatcattgcctattaagggaacagcgaacaaatattgtgttggatgagtagaagcgcacctcgtctcaaaagaggtacaaaataataaagcagcaggttgataagcatcgacaaaggcatccagagtgacaattgcatcgtttacaaaatccaacacctgaaggaagttggatttacaacaatatagaaaaatcagatgaaaggacagcagacatatcataaactatgcagtataggtaaaacttgcctctgagaaatctttctgaagttgggtatatccactatcattcggtccagatgaagtgagcgcctaaaatgaatttattatggttaagttctttttatgcatagttctccaagatcttctgtaaactactaaactgtcatcagatcaggaaggtgtgaaactacaagatcaagtttatatcaatatcataggtcctcaacttttaatcgtggtgagaaaacatacttcaatctcaatttaggataaaaaagaaacagagacaaattaatagtaaacatcataatcgtcactttctatctaacctaccaagcaatgtatcatggttgttgaaaggaactgggaagaaagtatttgaaacaataacagatataacaagtaataacaagtatattcgtcaatagcacaaatgaataacctgaatcctttgcagaaaacgataaaagttttagcatatgcgattgggactacagactaaagtgaaaacagctgttataatgatatcatatggatgttcataccagataaaggaatacagaatcctataacagctatgtgcagtgatttatgaagaagatcacaaaataacctgtaatgatttcatgcacctctcctgcattgtgtggaaaatgcccaggaattggggaaggacaatattaatgccatccagaatatttggctggacattgatagcgttttcaacctacagatacagaaaatgtgcacttgttattaataaaattataaaagtattcatgccaatgaatagaaaaaggttatctgagactaagggaatgaattagaatttgcatttaagttagcatctgtctgcaaaatgaaaaggagaaaaacaacaacaataataaacacttcaggaaccaaccagtgaacttgtcaatttgcaattgtcatgcccataaatagcacaaatgtccaacaacttgggtaaatcaagcaatcttttctcctgcaggagggctacaaccgaacaacgtgaatatagtatatttgaaccaatggtcactatccattctgctctaaaaaaaggtaaactcaaacagtgatcatatgagtagttctaatctcacctgcatgctccttcatgctaagggattcacccctgaatgctccaggatccttgtttgaagatctaccacccaaacaagagccatatcatgacaaatctcatgtgaatctgaacagtgtgcattatcttatgaaaaatatgtatacaagaaagatagcgaaatggtataaatctcacatgcggtacaggaccataaagactcgacggcaaagctcaagctccccgacaactaagccagcaactgtccctttgggtgcacgatgaggcaagtcataccaccgatgcctgaattgtaggtaactgtccaggaactcatgcagggaagtattctgtgccactgggaaaaggtaacgataagcattaggaaaccattggtaaagttcaaatgcacgcggatttattcataagttaaattctaggagtgaaacaatggataatcacagatctaggcgtgtcctcaactcaagcttttatgttgactcatctactcgctcaattattgttcaggcttagtttgcataagaaaaaatgccaaattcctctgattgtagggtagttattcctgtcaatctgaagttcctgtcaatctgaagggactaggattaattccttcccattaaaactatttcaaaggatcataggtcatgatagtgataagaatatgattgcataggctttgctttgcttatgcaactactagccacttcaactgcaaatgtagtaataaatttaactgcacgcattttatcttgcgcttaaaagtgcaaactgacatttgaacaagcatacactagaattttacacataatccgtagccttagataatcacagagaccgaagcatcagaagatgcattcaacaaacacaattgaagcaaacaagcagtaaacaccgaacattaagtggttaactagttatcgcttccaagctttcagctctgatttcccaatcccaaaataacaattcacgccttccagctacacggtttcatgagcacagtaatgcacaagcgagcgtttcggttaccctggcgccagaactcgcggggcttagcgcggaggagcgcggcgagggcatcgttgaggaggtcgacgacggcctgcgactcctgggcgtcgggcccgccgagcccggccgcgaccacctcgtcgtgcggcaggtacgccacgaacccatcggcctctccgcccaccctgccggcgccagatgcagacggggaagccgatgatcggagggcggtggtgagcgtcggcgggggcgagggtttaggtgcggcgggcttggggacgtagcgctgctgcggctgcggctgcggctgcggctgctgctgctgctggccgtggtggtgcctcggggcggcgttgttgtggcggcggtggttgtaggagggtttggattgctgcggcggcggcgcggacgacatggctggatcggggggaggagggagaaggagaagccgtcacggcgtttcaggacagggagaggagtaggctttgtagattccggaggggtttcccggaattttggggagacccaaggtttcttgtgacaatgtacaatatttaaattgccatgtgacaatttccacctttaaaaattgtaaaaattggaaggggcgtatttcgatcatttttgttttttttttcgtctcaagctcttcatatgatttggtttatagtttgtattttgtctgttcaccctgtcgggtagaaaatcaaaatactaagccatgttttatgaaagagtgcatatctgaatattagtaggagcagtactactattatttaggcaaaatgtgctctaagacactcaaattttatagcctttgtcgtagaacacccaaaaaacgtgtatttattgcattacaaatttgtacttttcgctttgttggactcttctatcgagggagtgagaatggactaggtctggtttggttcaaacaaagttatcttacaagccgattgacacaagggcaaaattgtaacttttctcttggtgtaggtctgatccgaactagatctggttgggttaaaaagaaacatgcaccataggtaaaaagttgtcttttttgaaagtttctctctccatttagatccgatataataaaataatacgttcagcatccaccagctaattaccatgtttttagtggtgtcatgtaataaatacacattctttggatgtcatacaacaaataccataaactttgaggatccttttttgcctgatatttatggcgaattgaggataccttagctactagtaaggtttcttatgatggaacctgctaatctaagtttaagttctaattttagcacgaatacttgtatttacagctactacctccgtttcaaaatatagcaaactatgatgggatgagacccatctaagactatgaatctggacatgagacatgtccggaaggagtaattattttcactggtagcgatatacatgttgacagcgagtctatgatgtgcttgtatttatagctaattatttttagtggtggacaacgtaccatattacttgtggtgacttcgtcgaactcaaaatttgtaggtatatacagacaccagtggtgaccggtaacctcgtcaatcttaacatattactaactcaatcttcaaaagtattcattagaaccaaatgtacacgtgtgtattatataagagtgagcttatatgtctgtgatgttttcatcgagctcaagatatacggaccaatttttttagaggtgctcatgagataggttaagtacgtatgcattaagaacaaattcgataaatgaatgataaatcagcaaaaattaattatcaaaaaaagacactaatattacttcgccatttggtgagattgtggttgcatagagctagcgtagaagattaagaagcaataattcaaaaaagatgaataaataaaataaatttagacgattcaaaaaagatgaataaataaaataaaattagacgattaagaagtcaaaaattaattatcagagccaggtttcgatcctgggacctgtgggttatgggcccaccacgcttccgctgcgccactctgatggtgttgtttaggatgttaaacgtttctaatttaaacaatgctctataactaatcattcggctaagaacactaaggcatcgttcgtttaggggtgataggggagattggctctcgttttccgcgcgcacacttttcaaactactaaacggtgtgttttttgcaaaaaatttctataggaaagttgctttaaaaaatcatattaatccatttttaaattttaaaatagttaatactcaattaatcatgagctaatggctcacctcgttttgcgtatcttcccaatctcctcaatccccttctcctcaaacactccctaactcattcattattaggtataagaacactaactcatccattctcgaacactaactcatccattatccattctcgaacactaactcattatacattctcgaacactaactcatcattctcagtataataacttcactaatcattcggtattcagatataatataagaactttctatctcagattttttccgtttgtcaactgagcacagcctgcgatgtgtaacaatcgaatgctatatatctcccataaatgctcgaagaaaagcgaaaaagtacaaggacgatattacagtgctttggtatgttaagcatttttttatacaaaaagtcagacttcataagaatacaagtccgcgtaatttataactcagatagcaaaacatcgggaacaactagcactacagcaaaactaatactatgaaaatatagaaatctcagatgaaaaatacacttctgattctagccagctgttggctcctcacataacaattcgattcaagggttcaattgttcgttttgcattgctctggcctctggagcacacttaacatctatagttagaacacattatctactgtaaatccatcacttggaaattccaaggtgtggggatataggatgtcgtggagatagtaaccatctgattcttcagctcaactcgttaattgcatcaagatgagtatcgtatcaatattcacagtttacatcctacggttcaagctctttgttttcctgagttgatttcccagttttctgtgcttgactttctttcttgcgctgcatcgattattagagagaaaaaaaatatgaggcaaagcagaactcaattgaggtaatttgatctagcctaagctctatgtgcagaagttagaaaagcggagaacataagccacataaacaaataacaatggcaaaattggttctagagcatccaaagttcatgtgttttaattttaaagcaccgaaagttaatgttcactttaatagcactgaaaagttccctccattcccgctcttagcactcccgtttctttgggtgagagatggggttccagctgcttgatttagttgatctgaagatgtgttcggctatttcagttgaaaggaggatagggttggaatttcaggtgcttgaatgagtcaatttcggtcaaaactgacgtcacatgcaagaaaagaaacgggagtgctaagagtgggaacggagggaacttttcggtgctattaaagtgaacctgtaactttcggtgctataaaacaaaaacatgtaaacttacgatgctctagaaccaattctgccaataatttaataaaagatcccatggattcagttcatgcagcacagagagctaaaagggcctcaggtgctgttttatcaaatatatatatatgattaattctggtttaaaaaactgtggtttagttcttgaagtcacaggcacacagtggaaacctatctaccgctgtcgccatctcctcaatatcagcaatctaatggatgaatttagatatctcctcaatattagtaaatgcttatcattagtaaaacatgacaaactcttacaaagaactgctattctgccagtcatgtatcaaccaaaaaagaaaggtacaagaattttaagcaatagagacattaataactgcaaccagttaataacagcaagagattcagcactcaataacaagacagattaatctcccatcatctttcaattagttctttttttctcttgcatctataatgaactacagcatttggttcatggtgaaatatcaacagatcacttaatggaagaataatgatgaggtcagcagctccaagagaatatttaggggaaaatagcatcagaagtgtaacatttcattttcaaagtattagcatgtcggtgagcggcataccttcggaagaagtccttctgcagacatcagctcatataacttgcgcatgattgtttcttcttccacctgtacagaccaacattttcaaagtattactatctaaaaagttacttccaagacatagtgacgcctcatactccaatactctccatataaagctcacctgaactttatgcaactcgtgggacattgctcggtaagtttccattagggcttgattttgcttgtccaaatgcctgcagatcccttgtaagtagtgtaatgaactaaaatcctcaagaattaagggacggaaaagaaattcttacttggacatttcagctgaatgctttggttccattctcaccaacagcctgataccagttcctgcaaattgctttacattttaaaaatcatttaaaagcaagctagaaagttgaccgttattttatattaattgaggaattctgagttcacgccttgagggtgcagtgaggatggaatcgtactgctacattatgatctcattcaaaaaaaaatgaaacaaatatatgcaattgtatttgtttcttacgcataggagagctgccctggtaccctaggatgcaaggctcaattcagcaatgaacgacacatgaatgacatgattatttgatttgacatctaaaaacattgcacatatagtccgatgtcatcttgtcattctggttttctagaatcaagacacattttgttctctctttattggaaatttaaaagaactaagaaatagctaagatgaaaaaaaaaacaacatgtaatcaaatggacatggcaggctgctatttgacatggctatatttcaacggaacacaaagctcgttgaggtgctagagaacagtttacatactacacgggcccagtaaattttcgtgggggcatggacacatcacgagttattaacaccactgttcataaatcatagtagtatagtattattttgagaatatcatgcgtccaaaatatcctataggcacagttgcaatacaatctgcaggggcaatggcgggactaacatgggggcaatggggttgagatgaaccctaaataacaggaatcggcgtatgaaggggatgggctaattggagggaaactgggggaaaaaaaatcgatctcctatctacgcgacgctgactcatgaagtgggcgccgaggagggaggagggatacgagagaagaaccaataataccttagttcgattcgagcagcgatggaggccggccgtgcgcgcgaggaggccgcacggggtggaagcctgaagcaggctagggcgagttcaggaagaagaggggaccgtgctcaccgcgccgccgatctgctcgccggccgcggacacgatgaggcgaggcggagcaggtgcacgacggcgcggagcggggcggcggcgttggagctctggctcaccgtgctcaaaagtcaagacaggcaggaggtcgattgtggggcggggccgtgcagcgctctgctaccgcctgcctgtgggtcatatgcacaggcccatgaggctggaaagaagaaatttttcatctcggaaaaagttcacctaaggtcccttttcttgacgtcgagttttaaaaccgttcctgaactgaaataccaagatacaatgtatgtcacatttggtcccaaggcagtattactctatgattttggtgacatggcggttgaatcagtgtggggcccacgtgagcgccacatgtcagccatcaattttcttccacctctctcgactctcttctcatatcaacccaaacctctagggcagccgacaacgggtggggagaagggtgccagccggcggggacaagctcgacggcggagactgccggctagtgtggctcccaatagccgggagtgctcgtgtcatgtacctgactgcgcacccaactgcaattgcaatgtattcacctgcacacacaggggctggggcttccgccacgtcatgctgcccaagctcttattccccaaactcagagccatctccactgagctgctcaaaagccgatttgtttaggtgtcctcgagctttgtctctcccccgcggaggcgcacgcacagctccactgcatcatcttcgaggtcaactccatttactccacgctgtggtcgcgtcatcctcaacgcttccgcccttcttcccgccacccgccaccgtcaagcttctcgccggtcgccagccttctcccacccattgccggccgtcaccgtcaggcttctacttggcgtcgccgcccaacggccgctactcttctcccctcctgttgtcggatgccccagaggtttgggttgagatgggaagagagagaagataaatggaataagactcagccgccacatcatcaaaaccgaggagtaatattgccttgggacctaatgtgatctgattttacaagattagatatgtgttatgtctagtatttcggtttagggatgattttgaaacttgatgacaagataagagacctcacgctcactttttcctttcatctctctcgttgcttttcttttaagaatagtaaaccgactagcgaaggtgttctgccaatttctcagtagttttcacattccgttgcccaaaaataagttcttccatggcaggatctgctgtacgaggaggcaaggagcgaaatggtaaaaaagaactcgatcaatgaggtatataattaaggttggccatcctttgggaatgaatcaaatggattcaggatggaaaaatgtactgtatcaacagaagtagaagaaaaaaaaatatgtatttctgcgccagctgcaaagaaccatagcttgagctagcgtccgtggcgccatggctggagtacgtggatcattgctgctgcggtggagagatcttgaggtcgagcccgacgttgaccccgttgtacgcgatcggcgcgaacatccacatatcatccgagctcagaagctgcgcaaaacgatgaatcccattgctttagcttatggaagattagagaccaacgcgcgaattgaagcaaaacttgggctcttggattcgaatcaggggtcttatggttaccttgatttggagctgcaagaacttgacgtagtgaactgcttcttcaagcatcgtgctgatgtccacctgaaaaaaataacaagtcctcgcatgatcagagcaattcagtatcgtggaggcttttgtggagtattgtgattgatgcggttttggaatcagatggtttttaagtaacttaccttggttccatttgggataagattctgcagtatctttagccgttcattgatcctttctctcctcttctgttcaagcaagacagttaaaaaaaaattcagattcagatgagcaacaaaaatgtgcagcaactcgcgcatagttctacctaccctggcatagaggctttgcggatcggtcgccgccccgcgcccggccctcgccttcgcgccgccgtgcccggtcgccggcgatgacaacgacgacttcttggacgccgagctcacgttgctgcacgaagtcatctccagcgacagcgagtcgtcatcagagaggtagttggtgctcgagctctgcacattgccgccgtcgccgccgccattgctctccttctggttgctgctccggctgcacgcgcccttctgcgccttctttgactgcgcgttcttattacccttcttctgcaccacctgatgcacacatcgtcaggaatcttaatccgattattacgaaagattaatcagttcattaattgtacattttttttgtacttactgttgctgccgtggagcgcgccttcttcctcgcgacgttgtccgtgcagctctcatccttgtgatcctcaaccttcctcttgcacgccggtgtcatcttggtggcggcggcggcggcggcggcgctgctcccagcgccgccagcatcgccgccgtgctggtcctcgaactcgaggttcaggtccaccatgaagctcgggtcggccaccagctgctcctccggcacgaagaagtcgccgccggccaccatcgcgccgccgtcgtagcacccgtaatgctgctgctgctgcatgtagcagtatggcgccgagccgtagtactggtcggccgcgtcgtgcgccggccagtacatcgccggcggcgccgccgccgccggctgctgctgctcctggtcattgccgaagtactgcacgccgagcagctgcgccatcgcctccgagtcctccattgcgactgacggatcgaacgagtgccagctcgcctccgaggactccatcatctccaatggcgaagaaatctgtaacaaaatatgatctcgtagatggccatacctgtcctagtatttatatagcaggggcactattttttttttcatcagttcaggaacagaatgttcgagcgtacaattctgaccattcataatttaattcgaaacattttgggaaaactactgcacagttggcgatgccagacagctaacaaaaaccgctgaaattcgtgcaaagacgaatagaaaaaacacaaggccgcgaatcgcacataaaaaacaccatttcgtccgtgcaatgagggcgattgaatttggggtgcaatgagtgagagactaagctaatgattaggtgacttacatactagagtaatgagcagagctggtcttattatgtcagtgatttgtgttggatggtaggactgtagttggaagaaaagaaataagagaaaaaaaaatggtcgtgaaggagttggcaagatcgtggggaagagtttcatgtcatgtcattataatttcagagtgaaaataaatgtgtttgtttcaaatcatggattctgatcttttgcctccctatataggaacttcagataatgctaactaacaaggaataattttgtgtgttttttgtttgtgggctaaagtcggagggacagggaagctggtttgctagtgattggtgaaaaatatttggattaacttatgatccgtgcgcattcgcttgttagtcgcctagatcacgtcgatgcattatcagttctcctgccggcgagaagtgatatctttgaagctagcgaaactgtattgttccagttgttaaaaaaacgtcgagagaatatatatgacaaaacaaaataatgtattaaatgtattaggatttgtcatgacaaaacaaaatgacattgtttgtcatggagatatcactacactttcataaaagtacaacagagaagagtgtacaaaatcgtgcagaagtatatttacatgttgccaatagatattggtggtgattccttacattccaaactccaaatagtacatgcattgttttttttagaaactcttataatttgctctgttgaaactctaattacaaaatatagtaattatcattaatcttattgtatttcataataattagtaataaaacagattaattgtcctaataaacactaactagctgggtggcccgcgcaattgcgcggctagcacccaaacaaaatcatatattttccagtctgattttacttaaaatttattaaatagctatctcgttgtcttaagactttgaaagacaaaaccttatcatccacgtatttctaattatatagcttttaaaagtcacaccagctgctaccccttacttctgtcatatccttctttatttgcttactcgatttatcactatttttattcattctctttgaaacctttaaaaattggatcttataatttttaaagtttattgtctcgttgggtttcgtttttataatttctagaagtccagtcaaacactgtcattatactcctctacaacccgtccactgtcttttctctttattgtcattgggattttaaaaatcgaacataattatcgttcgggttccgccaaaccgttagcggctttgccattgtactcctttatggctcgcccgctgcctccattctttattatcattgagattttaaaatcgaacatagttattattggttttttttttactttttagaagttccaaacctttaaaaattggacctcgtagtttttagagtttattgtctcgttgggtttcattttttttttaatttttagaagtcccgttaaacgatgccactatactcctctacggcccatatgccgcctactctttattgtcattgggattctaaaaatcgagcataactatcgttggaatttattttttattttctagaagtcccgccaaccgtcggcggctttgcagctatactcctatacaccccgcccgctgcttcacctttttattgtcattgagattttaaaaatcgaatatgattatcaatgaggttcactttttaactttctagaagtcccaacaaccgccctgcccatttgcttcacggcctgcatgtcgtccctccttttaatcgttattaggattctatttggtgttttattaacagtttttatatatcgtatcagccgtcaacactctactcttttataggcctggtacttaatatatcttgtcatgtgttttagatggtcttttctttataaattgtattcctaattaaaatctttttttcattttcttatttcagaatttatttttttcaaattttaattaatatcgcatagtgttcttttaatatttttatttttttaaaaaaaatcaattgttttaaaattgtatttctacttgaactctcttttaattttgtctaattttggatattattttattttttattctaaattttaattaatctcgtatagggttcttatgtgaattcttctttcaatatttcttattttttaattccgaatttcagttaattttaaattgtattcctaattgaattcttcttttctttttgctaattttggattttacttttatttttgaatattaattaatctcgtattagattcttatatggactcttctctcagtattccttatttttaattccgaattttaattattttaaaattgtatttctacttggactctcctttttcttttctaatttcatattttattttatttttattctgaattttgattaatctcctattgggttcttatatggactcttatttcaatattgcttatttttaattccgaatttcagctatttttaaattgtatttctgcttggactctccttttctttttctccgattaatgtgggaatttttagtcaccacagcgaacgtggtgcctcctttcaaagttgttttaataatataatagatcttgaaatgaaaattattaattaacgaaaaaactaactatgtctaatcatttgcgttgacaaaagtggatggtctcatcaatcaatttagatgggggctcatccaacatcttaagagaatatatattctcttcagtgtccatcccatcccatccactctcgcccatgaaacaaaaacatgtaaaaatgggatgattatctttcatctattttcatcccttcaaccaaatagactcttaatggaccaaaagcttcaattttttttctcttcaaaaggcattcatagagggcttaacaagaataaaggaagagtctggagactcctagcctcttgggtggcctatcaacagttggatccaaaccaatgggagccttgcctcgatgtccaagcctgttgggagatacttgctaacaaaaaggaggtacccaagaaaggcatgcgtagcttaatcttgttggttgtctgagaaatctcgacagagaggaaccggcaagtcttcgagcacaagaagatagcgacacctggcctcgtggcgaaaataaaggaggaagcaagaacatggaccctagcaggagcaaaaaaagctccaggagctccttccaacctcggatagatttgtatagatttttttcattcttacgcctaggggttgtatttttctccttctatatttaatgaaatagcataacctcgtgccgattccttttaaaaaacaagaataaaggaaaacaaaatatatggggatattttcattttcttcagaaactaagctgtcagatattgtatacttcatatagttattcagactatatgtccttagaaaacacattgtagtcgctgagtttctaattttaaattatttatacaattttatatatgtaggctcggagccaagttttattttttgaaaaaaaacttgcagcaaattcgcattgcatccccaaaccgaaatatatatattttttattttgttccttgcaaagaaaaaaaagaaaagattaatttgttgaaagagatggagaatagttagagagaagaaacatgaacagagccgtaccagatatattcaaattagagccacgttataaccacgtccaacaaaccaaaactaaaaacaatcagagagaaaatcgaagccatatgtttggtctccttccatcaataattaatattctagcggggtataccagtggcggagccaggattttaaagttgggtattcccgtctaagcgttgagccgttggccgcttctacccctcgcggctgccggccacccaaccggcctgactgcctgagcttggcggagtggcgggcgccacccgctgcccgccgcggcaatagcctccccctccgtggtagcgcggtccagttctcgccgccagttgccgcctcgccgcgccgccgcctagggtttggaaatggggagcggcgcgagggagccgagccagggagggatgggtcatggagggagagcgagagggggccgtctggaagagtggtggctaagtggatcaactgatgtctgatgggtcatataggccggttgggctgtgtttggatcgaagaattgaggatttaggtgcactaatatatgtacatgtgtatagggctatgtttggatcgaataattgaggatttaggtgcactaatatgtgtacatatgtatatattagaaatatacttgtttttcgataaaaaagttgggtattcccgggaatacccgggaatcatggtagctccgcccatggggtatacagtaccgaaaagaaaattatctccaccatgctcggttgcacttgcacacgagtgcagaaccgccagatcgaaagctagcgaacgtatgctgctgcgatggcaaacggccgtagtacactagcctagcaggctagcactactactctactaggcgtgccacggcctttgctacatttttctaccctggtgcacacgacgtatcaggtagtaccctggtgttgtttagattccaactttttttttcaaattttcaatttttttatcacatcaaactttcctacacacacaaactttcaacttttccgtcacatcgtttcaatttctttaaacttccaattttaacatggaactaaacacaaccgtaatagaatttgtgatatgatttgaatctttagttgtttaagccctactaactacttcatccgttctaaaatacggtatggctcattcatgtattcaggggctatttggatggaggctaactttaccacagtataactttatttaccataagcctataactgtgtcaagccatacaaagtgtttgttggccacaaccatggtaaattttggctagaaaataaaaatatgacgcgtggaccattgtgctaataaagtgtagcttaactcaactatggcactcaaccagccactagcctaagaaattgtggcgcgtctaaggtttggtgtagcaaactgcggccactacccaaacaacctctcactctttttattacgcacaaccacacaggtgaagtgggggaacctaggccttattagtttggaaggatttctaaaggaaatctcaattcctttggaataagcactattcatgccttcggtttgtaggatttaaaggaaaattttccataggaatactatgccaatcctccaaaaatcctccaaaatgtactaattccataggaatgaaaatatctactctatcctcttttgtttagctcagtgtaggaaaaattcctatgttccaatcctttattttgcacgtgcattcctacattatttctacgtttttcctatgatttgaaaatcctgtgaatcgaataaaccctaagtggttgcctaggattgtggactctttgttcactagtggtactatggctatgttctttatagatgattcgacatatatattatggatattttttgtatgattagaaggatgaatttaagctagagtaatgcagatgaccagtgtgttggagtgtatgtgtgtccacctgcgttcgaaccctatcagaggtcgtcgcatgtgttcacctctcttattcttttatatatatatatatatatatatatatatatatatatatatatatatatatatatattcacctcccttcttattaccatttatatggaaactcctcttttcatatttagattttttttataggggtgagttacctattctatactccctctgtaccatactataaacgatattgagtggatgtggcatgaatatgaacacggagtgaatataaatttaaaaatagtagaactagttattcgagtaatgtcgatatgattattttttttttggagaaatcgtaatttgatatctgtggtacacctattcacaagtccgtaagttaaaaataacagggcctaataagagacgatgcacttaagtacttaacaagttaacatgcataacgttagggtattttgattttctcatcgtgcagcttggcgcacgaagttgagccctgagcctgcttagtcgatcggtctacgtccatcggtccatgacagacaacagtgttgtctggttgactgctcatgcacttggacgccaccaccatcatgtgcaccccgatgctcaaaccagtacgccaccaatcaccatcatttgcttgcaagaaaacgacctctatatccagtcaagaacacgtactctttttcattacaagagtcacaaccgattagcaatcgtatagaagttttgttgtcacttggtcgatcgacaggtgtccacaggatgagaacacacatgacatatagtttatgctttccattaattgctaagcgtgtgagttagtggtgcattagtggagttaagttttttttttttttgagaaagagttaagtattactagttaagtgatggatctagaacagcaaattaaacatgtcttttgacgactgcatttgagcagaaagtgaaatgatagtcaggattccggcaaaacacaggaataattaagagaatatgagttaaagaaaaggagtccgatcggatgattagctaacagataccttcgctctttggacataattcgatatccaaatgttgccgtaaggccagtcacaatgggggtttcactggtgtgtcatgcacatttaataggggtaagactgaataaaaaatgattatttgcatgaaatggggatgagagagaaggaaagagtttcatcctggtgaaactcgtcagcgtcgtttccaagtcctcggtaacagagtgaaacccccgttgaggccgattcgtttcattcaccggatctcttgcgtccgcctccgccgtgcgacctccgcattctcccgcgccgcgccggattttgggtacaaatgatcccagcaacttgtatcaattaaatgctttgcttagtcttggaaacgtcaaagtgaaacccctccactgtggggattgtttcataaaagatttcatttgagagaagatggtataatattttgggtagccgtgcaatgacactagccattgtgactggcctaatgcaaattgctaactatgttttgtcaggccaatcagtgtgtccacgcatgatattcttcttcttcaacagcaatcgttctcgaaaaaaaaatactacttcccagtgcgaatattcagtgaattgttccggccatgacttccttttttttgatcaacttgcatgcggaggacacgtaaatttgatttccgtatcaaatctgtttagaccattgtactgtctacagctactctgttgagtaagaagactgaggttgtgtccaaacttcagccctttttcatctcatcaacctgtcatacacatacaatttttcagtcacaccatctctaattttaatcaaaatccaaactttacgctgaactaaacacagcctgaggtattttgtgcagccaagcaatgcattgcaggagtttcaaactctaaactctatttaggttgcgttcgagatgaggggttgggaaacctctttctcggcatgcaaaacaaaatacatattattacatgattaattaagtattaactatttttttaaaaaaataattaatatgtttttttaaaacaacatttatatagaaactttttgcaaagcagtttgaaaagtgtgcgtgcggaaaacgagagaagtgagttaggaaatctgggggaagaacacaatacaaggggtacagctatttagcgcacttgcattcttagcttatagtttttttctaaagactttcatctgcaaaactttcatccaaaaaaactttatctcaaaattttcataaaaaaacattcaacgaagaacttttatatgaaaactttcatatgaaaaaagtgtgcgtttgaaacacatgtgctctaaatagagtttagagtttgaaataactggaattgctaaccagggtggtaacagcttagctgcaaattgtttttatgatcctgcaaactatcaacttagcatatttcaagtctacataaccaaacactttcagcaaaagtacttaccagttaccagctaatcaaatgcgttgggaaaatattgatagacaatatacttattttgaacgcatgtatatcaggcccaaagttaaaaaaaaaggaagataagtagagcatcatgtcttgaaaagctgtgagtcgttacaccagttccacagatatattcagtaactcggtcaagaaagaacaacacgctttaaagttctgtttgatgtcttgaactgaatagtctactgttgatctggcaaaagaaatcaaccggaaccttaaacaagctggatgctaaagagaaaagaaagtaagacatgagctatctcaatattctcaagcagttcaaaacagacttaaaatcttcatacagattatacgaatgcagatatacagctagtgtattgttccctttctcattgaaatgaataatagttgacattgttagtcctgccacccggggaaatgtttggcttaagagaaatatactctataacatcgaactgtttggaccagtatactttttttttgtcgggattaccgaaggagatcatcaaatgtaattaagatagaggaaaaaaatgtttacaagaaagtttttcatcgacagcgagctgtcgagaaaggatgtgcagcaaagcacacgccccgacaccacacgccaaccacacagacacaagctacagagaggagagctgaacgccaaaccggccaccgctatgcgagaccggtcgccgccgggtatacaacaacaccatagaaaggatactccgaaaacaatgccttcacgaaggttgcgacgctaaaagacgctgtcgtcgcccgtccaaagaaattggacacggttttcacctagagatcctcgtcgagggaggaaggttcctcgacaacgcccccaagagggttactgcaccaaaaggcgtagccgctgccggcccaataaagcactaggctaggtttcgcctgagaccctcttcaccccgtcgctgtggtccgtcgcccgccaactctgatacctccaaccaaacatcagtagcgcgtggccttcaccgcaccggagtagggttgtcaaaaaagctcgagactcgcaagctactagaactcgactcgttataggctcggctcgagctcggcttgagcctaaaacgaaccgagctcgagcttgaaatgaggctcgtgcactttaacgagccgagctcgaatagctcggtaaagactcgagtattagttagtaactgtcatgtctcatgctttaccttggtctccaataaaaaatcatcgatgcttttccttggtctgctactactccaacattggtctatgtgaagtacagaagcaatcaattcttgaacactactcccaaagctagtagtagtagcaaagcagactactcctgtgctagtactagtagtacagtacactagtgctcccgtatggccgtatctctacacaacgtgcccagctacagctttctgtcagcttctctactttttgaaatatgtacacatgcttgtgttgcgttgatgcgagctcgattaggctcgaggctagcttgactgcaagctcgaaggttagtccaggctcggctcgagctcgactcgagttcataccgagctcgagcctgaggatctaagctcgctcgagctcggctcgttgacagccctacaccggagtttggaccagtatacttatcttattgtcagggccccaattggttttacatttcggctaataatcctatacaatataattttagatacacattgttaagactaagtttacatacacagccatacttgaacaaaatgttcctgtgggaagtaaattagtgtcaagaaaaatacaatgtagaaatgcaacatctcaacctagctcatacagattaaacactagactatactctatagtgcaacagctactgtttcatagaaaaggtacatccccaaatagaaatttcaccgtgaaagaacttcccttggctattggaaggaatcattcctcacctgagaggctgagagactcagactaacatacataaaacaatgttaattgacactactagcatcgaagtcaactaattaactagcacaaagtcagctaattataacatcacccgatcttagattagcaaagatgtgttaactaaaagagagaccgtcttatataattgaagaagaaagtgctctatcatagatccaactagtaggacaaaagcatatcattcaacaagggtgcaggaccattagctgaagaaaatgaactcttttatcataagtactcgaaaacatgggttggatatttgcatccctacaaaaccctttttccagaaatcctaacctattcggttcctaaagacaaaatgagaactactccctccttccctaaatgtttgacgccgttgacttttctaaacatgtttgaccgttcgtcttattcaaaattttttgtgaaatatgtaaaactatatgtatatataaaagtatatttaacaatgaatcaaatgataggaaaagaattaataattacttaaattttttgaataagacgaacggtcaaatatgtttaaaaaagtcaacggcgtcaaacatttagggatggagggagtatatagcagggtagtttaatcaatttcagatatgaaaagggtaatttcaggaaactgtttatagaagtctagagattatcttttttcgtttcctgaaaaagaaaagcagaaagagtatcaagtttcagttgagatttgctagttctgagcaatagcattggtttctcgttaggttcagatataggaatagatataagcattgtgcggttgttctccaatcgacttgggccaactacctgagcggcccaaaatccttaattgagcccattacccacatgggccgtagcccagactggaataacgcgaaccgccattcggccatcgattgaccttttcttctccaaaatgagggaaaaaaaacctgcgtgtaatcgcaactccatccggctcatcggcgagtcggcgtcgcgtcactcccgtgctccggcgacggcggaggaggaggcggagcggtcgccggaagccgtcccagcggcggcgggggggagatgggagtgcacgggctgtgggagctgctggctcccgtggggcggcgcgtgtcggtggagaccctggcggggaagcggctggcggtggacgcgagcatctggatggtgcagttcatgcgggcgatgcgggacgacaagggcgacatgatccgcgacgcccacctcctcgggttcctccgccgaatctgcaagctcctcttcctccgcgcgcgcccggtcttcgtcttcgacggcgccaccccggccctcaagcggcgcaccctcgccgcccgccgccgccaccgcgacgccgcccaggccaaggtccggaagaccgccgagaagctcctgctctcccatgtacgtggcctctctccccccattcctcttattggcgcagcgtattttaggtatcctcccaattgatactgtagggatgatggctgatttgtaggaaattttattcctaatccagtactagtagtgagtgatgaccagagaatttgcactatacactctattttagtaccagtacaacactacaatgacaaccaaatatgctatgatcatgtgaacaagagaatgatctacccaaggcccatgtattacttctctggggaaaaactactactgatttctgaaggatgatgccttgcatttctatgggaaaaaacgtgtcataaacatgtttctcagggttaatttacattccccacaaaaaaaattacaagcaaagggagcaatttatcccaccagcttcttttgtattggactctacccttgtgatcatcctgttatttgattgatctctttccactggaattccactattcagtttcttcaggaactgggagatttccctaggtcccaaatgtgtcctaaccacccaaaagtgtttgtagtggacataaaggagagttgtctaggctattaaatttgttctgatattttctcttaatttcctctagtttcttttcccaagagttgtctaggctattaaatttgttctgatattttctcttaatttcctctagtttcttttcccgagtagtccacactccattaccatactatatcatattgaaaaaaaaaattcaaatgaccattcgtttagcaatgatggtatggcattttaattttactagtattttaagtttgttggaaaggcaaaatcaatatctttatggttttgggcatgtggttccagctcaaggctaggaagcttgaagaattggcagctcaaatcaagagtgacagggctaagcatgacaataaaggcaagcaagttgagagcagtaaaatgggagaaattgagaaaattaatggagagcaaaagaaaaacaacgatggagaaaacagcggggggattgtagcaccaatcgaccaggagaaactggatgaactgtgtgtgcctccctatagcttccacatacttcttccttgttaagatcattaagttgatgtttttattgcatgttttaaggctggccgcatcacttgctgcagaggaagaggcaaatttgactggcaaaggaaaacagtatactgtaagtgttccattgcaagaagcagctgacattagtgaggatgatgacgaggatgatggagagatgatctttgtaagtatctggtttttatttgcttgatgaaaactgagtgtgccatctaagtttttcttattattcagtttcacataacatggtccctatctttttttagtgcacccactgctttttttttaatttattagttgattaaaaggtactggtttttgtaatccgattgcagcctatgacaacaggtgatattgatcctgcagtattagcttcactccctccatcaatgcagttggatcttcttgttcaggtaaagaggatgaactactggttctcatgtttctccttggtaccttaaactgtatgcaaccagagactaatttaagagaatatgattggtttagatgagggagagagtgatggctgaaaacaggcagaagtaccagaaaattaaaaaggtaatag

SEQ ID NO: 8098 - DNA, 9258 bp, Oryza sativa
  unsure (1)..(9258): unsure at all n locations
ttttaattgttggaggctttcacaaagattttacttattcttcgcatgattttgaggatgtattttagaggcgatttgggacgcgacagtttattagagtagaagcctttcttttccgttggtcgtgtagacgctgcagcttcggaagatccgctcttcgtggaagttgaagccgacgtttgggaaagcgagcaaggcaagtcacatcatccttgaacatattgaatcccagtttataaaattatgttgatttaaattattgcattatcgctttatttaaattcccgcgttatcactgttttatctagccatgcctatttacctttgttatgaccttattattgttattattattatttccttgttcaccctagaataaacaaaaccccaactagtggacactctactcatggtaccactagtatgattttaggtagatgcttcgctggttaattaggcaacattaggtggttttacaactctagactttgggatattcatatcacctggacactatggaatggtttgattattgtggaaattggattcacacctccccctctattcaaaatcctcaaaatggttttaggctgggctcggggtgcatggttttgatagtagcacctcggccatataaggaccggtcttcgggcctctgttgcaaagcactaccgtacttccacatgtctagtgggtaaggcttagtttgtggctcagtctggttatacacaaaagtacacggatggagatggacgaagtctggggtcgatagacatctctaggacaaatgaaggctacacaagctgcggcccggtagtcgagatgtcatggcacagggctggtgtcctgctgctaggggctcaatcctgcctgcctgtcccggaggttccggccgtaggcggggttgggtcggtactcttgtctatggctaggatgggttggaaactatgtcacatcttccgtctgtataccgtggtggtatgtggcacgtggttacacgtgaggaagatgtgtcttgtgggtaaagatgtacacctctgatcagagtataatctattcgaatagccgcgccctcggttatgggcaagcctagcaatgtacccaagttagtgttttaattcttaaaacctgcttaactactaaaatgtggaatggttggcctgggttggcttgggacgagctgggacccagggtcgggttgccagttcggtctaaatcatcgtaggccttggattaaggcatgttcgtgggggtttacggccttgattaatatcactgtgtagctctaggatcatctttataaaatggctttgggcaactaagtgacttttaaatgctgtttactgcaaaacttaacccctatattattaccccttgcacccccttgcattaatcatgcatctgccggtgtggcttgctgagtactgtggttgtactcattcttgctcaatctttcccccccttcagtaagagaagctttggagaagaagtcttaggtggagtcctggcttataccccagttgagcgcctgtgaagatggagccatagtcccgctagtccgctgctgtttatttttgattgtcaggccttaagtgcctttgtaataatgtaaatattatcgatataataaagatgtgtcttttgtatcatgtttgtgtggtgtaccccgacttttcctgggacggggattaatacactagcgttcgggaaaatgcatttttctcagtcgcgacagaagtaaagtgtattaattagagaatttttcttcgggatccccccattacatggccctatgagactatttatagctcctattacaggttcttactactagagttttggttatacaggggaatttacatggttacccttatgaaagggacatttacatgggtacatagggtaattgaggttcacaggcccctgatgggccgtcgggcgatcgtcagctcaatagcccctagacttgatgggcctgaaaggcttcttcggccctcgcgggggcgagcttgctttggcgaagtcgtctcccttcggcatatactcttcgccctgcatccttcgcccaagaggcctctggcttggcagagtacccgtgcgatccctcgcctctcgccgtccttgttccatagtcttcgtcatggggggacttcgccccgactaactttgacgtctcgggcttgaatccccactcttcgtatagctttcagcagattttggtcgaagggcctcatgccataccaccaacaatgatatccatcaaaactatccaaaatgcgagaggcagattaccatagtaactctcggtaagcacttggctgagtgagttgcaagtactgttcatgtacttaatgatacctaaggaattaatttatatacggagaaattaaacatagtgcagcctgttggtctgtggcgttgtgctcattttttcagaccaccaccctttcctcgatcttacttgggctagcgctcttcgctggtccagcgaaaaggagatagcagtcgagagtcgagatcgaaggcctaattatttttagagagcaatggaacgaacattgatgggtatagatcagtcatttaattaggtgttgttagctccagtttagtctcatgagtttaattatgcttgtactccatccgtttcataatgtagcattgtccacatttatgaaagtaatttttataagactaatgatgacaaaactatagaaatcttttatcaaacaatgatttatcataaaactatatatttatagcaccgaagttattatagaactacatatttgtggtgcagtactacagatttaataataaagttaccacaaaatcacatgttgagcatcaatttaatcagaaaacttggatgctaattattcaaacataacattattgctagggatttaaaccctaaattttgtagttttggaataattttattattattattaaatatgtagtcttaagatatttagcctttttactctttttaaaatttggttgccctcatgggtcggtcagtgaaacactgcaggatttaaacgacagctagagctataatttaccttatcagatcaagtaggtcctgtctgattcatggttcgatgcttgaactatcttaagttcttgacacacatgaacgttacaaaagattagtatttggtgtgtagaagggtcaacgccaagccggttaattagtgcaacaaactatgtgtttgcttgcggcacgattgcagagagcacaccatcgtcatggcatgaacacaaacagacccgtaggcttaatcatgtgtgttaggtgaaattaacttgatagatttgcagttcattatctgcaattgacacgataaattacatccttaaacctgctggcaattgtacttagataatggtagcgtatcctcacagatttagcacagctagcaaggcgggaaggaaacaagaaagcattgggatgccatcatctgtaaagtacacagcacagtactgaatcaatggcaatccatccgttgcctcccatgtatgcctattgtctactgtactaaccaagaagacatggaggacaagtccagcgcatgtacgcatggtgcccaagaggacagatggaggatcagatcatggggcaggcacatgcatccacatccctcaaaatcatgcccttgtctccagattcccgggcttggctgttaatgcgtgagttgtctgaagaagctcgcatccctccaaggcaggcggcatatatacagttcaggatcatccatttcttaatgctacttcatcattctgatctccaaaagggcctttctcatcaggacaccgctggtgatccccatccgtgtctcagatttatcatgctagctgattggagtccattgtcgcacgtggcgacgatcgggtttcttggaaagctgggggaacattgttggtgctgggtcactaataatttagtttgataagaaaagagatggagagaaaaattaagccggaaagggaaggtaggacatgcaaacatctaagtagaattattctgtagttcacatgcaataagtgcgcgtcatttttcaaatatcgaattaggtggattggaattagcatcactaattaatgtgaaacaccgtttatagtttaggttgataacaccaattaattactaacatacatctcccgtcagaaaaaaaaaacaaagaaagaaagagggggggggggtcatgttattcagttagagaagtgtgatacctgaaactgaatgtcatgttcagtttcagactttaagaggaggaacagatcatcaaattaacttgaagcttaagctctccaggacgactgcatttactcatggaagtcgacaagatccccagatccacaatggttataaacaatcttgggtggcaattattaatcagtcatgtcattcaactagattgagaaataaaagaaagaaaaaagggggtccgtactgttgtagtatattcctgagtgggggaggggaggtctgtgatgtcaacaagttaggagcgaggagcatgattccagggcaggcaggcatgcacacatgtgaagtgccttggttactttagctgttcctgtctcttggttcgggtgattctttcttcctttctggtgtagtgccttcctttaaatctatttctggatagatacaacacaagatggatgcacacatatttatagcaagtgggggttgctatgtctccctgcttttctagtctgcttgacattttgtggtgggggcatcatccctttcactctcaaatgcttcagatttcagtcaatccacactgtaatccccattgctagtatctctctctcgctctctctccgcctttaaaataggctcttgtggattgttgagaaagttaagtgcccctgttgcaaggttctttgaggcttcgatcccgataagcgttcgaactggtcggcctccacctattgtgagtaaaagccactcaattcctttctcatagtttccattttccttgcatccatctataaagatagctagggtgcaaaattttatatggttggtttgttactgccatggcagaaaaaaattgagcgtatgcatccatcgagagagagagagagagagagagcaatctgttgatctcgcactgtattttgcagctgtgatttggcttcaaagccagccaaaaaaggtctaattctccggccacaagaagatgtcaaggtacctgaagcagtacgagaaggaacacatgaagatggccatgttgaggcaggaggagacattcaagcagcaggtaagataagaacaccactccatactgaaacttccaaactcttgcttccttatccagtaccgaaccttcaagccctcaagcaaataacagcagctttgttcaggttcaggagctgcaccggctgtaccgagtacagaagctactgatggacgccggctctgcaatcacaatgcaaggcatcagttgcatacctgaagacgattatcatgcagaggagaacgaggcanggtcgagcaggccatggcacaccttccctgggagcgacaatgacaagccacaggctcacactagtgttcttgaagagagcgagctggacctgacgctagcgatcgggaggacgacgacgaccaagaaggaggcgccgtcgtctagcgtggactcgaggacgagcaactcgtcgtcgtcgacgagtccggcagcaccaactgcagggcggtgatgccgcaccggccatctcggttggggtcgtcgtcggcggtgaaggttgttgctggtggccccggtgttgggacgacgcagcagcatttggacctggagcagcaggacgcgctgaagcagcctccttggctccaccgttgtctcaatttggcacgataagaggatgtatagcacacaacttcttaatttcttgccgtgtcatccctttactattctcaatcatgcttgctgctcgccctcgcatttctcgatcgtttgtcctcactttacttcacttttttttttacttcttattttttttacttccccaccaccgtcatgattaagaagtcgcgctcagcaggggaaagaaaaaagagtcgtgcacccggagccgacccgcttgatgattccaagccttatcgttttccttatataaaatcagccgctataaaaatttaagtttcagacttacttttgctgttgataactagccggcggctacaagtcgtcggatagttattagcgagtactagttggttggcaagattagttagcttgctgcttgctccaccattataatttgtgagatataaattataaatttataattgaattagggctactacctatctcgggggtctgaatcaacacaaaaattcgttgtctttagattactttaccgcaatctcacgtatagcttagtcccaacgtccaccatactatatagataccgtagtcaggtataaactgttgatagtagcgtgccaagtagggggcttgatgaaaaaagtttcgacgagatgggtacaagagacggattttctaacaatggcctctataatcagcttggccagggcggtccaacccagctgatgttcactcttctgcatgttggatccgtcacattcccagtcttcgctgttacgtcgttgttagtatttcttacgatcacagacaaaatccgcaagcgcacggatataccgatgtagcacttctcctacggagtattccaagggtatcgaatccaagagaacatgtgtggtcagatcttcctccggttcatccaaggacaccaagcaaatgataagccaggatagagaggatttaatagtgagaaacattgttagggaaagcttaattttaatcctaatgcaatatttcaggcactggcaacccgcagttcccagatgtcgctctactacgtacccggacagggaggacttaagtgatctcgagggctgtcaccacctctacacccacctcaaacatactgtgggatacgcagcaattactggataataattacctaaacaccacgtctaagcaattactatctactttagtgtttataactcactaaagcaatcattatattttagttgattatagtgaacaataatcccgtatgctacttcggaactaaccaagagataattctcacaagataaatctaaattactcaagaagaatattatattgaattcacagtaataaacagaataaaagaaataggggaagattactgacaactccggaattcttccgactcctactctactcccttccttcctattttagtatacaatatagtacaatagagcctcttataattcagctcaagcttggaagtatgtgtgagagtgaataaagtgaggtctatttataggacaggtatgacggttgtgagaaggggaaatgtccgaactgccccgcaaccgtctttgggagagcatctggagcgtcgatgccaaaccctaggatcaacggcgatcagaggggttcgcccgaacctaggctgggccctcctggcctggccttcggtctatggactccctgggctcttctctatccatttctcagagttttgggttaattcactgatgttttgatgaagttcacaacccctccttgtatagatatataattctcctcactttagtctaggtttcctcccaacatcagggtatatcatctacatacaaatatacaccaacacttgtggaatatgtgagattaagcacctatcactatgttggatgttttattatccgaactttatgcagatgttggcggtatagaatcgacatttaacagccgccaacagtcgttgatctaccatccgacttccaccgagaacaaggagccgactgcgaagtctattgggtttactcccacatcggtaattgaggatgggggagcactttttaaaaggtggagggagtcctcacccatcagactagttttttgggttgtgtaggcctgagacctaaagttgtggctctggttgagcctgtggtggagcaggcccaatatgaccgggtggcccatggttggtggactgggctgcgcactctaacaagtaatatcagagtccaggtttagaacctggaacaatttccatgggtcacatgatgggggaggccaggtaacaagtcttcagggtcacatgggttaatgtgacataggagattgttgggcccgatgtgtgacgacggtggagattgttgagtttagtctcacatcggtaattgatgatgggagagcacgacttaaaaggtgggggcaatcctcacccatcaaactagtcttttgggttgtgtaggctcaagacctagagttgtggcttcggttgagcctgtggtggagcaaactcaatgtgacctgagtggcccatggttggtgggctaggttgcgcactctaacaaagtccaatcacaagattaggaagaagtggtgccccattaacaaaacgagttctcactctctagatgggtgcagtgttatgctgaaggacaaaactggatgcaacggttgcaaacttgatgatactcaacgcatctcctcatacaaattatgccccatcgacaagacctgagtggcccatggttggtgggctaggttgcgcactctaacaaagtccactcacaagattaggaagaagtggtgccccattaacaaaacgagttctcactctctatatgggtgcagtgttatgctgaaggacaaaactggatgcaacggttgcaaacttgatgatactcaacgcatctcgtcatacaaattatgccccatccacaagacaaaatgcgtactttgacagggtttaaggtattcatcaaagttgtcgaatccatgacctcgtctacgtcggccagttcttctcccaagcattgtctgatccactcccgatgacatcaatccatcaatttgggatcatacgatgatatgtcagatgacttagcttgtttggtcggctatctgggactagacccccatgaaccatctattctccatagtctggatccgctcgagtcctaggtctcaattcataccgtagggtgaacatcgttgagatcgtggacctagcgtcccgtgacgacattgttgacggtcgttatcgattagtttcgaccgtcaatattactaaaatagaggagaactagtggtgcttgcaatgcatatatttgttagaataataatattccattagtattaggtatactaaccttttgcagagaatgacaataaagtggaggagaatcgacatcaactcagacga

SEQ ID NO: 8099 - DNA, 11893 bp, Oryza sativa
gcacttgtgggtgtgtcttgttgagtacggtggttgtactcagtcttgctcaatttttcccaaccccagaagaggagttcctggaagatgaaggcttcggtgtctagctcgtgcctgccgtcaagtgtctgtggtcgtcgccctagtcttccgctgtttctcgtttgtctttgtgtgtgctgggccttcgctgcccatgtaataaattaactatttacgcttccgcttgttaaactctgatttgtatcaacttttggtgtaccttgcctcctgggacaaggattaatgcacgcacgtaaggaacgcccgttgggttatttccggtcgtgacaagttggtattagagcccccttgaccctaggacgagccgtagatcccaagccttagcaatattttcaaaaataaaaatcctttgctatttgtgaaaactgtctagtctctctctgtcttgctgcttcatttactgccaaaatctggcctttaaaatgttgcttttctttttgtttttgtttgtagatggccggcagcatcacccgtcgtggtttggacatgactggcttcgtcttggagctgcggggcatgtgcgtggtcctggggtatccacacggagtggactaccaggccaggccgcttccggagcaggagggtgacgatgcagagccccacgctgcttgggaagtcactgcagtgatcctcgctggttctcccgagcggacctcgctgacagtcaccgcgggtggagactctttccccgccgcttgccagaacgccgctctcctcgccatcggcactcttcaccagcgctacccggacgagttgcagcactcgccctaccgctaccaccctcgtcgcggaggagcccgcgaccacgccaccttccgggatgctagttcggaggatgacgctaccatcgtgcacttggcgcgcatggtggaggcatacgacgcggctcgtatcgacttccatcagatggtgcgccgtgggatggtcgagaacaacatgaagatcctggagctgcgtcaggagaacctgcagctcaagaaggacctagacgcggtggaggcgcagctgcatcagctcaagatcgcccagggagaggtctgccgccccaagcgtcgccgcgtctgccgcagccagaagatcaccgcccgcaagagcacctccaggcccgagcttgttcgtcagtccctagcgtggacctgcttcgtcgagaccccccgtgccgagcccgcgcccgtggttccccaggagggggaagcctccggcattggtagcacggaggatgcgctgttgctcaccttccgtcctggcccgtcgcagcggtagacgagcagttagtaggcttgcgcgtgtgttctttcttgtttgtcttcttgttgggttgtgtggggcatggttatgtcggtgtgtggcataactgtgtcagagcctgccttattttatttgcctaagcaacttgaactttaatgaaccaatttaatagcagtaataaattcaagaattatggtagtcgtgggtggttagttttaattgtccgctctctctgtttgctggtcctgtgtggggttttcagatggtgacgaccaggagaaatgctgttaccggtgatggcaaccaacccgaaggcagcaaccacaaccaccaaggcaacccacctccacctcctcctcctcctccgccaccaccaccagacaccaacgccattctcacccaaatcctcgcccagcaagctaatatgatgactgctttcctccaccacctccaaaatccgccacaacttaatgctccaccaccacccccacaacactctagactcgccgagtttctccgcatctgcccacctaccttctctagctccaacaaccccgtggatgtgttggattggttgcatgccgtggggaaaaagctagacactgtgcagtgcagcgatgaggagaaagtcatcttcgccgcccaccagctgcagggacccgcatctctatggtgggaccatttccaggctacacagccagagggacagcctattacttgggcccgcttcaccgccgctttccggagaacccatgtgcccgccggagtcgtggcccttaagaaaagggaattccgagagttgaagcaaggcaaccgctccgtgatggagtatttgcacgagttcaacaatctagcccgttacgctccggaggatgtgcgggaagatgaggagaagcaagagaagttcctggcaggaatggaccctgagctgtccgtccgtctagtctccggggattatccggatttccaacgtctggtggacaagagcatccgcttggaagccaagcacaaggaactggagtcgcacaagcgccgcttggcgaatttccgcaaccaacagggtgctaaccaaagggtccgctacaccaatccctatccagggggatcctcctcgcagcagcagcaacctcgctccgcgcctcgaccttaattcgtggtgcgcgtcccacagccgcagcaacagcagagtcagcaagggactcgtgcgccccgtcctcctacgccagctgtgcagcctagtcaaggccgcagggacgctcaaggtccgcagcgtctgtgcttcaactgcttcgagcccgggcactttgcggataaatgcccgaagccaaggcgtcagcaaggccaagcgcctccccgccccaacaacggtggtaaggacgtcattcggggtcgtgtgaaccatgtgacggccgaggacgtgctaacgactccagacgtcatcgttggtacgttcctcatttattccatccctgctaccattttgttcgactctggggcttcccactcgtttatatctgtgccattcgtggggagaattcagttgggggtagaaaggcttagaaaccctctgctcatcaccacccctggaggggttatgacagcaaagtattatagccctgccgtccctatagaaattcaggggattccttttccctcggatctgattctgctagacaccaagaacttggatgtgatccttgggatgaattggttggctcaattccaaggagtagtggattgcgcgagacgcactgtcactctgtaccgagggccggaacaaccggttgttttctttgcacccccaacctcagtcagaagttcagaacttcatcagataggactgtcagaaattcccatcgtcagagagttcggagacgtgtttccggaagaactacctggtatgccgcctaagcgggagattgagttccggatagatcttgctccaggaaccgctcctctgtacaaacgaccctaccgtatggcagcaaatgaactggccgaagtcaagaaacagttggaagagttgaaagaaaaggggtatatacgtccgagcacttccccctggggtgctcctgtgatttttgtggagaagaaagacaagacgaagaggatgtgcgttgactacagagctctcaatgaagtcaccatcaaaaacaagtaccctcttccccgaatcgatgatctgttcgatcagcttaaaggtgccactatattctccaagatcgatcttcgttccggatatcatcagctacgtattcgtgaagaagatattccgaagaccgcattcaccacgcgatacggactgtatgaattcaccgtgatgtcgtttggtttaaccaatgcacctgcctttttcatgaacttaatgaacaaagtgttcatggaatacttggataagtttgttgtggttttcattgatgacattctggtatactcacaatcagaggaagaccatcagcaccatctctgcctggtattgggaaagttgcgggaacatcaattgtatgccaaacttagcaagtgtgagttctggttgtccgaagtcaaattcttaggtcacgtgatatctgctaaaggagttgctgtggaccctgaaacagtgaccgccgtcaccgattggaagcaacccaagacagtcactcaagttcgcagtttcttaggtttggcaggatactaccggaggttcatcgagaacttctccaaaatcgctcgacccatgacacagttgttgaagaaagaagagaaatttgtgtggagcccgcaatgcgagaaggcgtttcaaactctcaaagaaaagctggtttcctcgccagtgttaatcttgccggatactcgtaaggacttcatggtgtattgtgacgcttcgcgccaaggattggggtgcgtgctcatgcaggacggtcatgtggtggcctacgcctcacgtcagctacggcctcatgaaggcaactaccctacccatgatttggagttagccgcggtggttcatgctctaaaaatctggcggcactatctcatctggaatcgctgtgaaatatatactgatcataagagtttgaaatacatcttcacccagtcggatctgaatcttcggcaaaggagatggttagaactcatcaaggattatgatgtggggattcactatcatcctggtaaggccaacgtggttgccgacgctctaagtcggaaaagccactgcaacactcttaacgtccgtggcattccactcgaacttaatcaacagatggaagccctgaacctaagcatagttggtcgcggattcttggctacgttggaagccaagcccaccttgctcgatcaaatccgcgaggctcagaagaatgatccagacctgcatggactcctcaagaatatgaaacagggtaaagccgctggtttcacagaggatgaacacggaaccctctggaatggaaatcgggtatgcgttccagacgtcagggaacttaaacagttgatacttcaggaagctcacgaaagtccttattccatccaccctggcagtacgaagatgtacttagacttgaaggagaaatactggtgggttagtatgaagcgggaaattgcagagttcgtggccctttgtgatgtatgccagcgtgtcaaggcagagcaccaacgaccggccggacttctccaacctctccaagtacctgaatggaaatgggatgaaattgggatggatttcatcaccggacttccaaaaacccaaggtggatatgattctatatgggtagttgtggatcgattaaccaaggtagctcgattcattcctgtgaagaccacctatggagggaacaaactagccgagctctacttcgctaggatcgtaagtctccatggcgttcctaagaaaatcgtatctgataggggaagccaattcacctctcacttttggaagaagctccaagaagagctgggtacccgattaaacttcagcaccgcgtatcacccgcagacagatgggcagaccgagcgtctaaatcagatcctagaagatatgcttcgcgcatgtgtcctggatttcgggaagacctgggataagagtctcccctatgccgagttctcctacaataacagctaccaagccagcatacaaatggcaccttatgaagcgttgtatgggcgcaaatgccggacaccgctaatgtgggatcaagttggggaaagccaagtgttcgggactgatatcctgagagaagctgaagcgaaagtcagaaccattagggataatctaaaggtggcacagtcccggcagaaaagttacgcagataaccgtcgccgtgacctggaattcgcagtggatgattttgtgtaccttcgagtcacgccattgcggggtgtacacaggtttcagacgaaggggaagctcgcacctcggtatgtgggtcctttccgtatcgctgctcgacgcggagaagtcgcttaccagttggagctgcccgcctccttgggcaacgtgcatgatgtgttccatgtgtcgcaactcaagaaatgtcttcgagtgccatccgagtaggccgactcagagcaaattgaagttcgcgaagacttgacctacgtggagaggccagtgaagatcctggacaccatggagcgcaggaccaggaaccgggtaatccgtttttgcaaggtccaatggagcaaccacgccgaagaagaagctacttgggagcgtgaagacgagctgaaggcagcccatcccgacctcttcgccagttctttcgaatctcggggtcgagattccgtttaaggggggtaggtttgtcgcgtcccaaatcgcctctaaaatacatcctcaaaatcatgcgaagaataagtaaaatctttgtgaaagcctccaacaattaaaatgtgcaaatttaaaagtcaaataaggcttggaggatttttgtatatttcctaaaagcctaaaatgcgtaaataaattttagtggaattttcagagcacaaataataattaagaagaaataaacaaagttaaaagggttttataaaaagaaaaatcctaaaagtccttttcccccccttcctcccttgggccggctcggcccaactccctctctctctcctcttccccgcggcccatcggccttccccgcgcgcgcgccgctgacgggcgggcccgcccgccaccctcgctgacgggtggggcccacccgtcatcccctacctcacgccgctccctccgcccgcccgtgccctagcgccgccgccgccgccgaatccgccgcatcccgccgtccccacgcgccataaagagggggaaatcactccccgtgattccctccctctttcccccctcttttccctctctctctccctcggattcgcgcggaatcttctcccgaaatcttcgccggcgcatcaatggagcccgagatcgccgcgccgatttccttcccctccggccgccctctctccctcccaacgctataaaatcactccccgtgcctccctcctccgtttccgccgttcgccgctctctctcctcgtcggattcgagcccgcgccgtcgtcctctctctccgccgtcgccgccgagctccggtttgccaccatcgtcgccccggacctcctcccgcttcggcatcgcctccttcggcttcgccgcctcctcgtcgacctcgtccactcctccgtttcgcccgtcgaccgccggagcaccgccgtcctcgtcgacccgagccgcgccgccgcctctctccgcttcggtcgccgttcccgtcgtcgccgtcgacccggggtgagccgaggaccgccattttgtttcccccttccctcccctctctcgggcgccgctccgtcgcgccggaggtcgccgccggcgaccatcggggcgtgggcgcgccacctcccgtcggccgtgccggcgaggccgccttcgggcgcgccccgcggctgccaggtggggcccggccgtcagccgcccgcgccctcgggtgcggctgacgcgtgggacccacggcgccggccagcgcaagctgcgtgcgcccggtccaccgtggaccgtgaggctgccgcgtgggccccactcccgtggacccggtccgcgcgccctctctcccggctgacgcaataaatccggtttttaattaaaatttaaatgaagaaattcgcaaatatccatttaaagagcatataaacttcaaatggccataacttggccatttgaactcggaattggaccgttcaagtctctaatttttccttaagaagtcaagaacccatttttgtgctttgtttctgcttgttatatggagtttattagagtaaaagcccttttcttttctgttggtcgtgtagacgctgcagcttcggaagatctgctcttcgtggaagttgaagccggcgtttgggaaagcgagcaaggcaagtcacatcatctttgaacatattgaatcccagtttgtaaaattatgttgatttaaattattgcattatcgctttatttaaattgccgcgttatcactgttttatttagccatgcctatttacctttgttatgaccttattattgttattgttattattaccttgttcaccctagaataaacaaaaccccaactaggggacactctacttatggtaccactagtgtgattataggtagatgcttcgcttttaattaggcaacattaggcggttttacaactctagactttgggaatattcatatcacctggacactgtggaattgttggagtattgtggaattggattcacaccgccccctctattcaaaacccccaaaaatggttttaggctgggctcggggtgcatggttttgatagtagcacctcggccatataaggaccggtcttcgggcctctgttgcaaagcactaccgtacttccacatgtctagtgggtaaggcttagtttgtggctcagtctagtcataaacaaaagtacacggattggaggtggatgaagtcgggggtcgatggacattctccagggcaaatgaaggctacacgagctgcggcccggtagtcgagatgtcatggcacagggccggtgtcctgctgctaggggctcagtcctgcctgcctgtcccgggggttccggccgtaggtgggattgggtcggtactcttgtctatggctaggatgggttggaaactatgtcacgtctttcgtctgtataccgtggtggtatgtggcacgtggttacacgtgaggaagatgtgtcttgtgggtaaagatgtacacctctgatcagagtataatctatttgaatagccgcgccctcggttatgggcaagccgagcaatgtacccaagttagtgttttaattcttaaaacctgcttaacaactaaaatgtggaatggttggcctgggttggcttgggacgagctgggacccagggtcgggttgccagttcggtctgaatcatcgtaggccttggattaaggcaggttcgtgtgggttcacggccttgataaataatattgtatagtactagaatcgtgtttacaaaatagccctgagcaactaatgtctttaaatgctgtttactgcaaccctaaccctttacagtataattcctttgtactcccttgcatttgttctgcacttgtgggtgtgtcttgttgagtacggtggttgtactcagtcttgctcaatttttcccaaccccagaagaggagttcctggaagatgaaggcttcggtgtctagctcgtgcctgccgtcaagtgtctgtggtcgtcgccctagtcttccgctgtttctcgtttgtctttgtgtgtgctggaccttcgctgcccatgtaataaattaactatttacgcttccgcttgttaaactctgatttgtatcaacttttggtgtaccttgcctcctgggacaaggattaatgcacgcacgtaaggaacgcccgttgggttatttccggtcgtgacataaactccatataacaagtaggaacaaagcacaaaaatgggttcttgacttcttaaggaaaaattagagacttgaacggtccaattccgagttcaaatggccaagttatggccatttgaagtttatatgctctttaaatgaatatttgcgaatttcttcatttaaattttaattttaaaagggtttattgcgtcaaccgaggggagggggcgcgcggaccgggtccacgggagtggggcccatgcggcagcctcacggtccacggtggaccgggtgcactcgggctcgcaccggccggcgccgtgggtcccacgcgtcagccgcacccaagggcgcgggcggctgacggccgggccccacgcggcagccgctcagtgcgcccgaaggcgggccacgtcggcgcggccggcgggaggcggcgcgcccgcgctcctatggtcaccggcggcggccatgggcacatcggagcggcggccgagagaggggtgggaaagggggaaacgaggcggcggtccacggctcaccataggtcgacggtgacgacgaaaaggcagccggagcggaggaaggcggcggcgcggctcgggtcgacggggacggcggcgctccggcggtcgacgagcgaaacggaggggtggacgaggtcggcgaggatgcggcgaagccgaagcaggcggcgccgacgttggaagttgttttgggcagctacgccgcggtcgggagcctggccgacaccgccgaaaaaaagcattggccaagttcgatccgggcaagaagaaaggccgttaaaagtcgcaaccgaccgaagcagttccgggaagggtttaaatagggttgaaagggaagaaaacggctgccggggaaggaataggacgcggaaggtccgccccccatcaatggcgccggcgccatttgtgggggcaaatccgtttgtttgaacgcgagagagagagggaaaaatggggggaaagggagaggggatcacggggagtgatttccccctctttattgcgcgcggggacggcgggaggcggcgggattcgcggcggcggcggcgctagggcgcgggcgaggcggcgggagcgacgggagtaaggggatgacgggtgggccccacccgtcagcgagggtggcgggcgggcccgcccgtcagcggcgcgcgcgcggggtgaggccggatgggccgcggggagaggagagggagggggagggagatgggccgagccggcccaagagggagagggagggaaaggggactttttagagtttttctttttataaaatcattttaactttgtttatttcttaataattattatttgtgctctgaaaattccactaaaatttatttacgcattttaggattttaggaaatatacaaaaatcctccaagccttatttgacttttaactttgcacattttaattgttggaggctttcacacggattttaattattctaggcataatttagaggatgtattttagagtcgttttgggacgtgacaccgatacatgctagatctatctgatcggctatgctataagcgtttataatctttatgttaatatatactttgatctaagtgatttatactgtctcggcatggcgaccgatctatcccaatcacttggtttaaatgtacatcgacagaaagattatttagtgttaatatctacagccgatcgagtagatttagtcttatcttgcttatttataactgccgatcgattcacatatgacatcggctcgaaaataaatgatatatcatcggcgactggccaattggctatcgtttatggatttaaccgcggtttcttttgtttttctttcttgtttgcaggatcaaatcaactggcacgctcacgaacctaaaagcaagattttggacctgcactgaagttaagcagattttccaggccagtgtgtgtttttcgcatcaacatgcttttggcacgcctggtgggaccgacaagtgacaacgatgtcaacagaaaagtaatctccatcgtcggcaagcaagccgtcaattcctcttcaaaccaagcttccaaaacctccaggaactaatctaccatcaactagggttgagtccgaggtcaatgaggcaaacattgtcccaggcagtgcagacaagttatcaccagaacaaaagaaagagtttgaattaatgatgaagaatgctcaggagcaattcatgaaatcgttcgtggcaactcgacagggaaaagttgttcaaaaatacaaggtgaaagtggttgttgccgttgaagttggaacaagctcatctcaaggtagtaagagtgctgcagatggctcgggcgacaaaggtgacgggcttcaggacagtgtggtcgaagatctttacgaagatggtgctgaagtgcaagaagaacctgctaggtgcaccaatttccaagaccaagttgattatgctgtacaacatgctttgatcaaccattctggagtgcttgtcaatccattaccaaatatgatcaaatctgtgattgatggcacgatagctgagcatcaaaccacggggccagtctacttgccaggtagtgtctttccaaactataggaacttggtgacaggtaaccagcaaagtacttccaatgtaccaccagtgcagccgacggctgcagcttcgactcatgc

SEQ ID NO: 8100 - DNA, 4349 bp, Oryza sativa
aatcattgtttgataaaagatttctatagttttgtcatcattagtcttataaaaattactttcataaatgtggacaatgctacattatgaaacggatggagtacaagcataattaaactcatgagactaaactgcagctaacaacacctaattaaatgactgatctatacccatcaatgttcgttccattgctctctaaaaataattaggccttcgatctcgactctcgactgctatctccttttcgctggaccagcgaagagcgctagcccaagtaagatcgaggaaagggtggtggtctgaaaaaatgagcacaacgccacagaccaacaggctgcactatgtttaatttctccgtatataaattaattccttaggtatcattaagtacatgaacagtacttgcaactcactcagccaagtgcttaccgagagttactatggtaatctgcctctcgcattttggatagttttgatggatatcattgttggtggtatggcatgaggcccttcgaccaaaatctgctgaaagctatacgaagagtggggattcaagcccgagacgtcaaagttagtcggggcgaagtccccccatgacgaagactatggaacaaggacggcgagaggcgagggatcgcacgggtactctgccaagccagaggcctcttgggcgaaggatgcagggcgaagagtatatgccgaagggagacgacttcgccaaagcaagctcgcccccgcgagggccgaagaagcctttcaggcccatcaagtctaggggctattgagctgacgatcgcccgacggcccatcaggggcctgtgaacctcaattaccctatgtacccatgtaaatgtccctttcataagggtaaccatgtaaattcccctgtataaccaaaactctagtagtaagaacctgtaataggagctataaatagtctcatagggccatgtaatggggggatcccgaagaaaaattctctaattaatacactttacttctgtcgcgactgagaaaaatgcattttcccgaacgctagtgtattaatccccgtcccaggaaaagtcggggtacaccacacaaacatgatacaaaagacacatctttattatatcgataatatttacattattacaaaggcacttaaggcctgacaatcaaaaataaacagcagcggactagcgggactatggctccatcttcacaggcgctcaactggggtataagccaggactccacctaagacttcttctccaaagcttctcttactgaagggggggaaagattgagcaagaatgagtacaaccacagtactcagcaagccacaccggcagatgcatgattaatgcaagggggtgcaaggggtaataatataggggttaagttttgcagtaaacagcatttaaaagtcacttagttgcccaaagccattttataaagatgatcctagagctacaaagtgttattaatcaaggccgtaaaccctcacgaacctgccttaattcaaggcctacgatgattcagaccgaactggcaacccgaccctgggtcccagctcatcccaagccaacccaggccaaccattccacattttagtagttaagcaggttttaagaattaaaacactaacttgggtacattgctaggcttgcccataaccgagggcgcggctattcgaatagattatactctgatcagaggtgtacatctttacccacaagacacatcatcctcacgtgtaaccacgtgccacataccaccacggcatacggacggaagacgtcacatagttcccaacccatcctagccataaacaaaagtaccgacccagccccatctacagccggaacctccgggacaggcaggcaggattgagctcctagcagcaggacaccagccctgtgccatgacatctcgactaccgggccgcagctcgtgtagcctttatttgtcctagagatgtccatcgacccccgacttcgtccatctccatccgtgtacctttgtttataaccagactgagccacaaactaagccttacccactagacatgtggaagtacggtagtgctttccaacagaggcccgagcttaatccttatagtacccgaggtacgactaacaaaacccaaccacggacctcgagcccagcctaaaaccattttgggggttttgaatagagggggaggtgtgtgtccaattccaacataagccaaccattccatagtgtccaaatgatatgagaattcccaaagtctaaagttataaaaccacctaatgttgcctaattaattagcgaagcatctacctaaattcatactagtggaaccatgaatagggtacccactagttggggttttgtttatcctagggtgaacaaggtaataataacaataacaacaatgataaggtcataacaaagataaataggcatggctaaataaaacagtgataacgcgggaatttgaataaagcgataatgcaataatttaaatcaaaataattttataaactaggattcaatatgctcaaggatgatgtgacttgccttgctcagagataacggccttccgaaccttcggcgatgaccgcgaaccacgcttcgggaacctcaggaacgacagaagctacgcgaagcacacaagcaaagctacaagcctataaagaagcaataacaatagataaaaagaaagcacagggttctttaggttataacaaacattaggagacttgaacggatcgattcggagctcgtatgaccaatgcatggtcatccgaagtttaatgttgttatatggagatttgtggattattataattaggttttacaactataaaacatgtgtaagcgctagcctggaaaagacaggaaggctgcgccgttgacatgcggaccccacatgtcaacctaagggaccacggcagaccgggtacacagagatggtccacgggtcgacggaagcggaccccatgtgtcaaccgaggcgagtggccgacaaacggactccactagacaccacgcgggctgcacacgtggaaaccacgcggtaccgagcgggcacactaacacggtcaccacacgcacaagcgaacgactaccgacaccagtacacgggtaccggggtcgacaaccgcacaacgggcacgggcgacaccaaaaggacgaggacgagggcgacgagggagagagatccttaccaccacgtgacgaggcgagggaacgacaacgacgaacgggcgcggcggagacggccgggaacgatggagacgaaaggcgaggggacgactccggtggcgatccttggacaaaggcgagacgtggccggcgcaacgcttggcaacgcagaggcgaggacgaagacaatgacggggctgcggcacttgacgtagcgaggacgacgaacgagaacggcttgacggagggacgaacgccacgacgaccgggaacgacgggaggacgacgatgacgacgaccggggccggcgaggaggcgacgtgggcagccggcagtggctacacggcgacgaggatggcgtggaacacgccgctgtgaatccgaagacggaggcggcgccgcgagacgatgagccggcgaggacgaacgaccgaccggaggagtcgtcgacgaggacgaacggagacgacaatgacggacagcggaggggttcggatggagggaaggcgatgccgaggacgacgtcgctggctcgccgctgcgatgccggaggtggtggtggcacggccaacggcgcacgggcacggcggaaggggttgccgaaggaactccagcgagaccgagggagaggcgccgcgggcgacggttttccggcaaaaccgatggcaggccggggtggagggcgatgcgccgactccgagggaggatggcgatgacgacagccgctgcaccggcgaggcggcacaggcggctggaggcggtggagtggtggcgacaccactggtcgtcggcgaggacgtcgctccgataatttccccgcgaaacggaggcgacgccagggaagaagaggcagctgcgaggccgctgggggcgacggcacggccggcccacacctgagcggcacggcaggggcggctggattggccggcggcgtgggagagagaggagggctgcggggagaggtggtgaggccacgggagagcgcgggagggggttaaaacgatagacggagcgagcgtgttccattttatagggtaggagagggagccgggcacggaagacgtgggaacggcggcggaaaagccggccggcagccatggaaggtggccggggttggcgcgggcgttcccgacgattgggggcacgaatcaagggggatattagggggaattgat

SEQ ID NO: 8101 - DNA, 1123 bp, Oryza sativa
tttggccacctttccggccagagccaactcggcctgctgtttgttgccccagaggaggacaacatggagacgatcgtcgcgcaggatgcgcttgtaatcacgtggaactcgtcgccagacaccgcagatcttgcccgtggcattctgatagacactgagagtgcccgccaaggtggtctccagttgatgctcctccaggattacacccgcatcatcaacgaattgaatggcacgcggacgaccgattcgcgatgaggtgtagaaggagtagtatagattcttcttgtggaacaggaaacgggcggtggccaccacattctgcggattgtaggtggtgtacatggacttcatttcctcacccttgaggaaataggaggtgcggcccgttagcaacgcagcgtaatctataaatagggatcaaatgaaaggtggagataatccaggtgttagataaatacaatagttctcttgttaattaaatgtaggagctggtgaatgggattacaatttcccgcaggatttggcggattctattgggatctgggtgggtgtccggtacttttgtacttacgtttcatgttgcgctcttcctcttcattgggcacgggcacatccaaggctacatccgtatctgaaagatggagggaatacaaatagagaataagatgatgctgggcgataaggtacgaccttaaatggaatttagatagcaacaaatgcttcaaagcaaccgaaccgccgccagccattcaccatccatccagccagccatccagccagccatccagccagccaaccaactatccatccacaatttgtggacacaattccggcattcaaccaaaattccagttgaatgggtgaatggtgaatggctgaatggacgaatgccaggggatcatcatgaatggcaatgcaactatcaggtagagatcccacctccgaactaagaccttccatttccacctctcgcttccacccaggtggcattcattaatcgtgcataaattgagggcaggtagaaggtagagtttctcgaacgggaagtctaacctacatctaactagggaagtgctttgtatttgaggatgtgcggactctggggttctgaattcatgggtac

SEQ ID NO: 8102 - DNA, 30983 bp, Oryza sativa
cccagatgaaaaagtacggccgcaagctctttatgggcggccaaaattgcaattagccccttgccaccctctgtatgggcggcaagggcctaatcgcaattttagccgacggcggcagacggcgcggtcgacccaccgtctgccacgtcagcttgccgcccaccattagggcggcaggggctatttctgcaatttttttggtcgatagattatttctgtaaatattaaaaaaaatctaaaaacgaaaaaaattcaggggaaaaggagggtggctggcccgggaggaaggagggggagttgggccgagcccaagagggaggagagggatttttatttggttttctttttatttaattgattagttgaattttgtgactttaagattacttcttgagctccgaacattcgcggaaaaatccggagagtattttagggcacaaagaatattacaaaatattctcggccaatgatttttaagggaaaattttaattcccccattaatttcacttgattgaattgatttaacttttatttaatttctagaaaatggattattaaatgatttttaatcccgaacgaaaatcggggcgttacacacatcgtattctaagggtatcagtaggcatattttgggtctaggcctaatatgtctgcagcccatattttcaggcgtggcctgtcacgttcttttagggacttagaaattttttggttaggcaaaagtgcgcgtgatcaagtgcccaatactttaaaaatccttttataccgctcttactcaactttttagtagttggtacaatgcattttaaaaggtaccaaacagtaaagctttatatagctgccttgctgacttttttatctaagtcagggcattgtttgggtttataaagcaattgattggatacaatatcgttgctttttgccacgtaagtgtgcattcttattgaccaatattatggcttaggttgactatatattttggtcgtttttcgggcgattagtaaatcctttatgagtttatttactcggattttacaccacatatgccatatatttctaggtatggtgaaaccatgtgtcttttagggacttaagcacatatgttaaagcagtgtgcgcatggtgtgtgcccaatactttagaaatttctttgttcacagcatactagcttttttatagttgttttgcaatgtgaattttcaatgatgtagtcaactttaggttgcacgcatcatattttataaagcagttggtatatcactcggatcatgttattcggggattcacaccgcatatgctatatattaatattaagtcacttggtttactacaattatcaaaaccactcggttggttggattatttactccttgactatatgttttgtttgttcaactaaccacatagtcgagggctatacctattaggtgcatctagtcgatgcacctacgtttataattaattaatttttagccctccacagtctttagatttggtaaaagtactcgggagaccatggcaaagatgattgatgcactcggctttggagtaatctggttcgagagaagattatcttttcgactgtgaaggtctcacgggctactgtggagattatgggtaccccatacccacacggcatggttatccgactggttataggggataacttatatctatgaaatatgtaaccgatcatgactttggtattacatttccttgtatattatagaacggcctaaagttctggtttgataatattgtaaagtatatttaggaaactgataccatattgattaaggtttctatcttgtaatcctgacccccccccccccaaatcctatataagatgggcaggaggccctctagggggcataattcacaaccagatcgtcagatctataatacacccggcggattcaaatccccaaaaaggagtagggtattacctctcatcgagagggcctgaacctgtctaaatccttgtctctgcatccatccacttttaggtctcatgcgctaccccttttattattgccgaattcttgtttcgacaccacctccccgggctgccaacatctaggtgaccgtgtcgtcaactgcatgcataagctgttgcggggatgccggggagatctatggtgacctgcaggcaggcggaggaggcaacgattcgacggcaggtagggcagggcgcgatggcgacggtcatcggcggcaagcgatgcagggtggagtgcgcggcggagtagtcccggggggcaagggttggtgaccacagcccgctggtggctgggcgactggcattggcgttaggcggagtgggtggcatagcggagaaaagggaggggggagttgtgtcgctatgggaggcgtcgctcgatgaaattgcggagagaagcgtatgtctgcctaattcgatttgatgatcgaatgatctacgtttcgtgtgtctgcctgcatcaggattcaagaccaccactatgtttttcttaagtagtacagattttatacccagaaataagagggtgggactaaactaagtctcgttcttttttccaacaaaagttgcatgaagattaagattttcgtggcacgctttttaaacaactaaacggtgcatttcgagcgaaaactttatatatgaaagttgctctaaaatatcatattaatatatttttcaagtttgaaataattaaaactcaatcaattatacgttaataccaccttaatcttacaccttaatcttataccatcttcatcttacaccatgtgtggaagaaatctttacaattttgtatgtcggtgtcacattttgttagtaaatgaagatttccaaccccttaggccttgttcggttggcccggaaatggcagggattgggccgcgatccctgtggatcactaagttcatctgaggtcccttaatttgtcaacgaatccgattttcgtccttcaacccgaaaaccagatacaacggtccctcaactatcaaaaccgtgcagatgaggtccctcggcggtttggatggtggttttggctgacgttgcgcttacgtggctaatttgactcggtcaccgtctgacatggcgcttacatggcaattcgaatcggaaaattaataaaccacgtggacccacatgttagtgtcacacccaaattaataaaaaattggtggggcccacgtgagccccgcatgtcattcccactcctcttcttcctcctctctccccatctcccctctcctctctccaggcacgacggagagtcagcggccggggggaatcagcaccaccaccaccacgcgatggcgagaagacagcggcgctggtattcccgtgcggctacgtcggcggcgatcccgacgagtagccagaccccggtcgacccgccgctgtcgtctgcagattgcacaagaccaaacaagaagcaaattggatcatcagcacggttttgatcagtggagacgaaggttagtacgtaccattgtggtagcggcctagcgggaggtcgttggcggccatggggatggacatgaacagctgtgtctcacgtccgagccccatccaggagcccttgctgctccttctcatgcggccactcgtcgaagaagtggccgagaggtttgaggtttctgcgtcgccgccgcatggtcgtggcccgccgaattctccagccggaggtcggcgcccaggaggaagcagtgctgctgctgccgcctctctttctcatcgtcattttctttggaaagatcaatggcgtacggcgacacagcggtgttgccataaccggcgcccgggaagagcggcgtggtgctctgcttgggctccatgccgagctgcttgaactgccactggccgtgtccggcggcggcgtggtggtgctccctctcggtgccgtcggagaagaaggcgtgctcaccgtgtgcacctccttggtggcgtgcccgtacgcgtactccttgtggtccatggagtagtaggacggcggcagccggcgggtgagggtgggtggtgtcgaggtggaggtggaacgggctcacctgcgcgtggtatgccgcggcggcggcgggggtgtgcgcggtggccacggcgtagggcccgccgtagagcgcctggtacggcgctgcgtcgtgtgccgccgggcggttgtaggacggcgccggggaggaggtggtggtggtggggacgacgaggacgacagcggcgggtcgtactgcacaccggggtccggctactcgtcgggatcgcggccgacgccgccacacaggaaaaccagcgccgccgctggctctccatcgtgcttggagagaggagaggggagatggggagagagcaggaggaagaagaagaggagtagaaatgacgtgggccccacctttttaaaattaatttggatgtgacactgacatatgggtctcatgtggattattattttcccacttcgtattgccatgtaagcgccacatcaatgctacgtcagatgaagacatagttaaattagccacgtaagcgacacgtcacgtcagttaaaaccgctatccaaaccgccgaggacctcatttgcattggttttgatagttgaggaacctattgtatctggtttttcggttgaaggaccaaattcggatttgttgacaagttaagggacctcagatgaacttattctccccggtgggtattaaatcccggcctacaagaaagtgtgcgttcggttaagcccagtttggattctgtcccggcccatcccggcctttccccctcaccccggtccgggaaaaaatcatcgacccaagaggcgtggaagaaaccctcgcgcacaggaggaaactatcaacgcataggggaaagcagcggcggtggcgcgggtgcggattgagagtcgacggcgcgacggcgacgcggcactctccccggaggcggcgctctcccctccgccgaccgtcccctccgctggccactttctcaccggtgagtctctcttccttcccctctcttctccctatccttcctagggtttggttcttggtccaaggttcttggttaaagatggtgtgcaattttgatgtagctagcggatctagaggactgatggttctcgttggaataagcctttcttaggttattaatcagtgtcttgattaaacctgattttctgcatattggatggactgagcagcatcacaatttaggttgctccttgctctgcactgcttgattttgtggaataaaatgaaattaatgtcaatttgaacatatcatatgctgacaaaatgcaaaaattaatgcaaatcaactatggtggctcacctttgctttcaaaactttctgactttcactgaaatactgattaggatgattgattccagtatcactgagacaccatgtgctgcctcgaaagtcatcgtgcaagctagctatgtatttcatatcttagatgattcaagcaaaccaagtttggaagaatgtttattaaaggtagaattgtgaggtgcagtacctggttactgctgtttgtcgagttttaagcagtcaccagttaacgtggcctcttttatctttatccaacaaattagattagtatgatggttagagtacataccatagatgcacaacatggtaagttcctgacagattcaacgtcttttgctccttattgtatatctcatctggttatacatttatgaatatgattagtataggacaaaacagaagtcaagatttgatttttgcacaagcattttgatctacataattgtacctatccatgtccaatatgaacataattgaaaattctcggtttgatctcaattgaaaattatttcaatttttattggtactagcacatatagggccttgcactttagaaatattttaattttactaatgtaaattgtgtctgctttgtagattgcatgtccaccaattagagttggagaagaccagcctcctccttcttgggaccctatacccttggcctggtagtactggattgattttaagaccaattttcagtactgggttgatttctgaactttatgtatagtcatttcctaaagctccattttctagatgataaagcttgtcttcctgattctttttggaattgatccaatgctgttcgattttttttcagagatgggaacactggagctgggtgactgaagcgcatggtggcattagtgctaagcttaaacacttgcattcaatttgtagtttagctcttagctggctacttctatttattctaagaaaaacaactgaattgtacccattttgattaatctgtgaccttttcatgtccttcaaatttcatcatcttctgcatttgttgatctaatacggcccagccacctgttttttttttcattcatagtctgcatgatcatcgcgcttcaccctgagtgggatcgatcctgatctgccaggtaggcctctgttctcgtcgtcatcatggtgctttgcccgtgagcatcgcttgtcgttctttgttgagtcatcgtcaagctgttaacaccaaaatttgatacggttgtttagaggattcagttaaggaaagaagtcaatcaaccgatcaggacttatatcttttcttttatctttaggaaacttgtatcttgtccgattaggactaatatcaacctaagggtataaatatgtacacccgtagactttgtaatctatttccacatatcaatacattactttcggtacattgccaacttttattccggcgagttcttagttttgagcaggtttgcatttgttaagttcgatctcccacgaggaagtaagtttcgtcaacttcccgcgaggaaataatctcctcttcctatactatttaactttggctacaactttctcgtttaagtccaatattttattcaggttgacgcaagcattgtctatctgatatattgattatatctttaactgcattgctatttagagtggtatcggcttagttaggactttctcacttaggtccgatattttgactaagttgatgtttttctaatcgtattgccgttttagatagatcgatgtatcaatcatgtttgtatatatatctattggctaaatatttttttcttgttatcgtcaatcttaaaatatcttagttaggctcgatctgttagattgctactaataagtctatttctactaagccgataggttttcatgcaacgtttcatcggactgttagccgatgagttgtctttattgtgggttagctatcagatataatgattacttagttgatatacactttaatttatttactgttggcggatggcatgaggcccttcgaccaaatctgccgaaacccgtggcaaagactatggagcaagaacggcgcgagacgaggggtcgtgcgagtaccttgtcgagccagaggcgtcccaggcgaagggtgcaaggcgaagagtatctgccgaaggaagacgatttcgccatggcaagttcgcccccgcgagggccgaagaagcctttccggcccatcaagcctaggggctatagggccggcggtcgcccgacggcccatcaggggcccatgaacctccataacattatgtaccccctgtaaatgtccctttcgtaagggtaaccatgtaaattcccctgtataacctaaaccctagtagtaagaacctataatggggctataaatagtcccctagggccatgtaataaggggatcccgaagtaaaaaattctaaaattaatacacttcgtttctttccaaccactgttgagtaaccacgtctttcgacgtatgcggttgtcgtttcgacaacatttacattggatcttcagccaatggatgttttaaccatcctatttacatcacattatattattagttttgaccgattggttcaaattatattatctcatggcatcttctgagttacatcggcttatactcaaacttgtataatcatagttaaatctatatttatcaacttaaatcttatattttttcggtttgatcttatctatcaatattgcttttgacaaagaatgtgtttacactcaaatttggcacctagaggcgaaataggaaaaattgccaagatttgggaatctaccggtttcctccagaagggccgatctaaccgccatgtatggaccactcagactgtggccagagggccggtctgaccagcagagtccaagtcagactccgtttttgtcgggtctcgagattccttgctcagggggctatgttttgggttctttttttgttttctacccctagttagacatggaggagggcctgtagagggcaagaccaacccctatttaatggataaggtcggttcaaacaatgtatcacacaacgatcaatcaatcgaatcgctttttcaatatcgctttctgcttttcacttagctctactttaattcgtccatctttattgatttacgccgtaaatcattcgccttcattgcgagagtgcgaaatcctttgtaggtttgtcccgtaaaccttctgtttgcccacgagacatgtagttattcaccgttttatctaaatcggctccgctatccggtttaatctatcaaaacccaacttgatctagattttgctggtttggggtggttggcgactctacaaatcaccgcaagacgtttaggtgttgcgatcatgcttatctacttgaccaaaaaagttgccaacagaaagcagacgggaagaagaaggacaagcgcgcgagaagatagaagaggcgagccgagaaaacaaggagaatttctttaatttgtacggggaaatctctactattataaaaattgaagatattttcgcggtccgtcatccgtttttgagtcggttataaaaattgaagatgtttctgctgttcgtcattcgtatttgagtcggttttaaatttatgttttggttttaacctatatctctgtctctgctatttaaaaaataaagatgtttttgtcgatatttttatatgtcatctgtgtatgagtcggtttttaagtttacttgctttttttgaaaataaatatccgtatttaagtcggtttttaagatcattcacatgcattttttttatagtaatagtattataagtataaacacagtagttaagacggagccaaacacagcagagccgtcccgatctaatcgaccgagcccaaaactaaccctaaattccccagctccccaccacgccgccgccgccgcctccatgggccgcaaagatacttcctcgtcgtcctccgccgccggcggcaagaaggacaagccgatgtcggtctccgccattctggcctccatggacgcgccggcgtccaaggccaagccatccaaggcggcgtccaagcccaagccctccaaggcgcccgcgtcgtcttacatgggcgacatcgacctgcccccctccgatgaggaggaggacgacgccgacctcgttgccatggccacgaagcccaaggcggcccgcgccaccgtcgacctcaacgccatcgcgccctcgcagaaggacgcgaagaagaaggacaagcgcgaggcgatggcggccgcgcaagccgaggcggccaagcaggaggcgctccgcgacgaccgcgacgcattctctgtcgttattggcgcgcgcgtcgctggatccgccggggcctccgagggtgactccgccgccgccgatgacaacatcaaggatattgtgctcgagaacttctctgtttctgcccgcgggaaggagctactcaagaacgcctcgctccggatctcgcacggccggcgctatggcctcgtcgggcccaacggcatgggcaagtccacccttctgaagctgctgtcatggcggcaggtcccggtgccccggagcattgatgtcctgcttgtggagcaggaaattattggagacaatcgttcagcgctcgaggctgttgttgctgctgatgaagagctcgcagcgcttcgtgccgagcaggcaaagctcgaggcctctaacgatgctgatgacaatgagcggcttgctgaggtttatgagaagctcaacctccgggattctgatgctgcccgggctcgtgcatccaagatccttgctgggctggggtttgatcaggctatgcaggccaggtccactaaatcgttcagtggtggctggaggatgcgcatctcgcttgctcgtgcgctgttcatgcagccaacattgttgctgcttgatgaaccgactaatcatcttgacctccgagctgttctttggttggagcaatacttgtgctcacagtggaagaaaacactgattgttgtgtcccatgatcgcgacttcctgaacacagtttgcaatgagatcattcatttgcatgataagaatctgcatgtttatcgtggaaattttgacgactttgagagtgggtatgaacagaagaggaaggagatgaataggaagtttgaggtgtttgaaaagcagatgaaggcagcaaagaagactgggagcaaggcagcgcaagacaaggtcaaaggtcaggcactatcaaaggctaataaggaggctgccaagagcaaggggaagggaaagaatgtagcaaatgatgacgacgacatgaagccagctgatcttccacagaaatggcttgactacaaggttgagttccacttcccagagccaactttgctcacaccaccgctccttcagctcattgaggtgggcttcagctaccctaataggccagatttcaagctgtctggtgttgatgttggcattgacatgggaacacgtgttgcaattgttggtcccaatggggcaggaaaatctacacttcttaatttacttgctggtgatcttaccccaaccaaaggagaggtaaggaggagtcagaagctgaggattgggcgatactcacagcattttgttgacttactgacaatggaggaaaatgcagttcagtatttgctcaggctccatcctgatcaggagggaatgagcaaagcagaggctgtacgtgcgaagctcggaaaatttggtttaccagggcacaaccatctcactccaatagttaaattatctggtggacagaaggcccgtgttgtgttcacttcaatatcaatgtcacatccccacattctcctgctggatgagccaacaaatcacctagacatgcaaagtatcgatgcattggcagatgcactggatgaattcactggtggtgtggtcttggttagccatgactcgagattgatctctagagtgtgtgacgatgagcagaggagtgagatatgggttgtagaagatggcactgtgaacaaatttgatggaacatttgaggactacaaggatgaacttttggaagaaatcaaaaaggaagttgaagagtaatgtgtttttatagttgcaggatactgcttattctttatagactgggctggtaaacttaatgtactagtacttattttctttggtttgcagagtatttgtatggttgagtccgaaacacctattcgagctgttcttgctttttgcatgatctaagaggttccaggatgagtctgataaatatgttttctatgattttgctgccaattactctgtactaagacttccatgatatacatccataataattcagtatgatttcatgttattggctcatataattaatattatattatgctcagcggtactttatgttggtcagattaatccaaattattatcaaattcttggtcaattagttcaatatatggttgaatgcctatatgcttatggatggaatgctcactgaacaatcatatggaactgcagcactgaattgaaagcacactaaatgtgcgtactgaaaccatggtaattgaaggacaatgttacactgctgattattgaaactctacatcctgcagcttgatcctgaaggactttatctggttattatcaccgtatgccttactgaaaacatgctatatctaactactgaaatgttcagctattgattgtgtcacaagttgtactgctaattaactaagctacatgctatgaatggcgatttaatgccataccgatacggattgctctggatggtttgttacaagacctatgatttctgcttaatggttcaactagaagatctgcacgcctgttggcgtgccacctaatttagcatgtaatatggctcatctgtaatatatatagaaaatttgcctacctctcattttatattatttgtaactctagcaaaatttcacatcaaacaaggagatgtggcaaattacactgatatgcttattaactacattataatcgttttcaaaagcaatattaactttgattgacagttatacatggcatttaaaaggtgaagatagaagaccacgatctaaaaataataatttgaaatgtgagaatgaccagtaatattaaacatgcagagtaatatattattacatgagtaagtttaactctgaaaaaaattctttcaaatggacatgttaatggaatttaattttatgtttgtcttagaattatgagaaaaaccaaagtaagattgtaattaatgatgatcaataatttggcaaatagctagactctattagaaaatttaaagttatgtttcctcaaaattgttgtgatttcattaaccaaaaagtcgtacatatagtatcaatgataaagtgcatatttgaagaaatggttcttagtttatatttgaacaaattctcatccaatctctttcactttatatttgatatttagtttttcccgattattatttattttatataaatacaggatatcaatattttatgttttgaagattttttttacaaaattatttatacttttctctaccttcctttttcctacttttgtttggtcctgtttgtgttattactaattaattagcccgagaaggtaaagtgcaacgtgcaaatgctgtagcaacaacgctagatgaccaggcctagtgcagtcatgcatgactgggctgtacagcccatgacaggcgggatggtaattttgccaatgggttcgggtatccacggatacccgatccaatgggcacgggtgtgggtgtgattttttacctgtgggcacgcctacccgagacccgcagacatcgtgagcaacagccgagtttcattttttatctgtgggtaacccatgcccgacccaattcatatgtattagctaatttcgacttatctcttaattcttatacccctttctcttgattcatttgtgatactaactactaataataagttgtgacgtaattcaaattattgttgatagctgataatttgataaattgttgattttatttctctttgttaaattatatatttttcgagttattattcatgtgagatccattgggtacccgctgggcatacccgtgcccgcatgggtacgggtacagagttttgcctgctaaccctagtgggtagggtttgggcgggcgacgacgggcatggggtcgggcatggttttgctctacccgtgcccaacccgacccgttgccatccattgacagccagtgaatgaaccaatggcttttcttttctttttctttttctttttcacggtccagtgtccggactaatcgagagggctggacgaatgaaacatgccacgtggaccaatgaaacgctagaagaatggctagctttagattaatagaagagatgagacaattgcacaatcgacgctctagctgaatctcacgggacacgtggctggttttcaaaggagcaaaccctaaaatcttagggagccacgtggcccaatcatatgcttgattttttaccttgaattcggtatattagataagatttgattcttttaatgggacatgctgctatgtggtctttcaggcttaaatctgaactactgatgccacttgaactgctgctaatttcctgaggttaatttatcaaggtcacaaactaattctaactaggtcataaactaatgataactattcctgtataaggttcatcctgtagggtcttcattagaatcttacatcatatatactagcttatgttgtcacacatttgcgcgactcttgttacgtgatacgtgagtgtcaatcaatctgttgtttttcttgttgctagtaaaatataatcaatctgttgtttttcttgttgctagtaaaatattgggtcaggatgagtcatagtattatgttggtaaagtagatggcttaatatttattgtaaattttaataggtatgagacatatgtatcaccctttattcttcacttattttctattagtgcgtacccttttgtgactcattgtcatatattttgtaggtttttaaggattagtttaatttctatttttaaatttgtgtgaaaaatcattaagcctatattcaggtgaccatgactcattattggaaggaatatgcatgtctcagtagcaattttttttctcaaatacattaacaacaaattgctagaaacaaaaataatcacatgaacatacattttgaatatgccctgaatagctcaatcttgactaatgaatatttagttaagggaatgagggtgccttttttcttccttcatttctttctttccacttctagtagcttcatctcctgaagtctcttgaatgtgttcttttgccatcatttaatccaatggtctaagattcattcactcttttttgtcttgtagtaagttcaatggctaatatttaccaaataatgtggctcattctcagtccactttggatgtcacttttcactagttaagatataaatagctgtgatgggctatgagataatgagatgtgagacggcgaatggaatatggagggtttgcatagggattggggataagatctgggcccttggattgtgaacctatgattcaagatttggaagattagagatccaatttattgtgaaatttatatcctctatgttcccaaatataagcaaattttaggattcaaattttatacacaaattgtttttataggactatgattccaatacatgaaaataaacattttcaaccaaatattccgtttgtccaaaaaaaaagaagtatgattggatgtgacgtaatctagtcctcgagccccgacatgatggtcagggtgggagacggggattgatagagaaaataacgtggagctgagacgggtggtggaggggggaggtgtgaagttgtttaaataaaaatgaaggggtcgagtgggctgaagttgtttgtagcgcatctgtcatctgtctcgctcacaatacgggatgtgggtgttgggtggtgccgttcgcttgtcaccaaatcatgccatcatgatcagtgagaaggtagctttaaaatagggagtttataggtagttttgtctgaaatgatattatagtgataaacacaccatttgagaataatattttgataaaaacctaatatatcaaaggctaagggtgaatgcgtttggtagaggggagattttaggagggatctcctcttgacctggataatggtgagttggaaaggatttcatcctctaccctatctaaataaatcttagcactatatttttatttaaaaatacatagtctaaactcaatattatttctaccttctaccaaaaatacaagattaagattgaaaaataaattttcgtaacaatcatacgatcaatttcctcataaaaaactcccaatcctcgtctcaatttaccaaacaagcccatgcatcaaagcctccaaggcaggcgccaaccccagcccgggaacatcttctccggttctccctcaccgctcactggctctcgtctctcgccgccgccgccgccgccgccgccgccgtcttgccctcaagcatccgggttcgccgatcgccccacttctcccttcctccctccgccagcgccacctccgcgctactgcctcctccctcctttctcgcgcccgcgcctcctgaaactgggatcccccaatggcaatggattcaagtattcaactctctctctctctctctctctctctctctctctctctctctctctctctcggtgaacattggggccgccatttgccaaagatataagcccgagaggttcagcttctcgtagaagctaaggctgtgatgcgactgggcggatggatgctccggccactgaaccgcggcctcctcctccccaccttgtcctgcccagttgccccacaccgccgtgggttcgcagcctatgcagcagcgctacagtggctggaggacgagctcacctcgctcgcgatcctcccctccgtccccggggtggactccttcgcgtgcgccaggcagttgcagggctgcatcgctcgtggcgacgcccgcggcggccgcgccgtgcacggccatgtagtgcgccgcggaggggtggggcgcctggacctcttctgcgccaacgtcctgctcaatatgtacgggaagctcgggccccttgccagcgcgcgcaggctgttcgaccgaatgcctgagcggaacatggtgtccttcgtcacgctcgtccaggcccacgctcagcgcggtgattttgaggctgccgcggctctgttcaggaggctgcggtgggaggggcacgaggtgaaccagttcgtgctcaccaccatgttgaagctagctattgccatggatgcggcagggcttgccgggggtgtgcactcatgtgcgtggaagctgggccatgatcacaacgcctttgttggttcagggctgattgatgcctactccttatgcagtcttgtcagtgatgcggaacatgtgtttaatgggattgtgcgtaaggatgctgttgtctggactgcgatggtttcttgctattctgaaaatgattgcccagagaatgcctttcgggtcttttccaagatgagggtgtcgggttgtaagcctaacccttttgcactaaccagtgtgctcaaagctgcagtttgcttgccatcagttgtgctaggcaagggcatccatggttgcgccataaaaacccttaatgacacggagcctcatgtcggtggtgctttgcttgatatgtatgccaaatgtggggatattaaggatgcacgtttggcttttgagatgattccctatgatgatgtgatacttctgagttttatgatatcccggtatgcacagagcaatcagaatgaacaagcctttgaactgttcctccgattgatgcgttcttctgtgctgcccaatgaatatagcctttctagtgttctgcaagcatgtactaacatggttcagttggatttcggaaagcaaattcataaccatgctataaaaataggccatgagtctgatctttttgttggaaatgcactaatggatttctatgccaagtgcaacgacatggatagctcacttaagatcttctcatcattgcgagatgccaatgaggtgagctggaacacaattgttgttggcttcagtcagtctggtttgggagaagaagcattgagtgtattctgtgagatgcaagctgctcagatgccttgcactcaagttacatactcgagtgtgctccgggcttgtgcaagcacagcatcaataagacatgctggtcagattcattgttcaattgagaagtccacatttaataatgacaccgtaattggcaattcacttattgatacatatgctaagtgcggatacattagggatgctctcaaggtatttcaacatttaatggaacgcgatataatttcatggaatgcaataatctcaggatatgcgcttcatggacaagcggcagatgctctagaactttttgacaggatgaataaaagcaacgtggaatccaatgatatcacttttgttgctctgctatccgtctgcagtagcacaggattagtaaatcatggattatctctgttcgattctatgaggattgatcatggcatcaaaccaagtatggagcattatacatgcattgttaggcttctaggacgagctggccgtctgaatgatgctctacaattcattggagatattccttcggcaccatctgctatggtttggcgtgcattgcttagctcttgtataatccataagaatgtggctctgggaagattttctgcagaaaaaatacttgagattgaaccacaagatgagacaacctatgtcttactatcaaatatgtatgctgcagctggaagtttggatcaagttgcccttttgaggaaatcaatgaggaatattggtgtaaggaaggtacctggtcttagttgggttgagatcaagggtgaaattcatgccttttcagtgggatcagtggaccatccagatatgcgggtgataaatgcaatgctggaatggctcaatcttaaaactagtagggaaggttatattcctgacattaatgtagtgttgcacgacgtagacaaggaacaaaagactcgaatgctgtgggtgcatagtgagaggctggctttagcatatggccttgtgatgacacctcctgggcatccaataaggatattgaagaatttgcgttcctgtttggattgtcatactgcatttacggtgatatctaaaatagttaaacgagaaatcatcgtgagggatataaatcgcttccatcattttgaggatggaaagtgctcatgcggtgactattggtgatcttctgttgttccttgatgtgttaaaggaatccatacaagttatatgtgatataatgtgtttggcaaatggcaatcttctaggaaaccaagttatcatgcatgctctattgttttgggtaacatggttttgaacttgaactcgtgcaatttcatgctattttcaaggcactggagaagagatatcatatcagactgggctaccattccgaaaaaaaaaacccattcatttttaatgtttagtgttacctaagcacattttcgttattgacttgaatactagtgaatgtcatctcattagcaatagaaaaccttatggctgaactgaattggctgatatttttcgttctctatgatttcatcaagttggtagatagccttttgtttaagtatgttctagtgactgcattggaaaattgacacttgcaccggccttcgtattgatagtaattagcatagttcatgctatgacacaaacattaggccatgcaagtggttttcatgaaagagctttccattttctaacgtttatcttacatagttttgttagaattgtaggggggttttagttataataaaattggcagcgaacctacaattaaagcatcggttgattttcttgagttatagttaaagcagcaaacctataattagttatatactttgagttgtttaaataaatatcgtttgattttcttgtgccattgccttgacatcattgtgccgcattatcagttcagtcacacttcacactgactaggtgatagcgactcttctagcactagctaatggggatattaagtgtaatgcaccctgactctgcttgctgtgggagaccaggagttgttttatttttctgatcttctcaagattgtggcaaagcttgctaaaggagaaggaaaaataatttcttttgcctatcttatatgatataaactgcttgcccttgttaaaataaactctgttctgcaggtgatagttgggcaaggcaaccataagggtaaaatgcagcctttggaagtgaaacgagcttgcctactggcttattcttaggctatataaccttctactacctccttatggaagctgagggattgtttgtgccggatcatcctgtaattgctcatcttgtagagatgaagagtattgtagaaaaggtttgttttcttttctacaacaaccttgtttctttaatttgtatattttctggaaggagttaatgcagtaccaatttcaattaatactatgattttttatcattgagttgattgcaaatatttgaataatatctgatattaaacgtatcattaaacaggccaatatatcttccaagacaacaaggagacattaatgactgttgtacgcctggtagcagtaccatggatgtgctagacaagataatttttttggacaaggacaatttactagtacgggataagataaaaataggatctgttcttctttactttactataaagtacaaacatgataattgaagtattctggtaactcatcatgataatttttattcagcgtgcggaagttgctgaattgacaaagaatgaccattctaataaggcttagaatgaaattgacaaaagaaaggacaaggttgaactgaaacaacacttttgatatattttagcattttgtttcgaaaataatgcagatgcacaaaagctgaacaaatattaaaattctaggatgagcatatcagctcacaaagccttgaaatgttggaagtatgagcaacccttgaagaaaaagggctctataatttcacgcagttgaagcctgagaaggtttcaaacaccaggacaactcctcataggtgagtcattagttgtgccatctctttctcttttaaacgacacatttaatatatttggatggttttagcttttaaatgcctttttgttaataattatgagatacctgcaaatgttggatgattttgatgatgatgttctcagaaatagacaagtaaccaaacctagcaaggtcctggtagcagtggtaaaatccaataaaaataaggtctgtatacatttttttaatttttttccacctttctttaataattttatatttggttggcttctttcttagtttctacaatttcttaaatcttgtgataacatgtaagcttgaaatgatttaaagtgtgccaatctaaccgaagccttctattgagatgatggaaatacagagctacctccaaaactgtagaaacaaaagtacttatgccatgcatttttttagagttactgtagaatattgatgtataggtagtttactgcaatagaggttcaaatatcatacttctatcaagttacccaatttgacaaacatttttttttaaatgtgacagtagattttggtccctggccagtggtctcagatgagaaaactgctatttcatccgtcacaaaatgtaagcattttttaggtgggcacgggtattaaagaagtacttcctccgtttcatattataagactttctagcattacccacattcatatatatgtctagattcattaacatatatatgaatgtgggtaatgctagaaagtcttataatttgaaacggagggagtaggtgagaatgattcgaggaatattgtgattgattgagaagagaaagtagatgaagaaatcaaatgaagaaaaatggttgtgattggttgagagtagggtaggtggaaaaatagctttcattttgggataaggtattgtgctagaaatagctacatttcgggacagaggtaacaaaataaaatctttgacatcagtttgttcagaatgatctgagaagaaaactgcgagaaaacgttgcttgagtttgcaattaatgttgtatttctgaggcagtgagatatctaggtatacattgccaaagtgtagtaggacttcacaaattgacagaagagaactgaaattttgtataagacctggtcataattcgtgtccattcttgtgaatatttgaagatatctcatccttgaggaagcgtaataggaatggactctgctgcatttggtgccttttgtccttgaaaacttggtttagctatgtactagctagatctaataattagctttctcaaatatgcagtaccaaaatatattggatattttcttcttgtattatttcaagtcattcctctaatggttgtctcgctgctatgctgttcttgcagagctgatgtgctaatctgtcatattaactcaataacatctgcgtgtgcataaattgtgttcaatattctttagaacaaaaaaaaatgtagttattcttgcctggttagagatagtctgaaatatgtaattgggttacagttttttaaattgctggtgaagtggtgataccgtgatatttcttcatcagtggtagtgtctggttatcactgccatgctcttgcatacaagataaactcttctttggtgtatgttatttgtggttgtgacagttgcagctgtcagatactcttttctgctctttattatctgtttatgtatctccagttcgggtatagtctttttctttggaataaaaaatgtaggcacccttttctggttagaggtatgtctgaatatattaagtatcttatagctttttggcaaaagttgcagttttgaattttatggtggtgttaagaaaagtatcaggtctttgtgtctgattcacaccaggccactactattctcttgcataggagtacctatttagcacatgcactttggagttctggatgtcaaatgcctacgttaattgtggttacgacttatgacagttgtagacttgcaccagctgcttacctctttcttttttttaacctgctatgttttcaagtttgtccctggtgatgatgagcttccaaagcgagataatattggtgaaagacagtgaaaatacgaactacatgttcttgccagagtagaagctagtacacttgaagaagatgacttgcccaatgaagatgcccatactgaagggaagcttaacattttcaatccaaaacaacaggaacagaaacatttccatactgaagtgaagaagatgacaatgatgatgacattggaccatcagagtacaaggacattaaaaagcatgactgaaaaactcgagcaaagaacagaaatactcaccgtaagttccattgataaaaacttatgaagattgattgtttccgatcaaggttcttttggcaaggggatggacacaaaaggaaatatagactagcaaggtgggacatcatatgtcgtcctaaagaccaaggggggttaggaattcaagatcttgaaattaagaacaaggctctccttagcaagtggttgcataaactactcactacagatggtgtgtggcaacaaatgctaaggaacaaatatttggggtcacagcctttgtctcaagctcagtggaaagcaagagactcacacttttgggctagtctaatgaaggccaagcttaattttcttaggtttggctccttcaacatcaaagatggctctcaagttcggttttgggaagataaatggttggggaatgcctgtttaagggaacaatatccttgtctctataacgttgttaggcataaacatacaactatttcagaaattttccaaaccagtcctctaagcttttcttggcgcagggaccttactggctttaagttagtggcatggaatcaccttctctcacgcatcgctaatattatattatctcacgaccaagatgagtttaaatggaatctaaccactgatggcagattctcggttaaatatctttatcttgcgttggtgcagaccgatgttcccaatataaacaaaagaatctggaaaatcaaagcccccctaaagattaagatcttcttatggtacttacgtcgtggagtagtcttaacaaaagataatcttattaaaaggaattagagaggaaacaagtcttgttctttctgccacaaagatgaaactattaatcatttgttctttgattgtcgttttgcctgcacagtttggtctataattcaattttgcttcgaatattagtttacctaatagtacaactcatatgtttgggcattggataagaagacaaccacgcaatttgagatctttggtcttattaggggcaactaccactatttggtctatttggctttgcagaaattatgtggtttttgaaagaaaaaacatatcttctcctttgcaggttatctttttgattacacattggctccgcttatgggctatccttcagaaggtcaatttgcggggtactatcattgcggcttgttaacaattggagctagtggccatggagttttctaccccggtgcatgggtggtgttctagactacggttagagggctcctgaagttctttttgtccctgctatttggatgatgagtttatcttttgtttctttcttgttggctgtgtgcactctttgggtgcagaagccggaggtgctcgcagaataattatatcacttgatagagttttactaagattaataaagcttccattatctaaaaaaaatacttattcgttgactgtattacagaaaccccattactcaaccgctggaggaagaagctgaaggaaattggcaagaggaagatctcataccaggttaatcctccactagtgtacggtacaacctttcacaatttttattttttttatatgtgtggctaattaaatctaaactcctccagatagagaagaaaggttaacctgcacaagaacaaaagcttaagaatccatggaagatagggtaagtaataacataatatatgagacagccgagctatgtgagcaagtcattcagatgcactcgcttgtgtgtatgatcgttcaagctaagcatcaaaccaagcttgtttagcggggaggtaagtgcgtggcgtcaaccgtggggtgaatgtccggcatcaatccaaatgttagccatagtgttaggtttaaaggttgatggatcctgcatgatgaattgattatggtctaacatgatatttctttgatggtacgtagttttcttgttaagaattttttgagagatcgcacacatgatatttggaggttcaacgtcatgcattaaaaaattgtgttatgtgctatggatgcttagttctcactggtggagaaacctcaattgtcccagtttacaaccccctatatcccgggttgcaaaccgggacccccaaattctagactaaagatggtatctttagttccggatcaaatttgatcaagtttatagacaaattagttttattaaatttataattgaatattttttcataatatatttgttttggattgaaaatgttaatatttttttctacaaacttggtagcagtttgactttgaccaaaggcaaaacgacttataatctaaaacggagagagtagtttatatgggtttctcattgttttgataccctaccgatggagtagtgcaagtgtagaaatttatggagttaccgaaatttggtagtggtaaggttgtgatagttgcaggagaaaattaacaaaatcgaaaagatacgtagtagataaactcaaaagataggttcgtattacacccattacacccatcaaaagataggttcttttttttttaaaaaaaaacaccttaactatggaactggacattttaaatctcaaccattcaaaccaaccaaattaccttcctaagaataaagtggcattcataattttggcatccaaatgtattagtttttctacttagatttaactactttttatatcttttctaactaagtgccatataagtacgaaaaatatactcgctctgttccaaaataaaataaatggattcctagaatcccaacaaaactttagtagggaggaaatgaccatgcacctggtggtaggtagcaagggataaagtttttttatttgcagatcgggggtatgtaagaaggtaaaaatcaatttattttgggacaaaatttttaaactttaggaactaatttattttcggcttgtttgataacttgagggaaagagattgggagtttacatgagggaattgatgatgagattaagatgggaatttgatttttaatcccaatattttgtttggtagaggtgatggaaattgatagggagtttagttggagattaggtcattaataaaaacggatggctgagatttgcttagacaaagtaaaggaggaattccctcccaattacctgcccctacccaggtattgaaaatgaggtattgaaaaggagggggttccttcctcaattccccatccccatcccaccaaaattcccatgtctcccaccaaataaaacacttaatagcctcatttttctatattcccaatccctcctaaaaactccctccaaccaaacggaccgtttgggatggagtcgaaaacggtcggaaacgatcggaatcggcagcatcttttcagaaacgatgctcgaccggccggtaattgaccatatttatcatttaaactactcagtattgacattaatacggtgtagaaagaattgtgaaaaaacaacatttaaaaatagccaaaaacggtatggtcagaaacggtacctcttatatggaaacgacgctcagtcgatcgggaatttccatgaccgttttcacccctagatagagtataatatttggatcttaaaaccatgaaaccgctgttaaaattgggttttgttgccatttgtgtgtgtgcgcgctcatactttcggaaaaaattttaaaaaataatttgttggctatattgttggtactatgaaacagaggatcgaaatcaaaggtacttgctatactatcaggttctctcatcaagtatcaattaggtttttttctatattttagtaataaaaagttaataaataacaagaagacctctcttttagaaactcaattatattatgtttcatgatttaataatcaatgatatgatattatttaaaaaaatgtaggctagttttttaaaaaaaacaaaattgtaaagtagtagtaaaatcttgagattggtctatattacacccttaaactactggttttgtttttaacaacgaaactagacattttacacccctcaaccaccaaaatcatccaaaataccctcccaaaagtaattttagttttgatagtgtttcttacaattttactaccgattcaacttttctactatatagccaagcccagccaaaagattattatacacacccatataaaatcatgagtaaattgcatattgggctcagtattattaccaaagttttactttgggcaagggtatagcctgcattttcactttggactagagtttctttcctttggttgcacgttgggccacctttctcgtcggccggccaggcactgcgtgcatcccaccattgctggcagtggcaggctccaagggcagccattattgttgctgctgcaaggtgtgaggatctcctgcacatgtgtaggaagaggagaagctccgggggacagccatcagggtggtgaggcagaggagctcgtgcacagcggctgggatggcagcaccggcgacgctcgagcttgtggtggagcaaacggagtttaactaaccttgagggcgagggacacgattccttttgcatcatccggtcaggtccattggggattggaggggattatcgcaatagatgtagaattaatcctctccaaatccccctcaatccacttgtgggagggggccttagagggaagcaacagcaggttgcattctcatgcatggaggagtaggagcaagggggcggaccgcagctagaatgatatggagatgaggagctcaagcaggaagccatgggaggctcgtgggagttttgagttccttggccatgaagcgcgagctcgagctagcccagtatctcttcttcgtatcaccaggggacacccggcttggcattctaccccttgtgcaatgctgagcagagcagtgatgtgctcaagcatcgtccctcacttcctccccaagcagtcattggatctagaccacgggcgaggagaacggcagggattggcggcggtggtgatgaattggaagcagagaatgcacggctggagagattgagacatggggtggcctaaattgcaacaaaggcgatatttcctagtataaagtgaaaacattggctcttctcttgtccaaagtgaaatcttggtaataataactggcccaagatgcaattcactctaaaatcattgtcataactaatactaggtgacacctcatgctttgctacaaaatgtatggataaatatgttaaatattatacaaatgatttatgttgaaataatatgaaaataatgtgagaaagatgatttgaaatattgtatgttgagttccataatattatattctagatgatgtgttatttttgcatgagatttaagatttctagtagaatagtaatagctagtggatgatgaagtgacatacttgcatgtaataattgctagtgagtaccaactatatatagaaggtatagatttgttgatgaacaattgaatttgcaaatgacttatttaatggaaattggtttgaaaatatttgtcgatattggtgtaagtatgtgtgattaacacaaatcggattgcgatatctataactagaaacaatttgtgtgcagatgattaaggatatttttggtcaattgcggtgatcgggactagcatggataaaatgtcatatgacaagattgaactaaagtcatgagacctcatggtcaatctcggttaacagcgggatgatgactacgctcagagaaaccgaggtttagatcagtcaaggatactaggtgataattttggacataagatgacatgagggtggacacatgcgggggaggagtctgacacagtacgggtcggtctagattttctatctatggctgcctttccggagagagggttttgaatttgggaaattgtaaaaattttggataccaagggattgagttatagtgtaaataggagttttcccttaaaagaagtgtaaataggagcttttgtgatggaattactagttatagatagacgagaggtttaactcaacacatggataagcatctagagttagagagaaaagttagggttaggattaaaaggggggcgattgcatttttgaccttgttttgaattcaaactactaatttgactctacttttttaagtttgctcatttgaccctcttttttgaaaatgaaaatcagatctgaccctcttttgtgaatgcaatgtaacggtgttaacttaggtaaaaaaagacgtttacgcccatgcttatttgaccatattttttctcaaagtttttgtttatttgacccagttttctactcattatatatgatgaatttgaactaggtatgacatatttggcttagttttcatttgtttgacttagatttgaaagcattttaagaaatttgacttagatttgatatatttttgacccatttgaattagtttgatatatttttgatagatttgacttagatttgaaaaaaaaagtgaacatacaaaaaaattgacagcatttatttatacgcatacatccgtcccgattaaatcatttctgtaatatttaacatatatttatccatacatttcgtagcaaagcatgaggtatcacctagcgacaatgattttatacgagtgtctataagcttttggctgggcttggctatagtagaaaagttgaatcggtagcgaaattgtaagaaacactatcaaaactaaaattacttttgggaggtattttggatggttttggtgattgaggggtgtgaaatgtctaatttcgttgttaaaaacaaaaccagtagtttaagggtgtaatatagaccaatctcaagattttactactactttacaattttgtttttttaagaaactagcctacatttttttaaacaatatcatatcatcgattattaaatcatgaaaaacattataattgagtttctaaaagagaggtcttcttgttatttattaaattttattactaaaatatagaaaaaacctaattgatacttgatgagacaacctgatagtatagcaagtacctttgatttcgatcctctgtttcatagtaccaaaaaattattttttaaaaaattttctgaaagtatgaatacacacacacaattggcatcaaaacccaactttaacagtggtttcatggtttttagatccaaatagtatactccatcccaaaataatgtagttcctaaagtttaaaaattttgtcccaaaataaattgatttctatcttattcctatccgctatcctattcctatcttgggccttcttttcatctgcctacgtctcaacactcaggccttcagtttcttttcttcttttttgccccatccctttttaaatgaacaaaaaatttaatgtttatattaaaacataatatagattaataatacgaatctttctaaatatttgtaaatattttgcaaaataaaaacgatttgaaaatgactagcacacgtcgctggttatttaaaaagacaggtgattcctcgcgctttgctgcgggaattactaagcaattctcaatatattttttcgacaatcaagttaggagtaaaaaggaaaaaataatgaaacatcagggcttatcagtacttattaaaaaaacaaatgatactcgtactttaatgtgaaacatattaataagtatacattaaatattataaatttattagaatattatgcaaatgatgtgagggatgattgttggatatgcttgcatgaggttaaatatgtaattattgctagtgggtgatgatgtggcatggttgtatcttgagttttagacttagtgggctataactttatataaagtatagatagggagtatttgttattatttattagttacccatacattagaacattaaatttaaaaggaattgtgcgacaattctaggttatgagtggtaatgctcgtttctagggcaagacaatctcaacgatccacttccgaaagtatgttttgctctccgttgatttttcggattttctgaagatggctctcaaaaattccgaaatcacaaaaattcaaaattcggtactgatgtgttttcagatatgttcaaaatgaaattttgtaatttctgaaattcattttagccctgtttttggagatttatatattttcaaaaatgatttttggaatttttgaaaaatggaatctttggttccaacgggtagatctaaggttgtggttataaatagtttcctccactctcaagttttggctactgctccattgaatatttcatgccattgacttacattgatttgagatccattttgagccttgttttctcactttccctctcctccgct

SEQ ID NO: 8103 - DNA, 19697 bp, Oryza sativa
ccagatgaaaaaagtacggccaaaagatttttctatgttatgttaataataaataaagaagtatttattggtaaaacttgttaatattgttataaaaatgtattgaagttggttgttgcgcaatttcatatgttaagtgaggtattattttgtaccttattcgacgtattagtactcggataatttatataggcctatcgcagtttgggtcgtagaaacattatatggacttaaacaaggagaattatataacatgaagaaatagtagtacaatttgaacatgatacgactatttgcattgcggttacatagatgatattagattcgaactaggagggaggtagcgcaatagttgaacacaacgacgatgtagtaatgggacaaggaagcatgacagtagaaatttcaatatgccaagttgtccgataatagctaacccctacgtgaggatccctctcctctctgaaaccgcgctttagtaaccctgtattgctctggtagttcaagctgcacaacacggctaggtggagttagaacccttatggtgtctatccattctctgtattgacatctccttggtggttcctgggaggaaagactagatgtaaagcaagcaaagttagtaaatgttgtgagaaaataaggattcatgtaatcaaaatatttttaccatgaaatcgtcgtcaagaatatttggacaaacaaagaaccttcgacccaatgttgtaggatttatggaacgaagaacctgacaacgatcaccacacctgcatcttggacgggcttcccatggagggagtgccgtagttagcacccgccagtcgctctgttgttcacgacattgtcgttcataagccacttttctctgtaagtattgctcagtactttcggatgcgaaataccagcgaccttcttgtaaacaagtggttaggtcgagaacgggattttctgtatcgacccactcgatgtatgcgcaagccgtagtgcgggtctgccgaatagagtagtattacgaagaataaagcgattgcccatacagaatgaataagcatatgcagataataaaatacctcacggtcatagttagggcacctaaaaaagcgccttcctcgaatatcaggattcctcgaagccattagttggcatcgatcactgcataggcagagaggacgctggcaccaaggtggtagtaggtatacacaaggatcgctacgccagtttggatcctcaacaccccggcgtctagccattgacgaaagccggttggatttgtaatgaagcaagtggggaagagagtactgaatgtgactgagttctgaaagattgtgaggccttactcgttaaggcgacttatataggcgcaaaaaatcgagtgatacccctgacatgtgaacgtggtggggtatggtgggtacgcctgattggcgccgaaagatacatgcatgatcggcgctgaaagttacattggtcgtatgcgccaaatggcgggcaaatactcgtatcacacgcgaataaaggaggctgcatcggtgcggcagaaagtagtcgtgcatgcgccgaaaggtatcgtgcatgcgccgaaaggtatcgtgcacatataacaacaacgtagtcattacacaagcatacagtactggaaagtgaagcaagtaaacaaagagaagactgctctactggccctgccccgcgccgcgaccacgcttggtcctccgggcctgtgctcgcacgtggtcctgggagtaggtgaaatgatccggtggcacagcacgggtagcacgagtgtcccgcggaggagtggcctgcgcctggtcctgcgtctacaccggcggtgcgcctcccagttgtgaggggccaatgacgtcctctgtcgagcctgaagcgaagtcgaagtcagtgatgttgaagagcaaggtggaaggcagcaagcggtccgacgaggtcccagcatggtccagtggtggaccctgactcgacgtgccggctgcctgtgacgaagtcccggtgtactgccagaactgcgctgagtgcgaggtcgacacagctgcctgagacgctgaccctgcagcctgggagaagtgggcggcctgcgtaatagcgaactgggcgaaacctacacatcgacaacgggacccttgtaagctaagacataaaatgtatgtaaattgattgtcgaagtaatgttgtttttttaagtacctgtggggggcacaacagaaggcctgcagaggaaggcggggtgctgaacggtgcacgaaaccctgaagcaatcggcaggtgaaacggctcacttatatgtgcgaggcatgtacagaaatagtaataaaaatacttacctccgtgcggagggggagtcggcctaggaatgtgcgcagctggatggggaccagtcggtacgggtggccgctgtacagctgcgtctgcccgagcaacgtcgtctgcacgacaggtgagcactcggagaatcgagcgcatcgactccaccatccgcatgtacgtcgtcaggtgctcctctatgggtactggaatccccgcgcctaaacgttggatcgtcgttgaaccgtcaacgacgacctggttgatgtcgtcgacctacatggttaatttgttcgtaaatattcgtaaaatttgacgaagagagagacatgaaaacataaaggaatggtgcgatgcagggtactcacagcacgagcgaagtcctggtcgcggtgcctggcatagaggtctctagtgctcgcaacgtggggctgctgctccaagggagcgaaggtgaccctagtacgggtgcgtggctggtaccagcgtaggtaggcctggtacgactcctcagtgtgtggctctccctcgtggtccatgacctcctcggttgcgagcaaccagtactcaacaaaagtcgccaacttggcgggccaatcgccagctgagtgctgacccttgcgcgagtacctgcgaattaatgtgtaatattagtgtgaaacgacagatgttacaaattattgtgaacaggcagattttaatgcaacaacgaaaagcatagtgcaagatcttaccggtgaacaacagctgggacggtggtcggaaacggtactggaaagggctgacggaagccgaactgccgtatcacgcggaaaggggcgtgaggctcaacgcagatgtcgaagaccatcggaaccgtagtcatccagtacgcctggtccctggtgtagagtgtggacagacccaacggcgcacgagcctgggtagccgctgcactgtagggtcccacacgacgtcagtcggcagaaggcggtcgaactccataacaaactcaggatacgaccgcctaacctggacgtgagcccatcggcgctgcaatacgagacgatcgatgtgatgtacaatgaacttagcaattaacttaacaatacgataagatcgatgcaacgtacctgacgacggcaccacagagtacccatcgtagggtagtcgacctctggtcgctcctcgtacagtgactcctcgtacgcgtgctggtccacctcagggcggccgatcgcaatcctctcagctgcccagatagaaagaaagagagggcacccaccaaaggtcgcgctgggatccgtcttcgtgcaagactcacaaagtgcatggtacagagccgccaacaacgcggaaccccagctccactgaggcacctcgcctaccgcggcgtcggcgatgctcctggtgtagtgcacgagtcccttgtcgacggcgtgcccgtgaccgccacagaacatcacccagccaaaaagccagagcaagtacgcctccaaacatcggctgtaggagtactcgtcggcctccgcctgtagctgctcaacctgcaagccgtcgataaaatgttaggcaccttaactgcggactaaatatgtaatacgattgtcatttcggtacaaaaacactcacggtgaactgaagcagccacctcttcgtaggtccggtgttgcggtagtgtgccaacggctcgagcgggaggtgcggtgcgcgctgtactagtgcgaaacgtgccgtcagatcgtcctgccaatccacagccgtggtcactggcccaacagcgtctcccgcgagcggtagccccaacaaatacgatacgtcctgtagggtaggggctacctcaccgcacggcaagtgaaaagtgtgcgtctctggcctccatcgatcgaccaaagttgctaggagggacctgtccacagaccatcgtctggccgggtccgcgtcgccggccgcagcctccaccagccgacacatcggtaggaggccggcctcacgtagcctgcaataacaaattaatatgtcattataaaaaatattacagtgcaactaacttatagtaaaacactgttcgtacctctcgacaaaggagtcgtgaaccgtgagtagctcaccgcacgtccgtgcccggaacgtcccaagctgagccccctgcaccgcagtaaggtgagaccggtgtcggtgatctatcgccgggtccaacaactgaggtgtatcctgacgtgccatctctgaaaaatatagtgtttcgtgttagaacaattcaaaaaatagtaatgtaaaacaaaagataacttgcaaaattatgaaatagtaataaaatcatgagattaattatgtacaacaagattacaggctatttaaatatagcaaacgttactaatggtacataacgatgacgtgcaatttaacatatatgtagagttcaataatataacataacattacgtgtcgaagtccgacatacatcggcatacctaaagacgttaggcgccttagtccgacgttacatcacgagacctaaagacatgacatgccgaagtctgacattacacgacgaaacataaacacattgataagttcgaaacgaattacaagcaaatccacatgctgacatagaacataagaactacaccacgtagccagacgtggcacgacgacgcctaggacgtggtcgagtggaggtagtgccttcacccgtagggcgagctccatctgctgctgatcctgatagtcctgcctccgccgcacttggtttctccttgtctttaggacaatgcttgtaggtgtgcccatgttcatcgcatttgctgcaacgcttcaccctgccagcctccgactcgtccatatcgttgcggatgcgacgagtcctcctccttccagccttgcctcggagcttcgatgggtcaggaatattgagtacttcatcgttagtctctgtgaactccccagctatgccgaacccataaatctcgccgctccatgtatgatatattgcttgcttactgaagtactgtgacacatatactgcatctggtatgccacactccgctgcagcagcaatgacatgggtggatggcctgtggagcagcttcggctttgcacaagagcaatgacatgtgccgtcggctttgagaacacactcctgcttcactctcttgcggtagatacccctgcctgccttatcttgacatagtatctcaaacctgtgctgttgggtaccttgcactacagctcgatgtttcatggcctttttacgcaactcctctagctttttctgcatgaaagctccaaacaaaatgctattgttcggcatagagggaagaactgcctggaaccgatccctaaaatacctgcatgtcccatgtaaaatgaactccactatgccaactagtggcagtccacggacaccgcgcatcacccagttgtaaacttctgccaaatttgttgtcataattccatatctagcaccacctgtgtcatacgccttggcccatttctcttttggttcatgcagaatccactgagaaaatttccgaatctccaattcagtttttctaaccaatgttgcactatccgttgggagaggtccaagagcttgaggagggtcagcaacggcggtcgatggagccgctgcacgctgatcactgcatttggctgtcaactcatctaatctcttccaaagctcattgaattttttctcctggttctgattgcacagcctcttgaacatgttcatgagctctttgttcttgaattgcttgaagaaattagctcccatatgacgcatgcaccacctactctgtacatgttcccaaacaccggggtatcctcgttccatactcccaaactgcaactcttctatcgctcgcagaatgccagcgtgcctatcatgtatcaggcacacatttggcctcataccaacaacttttgttttaaccaatttcaggaaccagtaccagctgtcggtattctcactctcaacaaaagcaaatgccaagggcaatacctgattgttcccatctacccctattgctgttagtatctggccccgatactttcctgtcaagaatgtcccatcaatgcggagaacaggacgacagttcacgaatgccatcttgcatgcatgtagagctaagaacgccctttgcagcacactcttgctaggatgttcaattgaggggaatttcttcacttcgtaagagctcccagggtttctttcctcgataacaccaagcaggcgtggcaaattgtcatacgaggcttcgtaagttccaaatctcatctctattattttctgtttggccctccaggccttgccatagctaatagtatacttgtatgtctcttcgatgtgtcggattattgaccttggttcatatgtgagattatcgatgacatgcgcatacatctcagatgcaacaaatgcacaagtaatgttcctgtggtatttctgaacaccaggtagaaaacatgtatgcttggtaacgactgacactgtccaataatccttccatttccccttatacgcgtgcactctccagggacaaccatctttttccttaacacaccgaacttcatattgcgaccggttcgacttggcaacccaaaactctctatgaagtgacactacaaaatgttttaccgcctccttcatatcttctgctctactataaatcactccctgaataacctcattttctttgtactcccatctcacactatcctcttcagagacgatcagcccagaaaaatcctcactagcccattctgctggattaatatccgtctcatcatctgacgaatcaccttcctctacacgctcgttgtcagaatcctccctctccatttcatccacaatggcaccgacagtctccccctcgtcggccactccacctggttgaatgccaactggagctactacgcccccgtcctctcgtgcgttgacctcctccacagaagtctcgtttacttcagcacttggtccctcgccatcatccatgttcatctgcacacctggatccttcgggtgaacaaacggaaccaaagctagaggccacccgcgttgcaatgcattttccaaataccatctccacactcgagaggtttgaactggcattagttcccaataaaaaccctcagttgcccgacttactataacattgattgttatgtcacttgtctgtgatctcaagcccttcattaaccatccttttatggaaggtacactcctctcagccggtctatcaattcccctttctgatacaataaaatctgacagatctacctcagttggcccgtaacggacgtttcctggtccatggtaaacttggaatatttgtttgttcgacatatctgtcaacgaaataactagatcatattactctttcatgcaataaacatctacaacgtaatatcttcttttgtaagccaatgcaacggtaatgtattgattccaaactagcagatctacgtagttaccgatatctacaatacgcacttctagattagtacaactaaaaccctaaaaatataatgcatttattcaaacaaaattttaaagaatacacactatttaactcaatagtcacatataggatctatgaatattacctgaaattggcgtctgaatccggtagggcttcgccccttcttctcttctcctcccctctcttcttttattttcactggaattgaggagagaagaatgagggctgggggctgggcagcaggccttttataggcagcgaggcctgccgcccggccagagggcggcaaggggccgcctgcaaaatagctggccccgactggcttttttgcattcgggccccttgccgccccaccagagggcggcaagggttttcctgcaaaaaaccctccctccgtcaccgcccgttcctcccccgtttgccacgtcagcttgccgcctcagaggtgggcggcagggtctatttttgtaatttttttggccgatagattatttctgtaaatatttttttaaaaaaatctaaaaccgaaaaaaaattccttttcccctcctcccttctctttgggccgttggcccggcttgccccctccttcgcgcaagtccgtttcgcctccctcctccttcctcctctccccgagccgccgacaggtgggccccacctgtcggggtcacccccaacctccagcccaggccggcaactgccatggccgcctgagccgcccacgttgccgcccctcccagcgcgcctcccggttcccgcgcgcgtgtgggcgcggtccaccgcacgtcctcccctttatccactttctcccccattttcccccaaaaatcagcgccgttcgagccccactcacccacgtcgccggaacttcatccgccggccgttgccgcccgccacggccacgatctccacctcccggacctataaaaagcatccccggggccccctctcccatttttccccaaatccccaagtcgtcgcgccctccctcgcgctccccgcgccgagcccaggtgccgccactctccggcgaactccagccgcgccgcgccaccgctcccgttcaccccgcactgcgccgtcgccttccccggtaccgcagccgccgtgcgcaccccgtccaccgctccatttcccctctccacctccgaagtgccacagccacgcgcaccacctctctccgccgccgccgccgactccagccacacctcgccgcagtcctagtcgtcggcgcaccacgagacgacctccaccggcttcgccgtctcgagggcaagcccgaccgctactccatttccctaacccctcaccgaaactccacccccactgttaacccgaggccgccgccgttttgccacctccggccgcctactgccgccatccctgtccacctcaggctgtgccaccgccatcactggcttcgcggttgcaagggcaagctcggccacttctccatcttcgcgaatcaccgaagaaactccctcccctctgctcaaggtgagctcggtttcctccgccggactccggccgtcttttgccgtcgtcccgcgccacctccctcactctagctcccttctataccttccccaggccctgtcgggcctcggccgcgccgcggtcttcgccgggagtcgccgaagccccgccgagctgtctatccgaggagcccgccgtcgccgttcctcgccgccggccgccttcccgtctccttctcgccatttgtgcgggcacggtgagaactgcctcctcctcctctcccttttgccgccctcctcgcgccgtcctatgccgccgctagtcaccggtggtcgcgccgccgcgcgccatcgctcggtcgactcggctttgcgccgcgctcgtgcactagccgcgccgcgccgccgttctctcgcgtgcgccgcctgccgcccatgtgcgccgccgctccccgcgccgcccgccggtcgccgtcaccagagaccgcgcgctgccgccgcaccatggccggctgggctggtcttggccataccgtgcccagccgtctctcccctcagccgtccgatcggcctcgggtcgatctgggccacccgtgtgtccgcacacgtggccgccacgtcggtgccccgtcaacgtcacgtgtgcgccacgtggtgcacccgtctcgtgcctccgtggacttggtccacggtggaccgcccctttgagtcaccgacaggtggggcccgcttgccggcaccacctatcccctcggtgacgtcataattgattttaattgcgcaataaattcgttaataattatagaaattcatttaaatggttcaaaacttctaaaattcatatctaattcattcgaacttcaaattgagccgttcaacttgcaaaattcatctaaaattgagctctacatgtttgtttactttttatgtactgtttccttggtttttattagagtttttcctcattttgtgtgccagcgagtagattccgtcatttcggaagtccgcgatcgcgaggaaaagagttcggaagattcttttgaagaagcaaggcaagtcacacattccccttgagcatttttatcctaatttacaaatgttttatcgtttgcaaataaaattgcatgttttgctaattacatgggatccgggtattacctatctgctcgcttgtgccatgtttacttgatatctgtcctttgtcaaccttgggtaataaatcaactagctcatgttacttatgtgacctagctagacctatatgcttagccatgcttaattaccactagctcagttgatgggataatgacagtattagacccttttagtatcagaataagctgcgtgctcgagacatctggccatgcttcatagtcgtaattatctaactaaaatgcgactgaatggtgggctgtgggtgcatggttttgctagtcgcacccatggcaattaaggaccggttcgagggatgccctggaagaacttgtcgtacttaccacaagccagcgtaggcaacggctgggcttgtagtgtagctttcctctagctgacgcatccaggcaagggtgggcgtgatggagtttggatgggccctgtgacggcctatgcggcttccggattcacctaggcatgagaggggactgcctgctgccttgcgaggagtgggggtaaaacctgaggtgtggtgcgcttggttagagggggttatgcgaagggtcctgtcgcggcctctatccggtatgtcgtggtggcatgtcggcgcacggaaatgtgtcgtggggctgtgtcttgtgggtacagttgtacacctctggccagagtaaaactattcgaatagccgtgcccgcggtgatgggcggtcgaccagattcaccgtgattagtctcacacttaataaatcgactcaatgcactgtagttcaggtgggttggttgggactgttcaacgtggtgtagcgttgatcagtggagatttaatgttactttaattactcaacagttttactattttgctcagtaaaatgttttacaaccgcctttatgtaaatagccacaaaccgtccttttgttccccttgcacgtctgcatcattggtgtggcttgctgagtacggtggttgtactcagccttgctattattcccccttttcagaagtgtagtgcttctgagctgaagacgaagttagaggatcaaggctcagaccccagttgagttttgcctgtggagtggagctgaagccccgctaggatcgcctttttccgctgctgctgcttttgtttcggtgtgaggacaaagtgcctcttctgtaagtattttacgctttatttacgtttggaactgtttattacttgtcgttttgtgtaccctggctggtcctggatagggatttaatacacaaaatagtctagaaatttgggctaaatttttgggcgtgacgtgtataacatgcctattaatatgctctcgagtgataaatttcccgggtgatgtaaatagaatgcatctcatctgagtagcttatgatctgagtagttatccctcatgggacgcaccaaagtagatgcgaagttgaatcccgactggcgcaagtactcggctgatagccctcatggagaataatgaatagtccagtcgttgagcataagaaatcgactcatgaccatgaattcatgttgcatgtatccagaacaagtccaaattgaaggtatgatacttgtgtttgagctggtaagcccctgagtatatagcttgtcattttgtcgtagtcgaaattatccattgacgatagcatatgcagtcggcatggaaacgagatgaccaacatggggatgacatctcccattagagatgatgaagatatattggtggtagtaaagacagtgacaccaatcaaagatgacgaagtcgcacagctacggaggcgaagaaaccagtcaacaacagtcaggtcagccaacagtgaagatgaaggcgcccagcaatagcgacagagttgtatagccatggcggcggaacaatcagtcggtgacgaggcagccggtgaagaagatgaagaggcctattagtggcaatggcgaaattcaccaatcatgaagatgaagaaaatagtcggcgacggcaaacgcaaccgatggtaatgacgattagcaacaacagagatgatcaactatgatgacgaagtttcccatcaatagcagtagaataggctatgttgaagaggcttgacaggatgttgatgaagatgacgatatcggtgatccagtcaatagcggtgtagcagccaatgataatggcaaagatgctcatcagtgtttgcgtagtaggtaaactgtgaaggtgaaataacaagtcggcaatgacggaagcaaccagaagcgaatatgtgatcacccattagcaacggcggagacgtcagggccgatgaagtagaggtgctggtgatgatgtcaatgacaataatccaccaaactgctgagaagatatcgaagctcgagtagtttccttgatgcgagcgtgtgtataacaaagattgatgcaacgccccttgatttataaagatggcagtagaacttggtgtcatagctgctgcagatgcttcatttggaggaaagtagatgctgttgtcaaactcgtcgaaactgagctgattggttgataaccctaaactctcaaacatgtagattatctctcaaacttgatacttgagaaatttgaagtagaccgtggcatcagctgagagccagaatagtcactcaaaatgttggagttgctgaagtagaaagcttgctctgaagtgatgatgaagataatgactcccggagttgactcgttggctaattaattgattgcttcatcttgatataacaccagtcgaattcgaattttaagggtcttgtatttgtgtagcccccgactctttggttagttgagaaataactaaacatagagtcgagaactgtagcttcttgttgtcgagtagccattgcttgagtgaagatatgtgttgaagatgtccgagtagaaatcttgaaaattggagcaccacttttgtagtataataacacggaatcatatttggtaacgcatgccgagatgttgaggctcttgtagacgtcatggttggtgaagtagaaaatcttgcgaagtagaggcaatagaatttgccggtgctgaagacaatgaagatgaagttgccccataatgatgatagagttacattgccgtgatgacgtagacacaagccggtggcaacaaaagcaaaccggtggcgaagaccagtcggcgacaaaagaagcagatggtgaaaatagagacatccatgagcagcagtataataggccagccatcaaggcggagacaccaatcagcaatggagaaggcaagctggtgatgacaatgatgccattcaatggtgacgaagacgtgcagccgtggaggcgaagaaaccagtcaacgccaaacaaggcggccagcaatgaagacgaatgcgcccagtagttatgacggagttgtgcatccatggcggcgagataatcagtcggcaacaaacgggagcagccggaagtgaagacatagacgcccattaacggtggtgtgacgaaccaaccgtgaaggcgaagacacaccagtcggcggtgacagaggcaagccagcggtgaagatatagatgcccaacaatggtggtgtgaccatccaaccgtgaaggcgagcaaaaccaatcggcagcgacggaggcaagccggtcggtgatgttctgactgatccattcctaaagcgtaggacataagcttaatgccatgaatccatattatgcatatctggatctggatcctgcaaaacaaacatataggatgagtagtatctgatgtaaatacaatacttgagaaaaattcaagtattttaaaatgtttataaatatgtatttctcctcttgtcaattttgatttccccaagcagatgactccttacgtttaaacactttgcccgactagtcatagcccccacgcatcgggaatgagctaaggcacttcctagacatgcatatgagtgacttgagttcgtcattaatggaacaaagtttcacggattagaatttactacgcgggtacttttgcaatggttgagagcagaaaataaattatcttatttctgtgcttttgatttcttccgagtaatacttagcatcttgcattactcggtccatccaacgagcccccggtaggaatcagcccaaaggcaactaaccatcgacaaaccaaacgggaagcatagaaagatagaactccataacttgataggcactttatatttttactcggtttatttcgcaagcaattaagatagatattatgaaaattttttgaaaaaatatgatataacatctgtagcccccaactcactactcaatagagaaccaattgatgtagtgaggtagagaaaagaaaaatatcataaaaaaattgatgacttagctttttggtcttcgccttggtgacggcagaggtggacgatgtggaaacaaattcgtccatcaatagcaatataaacaccagccgtgaaggcagctgaggcaactagcggtgaagatgaagacgcccatcaacggtggtgtgaccatccaaccataaagacgaaggatccaatcgacggcaatgaaggcagtcgtcagggaaagtgaagacgcccatcaacggcggtggaatccgccaaccgtataggtggaaacaccagtcgtcggtgatgacgacagccgacagtgaagacgttgatgcccaacaatggtgatgtgaccatcaaaccgtatagacgaggacaccagtcggctgcgatgaaagcaggccggcggtgaagatgtagatgcccaacaacggtggtgtgaccatccaaccgtataggcaaagataccagtcagcagcggacaaggcggccggtcggtgaagatgatgacgcacatcaacggtgatgtgaccatccaaccgtgtaggcgagggcaccagtcggcatcagcgaaggcgagccggtggtgaaaacgtagaccaaccagccatgtaggcgaggtcactagtcggcagtggtgaaggcaagccggcggtgaagacatcgacgcccaacaacgatggtgtgaccaaccaaccgtgtagtcagagacaccagtcggtggcggacaaggtggccggttgctgaagacatggacaccaacaacggtggtgtgaccaaccaaccgtgttggcggagacactagtcggcggcgacaaggacaggcaggcggtgaaagtgaagacgcccaccaaccaaccgtgtagtcagagacaccagtcggtggcggacaaggtggccggttgctgaagacatggacaccaacaacggtggtgtgaccaaccaaccgtgttggcggagacaccagtcggcggcgacaaggataggcaggcggtgaaagtgaagacgcccatcaacggtggcgatgtccgccaaccgtataggcgaaaacaccagtcggtggcgaccaaggtggttgacggtgaaagcgaagacgcccatcaatgacggcctaataggtcagccgtgaaagcgagggcaccagtcggctgcaatgacggcggccggcggtgaagacaacgtctccatcaaaaatgacggcggagtaaaccaaccgtggaggcaagggcaccagtcggctagtgctgcttttgactcatcgtggccgaggaggaattataccaaacaaatagtttgtgtaagccttggtttttgatcgggctcagccatcgatgatacatgcaaaagtagaaaaaaaaagatcacataaaggaagctttttactaatctcagatgactacatcaagttgatagaaccatactaagaaaacttccggcctttgcataactaggatgcacataggcaaaacacacacgagcccacaaaagactttgtaataagagagggaaagcactaaaatttagggagcaccaatcttcaggctagaccaagcttacaaagttaaattgaaaaggaaaacaccaaaaacttgccagaagctggattcgtggatgattccacgatttgagaggaaaataagtttctgttactagattaaagatcaaaaagatataaccaaataatagaaccggagaggatgtctgacgaggatgtgcatatatacttaattgccattaaacttgtactgcatacatatgcatgtcgccgacttctctgtatgcatgcacgccaatttcttgctagccaaatagatacgggacacaactggaaatatggtcctctcaacgggtgatgatcacgtgtatagcttggcgtcaatcaatcatgttcggcttggaattgcagattggacttgaaactcgccgccgagtggttgtcatcctccctagccgattagacccgaatctgagaggcgaagcttgttggcgactcctgtattttattccatcccctacctggcgcgccaactgtcaaaacaagaattcgtcaataataaaagggggtagcgcacgagacctaaatgtggatggatgcggagacaaggatttagacaggttcaggccctctcgatgagaggtaataccctactcctatttggggatttgaatccgccgggtgtattatagatccgacgatctggttgtgaattatgccccatagagggtctcctgcccaccttatataggacggggggcaggattacaagatagaaaccttaaccaatatagtatcagtttcctaaatctactttacaatattatcaaatcaaaactttaggctgttccataatatataagaaaatgtaatacccaagtcatgatccgttacatatttcatagatataagttatcccctataaccagtcggataaccatgccgtgtgggtatagagtacccataatctccacaggtggaggtgctggtgatcggtggtggctgtggtagagcggaggaggttggaagacgaggttgacgatgttgaccctgtgtgacacttcttcgtcacctgcaactgagccccctagctctgtcgatcccttccgcaccaaaaattggtatcgcactatgccggtgtgcccaatgccaatgcatgtacgccctcctccacagcatcagtaagtctctatccctattatctgttgatcttgtggtgccctcctccatggatttaaatcttgctttgctacagcgcataagtgcataacagagtgttccaatttttgctcctgaaattttttagtggtgattctctcccatgttcatctgattggatctggtggtggcagtacggcactactgatatatgttagacatggatccttatccagccccctcatatgcctaggttgtttcaagatccaatttgcaagaaactttcctagattgctatttaattcatatgctttctcgttatagggatttagctacaaatagctgcaaactgcaatgctcatatatatatatatatatatatatatatacatatatataaactattctacacccggggtatagaatagctattctacacccccctccctccaacccacctcatctccttctaagggctcaaaacccacctcctacctcagtcaaaggctagtccaaggtcccccacatcggtcaaatctcggtcaaacccgccaatgacttcccccaccaccccctctcttcttagctctcgtatcggaacaacgtagtaacgtcttgtttatcgtgcagtaacaccgtgttttacttgcagtaacaaaattaaaattcagtcataatatagtcatgatggatctacttttgataagcactttttttcgaacatcatggtgcaaacggtttttaaaagtagtacatgatatgagagatattgcccttcaaagatttgttcttaaaaacttaactctccacgagcagtaatagtatatcaaaaggtgttactagtgcatgttttgcgttactgcaatcacatcatgtcgttactacaagatgtagtaatgattataagtttcatagtaacatagtgtgttactgcaattacttgataacatcactacaagaatatggggaattggttcggtttactcgtttgttttaacccatatatttttttattcctggtttactacaatttcatcacgatgttactgccaaattaagatgcagtaacgctctatatgtactacagtaataaagtttttttactacagttcttggatagtgttattgcataaacatgcggtaatgtgtaactatcaagtggtaacgtgtatctgctgtgcagtaacacttttacttttgtgcagtaacaagtatatggttagcatctgagactttgaacccatatatttttgttccaattccaggtttacaacaattcaccacaatattactgtcaaaagtgcagtaacgtcatatacatgcacgcagaaacactatattggagggtggagaccggttttcttgagaagaaggaggaagaacgatttcttgaggaggggagtatgtagatgcattttgaagtttaactctccacatgcagttgcactatagcattatggtggaaacggttttaaaaaataatgcatatcttgtgagatattgcttttcaaatattggtattttgaactttaaccctccacatgcagtaacaaaatgtgtaatatgcagtaacaggggcatatacatgcagtaacatggtttgaccaaatgtataaaattgttcaaaatactcctacatcaatcagacctcgctcaaagccaactacagactttacctatggcccacctattcaatcttcatcttgtaaaaatgacataataaaactacaattattgtgcagtaacatagctacttggaagtggtaacatgcacctattatgcagtaacacttctacttttgtgcagtaacaactatatggttagcatgtgaggctttaacccatatatttttgtttcgattcttggtctactacaattttaccacgatgttactgccagaactgcaggaacgtcctatttgttctacagtaacgtggcgtgttactatacttttatgataatgttactactggagcatagtacatgttacgagtttcgtagtaacatatctttgttttttgttttacgatggtagagaaagatattagaattgataatcatactactttcccacaaaattcttgaaataaatagcatcattagatgaattggttagaagaatgtgctttgaactatgaggtcatgggttcaagtctttgaatttagcaatttattttttattttcctagaaaagagaaaaaagaatgttttaaggagaaaaaaaggatcgggaggggggaaggggaagcgagagagaagggatcgggagggagggaggggcggatcgggaggggggagggggaagcgagagagaaggggagagatcaggaggggaaggggggatcgcgagaggga

SEQ ID NO: 8104 - DNA, 85283 bp, Oryza sativa
  unsure (1)..(85283): unsure at all n locations
gtagattttgctgagattatgcgcagggaatttgagatgagcatgatgggtgagttatcgtactttttgggattgcaaattaagcaaacacctcaaggtacttttgtgcatcaaacgaagtatatgaaggatcttttgagacggttcaagatggagaactgcaagccaatttcaacaccaattggttctacagctgtgttggatcctgatgaagatggtgaagctgttgatcaaaaggaatatagaaatatgattggatctttgttgtatctaactgcttctaggtcagacatataatttgctgtgtgtttgtgtgcacgctttcaagcttctcctcgtgtttcacatcgtcaagcggtcaagcgaataatgaggtatttgaatcatacacatgagtttggaatttggtattctacttcatcttctatatgcttaagtggatattctgatactgattttggaggttgtagaattgataggaaaagtactagtggaacatgtcattttcttgttacatcattgattgcatggtcttctaggaaacaatctagtgttgctcagtcaactgctgaatctgaatatgttgctgctgctagttgttgttcacagattcttggcttttatctactttgaaagattatggtcttacttttgagaaagtacctctcttttgtgataatactagtgctatcaatattgctaagaatcctgttcaacactcacgcataaagcacattgatattcgttttcactttttgagggatcatgttgagaagggagatgttgaattgcagtttttggacacaaagttacaaattgctgatattttcactaaacctttggattctaatcgctttgcttttcttcgtggtgaattaggtataattcatccttttggtatggtttgagggggattttgtacctcatggttttatcgagcaataatatgacaatgagaaaaattgagaaaagagagctttgtttatacatatggtattttcttgtacatgctagcaatactttgaaggtttatttgtctctagcatagcatgtatgtatttttgtcttttcatgagatttagattttgtttttaagggagatgatgcatgacacttaaattctatacttgaattaagcaaatatgcaatgttgatgctagcatatggtttgatgtataaatgctatatatatatgctttattgactttttattcctcaaatagttttaattgctcattgtgaaaagataataaaaaatatgaaaaaaatgaataccgaatctttagaaacagtcttgacgattcgatgtgagcaaaataatgggtgccgaattcctggaaaaagtcttgacgacagggacgtacccggaataaaagagaaaaatatgagcaaaaaggctcaagaaaaataaaaagttaaaaaaattctcttggttgttttgtgctaaaggttacttgagaaagagtgataaatgtaataggtatatgtgtttagtgtttatttttcaacctatatgcttgttaagatgttgcattaaaaatcatatgaaatcatgaattttgactgttgattcaagcataattgtaaaatctttggttcatggttatactttaatgcatgattgttatattatagatgggtttatattctttttattgcaacacatgacttgatatgctatatgtatgctaaactcttgaacattaatgaacataattcctatgcttgatgaaatcattgtccaaagggggagaagtaatgtgaaaatttttggatttttggagaagcaagatgaatttttggagagttgttgagaagagcatgtttctggttcaattgggaatttcttactttttaaaaacggggagaagttttcttttggatttttgagcacgatgtgtacatttgtacgaagtgtgctttttaccacttttgtttttatttttccaaacaccaaaacattttttatgggtttgccaatgtgttcatcaaggtggagattgtaaaatcaaaggtgtttttgattattattctatgataaacaattgggcattagagattattggttttgttatttggaatttattcacgaagtggttttggagatgattggattcacaggtgatcgcaggattcattatttcatgtgaccggtcagaccgggctctggtagccggtcggaccggcggtatgcgcgcggtcagaccggccagcccgcggtctgaccggccgacactgtgtcgatttcggtttcgggttgtttgtttggatatccgtgattatttcatgattatgacttctagatggatactagatgtatataatactgttgtttgctactaatgagtcaagttggagatagcttggtttcggaatatggtttctttgtttgttccatgtgtaggtgactcgatgcctcgggagagtatttgcggtgatggaccgggagtcggcttggggataagacgacgtccgtggtggtcagagatcatgcgggatacttaggctagagttgatgcacgtggttgatggagattccatatggcatacgatggagttattgtgtgcgtatgggatgcggagtcaaatttggaaggagtccaaattttgtacgattggttatgtaaagtttctttcttgtactagagggtttcctaaggtgtttaggactcttagtatgagtttggttcgtggctttaggctgcctacctcatgtataaatagagggggagcgtgaggtttccctgtatcgctttggagagcaattgagttgagttttgagttagggtttcgagtttagttgaaatttttgtaaggagtgctgttggtgcactttgtaaacacagagagaatcaataaagtcatcatttactttaagagttcttcgatttgtgtttaccgggtttcggcggtcagaccggcgggagcacggcggtcagaccggcggcggcgacagcgagcagcagctgatctcggcggtcggaccgaagatataatcgcggtcagaccgatggcaaccaggcggtcagaccggcaggacaacttcggtcagaccgcgatccgtcgatttcgagggtaacttttatttccgctaaaagttttcggtttttgggtataccaaccattcacccccctttggttggcttagttcttgtgattcgattctacagaaatttgtggcattgaaggatttaccgaaggtgcgatgcccatttcggcctgtttatcgtgaaatggtgataaacggccgcagctataaggtttttaaggttgccgaatggcttcgggtgcaccccgggcgaaccttagaagactacgatctttgttcattcaagacgtttggaggatatggctcacttttggcgaaaccatcaaaagactgatcggcaggaggcgatctcccagcatcgttacagtctagtctgtgtttcaccctcttctcctcttagggttgtgtatgatattagtagtgatgacgaacctagttcgcctgattattcctaagagagagagaatgtgatcgcgggggcgaagatgtaatttatctgtaagctgggctgtaacgccattgctattttcttgtcacttgtatcattgtaatgggtttgtatttttcgatacatttttatttaaaatcaataaaggtgcgttttatttccttttcgctatttttgcattgtcacttcgcgtgcttttcgttgggtcggaacgtgtcggctcctttgcatatattagcgaaataggttttgacttttcagctttcggcttccgttttcgatccgttttgttctacgttgtaggaagcactcgtgctttccttttgatcgagtgtaacggtgttcggctagttgttctccgaaacaagctgttgcggtttcaatcgtttggcgagcgatgcttcgcctgattcgtttcgcccccctggcctttttcgctgatcaggcgtttgccttggggtttttccacaaattatcaatcgcacaaacaaataaaaagaaggcagaggacatagagattttatactggttcgggccttcgtggtggataatagccctacatctagttttttgtctttttttcattttcatcttttttttctcttttttttcttaccgaagggcttacataacgatatatacatttttacaagttggcgatatgggtgccatccgttctagacataaaaacgcttgagagaggcagcgttctaggaatggtcgaactcttcgccttccagtgtcgccagtcgaaaggaccccgtcctggacttgtgcttgatgaggtacggtccttcccacttcgattcaagcttgccaacggctatcgggttcgccttcttccttaagacaagatgaccaggcaacagctccgtcggtcgaacttttttgttgtaagttgccgaagtgcctatggcatacttgcgcatgtgctcgagtgcttcgactcttaccccctccaagagttcaagcgacacctcgcgcccctcttcgcccccagagaacgtcacccttggtgagttagtccttagctctgttggggtcattgcctcatcaccataaagaagcgtgaacgggctgaacttggttggtcttgtgggggtcgtccgaagggcccaaagaacagatagaattttctctggccatttgcccttcgctgccccctcaagccttttctttagtgcttttaggatcttaccatttgtatgtatggccgccccatttgactgcgggtgcatgaccgacgcgaacctgatttccaggttaagcccttcgcacatttctctgaacttgtcagagttgaactgcttgccgttgtcagtgataaactcttttggtactccaaaacggcaaacaatgtttttccatacaaacttctgtactgcggccgaagtgatatgagctagcaggctttgcatgtattgctttatctcgtcgaacgctgcttggcattcgggtgtccagttgaattttcccgtgccctggagggttttgaagaagagcaaacctctttcggctgcctttgagaggaatcgactgagtgccgcaattcggcctacgagcttttgtacttaacgtacgctcgacggaggcttcatttgctgaatggcatcgattttctcgggattcgcctcgatgcctctttcagaaacaaggaaacccaacaacttgcctgcgcgaacgccgaaaacacacttcccaggattcagtttcatacccgctgcacgcaagttgttgaaggtctcctgtaggtcggacgcgtggttgaaagccttccggctttttacggcgatgtcgtcgacataagcttccacgtttcgccccaatttcttgtaaaggaccttgtacaccagcctggcgaaggttgctctggcattcctcaggccgaaaggcatcctgaggtgacaaaaggtgccaaatggtgtgatgaaggctgtcttggggatgttggccgtgttcatgtggatctagtgatagccggaatatgcatctaggaagctcatgagttcgcagccaactatcaaatccacgagctagtcgatccgtggcaaggggaaatcgtccttcggacatgctttgtttaaatatgtgaaatcgacacacatgcgccatttgccgtttgacttccgcaccagcactggattctccagccactcaggatggtcaactcaggatggtcaatctcttgaatgaccccagccttgagcaatttttggacttcggcttttgctgcctcttggcgatcagcggacatcttgcgtagcttctgtttccttggcttggcatccggcttgactgctaggtgatgcatgatgagatctgtcgaaacacctcctacttcatcggggcctcaggcgaagatatcaatgttcttcttgagtacctctaggatgttctcagcttcttcttcgcccatgtcgccccccagcgatacgagctttgtggggtcggcatcatcaatctgtatcttgattatcttgtcgtgtggggcgggctttggcgcgtgcttcgcacggtcatgcggttcggcctcaacattgtgcactacttatggccagatcgccttttgaagcagccaaaggctgaagccccttgaccacgatcactcctgtcgggccgggcatcttgagcttgagataattgtggtgggaaatggcttcgaacttgttcaaggttgcacggccgaagatggcgttgtagttgtacgggatgtcgacaacgtcgaacaatacttgctcttcgcgtctgttttccgccatgctgaaggctaccatcaactgtgcttggccaagaacttgaactgcttctccgctatcagggcgggcatcttgagcttgagataattgtggtgggaaatggcttcgaacttgttcaaggttgcacggccgaagatggcgttgtagttgtacgggatgtcgacaacgtcgaacaatacttgctcttcgcgtctgttttccgccgtgcggaaggctaccatcaactgtgcttggccaagaacttgaactgcttctccgctgaaacgtcggagcgatgctggtgctggggtaagggcttgggtggctaaccccatcttggcatatgcttcggcgaagatgacatcggccgaagtccctccgtccaccaggattcgccggacctcgaaaccagctatctcggctgagatcaccagaggatcttgatgcgggaacattactccttcggcatctcctggcctaaaagaaatttgctggttcagatactgcggggccccttcgccagccaaagtgatattgtggaccgttcgtagctgcatcttcttttgtcgcttcgacagctggatcggcgggtcggcccttgtaatcacttggattactctgcgctgcgcgtcttggcactgttcggggggtgcttgttcttgagctgcttcacgaggtgcttcgacagctgctccctgctgcggccttggatcttgcccgctgacacgttgccgaatgtttcggcattgctctgtggtgtgtgaagagcgtctgagaaaggcgcagtagaggtcttttcggaccttcttgcggacaggctgctgatggttgcttgcttgctgggcgtcgaactccttgcggagggcttgcacttctttgacagccatcactgccttgcccgcacggtcggttctgaacttcctctagatcatgggggggggcttgaccttgccttggcggttgtccttggatggctggggctggcgaacagcgagaggaggtggttcggcaacttgaacttgtgcttgggcttgggctgcggcgacggaagccttatgatactcatcttgtattgcttgccatcgcttggaatcctcttcgccccttgcgtacccgtcaatgatgcaaagtaggtgctcaagcgtctgtggctccttattggcgatttttcttatgagttcaccctcgagtagaccggtcgaagcggcgtttatgacagatgcctcggttatgtcttgaacttggcaccgggcttgcgagaagcgacgcatgtactcccttatcgactcccccggcctctggcgaatgccgagcagatgttgctgcgtcttcggctcctcataggtgcctcgaaagttaaggacaaagatatcgcgtaattgctcccatgagtaaatgttattggctggtaaattgaaataccaagaacgggcaatgccgtctagagcgagatgtattacctttgccttggtattttcgtcgccatgagccgcttcgatcgcggactcataaatggagaggaattcctttgggtctgtttcacctgagtagcgtgggacgggtgggaacttgaactagggtgggattggacgggtcttgattcccccactcagcgatagccccttttcgctccctgccctgttcacggcaccttgctgcgggtatggcgtggcgaagggcgaaatcatggcttgcgcgtgaggttgggccatggcattcggctgcccggctccgattggtgatgcttgctgagctaccatggatgggtcaaaagttggctgtgaccgtgtcatggcgacctggtttggtgcctggtttgctccgaagcctgacgttggtgcttgcggccgaatggttggtgcctaagaagcattgatgaagttgaactacggtccttgactccacggcgaagctcccagacttggctgattcgacggcaaccaactcggtgcatcatgacttgtattcccctccgggtgtgctgaaggggctatacctgaaatgctatggggttggctgagctgctgaaggaaagcttggagctgcgcccgcagagccgaagccccttctgccattgtttgtggtgcttggccaggtggttgaggttgtacttgtgtaacaccctgcctccaaaatccgcattagtccactctacacgttgagcggacccactttcgcatggtatcgtgcttacactttcgtcctcgcttcgtgtaaaagggttaacctggggataccatggttggagcaccaaggcttataagtaggccttcacccacctaaacttccaaggtggtactaaaccaccactacacatccacttctgggccacatgggccaaactcacactactaacaggcttcaaacgggttggggtgttacattcacccccccttaagggctgacgccccggcagctcaccgtttacacggcagaggcctagaaccccctccggtgcagaccatggccttttaccccccttaagggctgacgccccggcagctcaccgtttacatggcagaggcctagaaccccctccggtgcagaccatggcccaaagcacatgcatcacacaacggaggtttatgctctgataccaactgtaacaccctgcctccaaaatccgcattagtccactctacacgttgagcggacccacgttcgcatggtatcccgcttacactttcgtcctcgcttcgtgtaaaagggttaacccggggataccatggttggagcaccaaggcttataagcaggctctcacccacctaaacttccaaggtggtactaaaccaccactacacatccacttctgggccacatgggccaaactcacactactaacaggcttcaaacgggctggggtgttacaacttgggcagcgaccggctgagcttgcagctgcacgtgaggggccggatgcgctgctgcggtcgatggctgcccgacgaagtacattggcgcttgcgcgacttgtggcggaaggggctgggtcggcacttgtggatagacttggggtgggacataacctgccgaatactggaggattggtgctgaagcgaccttggatcgtcttgccgtctcgtatgcttgctgttgttcttgcatttggcgaagcatgtcttggagtcgtgtcatgttctgtcgcatggcttccatgttggcttcggtttgtgtttcggggttagggttgacttgggcttgcacagcggtgagcgcagttggggccgctgccgactacgacggagcggcttggggcaccagcagttggcttgtcaaaaggatctccgccctggtctggagtgcccttgccgccgcagccgccttcgccataccagccatgttcggcacctgcacagaggtggcaggggccgaaggcggtagtgatggtgcaggtgcggaagctgatggcgctcctccatcttcggcaacgggcgccgaagtctctgctccctcttcggtggccatatccgccctgacgtcactttcctttcgccttgtaaccttctccttcacgaccttcttcggtggcattcgctctcaatggtttcgcttggaggtccccacgatcgacgccagctgctgtcgaaacgacaaccgcatacgtcgaaagacgtggtcactcaacagtggttgggaaagaagttgtcacgtcctgataaatttatcccgaaataaaaatcattctctaaaaggaataatagaattaattaaaaatcgaaaagaaattgacaaacactaaaatacgtacaagaaaaattcgaatatggtccagagaatttttgttaaattctccttggtctaaaaggagccctcaaattttacttgaattttcagagcaccggaaataattattaagcaacaaaaacaattaacaaagtttactaaaaagaaaaactaaaaataatccccctcctccctttgggccaagtctggcccaaagtcctccctctctctctctcggcctgcggccaaagtcctcacttcctccctctctttctctccctctcctcctctccctccttctcttgggcctcctctccttcccctcggcccagccccctcctcctccctctctcccccaggtcgcctctccctcctctcctcctgggccggccgcccggcccaaaccgcgccacccagccgcccctcccgcgcacgcgcgttgcacgcgcgctaactgcgcgcccgaccggtgggtcccacccacccggtcgtctccttcctcccgcccggcatcctttctctcttctctctcccgtgaaacctagcgtcgattcctcccctaaatccacgcgaatcaatgcccttccttccaaattgattggggggaattaatccccgttccttccacatcaattccccctaatttcccccttgattcgtgcccccaatcgtcgggaacgcccacgccaaccccggccaccttccaaggccgccggccggcttttccgccgttgttccctcctctcccgtccccggctccctctcctaccctataaaatggaacaccctcgctccgttctatcgttttagccccctcctgcgctctcccgtggcctcaccacctctccccgcagccctcctctctctcccacaccgccggccaactccagccgccactgccgcgccgctcaggtgcgggctggccgtgccgtcgccgccagcggcctcgcagccgcctcttcttccccggcgtcgcctccgtttcgcgggaaattatcggagcgacgtcctcgcagacgaccagtggtgtcgccaccactccaccgcctccagccgcctgtgccgcctcgccggtgcagcggctgtcgtcatcgccatcctccctcaacgtcgccgcgtcgccctccacccaggactgccctcggtttcgccggaacgccgtcgcccgtggcgcctctccctcggtctcgccggagttccttcggcaacccctttcgctgtgccagcgacgcatcacctccggcatcgcagcggcgagccagcgacgtcatcctcagcatcgccttccctccatctgaacccctccactgtccatcgtcgtcgtctccgttcgtcctcgtcgacgactcctccggtcggtcgttcgtcctcaccggctcatcgtctcgcggcgccgcctccgtcttcggattcacagcggcgtgttccatgccgtcctcgtcgccgtgcagccactgccggctgcccacgtcgcctcctcgccggccccggtcctcgtcatcgtcgtcctcccgtcgttcccggtcgtcgtggcgttcgtccctccgtcaagccgttctcgttcgtcgtcctcgctacgtcaagtgccgcagccccgtcattgtcttcgtcctcgcctctgcgtcgccaagcgttgcgccggccacgtctcgcctttgtccaaggatcgccaccggagtcgtcccctcgcctttcgtctccatcgttcccggccgtctccgccgcgcccgttcgtcgttgtcgttccctcgcctcgtcacgtggtggtaaggatctctctccctcgtcgccctcgtcctcgtccttttggtgtcgcccgtgcccgttgtgcggttgtcgaccccggtacccgtgtactggtgtcggtagtcgttcgcttgtgcgtgtggtgaccgtgttagtgtgcccgctcggtagccgcgtggtttccacgtgtgcagcccgcgtggtgtctagtggagtccgtttgtcggccactcgcctcggttgacacatggggtccgcttccgtcgacccgtggaccatctctgtgtacccggtctgccgtggtcccttaggttgacaagtggggtccgcatgtcaacggcgcagccttcctgtcttttccaggctagcgcttatacatgttttatagttgtaaaacctaattataataatccgcaaatctccatataacagcattaaacttcggatgaccatgcattggtcatacgagctccgaatcgatccgttcaagtctcctaatgtttgttataacctaaagaaccctgtgctttatttttatgtattgttattgcttctttataggcttgtagctttgcttgtgtgcttcgcgtagcttctgtcgttcctgagtttcccgaagcgtggttcgcggtcgtcgccgaaggttcggaaggccattatctttgagcaaggcaagtcacatcatccttgagcatattgaatcccagtttataaaattattttgatttaaattattgcattatcgctttattcaaattcccgcattatcactattttatttagccatgcctatttatctttgttatgaccttatcattgttgttattgttattattaccttgttcaccctaggataaacaaaactccaactagtgggtaccctattcatggttccactagtatgaatttaggtagatgcttcgctgactaattaggcaacattaggtggttttataactttagactttgggaattctcatatcatttggacactatggtatggttggcttatgttggaattggacacacacctccccctctattcaaaacccccaaaatggttttaggctgggctcgaggtccgtggttgggttttgttagtcgtacctcgggtactataaggattaagctcgggcctctgttggaaagcactaccgtacttccacatgtctagtgggtaaggcttagtttgtggctcagtctggttataaacaaaggtacacggatggagatggacgaagtcgggggtcgatggacatctctaggacaaataaaggctacacgagctgcggcccggtagtcgagatgtcatggcacagggctggtgtcctgctgctaggagctcaatcctgcctgcctgtcccggaggttccggctgtagatggggctgggtcggtacttttgtttatggctaggatgggttgggaactatgtgacgtcttccgtccgtatgccgtggtggtatgtggcacgtggttacacgtgaggatgatgtgtcttgtgggtaaagatgtacacctctgatcagagtataatctattcgaatagccgcgccctcggttatgggcaagcctagcaatgtacccaagttagtgttttaattcttaaaacctgcttaactactaaaatgtggaatggttggcctgggttggcttgggatgagctgggacccagggtcgggttgccagttcggtctgaatcatcgtaggccttgaattaaggcaggttcgtgggggtttacggccttgattaataacactttgtagctctaggatcatctttataaaatggctttgggcaactaagtgacttttaaatgctgtttactgcaaaacttaacccctatattattaccccttgcacccccttgcattaatcatgcatctgccggtgtggcttgctgagtactgtggttgtactcattcttgctcaatctttcccccccttcagtaagagaagctttggagaagaagtcttaggtggagtcctggcttataccccagttgagcgcctgtgaagatagagccatagtcccgctagtccgctgctgtttatttttgattgtcaggccttaagtgcctttgtaataatgtaaatattatcgatataataaagatgtgtcttttgtatcatgtttgtgtggtgtaccccgacttttcctgggacggggattaatacactagcgttcgggaaaatgcatttttctcagtcgcgacagaagtaaagtgtattaattagagaatttttcttcgggatccccccattacatggccctatgagactatttatagctcctattacaggttcttactactagagttttggttatacaggggaatttacatggttacccttatgaaagggacatttacatgggtacatagggtaattgaggttcacaggcccctgatgggccgtcgggcgatcgtcagctcaatagcccctagacttgatgggcctgaaaggcttcttcggccctcgcgggggcgagcttgctttggcgaagtcgtctcccttcggcatatactcttcgccctgcatccttcgcccaagaggcctctggcttggcagagtacccgtgcgatccctcgcctctcgccgtccttgttccatagtcttcgtcatggggggacttcgccccgactaactttgacgtctcgggcttgaatccccactcttcgtatagctttcagcagattttggtcgaagggcctcatgccataccaccaacaatgatatccatcaaaactatccaaaatgcgagaggcagattaccatagtaactctcggtaagcacttggctgagtgagttgcaagtactgttcatgtacttaatgatacctaaggaattaatttatatacggagaaattaaacatagtgcagcctgttggtctgtggcgttgtgctcattttttcagaccaccaccctttcctcgatcttacttgggctagcgctcttcgctggtccagcgaaaaggagatagcagtcgagagtcgagatcgaaggcctaattatttttagagagcaatggaacgaacattgatgggtatagatcagtcatttaattaggtgttgttagctgcagtttagtctcatgagtttaattatgcttgtactccatccgtttcataatgtagcattgtccacatttatgaaagtaatttttataagactaatgatgacaaaactatagaaatcttttatcaaacaatgatttatcataaaactatatatttatagcaccgaagttattatagaactacatatttgtggtgcagtactacagatttaataataaagttaccacaaaatcacatgttgagcatcaatttaatcagaaaacttggatgctaattattcaaacataacattattgctagggatttaaaccctaaattttgtagttttggaataattttattattattattaaatatgtagtcttaagatatttagcctttttactctttttaaaatttggttgccctcatgggtcggtcagtgaaacactgcaggatttaaacgacagctagagctataatttaccttatcagatcaagtaggtcctgtctgattcatggttcgatgcttgaactatcttaagttcttgacacacatgaacgttacaaaagattagtatttggtgtgtagaagggtcaacgccaagccggttaattagtgcaacaaactatgtgtttgcttgcggcacgattgcagagagcacaccatcgtcatggcatgaacacaaacagacccgtaggcttaatcatgtgtgttaggtgaaattaacttgatagatttgcagttcattatctgcaattgacacgataaattacatccttaaacctgctggcaattgtacttagataatggtagcgtatcctcacagatttagcacagctagcaaggcgggaaggaaacaagaaagcattgggatgccatcatctgtaaagtacacagcacagtactgaatcaatggcaatccatccgttgcctcccatgtatgcctattgtctactgtactaaccaagaagacatggaggacaagtccagcgcatgtacgcatggtgcccaagaggacagatggaggatcagatcatggggcaggcacatgcatccacatccctcaaaatcatgcccttgtctccagattcccgggcttggctgttaatgcgtgagttgtctgaagaagctcgcatccctccaaggcaggcggcatatatacagttcaggatcatccatttcttaatgctacttcatcattctgatctccaaaagggcctttctcatcaggacaccgctggtgatccccatccgtgtctcagatttatcatgctagctgattggagtccattgtcgcacgtggcgacgatcgggtttcttggaaagctgggggaacattgttggtgctgggtcactaataatttagtttgataagaaaagagatggagagaaaaattaagccggaaagggaaggtaggacatgcaaacatctaagtagaattattctgtagttcacatgcaataagtgcgcgtcatttttcaaatatcgaattaggtggattggaattagcatcactaattaatgtgaaacaccgtttatagtttaggttgataacaccaattaattactaacatacatctcccgtcagaaaaaaaaaacaaagaaagaaagagggggggggggtcatgttattcagttagagaagtgtgatacctgaaactgaatgtcatgttcagtttcagactttaagaggaggaacagatcatcaaattaacttgaagcttaagctctccaggacgactgcatttactcatggaagtcgacaagatccccagatccacaatggttataaacaatcttgggtggcaattattaatcagtcatgtcattcaactagattgagaaataaaagaaagaaaaaagggggtccgtactgttgtagtatattcctgagtgggggaggggaggtctgtgatgtcaacaagttaggagcgaggagcatgattccagggcaggcaggcatgcacacatgtgaagtgccttggttactttagctgttcctgtctcttggttcgggtgattctttcttcctttctggtgtagtgccttcctttaaatctatttctggatagatacaacacaagatggatgcacacatatttatagcaagtgggggttgctatgtctccctgcttttctagtctgcttgacattttgtggtgggggcatcatccctttcactctcaaatgcttcagatttcagtcaatccacactgtaatccccattgctagtatctctctctcgctctctctccgcctttaaaataggctcttgtggattgttgagaaagttaagtgcccctgttgcaaggttctttgaggcttcgatcccgataagcgttcgaactggtcggcctccacctattgtgagtaaaagccactcaattcctttctcatagtttccattttccttgcatccatctataaagatagctagggtgcaaaattttatatggttggtttgttactgccatggcagaaaaaaattgagcgtatgcatccatcgagagagagagagagagagagagcaatctgttgatctcgcactgtattttgcagctgtgatttggcttcaaagccagccaaaaaaggtctaattctccggccacaagaagatgtcaaggtacctgaagcagtacgagaaggaacacatgaagatggccatgttgaggcaggaggagacattcaagcagcaggtaagataagaacaccactccatactgaaacttccaaactcttgcttccttatccagtaccgaaccttcaggcctcaagcaaataacagcagctttgttcaggttcaggagctgcaccggctgtaccgagtacagaagctactgatggacgccggctctgcaatcacaatgcaaggcatcagttgcatacctgaagacgattatcatgcagaggagaacgaggcagggtcgagcaggccatggcacaccttccctgggagcgacaatgacaagccacaggctcacactagtgttcttgaagagagcgagctggacctgacgctagcgatcgggaggacgacgacgaccaagaaggaggcgccgtcgtctagcgtggactcgaggacgagcaactcgtcgtcgtcgacggagtccggcagcaccaactgcagggcggtgatgccgcaccggccatctcggttggggtcgtcgtcggcggtgaaggttgttgctggtggccccggtgttgggacgacgcagcagcatttggacctggagcagcaggacgcgctgaagcagcctccttggctccaccgttgtctcaatttggcacgataagaggatgtatagcacacaacttcttaatttcttgccgtgtcatccctttactattctcaatcatgcttgctgctcgccctcgcatttctcgatcgtttgtcctcactttacttcacttttttttttacttcttattttttttacttccccaccaccgtcatgattaagaagtcgcgctcagcaggggaaagaaaaaagagtcgtgcacccggagccgacccgcttgatgattccaagccttatcgttttccttatataaaatcagccgctataaaaatttaagtttcagacttacttttgctgttgataactagccggcggctacaagtcgtcggatagttattagcgagtactagttggttggcaagattagttagcttgctgcttgctccaccattataatttgtgagatataaattataaatttataattgaattagggctactacctatctcgggggtctgaatcaacacaaaaattcgttgtctttagattactttaccgcaatctcacgtatagcttagtcccaacgtccaccatactatatagataccgtagtcaggtataaactgttgatagtagcgtgccaagtagggggcttgatgaaaaaagtttcgacgagatgggtacaagagacggattttctaacaatggcctctataatcagcttggccagggcggtccaacccagctgatgttcactcttctgcatgttggatccgtcacattcccagtcttcgctgttacgtcgttgttagtatttcttacgatcacagacaaaatccgcaagcgcacggatataccgatgtagcacttctcctacggagtattccaagggtatcgaatccaagagaacatgtgtggtcagatcttcctccggttcatccaaggacaccaagcaaatgataagccaggatagagaggatttaatagtgagaaacattgttagggaaagcttaattttaatcctaatgcaatatttcaggcactggcaacccgcagttcccagatgtcgctctactacgtacccggacagggaggacttaagtgatctcgagggctgtcaccacctctacacccacctcaaacatactgtgggatacgcagcaattactggataataattacctaaacaccacgtctaagcaattactatctactttagtgtttataactcactaaagcaatcattatattttagttgattatagtgaacaataatcccgtatgctacttcggaactaaccaagagataattctcacaagataaatctaaattactcaagaagaatattatattgaattcacagtaataaacagaataaaagaaataggggaagattactgacaactccggaattcttccgactcctactctactcccttccttcctattctagtatacaatatagtacaatagagcctcttataattcagctcaagcttggaagtatgtgtgagagtgaataaagtgaggtctatttataggacaggtatgacggttgtgagaaggggaaatgtccgaactgccccgcaaccgtctttgggagagcatctggagcgtcgatgccaaaccctaggatcaacggcgatcagaggggttcgcccgaacctaggctgggccctcctggcctggccttcggtctatggactccctgggctcttctctatccatttctcagagttttgggttaattcactgatgttttgatgaagttcacaacccctccttgtatagatatataattctcctcactttagtctaggtttcctcccaacatcagggtatatcatctacatacaaatatacaccaacacttgtggaatatgtgagattaagcacctatcactatgttggatgttttattatccgaactttatgcagatgttggcggtatagaatcgacatttaacagccgccaacagtcgttgatctaccatccgacttccaccgagaacaaggagccgactgcgaagtctattgggtttactcccacatcggtaattgaggatgggggagcactttttaaaaggtggagggagtcctcacccatcagactagttttttgggttgtgtaggcctgagacctaaagttgtggctctggttgagcctgtggtggagcaggcccaatatgaccgggtggcccatggttggtggactgggctgcgcactctaacaagtaatatcagagtccaggtttagaacctggaacaatttccatgggtcacatgatgggggaggccaggtaacaagtcttcagggtcacatgggttaatgtgacataggagattgttgggcccgatgtgtgacgacggtggagattgttgagtttagtctcacatcggtaattgatgatgggagagcacgacttaaaaggtgggggcaatcctcacccatcaaactagtcttttgggttgtgtaggctcaagacctagagttgtggcttcggttgagcctgtggtggagcaaactcaatgtgacctgagtggcccatggttggtgggctaggttgcgcactctaacaaagtccaatcacaagattaggaagaagtggtgccccattaacaaaacgagttctcactctctagatgggtgcagtgttatgctgaaggacaaaactggatgcaacggttgcaaacttgatgatactcaacgcatctcctcatacaaattatgccccatcgacaagacctgagtggcccatggttggtgggctaggttgcgcactctaacaaagtccactcacaagattaggaagaagtggtgccccattaacaaaacgagttctcactctctatatgggtgcagtgttatgctgaaggacaaaactggatgcaacggttgcaaacttgatgatactcaacgcatctcgtcatacaaattatgccccatccacaagacaaaatgcgtactttgacagggtttaaggtattcatcaaagttgtcgaatccatgacctcgtctacgtcggccagttcttctcccaagcattgtctgatccactcccgatgacatcaatccatcaatttgggatcatacgatgatatgtcagatgacttagcttgtttggtcggctatctgggactagacccccatgaaccatctattctccatagtctggatccgctcgagtcctaggtctcaattcataccgtagggtgaacatcgttgagatcgtggacctagcgtcccgtgacgacattgttgacggtcgttatcgattagtttcgaccgtcaatattactaaaatagaggagaactagtggtgcttgcaatgcatatatttgttagaataataatattccattagtattaggtatactaaccttttgcagagaatgacaataaagtggaggagaatcgacatcaactcagacgataaatcaatcggacgatgtcgagaaccagacttatgtatgaatgggccaagaactcaaaaataacacgacacattgggccaaaattcacaagtctacggaggaggacaacaaaggaggccgccagccaaagatgggctgggttgggccagcccatggtgtttcgaccgaaccccccatagctccgtttgatccagggttctcctggacggctgagatggctccccaatgacggttagagggtattaccgacaattccaaccgtcacaaccgtcattgggaggctataaaaggagctctcatcctcacttcactcacacacctcaagcaatagctctctcatttctctcaagtttagtttagtagtatctagctggtggaataggaatagagtagaaatcaggagtccggaatccttaggaagagttcgggtatggctctagtagcttttctcttctcttttgtaagccttgtacttttactagaatactcttctaaatatatttatggtattgaaatactttccgagtatatgagtacctactttacattatgttcatgttatgctgaatatacggctagcttatctgggagatgctttggtgcgggtatagtgtttccttatgcaattactctatgtcatgacgatgatattagagtagtacgtggtagtttagacgtggtgtctagattacgggatatcattatttagggttatatattgcggatgagaggtgggccgctgatggtgacagctcagtacgggtattcctccgtgccggtatataatcctaagttaattccctgggagggtattcctccgtatttagccccggttgtatggtcatgacgggctgtcgtaaggaactcagcagtcaggggtggcttctcgaagtaccaggagggtatcggatagagggtattagctagtatatcggttaactagaatgtatgtatactatgtatattaaaagtataggaattgatttttgaagtataggaatagattttctctcttttctttccacttagcttagatgatatattatgagaatgagtagttaatgcttgtgtgtcactctacccttggattatcttaacccctacttagaatatgattatcacaagtaatatataaattattagtcaagttttctctacatgatcttcccacgggataaaataaatacgatacccttggaatactctcaggtgaaatgctacaatggtatatccgtccgcttgcggatgaactctgtaaccataatataccagaagtatttctgcgccattgttgggaattatatttctagtaatatcgttaagaaataccaacaagcatttctggtgccgttgccggggaagatttataatagtgattacttgaactaatactttatttttacctttgtataatcattttcctttgcaggataaaccttggttgtttttactttttgttctgaaaacaggttagtgcatgactggtttcaatttgccggaaaacttcaaagaaaatccagaaactttctttcggagcgttaggccgcgagtcgttgctccgcagaaaactctaccaatagagaaaccagccataccggcgccaccaaccttcaagactatggctaacaagactctccgcgagttcgctgctttctctgctgacaatttggccatttggcagctggtcaacataggggacgtggatttcgacttgaagtccagcctcatcacgatggcgccggctagctcattttgtggcaagcctaatgaggatgccaatgctcatttgcaatagttcctggagatctgtagcatgtacaccatcaagggtgtcagtcctgacgccgtcaggctaccactgttttcgttctcccttctcgggagagcgaagcaatggttctatgccaaccgtgctgctgtcaacacctgggataaatgctctataacattcctctcgaaattcttcctgatgggcaaaaccaatgcccttcgtggaaggatttcatgtttccagtaggcaagcgatgagtctattcctgaagcatgggaacgtctgtaggaattcgtggccgcttgtccttatcatgggatggacgactggctgatcccggttgacttcgtggtgctggacatggacacggggaaggagacaccgctcatcctgggacgcccattccttagcaccgcgggagccaacattgacgtgggaacggggagtatccgtttccacatcaacggcaaggaagagaagtttgagtttcaaccgaggatggaacaatgctccatggtcagaataaagtacgggctgaacccagagaatattcaagtggtcgaagtggagccacccaaaatggacagcctggtgaaattcatgcagaatttcctagagaaggaaacaacgatgcctaggaaccgttattggaagacgccggtaaaaccacccataccagccaagaagatagagcagccgactcagaagaagccgtcttccacaccaaagccaaggaatgtgtggaaggagaagccaaagacgcccgctccatcacctccggagacgggtggaaaatccacgaactgaactggatggaggtacagtcttgcacgtcggactttaaatgacacgaccttcaccaacaggtaaattggtatgtatccgcatatttgctttcaacaatttgaatttttgtatcatcacatgtttgaatttcaaagttgcatataggatttttgaattttgaggaaattcttcaaatgaatttttcagagcaaaccaaaataaaattttcagtgaaaattcgctgtgccacgaccacactgaccgttggaacccaacggccgaaagcggggacggttgggcccaccatgggttcggccaaacccattggttcggtcgaactagccaggccaacggttggctgcctccttcattgaggcaacggctagtgggcctcacaggtcggttttgaccgttgtgggtgcactacttaagccaaccggccgagagagggaattccaccccatttcaacacatcctgaacgacatcgacctcgaccttgtcagtgatcgggagagacaagcctactacatgctgagcgaccgggagtatgctcacacacgagaatactcaccggagctgctaaaaaagataggtatggatgttgaatttcgtactatttagaaagcggttggttggcagagatttgctgtggtagatgagcctggttcttgtttgcttactttgcaatttttgtgcactttgaaagaaatagaagatggaatttcctttcgctttttccataaggagtacacacttacatgaaaggcttaagtacacttcttggttttcacgattcctgtaaaatcgatctctagaaaggaatttctgggttcgagaaaaataggttttgggaaaatatttctggtgctccaatttgcaagaaacctagaacgaatgatatccataatcctacacttaggctcatgcacaaatggattgctatgactttgtttcctagaggtgatctaaggcccataggggagatgaattgattatcatgtttgccttggttagaaagatcaaaattgctcctgtgaattgtatgataaggcaattgttagaaagtataaagttctctgctcctgttgagtgcacttctctgattactcggatagcaaaagggctaagggtcgttagcgacgtgttgatgaaaaacacgaggcctaggagatctgcttaactccagtgtaggtccaaactcgccttcgggtatgctagcatgccagttgatttgatcctgcaatcaacaagaaataaaggcaaagaaaccatggttaaatctataaatgatacccgatcagctatgtgccgatgacatatcatttatccttgagccgatgtcatgtgtaaatcgatcggcagtcataaataaataagaaagaactatatccactcgatcggctgtagatattaacaatatatattccttatatcgatatatatttaaataaagtgattgggatagatcggtcgtcatgccgagacagtataaatcatttagatcgaaatatatattaataataggattatatatgttgatagcatagccgatcaaatggatctagcatgtatcggctaatactatgataccactctatactaagatattaagagaagtagaatatatcaaacaaaagtctaatatacttaaatgcaacaagatcataatataaagggtagatttaacatatcaatgaagcatatggagtaaatatagttaaatcaggtaagatcggctgaaactccgatactaccctaatcggcaaccagatggcaggctagagattgatattctaagcacgacttaatagatcaaactcaactgatgcagcattaagtatgaaaacaataacaatatctagacaatcaagcccatggaagtttcatagagtggtggatatcctatataatctaagtcaacatcgatgtttaacctaatcggctgccctctaccgacagatgttagccgaatgtaggttatatagcgatattgccagagattatgtaagatatatgataactcgacgaattacataaacaagatcagagtatcataaagatggaagcactaatcccgagaacgtaagccgtcataacaagttttacctcttgttgaagatcgaaaccgatgcagctcaacccgaaagcaagaactcgtcgaaataaaactaaagcaaaagggtggcgatgcgccgaaattgtattgaacgtgtgtgttaattgattacatggggttcggggtctatttatacccgaaaattacaaacaatgtccatatcggacacgactcttatctctaacaaactctaaaataccataagtctttacggcagacttttgcccaaacatatctctaaggaaattacataaaatatcctaattaatagatacaattgccttctcaggactctatccatgtgtggcaatcatcttgaagcatatcaactcaacccgatgtcatacaccaagtcgtattgtcggaatcggccgtatcacctaacccagtctgactcggacttagccgatcccaatcgtagccaatccggactccagccgattcttacactattctcgaatcgatcttcgtctttgactcagctttgacctaatcctcttttccgatgctgatatcaccaaattcggtcattaatacaagcccgccaagtccggaatatttggtaatgtttcggatttgctgtacgtcaactccaagcaagtttcgcactttgccgttttctgaccgttactcccatgctttaaatactaaccgtcaccctcgagagatctcgcaccgtcctcttccgtttttactgctgaaacagactttgccctctctctctccggcgactccgccgacgcaaaaggcgattccaaagcgattccatctcctgccggacctccgcctgcgatgatgtcgtcctccgccagcccgtctaccgcgccatcagccgagtacgccgaggtaagttctcatcggctagatcccttttcttcgtaagaattcgatttccccttccctcatcttgtttccttcttctcgaatcctttggatttgcagcacctctccaatttagttgcgattcccagcctgtcgcatgaaaaccattactttcttggtccaatcggcaacttagaccctactgatttcatcatcggcgaaaccaacagaatcccctttagattagccaaccctaacctaggtcactggaagaatacttttaagtcttggccatctcttgagaaaactactcctgagaatagttggaccacatggtacaagcgcctatcagctagcaagcgaacacattgggatgaaatcggaatcggccaagcgcttgcccttaccatagccaattcagctaaggatgaacctctgatggccgccgccacttatttctggtccaataccatcaatgcctttctgttcaaccaagggccgatgactcctactctgattatgatcaccggactagatgtaacctcatcggccaaccctatgagcatgaataccaagaatcaatttgattttagaaccaaaagcataggtggctggtctttctatgtggccgcatacatgggccaaggatctgttactcctcgagaacatgtggcctttctactcatgtggctggaaaagtttcttttctgtggatctagctgtggtcctacaaccaagtggcagtttgcagccgaagctcttgagtcaaaacgagaatttcctctaggcaaaatcctcctcggctacttataccaaatgctgaacaatgcatcggccaaaatagccatcggctcagtggttggagcaggtggaccatggtggctgctacaatcctagctcaacttaatggtcatgaaggttgtcaattggccatcagtaacagaagccgaattcccaaggctggagccgattgtagaagatgatggagaagaacgaacccatcgtaggtgcatgtcttatgtagattatgcatccacaccaaccgttgccggagcaaaactatcggttgagctgctcaaggattggttttgcagtgtcacgcctcgaactagtcccaaccggaactagcccgtgacgctccaaattaacctgttaatcaataccagtcccaggaaacagtgctggtatcacaggaagacagaatatcacagcaacagaggtctctttattatagagtaggagtacagtcatgttgggctgcggacagatcccgagctcacaactgcattactaaatggaagcggaagccaagacttggaccaaacatcacaggcgcgacttgggaactaggccgaaaccctaaaactcatcgtagccggcttgctcctggaagaactccatcttcttcagcaactgggggggggattatttatatagagcaagggtgagtacaggagtactcagcaagccatgggaaataagtgtttaatgcaggcttcaaagaaaggccgttgtttttgcgattgattttatttaaactcttttctgaaacaactaagggagtgcttctcaaacgacacggatgagacagtgcgtctcatccggtcggagtatgtgcaatgtttcagtcttttgaattgatcaagattggtacccggccaacagctttcaaacggccacccgggcctggctgatcccatcagccgtagattttccaaacatcaaacctattccacaacagcaaatttcacaaggcagtagtcaaacaaaactacgctaggaatcacctcacatccgcccatgaccatgggcacggctgttcgaacagttttaataacctctgcagagggggtacactttacccacacgacattactaacccggatcatccagcccgtgcagaacggccacgactagagaccttaaggctttcatgacaaggcatttcgaaagccgacacaggttcaccatatgccaacgagaggggtcccagaccaacaccagattaggtcccagaccatactgtgccaggaagcccaggggtcctccccgacaccaccccggcgaatccacatgtctcttagcatcatggctcccccgataagctagttactcagccaggggtgtcccattccacccatgtggtcgtacttgtcttatgttcggatgaaattccaaggaaacggtccttaagtgcaagagcgggaaaccgtacacccggtacattccccgatccgcagttttggaaattcatttagtttgcaagcaccgacccaggtgtcgggttttctaagtcttttgtaaaacccaagttttacccaagatgtttctcagattttaagtttgaaggcgaccgtcgatacccgtgcagagtgcacgattaccgaggcgcaactaggtgggtacaagcgaacatggtataacaattacaatggaagggtcaaatgcaacaaattaggtaggtccgccaatctgccttgcagacgggacaagcagattaagtgtgatcctatcaatgcataatatttttcaggcaacataattaagttcaaatataggctcaagatgttcaaaggtggcttgcctcgctcgagatcttgagcttcatcctcgaaatcatcgcactgcgggtcttcgggctccgaaactacacacgaaacgggacaactcagcaaacggcgaaaataaagccctattattgacctctaagcatgccattagatagatctcgagatttgaggaattttggaagttgaacggagtcaaacggacttacggttgggaagatattgaatttctaagattattggatttttggtctaaaggaaaaggatttatttaaatcctttttgaaaaagaaaagaaaagaaaagaaggagggagggaaattagactttcctcgggcggctagggcgcggcccaagagaatggggcggctcggccgagcttaatgggccggccggccaaagaaggcggcccaaggcgcgcgcgggcggggaggggagagagccggtgggccgggtccatcccgcgtggtcccgggtgggacccgcttgtcggcgactcggctcaccgtgagcgaggtgcacgcggggcgtgctagggtttggggagggaggcgcggcacatgcgcgcagttcgcggaggacgcggtgcggcgggcccacgcgcagcctcacggctcgcggtggaccgcgcgcgcgagggggcggagggaagcggcggaccggggtctgcttgtcgcggccgaggtggcgccaacgtggcgcctacgtggctgccacgcgggccggcgggaggtagacgacgacgccggccggaacggacggcggacgacaacggcgagcggcggagcgaaccatggcgatacaggcgaaggcgagcacaccgggatgttgcacaggacgaggggagacgagccaatggctcggattcaccgggggatgctcgacggcggcggattgcggcggcggcaaccgacggcgggagaagggggaaacggcgatgaggtcacgaggggccgattcccggcggtgagagcatctacgcggctacgggaatccattgctagtgtcgaattgggcggagctacgccgaacgaggccggtgacgagcgggcgctacggagcacgggcggcgacggtggtgagcacacatcgagcggcggcaacggtcggggcggcgccagctagctacgggaaggctacacatgctactaccgaaaactaaggggaggagatggatcgaggagggagaacgggggaatgcactaccgagatgaggcggggcgctgtgacgagaggccgacgacacgggagtgatctctccggcctcgggccgggggagaggaagaagtcgagcgcccggagtccccttccttgtcctcgctcgtgccggctcctccgacacgcacgatggcgaacggcgacagcgaacagagcacgggaggcggcgacaagaggcgaatgggagaggaaaggaaagggggggaagcttgggtttatatgggcgacaatgtcggtttgggagaggggaaccgagtttggacggtcaagccagcgagctggcgctccggctagcggccaaatcggcgacagggaggaggggaatgacgccggtggaggaagaaaaaggaaaaggaaggaagaaagggggcttgccccttgccactttgggaaaagaaggaggggatgggggcgacgcggcagagggaggaggggctctgcctccgtcccttggtggctagcgcacggagagaggcggggccgtgtcgatgacgacggcgatgacagcggggcggtttggagcggagcgatgacacgggcggcaggcgcgggcaggcgcggcaggcgctgacggcggcggcgactggccgatcggccaccacggcgcgcgcgcgcgggcggcacggcgatttgggcggcatcggcgggaacggcagcgggggcggagagggaggagggctcggcgcggctcacgggcagagcggggagagagagagagagagagagccggggagggagggggagatgggccgagagggattcggcccatcgaacccgagagaggctaaatagacttttgcggagggatttgatttgggaaggatttggattcgggattgaacttgacgatagatcggggattcgagatctgagatggcacggacacgacaacaagcaaagaaacggatttggcaaatagggtttttaagagatagttttcccgctaggcgccacgacggaacgggcgctacaattaggctcttgtttgatatattttacttgttttagtatcctgatatagagtagtatcggagtattagccgatacatgctagatctatctgaccggctatgctattaaaatatataaggctgttatcaatatatattttgatctaagtgattcatactgtctcggcatggcgatcgatccatctttggaagaactagtcccaggaatatccgcaaccacctttaccttatacttctgcaccatagttcccttacgggtttgcataaatgaactcaagaactggttgcgtgcttgctgcatcatcgcttcaaaatccttcttttgatcgggtgtcagcttgtctagagtgatgttcacgatgttgccttcattaacttcagataggcccaactgttgtatcttctcattaacaggaccggggctagccgaggacggcgatgctggcggcttgtcatccatgagaaaagacttctgacttcttatatgtcccaccaggcgtgccaaaagcgtgttaatgaaaaacacgaggcctgcgagatctgcttaactccagtgtaggtccaaaactcgccttcgggtatgctagcgtgccagttgatttgatcctgcaaccaacaaaaaataaaggcaaagaaaccgtggttaaatctataaatgatagccgatcggctaagtgccgatgacatgtcatttatccttgagccgatatcatgtgtaaatcgatcggtagtcataaataaataagaaagaactatatccactcgatcggctgtagatattaacaatatataatccttatatcgatatatatttaaatcaagtgattgggatagatcggtcgccatgccgagacagtataaatcatttagatcgaaatatatattaataataggattatatatgttcatagcatagccgatcaaatggatctagcatgtatcggctaatactccgataccactctatactaagatattaagacaagtagaatatatcaaataaaagtctaatatacttaaatgcaacaagatcttaatataaaggacagatttaacatatcaatgaagcatatagagtaaatatagttaaatcagataagatcgactgaaactccgatactaccctaatcggcaaccagaagacaggctagagattgatattctaagcacgacctaatagatcaaactcaactgatgcagcattaagtatgaaaagaagaacaatatctagacaatcaagcccctggaggtttcgtagagtggtggatatcctatataatctaagtcaacatcgatgtttaacctaatcggctgccctctaccgacagatgttagccgattgtaggttatatagcgatattgtcagagattatgtaagatatatgataactcaacgaattacataaacaagatcagagtatcataaagatggaagcactaatcccgagaacgcaagtcgtcataacaagttttacataaacaagatcgaaaccgatgcagctcaacccgaaagcaagaactcgtcgaaataaaactaaagcaaaagggtggcgatgcgccgaaattgtattgaacaagtgtgttaattgattacatggggttcggggtctatttatacccaaaaattacaaacaatgtccatatcgaacacgactcttatctctaacaaactctaaaataccataagtctttatggcagacttttgcccaaacatatctctaaggaaattacataaaatatcctaattaatagatacaattgccttctcaggactctatccatgtgtggcaatcatcttgaagcatatcaactcaacccgatgtcgtataccaagtcgtattgtcggaatcgaccgtatcacctaacctagtctgactcggacttagccgatcccaatcatagccgatccggactccagctgattcttactatgttctcgaatcgatcttcgcctttgactcagcttcggcctaatcctcttttccgatgctgatattaccaaatttggtcgttaacacgaccaaattgcttttatctcagccgctcgtctgtgtattgatgagacttatctagtgcaagggcatattctgaaacatggagtagatggatctttgatttactttttctctggttgtacaaatgaaatcccgttgccaaatgcggggtatcatttgtacaactgccgtgaactaaccattcccctgcagaccatagaagaatctcgtgcaggtggagcatacagggagacgcgcaacatgacaagaaatgaacgagaaagttcatcatcctcaacacctgtgcagatgtatgaggcaggttgggagccaattggggatgcacccggatggacccaagctccacgtcacagtatcggagtctcaacctgggcaagtgccagtgaggaccggtggcgtgcgcctcatgacatccaatggggggacaatcaaccttccagatcaagtggtgcgcctccatctccaagtgaatggcgctcaagttcctctcgttgggacttgggtgaaatcactaggaggatggacactcttgatatgcagacgtcagagatacagtacaacctcacggaacacatagcacaaacgcaaggatggcaacaatctgctgatgcgcagttcgccaacttcaggaacatgatgcagcaacaggacgatgaccttcaagagtacttccgctttcaggggttcaatccttatcaaggaccctgagcgaaaaccatgcttgggggggggacatctcttccccccactgaggtaacttgtatcacatcgcatattttccctttccaattgcatcttataaaacttgaaaacaacataaaaatttgcaaaatagaaaataccaaaaagataggatatgcttgagtcatgctaggtaagacaagctagttctctttgttgaaatgatgaatagttgctctgttttatatctcttatatatgggttcttggtaagtgctctctcaaaggtcaaatatgagtagccaacaattatctgggaacatgagataaatgagttgcacttgctgatctaagtctaagttattgtgagctatgatatagtaaataagagttactatgatcctgatcctagtttgacttgaattccggatgttttgtttttcaaaattataaaatggaaagttcctcatttgatataaattcctaccagagccaaaaatgtgctatcatgtttaaaccatatacattttggttacttgtcattccattgaactctgtcaaactcttgtgacttgtgtagaaacttctcatgctctatgatcaagatcatacatccacatatatgcagatgccaaactcctacactgggagctaagcaatattccattccatttccttattaccaccaaaataaattctccatgctttcatgtgctttctcctcctagaaagaaagaaaaaaaaagagaggagggaaaggcatgattatgaaaaaaaaaagttatgctccatcaagcatgagcatgatgttgaaaaaaaatgtaatcataccctctcctaatcaataaaagaaggatttttgggagaagaaagtaagcgcaaaggagaagctttttctttattttccttcatgtaccacttttatcatataccacacacattttgcacgatcttgatcttgagtatgtttagtcatctgctttagtctaagtttttgatttagtaataaatgtgaatacaagtatgccatgtttgatccctactgaggtctacatattaaaaccttagagtaggaatcaaaaaggcaacaattggtaaggaattcattttgatacacttggagagactgagtgaatcatttgaggaacttggctttcttttgcaaaatcatttgaaaacttccagaataagagttgaataaatattgggtgattgatgctctaattactgttctatctttcaatcgctcaaggcaaggaaaagcagtgtcttgtgggaatcaggggtaagggtaagccaccgtgccaaagattatttaatttgagagatatgcagcatagtagcaactcctgatcaacaaccaagtctttgtttcctttcgtccttcactcgggacgagcaaaggttcaagcttggggggttttgttgatagtcgttatcgatcagtttcgaccgtcaatattactaaaatagaggagaactagtgatgcttgcaatgcatatatttgttagaataataatattccactagtattagatatactaaccttttgcagagaatgacaataaagtggaggagaatcgacatcaactcagatgataaatcaatcggacgatgtcgagaactagacttatgtatgaatgggccaagaactcagaaataacacgacacattgggcccgaattcacaagtctacggaggaggacaacaaaggaggtcgctagccgaagataggcatatatgctacgggacagtagaggtgggccactgatggtgacagctcagtacgggtattcctctatgttagtatatattcctaagaaaaattcatagggagggtactcctccgtatttacccccggttggacggccatgataggttgtagtaaggaacttggcaacccggggtggactctcgaagtaccaggaggacactgttagggggtattggccacacgattgtatagtaacatatgtaaactagatattgagtgtatacttgaagtataggaattgagtgctttatgtttcttgttccacttagttaaaattaatttattatgaggatttgaacagctttgcttcttgtcactctacccctatattaaatataacccctacttagactttgataaatacaagtaatatatgtataaagtgtattagcaaagtccactcatatgatctttccttgggattaaaaatacgataccttggaatacttccgggtgaaatgctacaatggtatatctgtgcgcttgtggatttacttctgtaaccataaatatacgaggactatttctggcgccattgctgggaatgaatatttctagcaatgtccttaagaaataccaacaagcatttctggcgccgttgccgaggatgaatatttctagtaatgtcgttaagaaataccaacaagcatttctggcgccattgctgcggaagattaataatgagatgactataagctaaccttgattgttttcacttgtgtcgtgaaaatagggtagtgtatgactggtttcaacctaccggaaaactttaacgagaatccagaggccttcttctggagtgtcaaacctcgcgtcgtccctccgcagaagagactctccgaaaagaaaccagccatcccagtgtcaccaagtttcaggaacaaggccgagaagactcttcattaattcgttgccccgtctattgacaacgtgcctgctggcccagctgtcaacatcggagacaccgatttcgaccttaagaacaggctgctaactatagcataggcaagcccattctatggcaagcctaacgaggacgcaagcgctcatctgcagcacttacacggaaaagggtgtcagtccggacgccgttaggctatgtctgtttccttgctcactcctgggaaaggcaaagcagtggttctacgtgaaccgggcgacagtcaacacctgggacagatgctccaccgcgttcctctcaaaattcttcccgatgggatgatgccgcttattttctgcagtgatccatgtggaactaaatgaacagtagatagagcaaagggataagcacttgctggtagcaacttgcaatgatcaacaatattgttgaggcgcattttcacaaaacaataattttctagagtatggcatgaatcttggcacatctaaataagtgaaaagatagtcctttcttgcaaaactatgcatccacgccggtggcaaaatatagtccattggatatagacgatcagaaatttcaaccgttagatcatccacatcaaaattttataaagccccgattgagagacttctatttcagaagggtcctctgaccttcatgtcggtctctgttgtcgaaacgacaactgcatacgtcaaaagactggttacttaacagtggttggaaagaaagtagagtgtatataattgagaattttttcttgggatccccctgttacatggacctagaaggctatttatagcctcattacaggttcttactactagggtttaagttatacaggggaatttacatggttccccttatgaaaggggcatttacatgggtatacagtgtaattgaggtatatgggctcctaatgggccgtcaggcgatcgttggcccaaaggccactgggccttcgtgaggccgaacttgctatggcgaagttgtctcccttcgacatacactcttcgccttacatccttcgcccaagaggtctttggctctgcgaggcacccgagtgattctccgcccttcgccgtctttgatccatagtcttcgccatgtgggcttcgccccaactgatcttgacgtcttaggcttgaatccttactggtcgcatggtttcggcaggtttggtcgaagggcctcatgccaaaccgcgaactagcccctcatgggcaagggtgagataggagcttcgggcgagaccgtgcagaccatgtggtatggtatgtggcgccccctttcgaccgatgctcctgccgaaacctatcttattcctgcaaagaaagtgcgttgtgtcttttcggttggtattgttttgtagctttcacctcttgcggatggtggagttatttttttatttttcctgggccgaaaggaacagtaatgggctttcccttcgtgggcttattactgtgcggctcggttgatgggaatttaccgtttcgcctacccttgcgatacgtggcgctttattactggtgggtaggcgaaccgttgcctgggtgggctatatattctcaccctcttttcccttttcaccgccacacttgtcatttttgccatgcgcactctattccaccgttctttcctttcacggtgccccttgacccctcatatctttcgcccattccctttgtttgccactgcacacacccttcgccatggctcctcgaaagccaaaccccgcttcggcgaaagggcccgatcccggccggattgacaacgacaccacggcctttttggtgatttctctcatagatgatggcgagctggtgaagttggtcagctctggggcgttggttgaggggcaggctttcgccctgggaaggccgtggtaccaaagcccgtcgacaaccggacggtggtgttcatcgtcttttttgaggcggggcttcggttcccgtgcaacgtgttgttgccggagatccttcgccttttccaggtagagctcccacagttgagcccgtcggcgctagtccggatcgccatcttcgactgggcgtgccggacctccgggtttgaatctagcgctgaactctttggcgccatattttttccaccgtgaatttgaagacggtggtgaccccggccggaacaaagaagacgatgttcgggagcatgaacttcaacgttcgccccgagcactccgatctctggccggtgaatgctgccatgtcgaagtgggatcgccactggatggcgaggtggttctatcacaccatccccttcgaggctgggtccgagtcggcgaaggcccttcggtgtcggcgcagggcgattgcgccgaaccggaaacccaagatcgccgtggacggcgccatggaggaacggttcgccttgctgcgcaaggtctgctcccgcatcagctgccgcgacttggtggaggagttctgtatgcttctcattttcccctctcccattcgtggcaagtcgcggttgaccaagatgaagaggtcaacggtttgccgaagctggttcttcctgaggggacgaacggtgagattgcgctttcgctatgcgcttatgtgtttcgctatttttcctggctcgacgcttaatatggctacaccttttattttcacagtgttgactctcgatcaggccgatgccaaagcccggaggatgatcggcgatgtgtcggtcatcgagtacagccagctgctcacacgacaggccgctggtcgggtggaccgggtttacgacggcgaactgcctccccgggcgaacccccacaaggccgacgacgatacagggccttcgcgaaagcggacacacggacaagtgagactggcccctagaaagcaaagggtccatgcttccttcaattctgacgctgatgacgaggacgacgtcgaagagcgtgacggcgaggaggaaagggaggaagaagagggggcggacgctgcggccggaaaggctgcggacgaggcggtcgaaaaccacgccgagacccctggctacactcctactacaagtccagggcataatgacactggggtggagtcgaatagctcccccgttcattgaaagtatttgcagggggcaaaggcgctagttgcgttttcggcgggaaaggtggcgaaggggtgtccagttaagaaggccgccaagaagaaaggactcgtcgatgttgctcgtgtttttagcgacgacgagtcttctgacaaatccccgacttcacccaccggtcgtagcttagatctttcgaccgcccccgttcttccgatcgacgctagcggagcgggtggcagtgccgccgccagggcctcagcctccactgatcgtgtcgtgaaggctgcagctagggtttttggaagccctttgcgtcagccgattgtttcgctgctagtgaagccgaaggggaagggggcggccgtcgaaacatctgcccctgaatattctctcgcggcgccccacttcgcccctggcgatttcgagacccgggcggaacttattccctttgttgagggggtaagcaaccttgtctctcctgtcggcactctgagcctattcaccgagctgaatgagttcgacgaagggtattctgctattaaaagcttggcagttcgggtatgctgttcgctctctcttcttgtttgtctttattttcttcttacagatcccacaactaacatttgctctcttcgtccgttttaccttacatccagattcttgcggctcactgttcgatagagcgaaccgtgcgggcccgtcttgacagatttaggatacatcttcgagccaaggatgatgagattggccgcatgagtttggagatggaggccctcgccaacaccctcaaggaggtgaaggcgcaaaaacaagcgactccaagccgaactggagaaaggaagagaggccagagctgaggtcgatcgccttaaggccgaactggagaagggaagagaggctagagctgaggttgatcgcctcatggccgagcttaaaaaggagaaagcccattcggctgtgctgaccgactattacaatcttactgagccgaagatagaggctcttgacctggaggtcagcaaggctgaggcaagcgctgcggaggagtcgcagcggttttcgcgggagatggcaaaggccaccgagtccgcaaaaacggtgtgccaaatgctccgccttgccctcttcgacatgggtgtgagggtgcgaggagtccccgccgaagatgcctctgcctttgacttttcggagtggacacagcaggctgctggtgtagtttcggactgcgctactgcgtacggtgattgctgtgcacgtgtatcggcggccttcactatgggccttctgcaccagtttggctgtgagcacgtcgccgagttccctaactatgcgaagggggaatgggaggttagtgcgcaggacgtttcgcccgcgctccgcgcgtggtggagcagttctagcagaaggacggccgatccactgccaaggcgtgccttttggagcaaccggcggaggcagaggtggcagaccagggcgaaggtgaggatgcggcggttggatggggtggaggcgatgcctaggatcacccagaggtgtgaggccctccgccctttccttagatttttgtagtttttcttttttttcgtttgccgcaaaagacgaacaatgtatatttggccgatggccccttacccttcttaatgtagctgaaaatggccttttggatatttggaatgtatgactcagtcttagtcattttttatggtcgatgcctttggcgtatgtgcttgcgccattttcgtattacgtaatatttgctctttttcgcccattcttactatgcaatttgccttttgccctgtctgcactgtttagcagggtgttcgccgaaaattgtgcactgccccctctgggaattggcgaagcaaaaacgagaaattcgtggtgttgaagggtctgccaaaagtgcgatgcccgtttcggcctatttatcgcgagatggtaaaatacggccacagctataaggtttttaaggttgccggctggctgcaggcgcaccccgggagaaccttagaagattacgatcgtgttcatacaaaacgtttggaggatatggttcgcttttggcgaaatcatcagaagaccttagaagattgcggttttaacgtttggcgagcgatgcttcagccgattcgtttcgcccccctagcatttttgctgatcaggcgtttgccttagggcttttcccacaaattatcaatcacacaaatagtaaggcgaaaaacacaaagattttatactggttcgggcctccgggatggataatagccctacatccagttttttttgtcttttttcattttcctctttttttttgcattttcgtgccgaaaggcatacatagtgccgaaaggcttacataacaatatgtacatttttacaagttggcgattcgggtgccacccgttctacacatagaaacgcttgagagaggcagcgttccaggaacgattgaactcttcgccttctagtgtcgctaggcgaaaggaccccgtcctggacttgtgcttgatgaggtacggtccttcccacttcgattcaagcttgccgaccgccaccgagttcgctttcttccttaggacgaggtggccgggcaatagctccgtcggtcgaacttttttgttgtaagttgccgaagtgcctgcgacgtatttgcgcatctgttccagtgcttcgactctcaccccctccaggagttcgagcgacacctcgcgcccctcttcgccccaagagaacatcacccttggtgaattagcccctagctatgttggggtcattgcttcatcgccatagagaagcatgaacaggctgaacttggttggccttgtgggggtcgtccgaagggcccagagaacagatagcatttcatctcgccatttacccttcgctgccccctcaagccttttctttagtgcttctaagatcttaccatttgtgcgttcggccgccccgtttgactacgggtgtgcgatcgacgtgaacatgatttccatgtttagcccctcacgcatctctctgaacttgtcaatgtcgaattgcttgccgttgtcagtgatgaactcttttggcactccgaaacggcaaacaatgtttttccatacgaacttctaaactgctgccgaagtgatcgcgccaagtggttcggcctcgatccatcaggagaagtattcaatagccacaattgcgaacttgtacccgtttcgcgccaccgggaacggcccaatgatgtccagcccccatctggcgaaaggccaaattggtgcgataggctgcagctcttattggggcgcagtttagcttcggccatggcgctgacagctttcgcatttcttgacttgctcaacacagactttcagcacggtgggccagtacacaccttgtcgaaacactttggaggcaactgttcttgcggcctgctgtgtgcctctgtgaaacaaattttcggcaatatgcaaagggggtagcgcacgagacctaaaagtagatggatgcagagacaaaggatttagacaggttcaggccctcccgatgagaggtaataccctactcctgtttggggatttgaatccgccgggtgtatattgatctgacgatcaagttgtctcattctcatgccccctagagggcctcctgccccccttatataggatggggggcaagattacaagatagaaaccttaaccaatacggtatcggtttcctaaatctactttacaatcttatcaaaccaggactttaggccgttccacaatatacagggaaacgtaatacccaagtcatgatccgttacatatttcataaatataagtcatcccctatagctagtcggataaccatgccgtgtggatatggggtaccataatctccacagtagcccctgagaccttcacagtcaaaaagataatcttctctcgaactagattactccaaagctgagtgctttaatcatcttcgctatggtctccgaagtacttttaaatatgaagactgtggagggctgaaaaataaagtcaggtgcatcgactagatgcacctaataggtgtagccccccgactatgtggttagctaaacaaactaagcatatagtcaaggaataaataatccaaccaaccgagtggttttgataattgtaatcaaccaagtgacttgatatcaatatatagcatatgcggtgtgaatccctgaataacatgatccgagtgatatactgactgttttgtaaaatatgatgagtgtaacctaaagttggctacatcattgaaaattcacatagcaaaacagctataaagaagtttgtatgttgtgaataaagaaatttccaaagtattgggcatacaccatgcgcacacttctttaacagatgtgcttgagtccataaaagacacatggtttcaccacacctagaaatatatgccatatgtggtataaaatccgagtaaataaactcataaggatttatcaatcgtttggaaaatgaccaaaatatataatcagcctaagccataatattggtcaataaaaatgcacacttacgtggcaaaaagcaatgatattgtatctaatcaattgctttatgaacccaaacagcgccttgacttatataaaaaagtcagcggggagctatataaagcattattgtttggcaccttttaaaatgtattgtaccaactcctaaaaagttgagtaactgcggtataaaaggattttaaggtattgggcacataatcacgcgcacttttgcctaagcaaaaagatgcctaagtccctaaaaaaacgtgacaggccacacctgaaaatatgggctgcagacatattaggcctaggccaaaaaatatgccttcgacaccctttaaaggatcacgcatgtaacatgctcccgagtaataaatctttcgggtgatatagaccaagtgtagctcatatgaatagcttctgatctgagggattatcctttatgggatactccaaaatagatataacaattgaatttcgactggcgcaagtattcggttaataacccatacggggaataataaatagtccagtctttgagcatagaaaatagacccatgatcatcaaattcatgttgcatgtatccggaacaagtccaaattggagatataatcctcacgcttgagttgatgagcccctgagcatatagcttgtccttctgtcatagtcaccattgtccattgatggtagctgatgcagttggcatagagacaagacgaccaatatagagataatattgcccaccagaggtggcaaaaatattggtagtagtgaagatagtgataccaatcaaaagtgatgaagttgcatagccgtggaggcgaagaaaccagtcggcaaccgttaggtcagccagcaatgaatatgaaggcacccagcgataaagttgtgtagccataccagcgaaataattagtcggtgacagacgatgcagctggtgaagaagatgaagatgcccattagtggcgacataatgagccatccatgaaggcgaggataccggtcggtggtgacgaaagccagccgacggtgaagatgtaggcacgcatcaaaggcgatgacgaaatccaccaatcatgaagatgaagaaaatagtcggcgacgacaaacacaaccgacagtaatgatgataagcagcaatcatagatgatcaaatataatgacgaagttgcccatcaatagcagtagagtgggctatgttgaagaggcttgataggatgttgataaagatgacgatgtcggtgatccagtcaatagcagtgtagcagccgatgataatgacgatgactctcatcagcgtttgcatagtaggtcaaccgtgaagacgaaataacaagtcggtgatgagagttgatgatgataaaagtaaccgaaggcgaagacgtagtcgccccttagcaatggtgtaaatgtcagggccgatgaagtacacatgctggtgatgatgtcagtgacaataatccatcaaattggtgttatagctgttgcagatgcttcacttggaggaaagtagatgatgttgtccaactggtcgaaactgagctgattggttgataactctgctctaaagcaaagacgaagataatgactcctggaattgactcgttggctgattaattgattacttcagcttgtcgaattttaagagtcttgtatttgtgtagcccccgactctttggttagttgggaaacaactgaacatagagtcgagaactgtaacttcttgtcgtcgagtagtcattacttgagtgaagataaatattaaagattggaacaccacttgttgtaataaaataacacggcatcatatttggtgacgtatgccgaggtgtcgaaactcttgtagtcgtcatggttggtgaagtagaggcaatagagtttgccgatgccgaagataataaaaatgaagttgctccaccatggtgacaaaattgcatagccgtgatgaagtcaacacgactcggtggcaacagaagcaaaccggtagtaaagacgcgcatttgtgaagataaaagcaccagtcggcggcggcataaccagtcgatgacggaagacgatgatgtccatcagtagttgtagttgtgttgaagatgctgacgcctattagcggtgacggcgatgtagccagccgtgaagaagatagcatcagttggcgtcataacaggccagccgtgcaggcggtgacaccagttggcggcggatgaggcggccagtcggtgaagcggtcggttggtgaagacgtagacgcccaacaacaccagtcggcggcggaaacaccagtataataggccagccgtgcaggcggatgttctgactgatccattcctggagcgtaagagataagcttaaagccatgaatcccttttatgcatatctggatctggatcctacagaacaaacatataggatgagtagtatctgatataaatataatactcgagaaaaattcaagtattttaaaatatttataaatatatatttcttctcttgtcaattttgatttccccgagcagatgactcattacgtttaaacattctgcccgactagtcatagccaccaaacaccgggagtcggcctaagcactttccaaacatgcatatgagtgacatgagttcgtcattaatggaacaaagtttcacgggtcggagtttactactcgggtacttttgcaattattaagagcagaaaataaattatcttatctctatgcttttgatttattctgaataatacttagcaccttgcgttattcggtccatccaacaagcccccgggtgctaggaatcagcccaaaggcaactatccattggcaaaccaaacggaaagcataggaagatggaactccataactcgataggcacttttgtactcagaatatgtcgcaagcaatcaagataaatattatgaaaattgtttaaaaaaaatgatataacatctatagcccccgactcactagtcaacggcgaaccagttgatgtagtgaggcaaaggaaaaggcaaaatatcatataaagaataaaataaatgatgacttagctttattgtattccctcggtgacagcaaaagtagccgatgtgggaacgaagcagtctatcaatggtgacaaaaacaccagtcggcgccagtggaaccaagccagtggtgtagatgatgaagcccattaacggtggcgaagtccgccaaccatacaggcggaaacaccagtcggcagcggacgaggcggccggtcggtgaagacgtggatgcccatgaacggtggtgtgaccaaccaaccgtataggcgaggacactagtcggcggcgacagaggcaagccggcggtgaagttgttgttgctatcagcaatggcggtggcgaggacaagccggcggagtggactcgcggccgatcgaccggaaagctgagacgcctcgaatccatgaccagcatcaatcgcctcaatagtgccgcgtaattatatgcgaacaacaacaaaaaatagcaagagattaatctgacattaaaaatcaatatgataaataatgataaaactaggcgtccggcgctagacgagtagttagcatgagtagatataaaaaattgctcaatggaaaatatcacataaagaggaaaaataaaggcacttagcttttttctcagtgtcctccgtatatgtgttaatggatggacaggagatcatatcggcagcttgtgacagacatgcaatacatgcatgagtgctgcacttccttgcgcgaaaattgctcctattggttggctcacattccacgtcgactccaatttagattggtaattgaatatcaccaggagatttaacgtcatctaaaaaaaacgctggcggttgagaattgatccgttgcttggtgatccgggtagattgatatcgccgaacagattaaaccagatgatggacacggcatgtcatacgatcaagttgacgactgacgtcccatcggaattttcggtggtggcgatgcaagccaaactccagaagagaagaaccagtccgaagatgaaggtggtgctgacggcagccataggagattgaatctgaaacttgccgtggtagattgttgtaatccctcgattgagtttccccctgactaatttggatcaagtcagagaagaggagcttgaagaagttatcgacggaaaggaagtgaaaactcccgaagctaaaacgaagtcggcgactcatgaagttgattccatcgcgctcgttgataggaaactcgacgcagcccctacctggcgcgccaactgtcgaaacaaattttcggcaatatgaaaagggggtagcgcacgagacctaaaagtggatggatgcagagacaaaggatttagacaggttcaggccctctcgatgcgaggtaataccctactcctgtttggggatttgaatccgccgggtgtatattgatctgacgatcaggttgtctcatgccccctagagggcctcctgccccccttatataggatggggggcaaaattacaagatagaaaccttaaccaatacggtatcggtttcctaaatctactttacaatcttatcaaaccaggactttaggccgttccacaatatacagggaaacataatacccaagtcatgatccgttacatatttcataaatataagtcatcccctatagctagtcggataaccatgccgtgtgggtatggggtaccataatctccacagccacaaagcccctggtgtatttcctttgccatttcctcaacttcggcgaatgagatgcagcgaagcaaaggttggagcaccccagatcgatatagttggcccgagaccatcttgtactttgcggctctgagctgtaagctctttgcttctgcttcgtcctccggaagccagccgctcttgaggtaccttatgaacgggggtcgccagtcttctggatcttcgcccagttctacctggtcgattgccataatatccaggctctctatgggcacgcttggtgcgtgtaggacttaaaaaagatgccaggcgaatgcgggcccctacaagcaacagatttcgccaaggcgtctacttcctcgttctggtctctaggtaagtgttcgaccgttatgccggtaaagcatttttccatagaccgaacagcctccaaatacttcttcaatccttcttcttttgcctcaaaggacttatcaacatgacttgccaccaacttggagtcggttcggatgagcaagtgccgaacccccaatgctttcgcatttttcaggcccagaagaatggcttcgtattctgccgcgttgttggttgtgtcgaaatgcagccttgcggcataccgaatcggcacgccccctggcgaagtgagtactgccgtagcgcccgcccccttgtgcgaccacaagccgtcggagtacatcacccagggttgttcgacgggctcaggctcagggtcgaacgccggtgtccattcggccacgaagtcagctagaacttgtgacttgatagcagtgcgagcgacaaaatgcaagtcgaagggagatagctccgccacctatttgctgagccggccagtaacttccttgccccggagtaccacgcccaaagggtactgtgatggcactgtgactttgtgggcctggaagtagtgtttaagcttgcgcgaagccatcaccagtgcgtaagcaagcttttctatttcaatgtatcttatcttcactccttgcaaggcttaggagatgaaataaactggtttctggcctgactctgtctcttggacatgggcagcagtgactgccactagcgaagctgccaggtacagtagcagttcgcttcctggtgctgggcagatcaaatcgggtgggctttgcagatattgctttagctcgtcgaacgctgcttggtattcgggtgtccaggtgaattttcccacgccccggagggtcttgaagaagggcaaatttttttcggctgcctttgagaggaatcgactgagtgccgcaattcggcctgcgagcttctgtacttcacgtacgctcgacgggggcttcattccattttctcgtggttcgcctcgataccccatttagaaacaaggaaacccaacaacttgcccacgcaaacaccaaaaacacacttctcaggatttagtttcatacccgccgcgcgtaagttgtcgaaggtctcctacaggtcggacgcatggtcgaaagccttgcggctttttacgacgatatctggtggtagccggagtacgcatcaaagaagctcatgagttcgcagccagctgtcgaatccacgagttggtcgatccgtggcaagggaaatcgtccttcggacatgccttatttaggtctatgaaattgacacacatgcgccatttgccgtttgatttccacaccagcaccggattcgccagccagtcagggtggtccatctcttgaatgaccccagccttgagcaattgttggacttcggcttttgctgcttcttggcgatcagcggacatcttgcgtagcttctgtttccttggcttggcatccggcttaactgccaggtgatgcatgatgagatctatcgaaacacctcccacctcatcagggccccaggcgaagagatcaatgttttaattgagcacctctaggatgttctcaactttttcttcacccatgtcgccccccagcgatacaagctttgtgggatcggcatcatcaatctgtatcttgattaccttgccatgaggggcgggctttggcgcgtgcttcgcccgatcatgcggttcggcctcaacattatgcactgctctgttgattatggccagatcaccctttgaagcggccgaaggctaaagccccttgaccacgatcactcctgccgggccaggcatcttgagcttgagataattgtggtgggaaatggcttcaaacttgttcaaggtcgcacggccgaagatggcattgtagttgtacgggatgtcgacaatgtcgaacaatatttgctcttcgcgtctgtttttgcctatgccgaaagctactagcaattgcgcttggcctagaacttggactgcttctccgccgaaaccacaaagcgaggccggtgcttgggtaagggctagggaaggtaatcccatcttggcatatgctctggcgaagatgacatcggtcgaactccctccgtcgactaagattcaccggacctcgaagccagctatctcggccgagatcaccagagggtcttgatgcgggaacattactcctttggcgtcttccgacccgaacgagattttctggtttagatattgcggggccccttcgcccgccgaagtgatgttgtggaccattcagagctgcatcttcttttgtcgtttcgacagttgattcggcggatcggcccttgtaatcacttggattactctgcactgcacatcttggcgctgttcggccgggggtgcttgttcttgaatggcttcgcgaggtgcttcgacagctgctccctgttgcggccttggatcttgcgcgttgccacgctgccgaatatttcggcattgctcggtggtgtgcaaagagcgtccgtggaaggcgcagtaaatgtcttttcggaccttcttgcgagtaggctgctgatggttgcttgcttgctgggcatcgaactccttgcggagggcttgaacttcttcgacagccatcacagccttgcccgcacagtcggttctgaatttcctccaagtcatgggagcttggccttgccttggcggttgtccttggttcgccggctgaggctggcgaacagcgagaagaggtggttcggtgacctgagcttgtacttgggcttgggcagtggcgacggaggctttatcatactcagcctgaattgcttgccgtcgcttggaatcttcttcgccccttgcgtacccgttgatgatgcgaagcaggtgttcaagcatctgcggctctttgttggcaatttttcttgtgagtacgccctcgagcagccctgccaaaatggcgttgatgactgacgcctccgttatgtcttgtacttgacaccgggcttgcgagaagcgacgcatgtactcccttatcgattcccccggcctcaggcaaatgccaagtagatgctgctatgtcttcagctcctcgtaggtgcctcgaaagataaggacaaagacatcgcgcaattgctcccatgagtaaatgctgttggctggtaaattgaagtaccaagaacgggcgatgccatctagagtgagatgtattacctttcccttggtattttggtcgccatgagccgcttcgatcgcggactcgtagatggagaagaattcctttgggtcagtttcgcctgaatagcgtgggacgggtgggaacttgaactggggtgggatcggacggatcttaattcccccactcagtggtagccccttttcgccccctgccctattcacggcaccttgctgcggatatggtgtggcgaagggcgaggtcacggcctgcacgtgaggttgaaccacggtgttcagttgcctggctctgattggtgctgtttggtgagccgccatggatgggtcgaacgttggctggggccacaccatggcggcctggtttggtgcttggtttgccccgaagcctggtgttgtttcttgcggccgaaggtttggtgcctgagcagtgttgatgaagtcgaactgcggtccttgactccaaggcgaagcccccagacccggctgattccacggcaaccaactgggcgcaccttgacttgtgttccccttcggctaggctgaaggggttgtacctgaaatgttgtggggttggctgaattgttgaaggaaagcttgaacctacaccgaagccccttctgccatcgcttgtgacacttggccaagcggttgagagtgtgtttgggcagcgaccggctgagcttgcagctgcacgtgaggggccggatgtattgctgcggtcgaaggctgcctggtgaagtatactggcgcttgcgtggcttatgacggaaggggctggatcggtgcttgtggatagacttgggtgggatgtagccttccgaatactggaggattggggcctgaaagtgtatctaggcccctaatgattttgatgattgattacaatgcgattagagaggactaacacttttattcaaacaagtgtgaaggttgttatgtcctcgacatgttgtaatgagatgcataccccatgaatgcgacatcacgatgcaatgcggcaatgatcaaatggtatattgtatcttttaccttgcattatgtcgtactattaagagggataccacatgcatataattggtagaacactagtgctcaaaatgcttcatctttgtgtgagttgaaaaacctaagccaaaatttcaattccgagttgttcacttgtcacaacacttacaccaggtttctttgcaagtttttcaacatctcttgaaggttttggaccatgttttatgttggttttgatagcccacgaaactagctttccatagagtctaagatcttcgaaatcggagtttggagtaaaaagttattgcatttttactggagcaacatcagactatccgatttgaaatcagactatccaatgtatcggactatccgatttttcacaaaacttcactctctgtctttgtttgaaaaatactttcgagtgagtttttctatgtgtcggagtatccgatgttggatcagatagtccaatggtacagagactccgaaatttcatggaacttgagtctctgtttgaggacgaagtttttgcttctaaaatatcggacactctgatttaacatcagatagtccgatgtcttggaaagtccgaaatttcatcgaacttcgttctctgtttctcgttgtcttggaggtttaaaatatcggactatccgatcttgtatcggactatctgacgtgggatgaaagattcccctccaacggccacattttgggggggtctataaatatcccccacctaatctttttctagggtgacccaactcattcattcacattcactttgggttgagcttggtgctaaggtgctttcgatctttgagctctttctccctttctcaaatccctcctcattctttctgtggtggatcttggtggttgtggatttggtgtttgagggcctagtgtgtgtttcactcgatcttgaacactagggtttgaccaagagttgtgtggtgtttgttactcttggaggttgaggactcctagatggctaggtgtcactctcgagccaccgatcaacgtgtggttggccgggagaagtttgtgaaggccggatctcgcctccgcaaagaaagaggtaccccttagtggaaggaggagtgcttagtgcaacctcttgaggaaagggttagtagagacccggctcttagtgagctcctcaacggagagtagaatcccctcaaggatttgaactccgggaacaactccgggaacaacggagagtagaatcccctcaacttcatcgttggtgatatctcttcatcttctctttagctttgcttaattgtgccgctatagatctagctgttgtttgtgctatactcttgtttgtgcactagatctgcttgttgtgattctttagtggatcagacagtctgatccaacatcagactatctgatattttcggatagtttgactgtggatcagactttccaaccctaactcaggtttagcttccgcataaagttttaaattagcctattcaccccacctcctctaggcctaattgaccctttcaattggtatcagagcctaatctcctaattaggcttaaccgcttggagagatcatgtcggaccaaacggggaatggcaaggatggtgaaaagggagctacgttttattatgactatccatccacatcaacctcttatgtgagtacttatagcggcaaagctccgtacttcaacggcacggactatgccgcttggaaacataagatgaagatgcatttgaagtctattaacccatctatttggagaatagtcgaaaagggctatgttttgcagaaacccgaggatcccaccaatgaggatgacgagaacgagcattagaacgctcaagccgctaatgcaatacttagcgccttgagcggaagtgagtttaaccgcgtggacggcattgagagtgccaaagtgattcgggacacgcttcgaaattttcatgaaggcacggatagtgttcgcgagtccaaggtggagatcctcaaagggcaatttgagaggtttctgatgttggatggagagagcccaagctacatgtatgaccgtttgagcaagatcgtcaatgagatcaagggaattggctccaaggacatgaccgatgaggtagtggtcaagaagatggttcgagcaatcattccaaggaactctaccttggtaactatcattcgtgagcgtccggactacaagactctcacacctcatgatttgcttgggcgcatccttgcccatgacatgcttgtgcaagagtccaaggagttcatccaatacattaaccaaagctcaacgacaagcatcaagaaggaagacttggcattgaaggcaaagtaagaagaagaagagagtcgcaagagcaagagcaaggcggagatcgatgatgaagagatggcactcttcgtcaagaagttcggcaagttcatgaagcaaagtgtcttcttcaagggaagttcgtccaagtattcccctaacaagtcaagtggaagacacttcgcaagggtgtgctatgtgtgcaaagagtccgggcacttcattgtggattgaccccacatcaaggattgcccccacttcaaggaagacaagaagaagcttgagaagaaggagaagcacaagcatagctgaacgtgtagagatgtagcctagagagggggtgaataggctttcctgaaattttctcaacaatcacagcagttaaattaatagggctcggaacctcctggtgatgaacaccggaacatccgggcaggatgagtagcccggaacttccggagttcttgagctaggaacttccgagcagcagagataaattaaaactgagatgaaaaacaggtcctagcaagggaagtttaggcacacagaggaacaagatgaagattgcagaatatcagcagattcacacaaagatcatgcacaagagagacaaagacgattttttcccgaagttcggatcacatgaatcctactctccgttgaggtgctccaaagagccgggtctcgattaaccccttgcctcacttatgcaaagatctcagaggaggtccacagccttcaacttaacacttgttggcggatgacatgaggctcttcgaccagatctgccgaaacccgtggcgaaggctatggagcaagaacggcgtgaggtgaagagtcgcacgagggccttgccaggccaggggcgtctcgggcgatgggtgcaaggcgaagactatctgccgaaggaagacgacttcgccatggcaagttcgcccccgcaagggccgaggaagcctttccggcccatcaagcctaagggccggcaatcgctagatggcccatcaggggcccatgagaccctataacattatgtacccctgtaaatgtccctttcataagggtaatcatgtaaattcccctgtacaatctagatcctagtagtaagagcctgcaatagggctataaatagccccctagggccatgtaatgggggatcctaagtgaaattcaaaatttagtactcaacatccttcgacgtatgcagttgtcgtttcgacaacaacacttctaggtcattttctagaattgagtgaccaccaagatcaaactcaaaattccttctagaaaaggccacaagtgcaagttgctctacataggacaacctctgaaaactcagcacaagaatctttactcacttatctcgtttccttgtggaggtgaggaaaaccctcacaaactttcccgggacatccacaagatctttggaagctcacgggcgacacctaaccgtctaggagaagatctctgagagtatccaaagtgacagcccacaaggtatccaaagtgctcaattaaacgtaatcttcaagccatctccaaaacactcctacactctcatctaatctctcaatctcacaagatagactacagatttgagtggaggaagcaaaggaagcttgggagtggctagaaaaccctagaacatgacagaactgaagtggaatggccaaagggtgacctggggacgaaatccatatatataaatgctaggtgacgtcatctagccgttactcacaagtttgaactggaaacctgccaggaggttccgggcaaaagtgccaggaacttccgggcagaacttaggaatttttttgtaaataaacggcgcccggaagttccggccagaacctctgggtagccctctctgtcccggggtgaaaatcatttttcaaaaatgattccaaaaatcttttgactcatggatatgactaagagcactttgtataccctagaaccacacttgaaacccctcttaatagtacggtttttcctaaactcaatttcgaaagtgaaaaacctagtctaatcaccttcggtgtttttcgcacttaggaacattcaaattgggaggtctccttgcattcttagccatcaaaacttggtttgggactaaactcctatgaataaacttgataaacacgtttgtcacctttaaccaccttgtcattaatcaccaaaacccactagggggtttaagtgcatcttcaatctccccctttttggtgattgatgacaacatggttaaagcaaataaaaagacaatagaatttaaattttgaatgatgagagaagtgtgaagctccccctaaagatatgcatataaagaactagaaatgaaaacattatgcataagatgaaggaaagctcaaaagaaacctcacactacccttatcaaagaagagatgcagatgaaagtgcttgaatgattagtgatgcaaatagaaagactagatgacatggcaatcactcaaaaagatgaaaagaacacaatcatcacatcaaaatgcaacatccatatggtctaacttactgacaaaaagaataataaagcatctaatagtcattacatccaaccataatagaatacgattacatgtccataagagagggaaaatagaggggagatctgcttggccggaacctccggatcacaggacccggaacttccggccaaatgaccagacaacagtcaaggcagcaaaaaagatttaaatgacccccttcaattcacaatttctccccctttggcatcaaggcaccaaaaagcaagaaaccatgaagagaagaagaggatcactcatctccatctccatcggagggaacaatctcggtatcgtcggagagatgagattcatcggactgtgcaacggtgtcaccctcatcaacatcggtgggagcatcctctgcagctgcctcggcgtcaccctcatcaccatcatcatcatcatcatcagaatgggaagattcttcattgaagaaggtggatggaccttcaccggcaacgttgcgggctgcctcataagcctcaaatggatcaacatagacctcatcctcagaatcatctgacacttgcttcccagcctctcttctatcttccttctgacgcctttcgatcttcttcactttcttggcagtcttagcacacatacagaaaattgcctgaagagccttcttgatgggagaagaactcgaggaactcggtggggcactagtagaaggaccagctgaagtacaaggaacagatcgagggaccactggagaagaggaaggtggagcatgagggcgaaaaggattatggcgcccatctttgatgtagaacaccccagtgattgtctcaatcatcttcataatgaaaggagcatagatgcaactccgcttaggctcaagaatggtgttggcgatctcataccaaatcaacttcatcacactaaaaggaggctgattgtagcgcatgtgactgagaagatgagcatgcttggatggcaaagcagtagcatctccaacctttggaagcaaagaccaacaaaaatggagtacaacaccttgtagttgggatgcaatccatgagtagatcccatgcaagtcctaggtgcatcctttgcatacatgaacttggttttgatcatggggaggggtgcttcactatgaatgttgggcctattgagatcctcatcatctaaccccaacatctcagcaaactatgccatggaaatcttgtgcctaacaccctcagtcaaccacttcacataaggggttcccttccttgtagtaccaaagaatgttttcacattgaactgtgcaataacttcctcattccagtcatactccatggcgagaatatctccaagattcttgttgtggcacacttgcgtcacttggttgaacacttcattgtttttcttcctcatgtaagcccaatcaatccacttcatcccaaccactgaattctctctagccataatcactgagatataccaatccaattgagtgaatgtcctaaagcgaggatcctgtgactcctcaggctgtgactctggatcaatcaaacgatctcttctacacttggcaagttgatgaaggtagttggacttgggtcttccaatgtggtgcataggagtggtgtcaaaaacaagagtcttgtagagccgaataggattctcacgagatcctatagggaaatcatgagatgccctttcagccccagaactgcgaccaccacctctcccccgtcctcttgtattaggtgcatcacttccttgaccactgtcagcatccctaatctgaacaggacggttgctggattgccttgtaaacctgggagaagtacgagtgccactgccactgccgccctcaacaactttctctttacccaaacgaccacgaggaaactaaataggaggactctcatcaccggacacatcctgagaggctttctatattttctcacgagtcatagtgcttactgcaacaggaatcaacaaattggagtgcagtagttaggcaaaaattgagagaagcaagaatgacaggctggctggacaacgcccgaaggttccgggtgcaagaacaccggaacttccggccggcaaaaatgaagaacagaggtctcaaaaatagccagtgcatgtgaacaaatcctatagatcggtgatccacaagatagcagaaacaagactatccaagtggttttctccctaggttcacagatttagagatcgggataaaaatacaatgaactgagagagggaatcaaaaagtgctaccttgagagaagaaactgcgaatcgatcacaggaagaacctcccagccaccaatgtagatgaatccacggagaagaatcgaatttgattggagggaaaagaaaatcgccactcggggcactgtagcggcggctagggctggcgttggggagggagaagaatgaggagagagactagggtttctaactccccctgagtatatatactccccgacacccggaggttccggacagggaggcccggaacttctggcctgacagataaagggcagtcaggcccaaaaacaagaagaagatgagaatccaacaaggggaaataaagaactatggacatgtagagacttatgatgcatatgaccagccaacaatcaacattatataataatggtcaatatacaccacaagaaggggataaaaaccaaattttcaaaataaaaggtacacaaaggattttgcaaaaattttcacaaaaggggtttttggatgaaggcgaatgtttgagctttattcctggtatcaagatcatcttctaccaagaagtgatctcaagacacaaaagctcattttttttaatttacattttagtgatacatgtttgactataaattagctaaccacccatcacctaatgttgcgagaatctaagatattgagctcactcctaagctcacaaaatcttttctcatctaaaggcttggtgaaaatgtcggctaattggctttcggttctcacatgtgtaaggcatatgtctcctttggtcatgatctctcaaaaagtggtggcgaatatctatgtgtttggttcgagagtgttgaatgggattattggctattttgatggcactctcattgtcacataggagtgtgatcttggtgaagttgtagccaaagtcttttagagtttgtttcatccaaaggagttgggcacaaaaagaaccggcggcgacatattcggcttcggcggtggataatgcaatggaattttgcttcttggaggaccaagaaacaagggaccgcctgtcgaaacaagatttcgacaataataaagggggtggctatcaagctaggaaagtggatgggtttggagacaaggaattttatacaggttcaggccttcttattcaagaagtaatactctactcctgtccgaggatgattccgccgagtgtattattgattgtatgattgggagaaaaaagaatcgtcccgagaggaacccggacccctccttatataggggaagggatccgtattacaaagtacagtccatatcctaacggaatatgggattgtagataaaatacaatcgtaaccgactaggatcccgggtattttcttgacatacaagtttagaatctaacccgagtcctcataaagatattctatctatatttggtaccgtatatccagctggaatataaccgccatgtagatatggggtaaccataatctccacagtagcccccgagaccttcgcagttgaccaaaatagtcttctcgaaacaaaaaacaataatccgagtgcttcaattcaacttgcttcggcttgccgagtgctaaaagactgtgaagggcgaaaataaaacatggtgcatcgagtagatgcacctaattaggtgtacccccgactatgtgattagttgaaaaactaaacatatagtcaagaaacgagtgattttatatcgaagcatgcatggtactcaataaaatacccagccgactccttcttacttgaatatatcaaggacaaaaaatatgaaaagggccgaatgataaacactcaaaaggtccaaaaatagatatatttggtaggaatccgagtaagaaactcttaaaatgatccaccaaatatgataaagatcatggtaattaagaagttcattagcctaggctataacccttaccataatcaaaataagcatataacatgctaggagaatgactactaataaactagtcatctcaaattaacccaacaacttttgtagcctaaaaaagcttacaaaaatggtataacacctttctgtcgggcaccttttcatgtgcatcataatcattccaaagaattattgaatcgcgtaaaaaagcattttaacagcatcgggccacatcattgtgagcacatattgccaaagcaaaaagcgcctaagtccctagggatcacaacgggccacgctaaaaacataattgggctgaaatactgtacaggcccaggcccattagtactcccaataccctaaaaacaccgaagtccaaacattgtttcgtcttccccgctgagactctcgccattccccactccgtgctacagtacagaaccgcgccgacgaagctagggttcatcaatctgctccaacccaccctcaaaaacttcacgaaatttctccccacgtccaccactccgattccccattcctctccagccatatctcggaccaaattaaaacatccagttcacattcatggcggaagaaagagaaagcttcgagagtcagtgggcgccctccgatgtgacagaagataatctgaaggagatggtggcgcacggcgttctcccagcgaaggagattatcgggtggcgaccggcgttcggcgaagcattcccgacccccgacacacacgaaatcgtggtatttgctcatttcttctatggcggattttctcttctaacctcaagattcttccgggggattctgaacttctacgggattagcttgcatcacttgaatccaaactccatagtgcatattgccaaatttatccatgcctacgaagcttttctgggcattaggcctcatttcgccttgttccgccgcatcttcttcctcaagccccagccaaacaaaagcacaccgtgcgttgttgggggagctggtttccaactcagaggaaccttgagccaaaaatatttctccatgcctttcaaaacctcaaacaaaggctggcatgcaaactggttctatgttcagaatcctgagcgcgcactccccgagtactgctgtcttcctccagtttaccaggacacatggaactcattgcctatgggagatgaagctgctcaggcagtggaattgatggaacgcatgctaaaactgaagtaacaaggtttgcaaggagaacagatcactcggcacttcatcaaaagtcgattagctccaatcaaagaaagatctcgcacagccttcgaatttgacggcaagcatgacccaaaccgtgaagacccagattctcttgacttcaaggtcatgaaggaaatgatgtataagatcatttcaaacgccattgttgtcagctactcacacttgctgccagtcgtaccgttcaatgcattcaatcctcctccaccggtacgtattcatacacttcaacctttctcaaaatatgatcttgtcttcttgttgaatcagttaacaatgaaggatattacactcaggaatttgctttgatgaagtcggatctcccaatcgctcaacgccgatctccccgccaccaaactgggcaagggagtggaggaccaagaattcggtctgaaactcagccaagtgcttctgatccagtcggccagtcagattctcgaaagagcaagctggttctaagtgacgacgaagccgatgataccaccaggaggcctggagaccgagagacaaccaagaaactaccaaaacaggctactccaaggaagaaagcatccagtcgccctgcgccaaagatcaggaagtcttctaggtataactcatataacaatctctcttgcattgatgcgcatccattgcggcaataatactgataatcaaatttgcaggaaaccatctgatatagatccgtccgggaaagactctaacccgactaacgtggacgcaagttcttccaaagaaaccggaccaactgctgaggatcatccaagtgacaatcagccggcaaccgataatgtagaacccggtgatcaacccctgaccggaaaccagtcggacacaggggcaagcgaagagattccagaagtcaaaacccatgcagacaaccctcgtggacaagacgccagcaatgaccggagatctggatctcctttaaaagcatccgagtccactcattgtctgaaaccatgtcgacccaaataactctgaccaattgtctaacctttgttagtggatacattagggccaatgatcagtgatgaagaagaaattccccgcatacaagcagccgaaggttcgtgccctcccattctggtcaagtggtgggatgacaacttgcaacctcaaggaattgtaataaaccggcaaaaagaagatgaagaggtatgcctactgaaaaaggcactaaatcaagcgactcgcattgtaaatgtaagttccttaacgcctgacctcagccatcttgtttaccgtctggctcgagcgctgattaaactgctccgcaaaggattcatcttaggaacgaggcgaaaaccgcaaccctagagaaactagttccttatcttggaaccttcgaagccaccaggagtcaactgcacgaggccagagaacttctgtaacatcctgaaaattcaagacaatgaaaatcacgaaaatttcgaactttttaaaacttttgcatcatgctggttgttatgattgctattacttgccaaactgtaaatgatcaccaagaaagtaaagaaaagaactacatttaagcaatagatatgatttatgggaatatatttaatcctacaaataattatgcacaagatattaaaatcaaataaaagaaaagttattattaacctattttatcaaatattaaaatatttgaataatgtaggtgggtgccataatatgtgtacacatgaaatgatgatcattcaaataaactgagctctctgtatatataatagaattacgggagtatttaattcgatatgtagatcgattttgcaccaagttcctaattgcatttagggattgaaatttgatatattaaacccctccatataaaataaactaacatatagataaattgaggtaatgtgctattgtgttaataacggtctcattagaaaattatagaatctttaataaaccttaaatattggacaatattaaattttgggcaaattcacatttgaacacttaatacggtcacctaaatgcttgggagtaaatacaaatttaatttgcaacttttctcaatttataaatcaaccaaaaccctaaaagaagaaaaataggaaaactttgaaaaatatataataataataagaattaaccctaattaaaaattcaaataaattatataaataaaatatgagtaatattaatctagaataaatccattggttggaatgacacaaatattgggtaaacttcatttatacaaaatctaggatttataaaatcaaatttacacaaaaaaataggctaaaatggggattaaataggaaaagacactattcatcggccgccaggtgttcgacgaggtcccctaacccagcccctcctctttccccctctctctgtcacctgccaccgcgccgacgtcgccatcgccgtccttgccccgcgctgccgttgccgtcactgcctcgcgccgcgcgccgccgctgccacgccgccccgcgcccgcgccccacgccgcgccgcctgccgtcgcgttgccgtcactgcctcgcgccgcgcgccgccgctgtcatgtcgtcctgcgcccgcgcgtcgcgtccgtcgtgtcgccgtcatctcgagccccgcgccgccctgtcgccatcgccgcgcgccgagccccgtgccgcgccgcgccgtcccgtcgccgtcgtgtcgacgctccgccgtcgtcatcgcgtcgcccgtcgccctcaccgcgcgccgagccccgctacgccccgagccccgcgccgccgcgccgccgtcgcgtcaccccctcccttctcttccctcttccccttattccctctctcccctataagagccaccgttctcccctctcctcactccatgttccccctcctctccctcttccccctctccacgcaccgccgcgccgccgccttcgagccgccgcgccgccgccctcgtgctgtcgtgccgccgcattcgtgaccgccgcgccgccgcctcagtgtgccgcgccgtgcgccgtcgtcgccgccgccgtcgtcgccaccgccgccgtcggtgagccgctgccccccccccctatttgtcgccgtgccgccgggtagagagggagccgagaaagagagaggaagggagaagccgagggagagaaagaagagggaaggaggagagaaaccggaaaagaaaagagagagaaaggagaagaaaagaaaagagagagaaaggagaagaaaagaaaagagagagagaaaggagaggagaaattagagtgggccccacgtgtttagtgaatagtaatccccttcttaatcattattagttgagtctattacatgtgggtccgggtggttaaaaatctaattatagaagttttatggtctcgagtttatgacatgtgggccccacttgtcattagctcttcctatttccctttagaaaataattcagtaggaaaaaggaataaacccggggtcccacttgtcaatggatatgtcttggattaaaaataaatctattatgaacagtagcttttcgcaatttctcggattaattcaaagttgaatctttacactagcataacttattcattttaactcggatttgagtgaaacttgaacctaaattcatctaaattcataagctttccaatgatatataattcactattcaataaaatatatttataattataaattaatcaatatcaaatgattagataatagttaacctaaatagtgtgccaataaataaaaaaaaatggatattgtacagtagcataattatctttaatatgtcttgtcactgtagcaaccaaataaattagttataatcaatccttcaaattaatgggtgtaaaggaaaatattagtgccatttactagcctatgtccaaatataactaattccatgacttataaattatttacataaagtttagcctcatattactttatcctcatattttgtaactaaaatataaacacacatagatgagtctttaacttgtttaggagagtaatcacagagctagttgtatttggaccacttaaaaaaattagttgatacaatgtcatgtgaagtagaatatatatatatagtcggttgatatccattagttaaccaaatagagccatcttaaaatcaacatgtattgtatagcttacagtaaaaagaaactactcaaatatatgatccaataataagatattgttgcttacacatatactatacatcccattatagtggtacggtatagtattaatttgcgtattgcatatatgaaattaagagggagtgtatgacaaacatgtatattagataaatactagttataaatcttgacctcatataattataattatagttcaactgtaaattaggattattcattgtaaaattatgtgatgggataatctgtaaccataatatgattaacctaaacaattctaacatacaaagcaagggtaattgttaacctttataatttattttgacaagtaaaatatgtacataattaaaataaagcctccatcaataaaataataatacaaatgattcacagtaattatttgaccgatccaaatctatccggcaacaaaacctctagtgtataaccgttctatttagatagatgcatgaatagccatttgctagactaaaccacatagtagccagatacgtatctcattcatactacattggctagctcctaaatagaccaccatgataacagaccaccatgataacagaaagattaagaaactttagcccttagcatgttggaacccattagcaagcgcgaataatatgagcaaccttaggtttaacctcaacaaatatattttgtttgtgcatatttgattgttgcttgaatattggtttttctcgcgtattatagactttgtgtatcggttagtcgtgaggcaatgtcagcaacttccaggaggtgaagattgatcaagaattatatcaagaataaggactatcctgagcaaggcaagtcatcactattccttgaacatgttgatcctaattgcgaaattgttttgtttacaaataaaaattgcatgcaatgatgaacatcctacttgtgattatgccatgccttggttattgtttacccttaaatatttgcaaccatgtttacgtatgagtccctagtcaactatgacaattgcttagaaatgctattctagaatcatgcatactcatatttatcaaatgctatatgcttgggcaattaccttcgggaaggtaattgagatgcggcatgtggagacatgagcgccacattgccatgatgttgatgacatgatttgtgaaaggagaaataaaatcaaaacaactgtttaagactggggcggacggaggatttgggtggtatctggaaaaggctagtatcgtccccagtcaattaaggactgagccatgaagttaagcatgaaacgacccccgtacaaccgtactactcgaatgggtatagacctagcggattagatagccgagcggaggcagtatccctgcatagatggttcacccctgagtgaggcaggtgcgctacgatgggacagccgttgaggtagggccgagaggcgtgccctacatcggtgttgtcattggtaggactgccatgagtgtgtgtgagagagaacttaacttgaaccataatttaatatgtgtgtgagatttctctttcccgggagcgccagaactcctctcactgctagaaacatggacgcctagagtgcatgaggatttaagttcatggagcgggtactgccaatgcgaggttatcgaaaagctttgccgtgacgcgtctcatgtgttgggacgaggcgcatgtgttgggcagtcgcggagtgcgggtaaagtgtacatccattgtagtgtgagtaaaccaaatctattcgaatagccgtgctcgttgttattgagcaccgggacatgtattacacttggctagactctaaattctttaacttgtgtgggatgggatattgcatgatgatttttatgctgatggagccacttcctgagaggcgggaatgtggacgccctcagaaaaccataacgactcaatggcgggaagctatccttgggatcataatggatagtggacagaaccgtcgttgtttaatgtgaatattggtactaaaatttgatcagtctatgctaggtcttaggcttgtgaaaagaattgcaaaactagctttatgcaaaagaacctgaagccattccttgaaataccctctatcatatgcatcgttgctgtggtggcttgctgagtacggttggtactcacccttgctaattatatatcttttaggagagtgttgaagagaaacccttgtcggtacgcttgcgtatccaacaagatgatcggagtgcggtcttgttctaggtctcgttccccagtcgactgcctgtggcatgttaaccggacccttatattatttggtcttccgctgttgttctctgatagttgttggcctacctggccctaatgtaagtatttaactcttttagcctgaattcattcgtgatatgttgtgattcaactatgtatgtgtgtaccaactactgatccagggattggtacggataaacacagatgatttccgatttccaaaatcgggggtccacaacttgccaagaagaatgaacacgatctgagggatcggattgctgagctccaggagtccaatttcgaactgagtggctcatcaaaaggttcgcgcaaactctgcccaactaatttgttatctctgtaatcttgattaaccaaagttgatgtagtgcaagctgccaagatatcttaactagagaagcagatccatactctggaaaatgacaaggcagagctggcaaggcagagggattcggctataaaggaggttgaaggtaccaataatcaatacctcaaaagccattatcttatatatgctgattcattaatgtgaatctgttgatgcagaccgcaagatcaagtctcaagcacagtttgatgtcttagttgacaagatcaacaatcttgaaggagccagggataaagtcgctaatgccgctactcccctcatccaggccatgttcttcaataacgccggttcaagtacacttgatgctaccgaaatcttcgacaagctgagagtcactccagatacttatttcaagaacatcaaagaagctggaagtatgggagcaagtctggcgttggcgatgaccaaatccctttatccaagggttgatatggatgccatcgatggctttgcagacgggacgagcgaagaagctgctcttgacctcatcagtgatgcgcagaaagcnnnnnnnnnnnnnnnnnnnnnnntagttgagagattccaagatgtcgaccttcggccgacttggtctgataagtctgatgatgaaaaaactgatactgattgatataacaataattttgatgattaatgatgacggaggcacaatttgtacaatactgatgaatttatgctatgcttgatatcttaacttagttcctgatttcttaaaagtttttgtcaaaccttgttgatcctaaaacccacaaaagttgttaaaaaactttcagtcctcattgactaagccaagaaatcaaacagggcaatgatatatcaagtaagcaaattgaattgatataaatcacacaccattattattatagtagccccctgactgaaaacttcaaggaaaaacttgaagttagcagtcaaagaggaaagatacaaacgaaatgcctaagtgtaaaatcaacgaaggtgttcaatattccaagaattgttgatgagagtaccgtcttcgcgcttgagtcgataagaacccggccgagtgacttcagcaattatgaacggtccttcccataagggagataatttatgccgatcctgtgttgtttgaattttcctcagaaccaggtcaccgactaaaaaggctcgcgatcgaacattctgattatgataacggcgcaacccttgcaaatatcgagtcgactgaattaaagctgcttctcgggcttcttctagtcgattgatgtcatctactcggccttcttcatagccctcctcgttgaagttccgaaatcatagttattcaaattccacttcactcggcaacattgcttctgcgccataaaccaaaaagaacggcgactggccggtagcccgactaggagttgtgcgtaaagaccaaagtacggacgacagctgatctacccacttgccagcgtagggacgtagtcggtcaaaaactcgtgctttgatcccatgaagtatcttgccattagcgcgctcgacttgtccgttactcctagggtgtgccatggaggcataacaaattttaatgccgaagtcttcacaaaagtctttaaatgctccgccagtgaattgagtgccattattagtgatgtccgattaggcaccccaaaccgatgcacaatgttgatgaaaaaatctctagctttatctgctgtgatcgtgatgaccggtttagcctcaatccacttggagaatttatcgatagctacaaagagatgtgtgtaaccgccgactgcccttttaaataggccgaccatgtcaaggccccagaccgcgaacggccaagacaacgggttggtttgcaactcttgggctggcaaatgagtttgtctggcaaaaaattgacaaccttcgcatgtgcgcacaatcttgtccgcatcagacacagctgtaggccagaaaaaaccatgccggtaagctttgccgacaatggtccgtgcagcagcatgattaccacaaataccggaatgtatatccttcaacaactgtctcccttgttccacagacacacagcgctgcagtattcctgatggactttttttgtacagctcagtctcatgaataatgtaaagtctgctgcgcctggaaatccgctcggcttcgtttttgtcttgaggaagttcttctttgctcaaaaattttataaacggttctctctagtcagcttcgatcatgcttatgcctcgagtatccatggcttcgactgtctcttttctgggcacggtcggttcgtaaagatgttcgacgaacacatctgaaggagctgcttcccgttttgatccaaaattggccagtctgtcggctgcctcattgttatgtcggaggacatgggtgagctcgagtccatcgaatttattttccaacttgtgtacctcttgtcgataagcggtcatattatcatctggacatgaccactctttcatgacttgattaacaaccaactgcgagtctccacggacgattaaccggcgaatgcctaaacagattgcaatccttaatccatggagtagcgcctcgtattccgccacgttatgggacgcagaaaaatgtatccacaatacgtagctcaatctttctccagtcggggaaatcaagacaaccccagctccagtgcctgtgagcctcttcgacccatcaaaatgcatagtccaatattccatcttttcctctggcatgtcttcttggcactcggtccactcggcgaggaaatcagctaaagcttgtgacttgatcgaagttcgtggcttgaacgatatgtccaaagacatcaattctaaggcccacttcgcaatccgtccgttcgcttcgcggttatgaagtatatccctgagtggaaacgatgtgaccaccgtgaccgagtgactttgaaagtagtgagataatttcctgacggtaattaaggcaccatataataacttttgaacctgaggatattttgtcttggagtcggctaaaacctcgctaacgaagtaaattggtcgttggactttttgaatatggccttcctcttcacgctcgacaatcaggaccgtgctcacaacctgggaggtcgccgacacatataacagtagcggctcttgtggatgtggcgaggccaaaactggtggagtggtgagaagtttcttgaagtcttcgaaggctttttgtgctttgggtccccactagaaattgtcagtcttcttcagcagcttgaagaagggcatcccccgctcgccgagtcgtgagacgaatcggctgagcgccgccatgcaaccagtcagcttttggacgtctttttgggagcttggcggtttcatgttgaggatggcgttgattttctccgggttggcctgtatgcctctctgagataccataaatccgagcaacttccctgacggtactccgaagatgcacttttcaggattcttccaaatccgcaatcaggtcatccttctgcttggtcttgacgactacatcatcaacataagcttcgacattgcgaccgatctgagttgaaaagcatctttgaatcatgcgttgataggttgctcctgcgttcttcaatccaaagggcatggtgatgtagcagtaggccccaaagggcgtaataaacgaggtcttcaagcagtcggattcttttagtcggatctgatgatatcccgagtaacagtccaagaagctgagtaactcgcagccggccgttgagtcaaccacctggtcaatgcgaggtaacccaaaagggtctttgggacaagatttgttgaggtcggtataatcgacacacatgcgccattgccccgtctttttctgaaccagactgacttagccagccagtcaggatgaaggacttccttaatgaagcctgctgctaacagcttggttaattcctccttgatcgcatccttcctgtcctgtgcaaaacggcggagtcgttgcttgatgggtttggcgtcttccttaacatgtaaagagtgctcaatcacctctctggggataccaggcatattggatggtttccacgcaaaaatatctttattattctgaagaaaggtgatgagcatgctttcctatttacaatctaacacagcgcctattacagcagtctttatcaggattagagggatctaaggaaatctttttcgtcttggcatcattttcttcagtcttcgtcagcttggttgcaggcacttctccctcgcttgccgtggtcgcagccagtcggatctcttcgcgggcgagtagtctcgtgggtttgggccatctcgcaactttctttgtcgcatgtgacggcttgcttgatgtcgctccgtagtgatatgactcctcgaggaccaggcatcttcatcatcatgtaggtgtagtgtgggacggccataaatttagctaaagccggtcgtccaagtatagcatgatatgctgtctcgaaatcagcaacttcgaaacaaacattttctgtgcgaaaattctcccgagtgccgaaggtaactggaagagtgatctggccgagtggtgtagctgacaatcctgggataacaccgtggaagggtgcattactcggttttaattccgtgcgaggaatctgcatatcgtccagggtcttagcgaaaaggatgttgagtgcgctgccatcatcgatgagagtccgtcggagcttgacattgtgaaccactaggtctagtaccagggggtaccgccccgggtggaccatgatccgatcatgccacggggtagtccgtggagctaggatcgggcggagtccgctagggccacaggtagatagtttgccatggccttgctgtctcctcctgctgcgtggattgcgagtccgtagacggtgagccaagactccggattagtggtgccgtcatacttcttgattccagtcggcttagagccggctggccaatccactcgacaggtcattagtgaaggcagctactccatcaacgtcgtcgtcgtagcgatttggtgaatggcggtgacctcgtgctgcacggcgctggttgatcgtgtcgcgaaggtcgatgagacgctggtgaggtggagagcgaggccgttcgactcggcgctccctgtgacgttcgggaggcgagtgaacagatcgttcgtcgtgacccctgctcctgcgattagatcctatgccgatgatgctgaggcttggctgatgataatcatgagatcggaggtgagggactcggctaccggtcggggtgcgggtgcttgcggagttggctagaaccgaggcaacgatcatggtcttcgtatgttgacaacgtgattggcttggttgagtgcgtcttccttgagggggggtgtcgaggagagtgattgctgcaaccgcgttctgctggggtttgcgaagaccgctgttccatcgacgtcttgttgcccaatgagctctctccctcggcgcccagattccaaggcgcgttgccgtcgatcttcagcctcctttgcaatccgttcgcgatcttgttgctcacgctgtagtcattctcactcctgtcgctgtcgctcttcctccagtcggcgacgttcagcttcttgccgtacgcgatcttggtccgcttctcgggcttggcgctgttcctccgtttcgttgtcagccatgaatacgccgaagaagaggggcgtgtagttatcctcatagctgtcgtcgaagttgtcgaggtcgctgaggtagtagtggtagccgaaatcgtcgtagtcgaggatctcgattagtcaagaactgatgccgggggagctaaggtaaccatccaactcttccgtcgagactgtcccaagaggttggagtataacgccaacctctctggatctagattggatcggggccgaagccggagctcgcctagatcttcgagtgggagatgtcctggtagtgaagacagcggccaaatcatcaggaagtttcatcaggattgagggataggacccgtcgtcttcatctggtcgcggaagagtagattggatcttgtccgagtggtttgaagccgactcgggatagatgatcttggagtaggcctcggccgagttcggaataccgaatggcacggggacatggtccgagtcgaggagagagatcttgctaaggtcgttggtgatgaagttgaaactgccgaaccggaacgcctgcccgggagggaacgcgaagtcgtcgatgccagaaacgaaacccatcgcacttagtcggtgagaacttgacgctacccctacctggcgcaccaactgtcgaaacaagatttcgacaataataaagggggtggctatcaagctaggaaagtggatgggtttggagacaaggaattttatacaggttcaggccttcttattcaagaagtaataccctactcctgtccggggatgattccgccgagtgtattattgattgtatgattgggagaaaaaagaatcgtcccgagaggaacccggacccctccttatataggggaagggatccgtattacaaagtacagtccatatcctaacggaatatgggattacagataaaatacaatcgtaaccgactaggatcccgggtattttcttgacatacaagtttagaatctaacccgagtcctcataaagatattctatctatatttagtaccgtatatccagctgaaatataaccgccatgtagatatggggtaaccataatctccacagtagcccccgagaccttcgcagttgaccaaaatagtcttctcgaaacaaaaaacaataatccgagtgcttcaattcaacttgcttcggcttgccgagtgctaaaagactgtgaagggcgaaaataaaacatggtgcatcgagtagatgcacctaattaggtgtacccccgactatgtgattagttgaaaaactaaacatatagtcaagaaacgagtgattttatatcgaagcatgcatggtactcaataaaatacccagccgactccttcttacttgaatatatcaaggacaaaaaatatgaaaagggccgaatgataaacactcaaaaggtccaaaaatagatatatttggtaggaatccgagtaagaaactcttaaaatgatccaccaaatatgataaagatcatggtaattaagaagttcattagcctaggctataacccttaccataatcaaaataagcatataacatgctaggagaatgactactaataaactagtcatctcaaattaacccaacaacttttgtagcctaaaaaagcttacaaaaatggtataacacctttctgtcgggcaccttttcatgtgcatcataatcattccaaagaattattgaatcgcgtaaaaaagcattttaacagcatcgggccacatcattgtgagcacatattgccaaagcaaaaagcgcctaagtccctagggatcacaacgggccacgctaaaaacataattgggctgaaatactgtacaggcccaggcccattagtactcccaataccctaaaaacaccgaagtccaaacattgtttcgtcttccccgctgagactctcgccattccccactccgtgctacagtacagaaccgcgccgacgaagctagggttcatcaatctgctccaacccaccctcaaaaacttcacgaaatttctccccacgtccaccactccgattccccattcctctccagccatatctcggaccaaattaaaacatccagttcacattcatggcggaagaaagagaaagcttcgagagtcagtgggcgccctccgatgtgacagaagataatctgaaggagatggtggcgcacggcgttctcccagcgaaggagattatcgggtggcgaccggcgttcggcgaagcattcccgacccccgacacacacgaaatcgtggtatttgctcatttcttctatggcggattttctcttctaacctcaagattcttccgggggattctgaacttctacgggattagcttgcatcacttgaatccaaactccatagtgcatattgccaaatttatccatgcctacgaagcttttctgggcattaggcctcatttcgccttgttccgccgcatcttcttcctcaagccccagccaaacaaaagcacaccgtgcgttgttgggggagctggtttccaactcagaggaaccttgagccaaaaatatttctccatgcctttcaaaacctcaaacaaaggctggcatgcaaactggttctatgttcagaatcctgagcgcgcactccccgagtactgctgtcttcctccagtttaccaggacacatggaactcattgcctatgggagatgaagctgctcaggcagtggaattgatggaacgcatgctaaaactgaagtaacaaggtttgcaaggagaacagatcactcggcacttcatcaaaagtcgattagctccaatcaaagaaagatctcgcacagccttcgaatttgacggcaagcatgacccaaaccgtgaagacccagattctcttgacttcaaggtcatgaaggaaatgatgtataagatcatttcaaacgccattgttgtcagctactcacacttgctgccagtcgtaccgttcaatgcattcaatcctcctccaccggtacgtattcatacacttcaacctttctcaaaatatgatcttgtcttcttgttgaatcagttaacaatgaaggatattacactcaggaatttgctttgatgaagtcggatctcccaatcgctcaacgccgatctccccgccaccaaactgggcaagggagtggaggaccaagaattcggtctgaaactcagccaagtgcttctgatccagtcggccagtcagattctcgaaagagcaagctggttctaagtgacgacgaagccgatgataccaccaggaggcctggagaccgagagacaaccaagaaactaccaaaacaggctactccaaggaagaaagcatccagtcgccctgcgccaaagatcaggaagtcttctaggtataactcatataacaatctctcttgcattgatgcgcatccattgcggcaataatactgataatcaaatttgcaggaaaccatctgatatagatccgtccgggaaagactctaacccgactaacgtggacgcaagttcttccaaagaaaccggaccaactgctgaggatcatccaagtgacaatcagccggcaaccgataatgtagaacccggtgatcaacccctgaccggaaaccagtcggacacaggggcaagcgaagagattccagaagtcaaaacccatgcagacaaccctcgtggacaagacgccagcaatgaccggagatctggatctcctttaaaagcatccgagtccactcattgtctgaaaccatgtcgacccaaataactctgaccaattgtctaacctttgttagtggatacattagggccaatgatcagtgatgaagaagaaattccccgcatacaagcagccgaaggttcgtgccctcccattctggtcaagtggtgggatgacaacttgcaacctcaaggaattgtaataaaccggcaaaaagaagatgaagaggtatgcctactgaaaaaggcactaaatcaagcgactcgcattgtaaatgtaagttccttaacgcctgacctcagccatcttgtttaccgtctggctcgagcgctgattaaactgctccgcaaaggattcatcttaggaacgaggcgaaaaccgcaaccctagagaaactagttccttatcttggaaccttcgaagccaccaggagtcaactgcacgaggccagagaacttctgtaacatcctgaaaattcaagacaatgaaaatcacgaaaatttcgaactttttaaaacttttgcatcatgctggttgttatgattgctattacttgccaaactgtaaatgatcaccaagaaagtaaagaaaagaactacatttaagcaatagatatgatttatgggaatatatttaatcctacaaataattatgcacaagatattaaaatcaaataaaagaaaagttattattaacctattttatcaaatattaaaatatttgaataatgtaggtgggtgccataatatgtgtacacatgaaatgatgatcattcaaataaactgagctctctgtatatataatagaattacgggagtatttaattcgatatgtagatcgattttgcaccaagttcctaattgcatttagggattgaaatttgatatattaaacccctccatataaaataaactaacatatagataaattgaggtaatgtgctattgtgttaataacggtctcattagaaaattatagaatctttaataaaccttaaatattggacaatattaaattttgggcaaattcacatttgaacacttaatacggtcacctaaatgcttgggagtaaatacaaatttaatttgcaacttttctcaatttataaatcaaccaaaaccctaaaagaagaaaaataggaaaactttgaaaaatatataataataataagaattaaccctaattaaaaattcaaataaattatataaataaaatatgagtaatattaatctagaataaatccattggttggaatgacacaaatattgggtaaacttcatttatacaaaatctaggatttataaaatcaaatttacacaaaaaaataggctaaaatggggattaaataggaaaagacactattcatcggccgccaggtgttcgacgaggtcccctaacccagcccctcctctttccccctctctctgtcacctgccaccgcgccgacgtcgccatcgccgtccttgccccgcgctgccgttgccgtcactgcctcgcgccgcgcgccgccgctgccacgccgccccgcgcccgcgccccacgccgcgccgcctgccgtcgcgttgccgtcactgcctcgcgccgcgcgccgccgctgtcatgtcgtcctgcgcccgcgcgtcgcgtccgtcgtgtcgccgtcatctcgagccccgcgccgccctgtcgccatcgccgcgcgccgagccccgtgccgcgccgcgccgtcccgtcgccgtcgtgtcgacgctccgccgtcgtcatcgcgtcgcccgtcgccctcaccgcgcgccgagccccgctacgccccgagccccgcgccgccgcgccgccgtcgcgtcaccccctcccttctcttccctgttccccttattccctctctcccctataagagccaccgttctcccctctcctcactccatgttccccctcctctccctcttccccctctccacgcaccgccgcgccgccgccttcgagccgccgcgccgccgccctcgtgctgtcgtgccgccgcattcgtgaccgccgcgccgccgcctcagtgtgccgcgccgtgcgccgtcgtcgccgccgccgtcgtcgccaccgccgccgtcggtgagccgctgccccccccccctatttgtcgccgtgccgccgggtagagagggagccgagaaagagagaggaagggagaagccgagggagagaaagaagagggaaggaggagagaaaccggaaaagaaaagagagagaaaggagaagaaaagaaaagagagagaaaggagaagaaaagaaaagagagagagaaaggagaggagaaattagagtgggccccacgtgtttagtgaatagtaatccccttcttaatcattattagttgagtctattacatgtgggtccgggtggttaaaaatctaattatagaagttttatggtctcgagtttatgacatgtgggccccacttgtcattagctcttcctatttccctttagaaaataattcagtaggaaaaaggaataaacccggggtcccacttgtcaatggatatgtcttggattaaaaataaatctattatgaacagtagcttttcgcaatttctcggattaattcaaagttgaatctttacactagcataacttattcattttaactcggatttgagtgaaacttgaacctaaattcatctaaattcataagctttccaatgatatataattcactattcaataaaatatatttataattataaattaatcaatatcaaatgattagataatagttaacctaaatagtgtgccaataaataaaaaaaaatggatattgtacagtagcataattatctttaatatgtcttgtcactgtagcaaccaaataaattagttataatcaatccttcaaattaatgggtgtaaaggaaaatattagtgccatttactagcctatgtccaaatataactaattccatgacttataaattatttacataaagtttagcctcatattactttatcctcatattttgtaactaaaatataaacacacatagatgagtctttaacttgtttaggagagtaatcacagagctagttgtatttggaccacttaaaaaaattagttgatacaatgtcatgtgaagtagaatatatatatatagtcggttgatatccattagttaaccaaatagagccatcttaaaatcaacatgtattgtatagcttacagtaaaaagaaactactcaaatatatgatccaataataagatattgttgcttacacatatactatacatcccattatagtggtacggtatagtattaatttgcgtattgcatatatgaaattaagagggagtgtatgacaaacatgtatattagataaatactagttataaatcttgacctcatataattataattatagttcaactgtaaattaggattattcattgtaaaattatgtgatgggataatctgtaaccataatatgattaacctaaacaattctaacatacaaagcaagggtaattgttaacctttataatttattttgacaagtaaaatatgtacataattaaaataaagcctccatcaataaaataataatacaaatgattcacagtaattatttgaccgatccaaatctatccggcaacaaaacctctagtgtataaccgttctatttagatagatgcatgaatagccatttgctagactaaaccacatagtagccagatacgtatctcattcatactacattggctagctcctaaatagaccaccatgataacagaccaccatgataacagaaagattaagaaactttagcccttagcatgttggaacccattagcaagcgcgaataatatgagcaaccttaggtttaacctcaacaaatatattttgtttgtgcatatttgattgttgcttgaatattggtttttctcgcgtattatagactttgtgtatcggttagtcgtgaggcaatgtcagcaacttccaggaggtgaagattgatcaagaattatatcaagaataaggactatcctgagcaaggcaagtcatcactattccttgaacatgttgatcctaattgcgaaattgttttgtttacaaataaaaattgcatgcaatgatgaacatcctacttgtgattatgccatgccttggttattgtttacccttaaatatttgcaaccatgtttacgtatgagtccctagtcaactatgacaattgcttagaaatgctattctagaatcatgcatactcatatttatcaaatgctatatgcttgggcaattaccttcgggaaggtaattgagatgcggcatgtggagacatgagcgccacattgccatgatgttgatgacatgatttgtgaaaggagaaataaaatcaaaacaactgtttaagactggggcggacggaggatttgggtggtatctggaaaaggctagtatcgtccccagtcaattaaggactgagccatgaagttaagcatgaaacgacccccgtacaaccgtactactcgaatgggtatagacctagcggattagatagccgagcggaggcagtatccctgcatagatggttcacccctgagtgaggcaggtgcgctacgatgggacagccgttgaggtagggccgagaggcgtgccctacatcggtgttgtcattggtaggactgccatgagtgtgtgtgagagagaacttaacttgaaccataatttaatatgtgtgtgagatttctctttcccgggagcgccagaactcctctcactgctagaaacatggacgcctagagtgcatgaggatttaagttcatggagcgggtactgccaatgcgaggttatcgaaaagctttgccgtgacgcgtctcatgtgttgggacgaggcgcatgtgttgggcagtcgcggagtgcgggtaaagtgtacatccattgtagtgtgagtaaaccaaatctattcgaatagccgtgctcgttgttattgagcaccgggacatgtattacacttggctagactctaaattctttaacttgtgtgggatgggatattgcatgatgatttttatgctgatggagccacttcctgagaggcgggaatgtggacgccctcagaaaaccataccgactcaatggcgggaagctatccttgggatcataatggatagtggacagaaccgtcgttgtttaatgtgaa

SEQ ID NO: 8105 - DNA, 43799 bp, Oryza sativa
atatatatatatatatatatatatatatatatatatatatatatatatatatatatatatatatatatatatatatatagtgaaatcatatagtactttgcaacttaactaaatttatagttggttagggaaatcaatactttgcaaattaacttattatgtcaaaaccttcttaaaagcttacctagactaatagaccatatacaaaagttcttaaacaggatcaaaagttgcgcaagcgcgactacgtggctagtgttgttctttagaaatcccaagtaacctttcgagttatttttgcgaggtgaattgacatatcaaattgcacatatctttgaggaaatgctccaatggccctttaatccaggattaaagaaagtactttttaatgcttgagtagaaaccttaattaattgcagtatgaataattcaggttcttcattatcctactccctccgtttcaggttataagacgttcaactgcttcaagtttgaccaagtttgtagaaaacaataataatattttcaactcaacacaaatttattatgaaaatatattctattattgatttaatgaaactaatttggtattataaatattactatatttgtgcataaacttagtcagatttaaagtagtttaactttgaccaaaatcaaaacgtcttataacgtaaaacaaagggagtatataatactctttcttcattttttggaagaatgttgtggcctattctgtttgttattaattattcagtggttcaacaattgttaaatactatacaggctataccgtctttagattaaagttgatgcatctatatgaattgcctaccaattgtttttcatacattttagaggaattgccagatatatgaaccttttgctagcttcctataagtggaatattcaataatcaaactcagataaaacctacagtgaacatgacatagcaacacaatatttattgcataaattatgccaagttactcttaacatcttgttaggtagcaattgggttaacatatctctgcactactggtatttgcatggctttccttggaagatgaggaaagtgatgatgcggtgtgtagaaccaagcgtggtgaaggatgtggaggacacagtcaagttccttgtttccaggtgaggtctaataggatattttcaactgaacattcatccagaattattggaggaacctcactgaaacgctgataattaagaacttcatgtaaaaaaaagaatttgagggaaataatcttccattttgctgtgcaaaaatgtaagctttttattctggtaagcatggtttgtgtgttagtgatatgccctagaggcaatcatagagataattgtatcacacactatgtttacatatttatccgacttcattccttgaaatagataaactcattattggttaatgaatatgtgattctttcatgagactctttatgttgtgtgttgctatttctaaaggatccctgatcaaatatcatatgtggaacaaatatgatgattagcatatgtattaattgatgatcatgtctcatggatcatggtatagagataccaaattaataatgtggacacatgttagtgaacatgttgttggatagacccaacatgagacactgcaaaagccgtatgtgttgtgtcatcagtgatcttatttagtgttggtgttgaatccttagacctgagattatgatggttcccaacatgtgtagtagcttacttaaggactgctaaacgctactccgtaattgggtagttataaaagtagttttcgggtatgctatgaaacatgtagtgggatatgaataattaagatgggatttgcccctcctatggagagatatctctaggcccctcggtgttgtagattatagaagtgcatggccatgctaaaggtgattgaggagacaattacaagttatataatctatcaacaggttcgagtgaatgattgagctattagaggatggcacatatctagccttgagcttaatcgatatcgtgaggcaaaggggttcatacaagtatacactagaggttcagccgatatgatctttgtgtatgcccagtgggtaaatacgttctgctaggggccgttgttgacacgtggacagaaaaggagttttcgggttacagccgagtgtacatgaacctacagggtcgcacgcttaatgggccggaataaggggattggatggagatccaatatgagcttaattcggatagggatccgaataggagtcctacgggccttggaggctcgagtgatggatcctatatattcgtgaggggtgtgaccgacgaaggtattacatcacatgagaaaccctagccgtcacttccctccccgagcaaaaccctagccacgcgcgggtgctagcacatctgtgcgtggcgttccgtccctgtacgtgtggataccagtagaggcgccgctggtttgcagtgctgatcgacgtgggagtacggcgagaagaacgcacggggaggagaaggtcgagccggtgcaatcaactacttcctctacatcgacacgtgctacttcgcgagagttccttcgacttctcagtgtcttcttccgcagcgcgtcgagtgataacgatctatgatctaatacttgcatggttcctggtttacgcgatagaaaattttgatttatgctatcgtagcctacgcgtaacccaacattgtgcactaaggaaagagttggaaaatatcgtgtgcagcattttgtgcgtatgcaagtagttgaagaattccaccaagttctgctattgtgctattgtacagtaactattgtgctattgtacagtaactatagaagaatggaacttagttcaaatttaggggatatatgctaataaaagtacaagggaatgatgtgcattcaatttgatatagttcatatgaatttcactttcttgaaaatattgagttttggttttacttgttaagccttcatcaaaatgcagaaaacacaggatcaaactaatctaaatcaacatctctccttcaagttttctaatgtcagggtggcctttccttttctgaatgctgtaaatacaactgtttccctctccgatgatctgtttgttttctacatgcttgcataaattgctctgcttgatcaagggaaaatcaccacaaccagcaggtgttgtttgaaaagtttagcctaggttttggtaaattgaaatttaccatgttactatgacatgtacgagaatttaggaatatgaaattatatttggggccaaatatattacaacgatatactatatatcattgtttggttttttgggttttgagacatttgaacttaatttgctaaaatatgtatcttttagcatttgattgtttaattcgcattactaaatatcgatgtagtgttagcatgggcatattagtcttttaagtattcattgggactgtataacaaaaatggttgttttgcctagcacactgtagttgcaagtgatgttttgttgtgcacaagtttcgacgagaaagatgtatcatatttttctcctgtacttttgcataatctctactattttaaaaattaaagatgtttttgccggtactttagtacgtcatccgtgcatttgtcggtttttaagtttgttcgtttttggaaatacatatccgtatttgagttagttttgaagttcattcgcttttggaaatacataatgaatcatctacaatatctcttaaaaaaacttacatgctaacttgaaacgattagactgctaattgcagctcatgattttcttaaaaaaaatccaaacgagttctgatttcaccttaactaaacgtataacaataataaagctaaaattgccttcacccgttgtaatgcacaaattgctttcacccgttgtaacgcacgtgcattttttctagtttaattataaagtcaaaagtcattgtgttcacaaactgttagttatgcatatattattgtttgctattatggtatttacatatacggtcctattttttagagggcttttacagtacctcccactggtactagtagtgtagtaaaaatcaaatccaacccttgattgtaaaatgtgtttttcagttttactctaataaggtggaaggatattttgataatttattactagcctcccacgcgaggcaagacgactgatctcgttctgctcaactccccgttctcaggaccgccgccgcctgatgactgacgtccaccttcgcctctctcctcaactcctcctcgcggctcaagtaaccacgggcacggcggcgccgcccctccacctccctacgcgctcaacagccagcgcccctccttgtgcgaaccgatctacggcggcaatgcccatcctcctctacgcgcgtgcgacgaccgccgcttctccttgcatgaatcctcgctcgtggtctgtggaggcagcgctcctcttctgtgcactgtgctctcaatctcctgcactgcattcgagacgtcaactcagctgccatgccgccagcacctaagtactgaaggaggaactttggccttccatgattcctgcagagaaattcagtcttgcctactccagagaaatgatcgatgtttcaccaagctattttcttatcgtactcgtttctaccatattaactcccatataggacttggaagaactgatacaaggctgttaatttgctttactggaacaattcactgttaagccattggggagaatgttgaacagagaagggagctttgtacttgtagtacagaaactctaatgcccttctctaatatttgtacatcattatagttttttttaaaatacaaacgcagacgttcacaaacaacataacatatagttttcccttcatatgtctacctgctccttttgaatcatttttgttttcgcctcccattctctttctcttctagttatttttattcgggtcacaaaccgatcgagattgcaagtgtctaaagcagcaaatctaatgtaacagaccacactacctacatgtggctcttccatgtggcacatgcatggcatctgaactgattaaattgtactactgaattaacatgttgagcctgaatctgaactacgtaccttcctactgaacgctagatcaaccctggcaactaaccaaaatcatatcatggggaaagaaacaagtcagtacatgtacagcaccggtggttatttgtctcatttttggctaagcacgcccatttctcgaggcagattcctgtggcagcaaagacactagctccaaagaaaggaagagagatctctcactatatttattattatcagaacaagatattatttaacatgttcagaaatatccacaatttacatgcacagctagctccttgcatgtgtcctggtctatcctgtaggtcagttggatcagatccaccagaaagaatgtaccaaacatggtccggcccctgatcttggtctcgttaaggataattatgcatcaatgtctgctgcgtacatgtaatatgtaccatgcgattgcatcattgcgatttgattcttttctacgctccagttgtacccacaagtggatctatatatgtatgatcgatacgtctctgtcaaggagcgctgatccattttatcatgtagcccatgcaactagctacaacctagtgatcgatgagattgttttgtgttccatggtcggctatgcgatactgttagattagattctttcccccgtgctctacagagcatgtaatttaaggatcaactacagctgcaaacttcatgggaactatggctgctatttgtgcaacaacatgatatctgcactgtattatacctaactgtgtttttctatgataagagctacgaaaaatcatactaaccattaatgtatacattttattaataaattacagcctaaaaaacaagtgattatatatacttttttttatccttctaattaaatttaatcaagaatgttaatcttgccaaaaggtgaaagaaacgcccattcagaaattgggggacctatttgtcaatttatattcaaatgttaacaaatttagtccaaattcaattctattcaaactaaatttgaaaaaaaaatgaacttgaaacaaggttgtattttcaagtctcaaattgttatatgtgaaagaaaaattaagagtaaatttcccattgaaactacatgaattttgaccaaattttgtaaaactacagatttaagacgttgtatcacaaaccatagatttaacacaagatttatcacaaaactacatatttaaggccaaatatcacaaaactatagatttagtactatagttatcacaacactatagattttacaatttcaatccttaccaccagtgttatgttagagttataaatgttgtaattttgcacttaacatgcatggtgtaaaacatgtagttttgtgataattttaaaactatatatgtagtttggtgatagttcatcttaaaattgtagttctttgataaaattggttctaaatctgtagttgatacaccttcttaaatatgtagttttgttataattttatcaaagtatatgtagttttatgaaatttactcaaaaattaaatataacttaaaatttcaaagttatttcaaaattttggtttgaaaatggaagtagaatagcatttcaattagtctatttattaaaatttcactcgaaatttgaactagcagatatttttttcttggtattaatagctatgtgtggactaattattgacaataatagactttaaatgataagaaatgaaatcttgtcactcaataggccgggaggtaagagaaatattaagccttggataacatctgtttcctattctagcctccgatatccgaatatgattgaaaaggtacgatgattgatgaatgttcaatggttccatagatgtttttcacccacccatggatacgcaataagccgtcctagcataatggagttcacaaggatttggtgtaactctagaaaattccaaattatgatatacatcaacactacgtgttggcggttttgtcggtttttggttggccaggttttctctagtgatgtagcaatggactaggctgagtggcggggcatcgtgccaatgagcagagggtgggcggctggcagcatgatgacgacggtagcggttgaggaggcaggatttcacagcgcaacaacgaagatggtggcggtggcagggatagtgcttccaatggtgatggccctagcggtggtgactactagttcgggtgcccctacacccaaatcaggctgtgtgacaacaagtgtaaccattgaggcaatagtgctttctagcgtggcatcgtggatggtggtggtgatggctctagggatagtgcctaccagatcgtgggcttccgtgtccagatccagccgtgtggattggaggcaagctcaaaggcagtgatttgacagtacaatgacgaattcaatggcggtgttacgacaatcgaggtgggtgaacccaacatccttttggtgagcaaggtgaggagtggaacgaagagattgacgtaggtgccagcgatagtagcggttagaccgcgacgctagatccagggcctaagtgcccctagatcggatgtgtttgtgccaggatccgttcatgcaacggtcaagggcaatggctcttctctgcctttcgtggatggcgttggcgagcgaaggcactagggggttgggagctatccggtttgtcaaatggatgtggtcgtcagtaggggcagttggacgaagcaggaatcagttgaaggtggatggatcgctaatctatctatctatctatctataataattatctacgagctctcacgttaatcagaaaaaatctgactgttaattagaaggatcgtattatacaaccgtatatctttaatccaacatgtgtttaatataaattattgtaggccaattctaaagcccaaatctgttgtgcgtcatgtacgtatatcttatcgtctccctacgttttttatccaatctccagtcacgctacctacactatacaagttgcttctttcacgataaaagtaggacgtgtctacaacgagaccgttctctgtatggtcataaccagctacctcaatctatctagttgctactagtatactcaaaagtgtatgtatttttttcttcttatagaattttttcttagattactcatccgatttacgatccgattacaccattgtgttcataacaattagatctttataacaagatctcacatgactatatttttatgaaaaaatacaaattacttttataatacatctaaattacttttagattttattaaattacttcttagtcataaaagtaatttaataaagcttaaaattaatttacctatattatagaagtaacttaaaacaaaagtaaagtaacttgttacggcattaaaagaaatctatacattcataatgttattcataatattgtgagttgtttattttataatcatttttagtcagtgacgtaatttgtgcttattaaatttaatttctatatagactcatgtttttacctctataacggatttagttttgatgtcgtgataaagttactttttctttttgttttaagttacttttataatttatgtaaattacttttagactttactaaatttacttttatatgtctaagaagtaatttagtgaaatctaaaagtaatttagatatattataaaaataatttataatttttcatcaaagtataatcatgtgagatcttgttataaagatttaattgttacgaacacaacggcgcaatcggaccacagatcggataagtagtttaagagaaaatttaatttgaagtataggtggttcctatttgcttgaaacacagggataaactactctctctctagcgtaacagagtgcgtcacgtggcttccgattcggtctgttctggccttctcggcaatatcggcatgtggaatagacgactacaccagcgtgtgggatcggacggccctagatgcgtcgcgtgataggaccagatcgagaggcctctcgagatagattttacgataaaagtaataacatatacctgataaatggtatcttagttagtttccaccgttatcatagctggtagaaaccatatgctgttgatggattggccatatttgcatttggagtactggaaagggattcacgtacattggctggtagtttatacgatctggatcgaggtcgtcaaccatgcatacgatgatccggccatctggagacttcacgcggccgatacacgtgtggtgtgggacttcgtcagagacgagagccgctgcagcgaaattcatcccgatttgcagacatgtgtgacttgaagaatgaagatcctacaattcaagtgctattcctttttctcaatcaaggcatcatctaaaacaaccttgatcgggggatttgcaattatgacactgtaaacattaacctttgctataatgacattggacctatatttcatagacacagatggacccatttatcattcactcagagtgtcaaaacaacgaagccctcatgtttgcagttccaattttgcaattttctcacctttgatcaggaatagctacgtacgtcttggtttctatttcgcaaacaagattggtttctaattaacgcggttattcctcatctaaaacgactacaccaagcagaagtacggcttatccgcttatgctatatcatttgacacaaaaacatccagtgtttggatgttcatccactaatccagttcttctgcacctaaactgacccagtaaatttcaggtgtttattagatgttcatccactaatcagaaagttcttttgcacagtaactcagaagattcgtacgtgatttcaagcacaaactaaaataagttcttagggacagccataaaatttatattaaataaaacacaactctatagactaattaatttttttaccttaatataaaagcaagaaatcaaactgaggtacagtagattctataatttttgaattattgaaactaataaatgagactctaaaccgaatatggcttcatgtttattaattatgaattttggaattattaaactgtaacaagctataatagacattctcgaagccaaatacatatagtttggtacttatcaattttaatttttactattttaaaccgtgaactataaatataatagaatttgtttaacatttgaacttcaaaaaaatttttacatgtactttcagcaatatttagtaacaacatatttaagatgtaattaaatttgtgctattcataatatatccacaatttaattctaaatttcgtaattattaaattatgaaacatactacattgaatctccaacacaacacaaatagataaaataattattaatttcacaactccaaaatataaaataaataggaaacaacataatatattaagtatggattcttaatttctgtcaaaatagcgatggattctaaatttcagtgaaaaagggattgattctgaatttcagtcataaaaaatgggatgggttcttcatatagtatttcatttaattgtcaattttaaaactaataattatcgagtagtaactgaagttgactgttattttgatctattacttcctttttatatgacatttaatagttcaaaaaggaactaaccaatataatttaaaaaaaggagtaatcaactataatttgaatgtaaccaacgtattcaacatttgtctcaaattttaataaacttttatattattgacactaataaccatccaaagcacgtgtattataatattattgttaacacaccatgaaacgcgtgggttggcgtctagtgaaaggctaaaaggtggttgggctgctccctggatcaccacggtttgttggagcggtgaagcaagaattggatgtagttttgaagcttaatcttctaactttatttctttgtttttcttttattgttcgttggttacgagacttggagtcatgctgtaacttttggctgcagtatatccacttatggatatacatgtcaaatttttatctattattgtaagaaaataatgattgttggcgaaacgacaaccgcatacgtcgaaagacgtggtcactcaacagtggttgggaaagaagtaaagtgtattaattagagaatttttcttcgggatcccccattacatggccctatgagactatttatagcccctattacaggttcttactactagggttttggttatacaggggaatttacatggttacccttatgaaaagggaaatttacatgggtacatagtgtaattgaggttcatgggctcctgatgggccgtcgggcgatcgtcggcccaatagcccctaggcttgatgggccgaaaaggcttcttcagccctcgcgggggcgagcttgctttggcaaagtcatctccctttggcatatactcttcgcgctgcatccttcgcccaagaggcctctggcttggcagagtacccgtgcgatccctcggctctcgctgtccttgttccatagtcttcgccatggggggacttcgccccgactaactttgacgtctcgggcttgaatccccactcttcgcatagctttcggcagattttggtcgaatggcctcatgccataccgccaacaagctcctcacgggcaagggtgagattggagcttcggccgagaccgtgcaaaccatgtggtatggtgtgtggcgccccctttcgatcgatgctcctgccgaaacctacattgttcctgcaaataaagtttgttgtctgtgtggctggtattgttttgccactcttcgcctcctgcggacggtggtatattatttttatctttcccgggccaaaaggaaacagtaatgggccttccctttgtgggctttttactttgcagctcggtcgatgggaatttaccgttttgcctaccctcgcgacacgtggcgctttattactggtgggtaggcgaaccgttgcttcggtgggctatatattctccccccgttctcttttcaccgccagacttgtcactttcaccgctcgtgctctcttcctccgttcttgctctcacggtaccccttggcccttcagacctttcgctcgctccctttgttcgccactgcacacaccattcaccactgcatatgtccttcgtcatggctccccgcaagcctaaccccttttcggtgaaagggcccgaccccggccggattgacgatgacaccaccgcctatttagggatttctctcatagatgacggcgagcaggagaagttggtcagctctgggacgttagtcgagggacagactttcgccctggggaaagccgttgtaccgaagcccgtcgacaaccggacggtggtgttcgccgtgttttttgaggcggggctccggttttcgtgcaacgcgttgttgccggagatccttcgccttttccaggtggagctcccacagttgagcccgtcggcgctggtccggatcgctatcttcgactaggcgtgttggacttccggttttgagcctagcgccgaactttttggcgccatatttttcgccatcgtgaattcgaagacagtggttacccctgctgggacgaagaaaacagtgttcgggagcgtgaactttaatgttcgccccgagcggtccgatctctggccagtgaatgccgccatgtcgaagtgggaccgccattggatggcgaggtggttttaccacaccatctccttcgaggctggttctaactcagcgaaggccctccggtgccagcgcagggcgattgcgccgaaccaaaaacccaatatcgccgtggacggcgctatggaggcgcggttcgctctgctgcgtaaggtttgctcctgccttagctgtcgcgacttggtggaggaattctgcatgcttcacatctttcccctctctcaatcatggcaagtcgcagttgatcaaggcaaagaggttgatggtttgccgaagttggttctccccgagggaacgaatggtaagagtgctctttcactacgcactcctgcgctttgctattttgatttgttcgacgcttgatgtggctacacccgttatttttgcagtgttgaccctcgaccaggctgacgccgaagcccgtaggatgatcggcgatgtgtcagtcgtcgagtatagccagctgctgatgtgacaagcagctggccgagcgaaccgggtttacaacggcgaattgcctccccgggcgaacccccacaaggcggacgacgatgcaggaccttcgcgaaagcgaacgcgcgggcaagtgaagcttgtccctaggaagcgaagggttcctgcttcctccgattccgacgccgacgatgaggaggacgtcgaagagcgtgacggcgaggaggaaggagaggaagaagaggagacggaggtcgtggctgacaaggccgcggacgagacggtcgaaaaccgcgtcgacacccctggctacactcctactccaagtccaggtcacaacgagaccggggtggagtcgaacagctccccccttcgtcgaaaggatttggatggggcgaaggcgctaattgcgttttcggcaggcagggcggcgaagggaggtccggtcaaaaagatctccaaaaagaaaggacttgtcgatgtcgctcgtgtcttcaacgatgacgagtcttctgacgagactccgacttcgcccgctagccgcagcctggacctttcaaccgtccccattcttttcctcggcgctggtggggcaggcgatagtgccgccgccggggcttcagcctctgcggaatggatcgtgacagctgcggcgagggtcttcggtagccctctgcgtcagccggttgtttcgccgctagtcaaagcgaaggggaagggtgcggccgtcgaaacatctgcctcggagtattcccttgtggcgccccattttgcccctggcgatttcgagacccgagcagagcttattctctttgttgagggagtaagcaatcttgtcttacctgctagcaccccgagcctattcaccgaattgaatgagttcgatgaagggtgttctgctattagaagcttggcggttcgggtatgctttttctctcttcttgattttcttcttattttttacatgtcacataattaacatttgttctctttacccgttcctaccttgcatccagattcttgcagctcactgttcgacagagcgaaccgtgcgggcccatcttgacggattcaagaaccatcttcgggccaaggatgacgaaataggccgcaagaacttggagatggaggccctcgccaacaccctgaaagaggcgaaagccgaaaacaagcggctccaatccgagttggagaaaggaaaagaagctagggccgaggtcgatcggctcaaggctgaactggagaaagggagagaggccatagctgaggttgatcgtctccaggccgaattgaagaaagaaaaagcccattccgccgtgctgacagattattttaatcttactgagccgaagattgaggctcttcgcctggaggtcagctgtggaggagtcgcagcggttttcgcgggagatggcgaaaactaccgaatccgcgagaatggcgtgccgaacgcttcgcctcgcccttactgacatgggtgcaaagatgcgaggggtccctgccgaagttgcctcggccttcgacttctccgagtggacccagcagaccggtggttcggtttcggactgcgccactgcgtacggcgattgctgtgcgtgcgtatcggcggcctttactacgggccatctacaacagttcggctatgaacacgtcgccgagttccctaactatgcgaagggggactgggagatcagtgcgcagaacatttcgcccgcgctttgtgcgtggctaaaacagatatggcagaaagacggccggtccaccgccaaggcacgccttttggagcaactggcgaaggcagaggcggcagaccggtgcgaagaagaggacgcggcagccgaagggggtggaggcgatgcccaggatcacccagaggtgtgaggccctccgccccttccttagatttttgtagtttcccttcttctttttgtgtttgccgggaatggcgaatgatgtatattcggcaggctgccgctaatcctccctattgtagccgaaaaaagggcccattggatattttgaatatatgactcactcttagccacttttttgtggtcgaagtctttggcgtatttatgattatgcacatttcacattatgcaatacttttttcgcctattctcactatgcaattcgtcttttgccctttttgcactgtctaccagggtgttcgccgaaagttgtgcattcggcccccttctgggagttggcgaaaccaaaacgagaaattctaaaatcaaaggtgtttttgattattattctatgatgaacaattgggcattggagattattggttttgttatttggaatttattcacggagtggttttggagatgattggattcataggtgatcgcaggattcattatttcatgtgaccggtcagactgggctctggtagctggtcggactggcggtatgcgcgcggtcagactggccagcccgtgctctgaccggccgacactgtgttggtttcggtttcgggttgtttgtttggacatccgtgattattttatgattatgacttctagatggatactatacgtatgtaatactgttgtttgctactaatgagtcaagttggagatagcttggtctcggaatatggtttctttgtttgttccatgtgtaggtgactcgatgtctcgggatagtatttgtggtgatggaccgggagtcggcttggggataagacgacgtccgtggtggtcagagatcatgcgggatacttaggctagagttgatgcacgtgattgatggatattccatatggcatacgatggagttattgtatgcgtatgggatgcggagtcaaatttggtatgattggttatgtaaagtttctttcttgtactagagggtttcctaaggtgtttaggactcttagtataagtttggttcgtggctttaggctgcctacctcatgtataaatagagagggagcgtgaggcttccctgtatcgctttggagagcaattgagttgagttttgagttagggtttcgagtttagtcagaatttttgtaaggagtgctgttggtgcactttgtaaacatagagagaatcaataaagtcatcatttactttaagatttcttcgatttgtgtttaccgggtttcggcggtcagaccggcgggagcacggcggtcagaccggcggcggcgacacagcgagcagcagctgatctcggcggtcggaccggagatataatcgcggtcagaccgacggcaaccaggctgtcagaccggcaggacaacttcggtctgaccgcgatccgtcgatttcgagggtaacttttattttcgcttaaagttttcggtttttgggtataccaaccattcaccccccctctagttggcttagttcttgtgattcgatcctacaagtggtttcaaagccttgttttcttctttggatttttatcgatccaaagtttttgccatggctactcctgctaggttttcaactaagcctcatgtttttgatggaacggatttttctcattggtgtagtaggatgtaatcttatattatggctgaagattatgatatttggagaaaagtttctcatccttatgtgattcttgaagctattaatactgctgctgaaaaaactgcttttgaacaaaattgcaaagctcgcaatattcttttgagtggtatttctcgttcagattatgatcgtgttgctcatcttcaaactgctcaggagatttggagtgctttgagtaattttcatcaaggaacaaataatattaaagaacttcgtcgtgatcttttcaaaaaggagtatattaaatttgagatgaaacctggagaagctttggatgactatctttctcggtttaataaaattttgagtgatcgtagatctgttgattcttcttatgatgctaattatccacaatctgagatttctcgccactttttgaatggtcttgacatatctatttgggagatgaaagttacatctattcacgaatctattaacacgtctactttgactttggattcactttatacaaaattgaaaacacatgagatgaatgttctttctcgaaaagttgattctaagtcgagtgctttagtttcctctttggatgttgatgcttcttcatctaagtcttcttttcttgctgtttttaatgccacatccgatgatcaactcgaacaaatcgaggaggaggatttggctttggtttcttatttgaaaaattctttgctaagattttctgatggtaaaaagaacctcaacatgattttggatcaatcagagattagcacacataaccgtggtttaggttttaatccttatgctcacaattttagacatcctcctgttgtgttaggtgttggtgctagaagtggcaagattttggttaaacttgatactaacaaaactgtgcttaaatctgttggtgtcatatctaatatgaatgcatcttcttcaaaatccaatgttgtgcatgcaaaatctcatgttgttgctcatgttgataaatctactagtgctaccaatgtgtctaatcatcgtgaaaaatatacttgttctttttgtggcaaagatggacatattgttggtttttgtttcagattagttcataaacagaaaaaggagagagagagattgcctttgcaaaatcaaagtggcaaaaatctggttttcccttgaggaaaccggtctgaccgcagtgggtcccgcggtcggaccggcgaccggtcagaccggctgaacagcctcggtcagaccgaccaccggtcagaccggctacacaccctcggtcataccggcctcggaggaatttttctgtaaattctaaaattgattttgcacgtggatatatgcctattggatcttctggtcgtgtgcctcagtactgacgcttcgacttctgcttgtgtgtaggctttggtggcaaggaaggagaatgtgtggatcgtggattccggttgttcgcgacacatcaccggtgataaaaattggttctcctccctaaagaaggcagctaagattgaatcgattatctttggtgatgctgctacaagtgccgttctcgctacaggtttggttaaggtaaatgaaaaatttgaattgaagaatgtagctttggttcaggacttaaagtacaatttgctttcagtttcacaaattattgatgaaaatttttgaggttcactttaagaaaactggaagtaaagtttttgattcttgtggtgattctgtgttgattatttctcgctatggaagagtgtttaaagctgattttgaaaatcctatttcacctatgataacatgtttggttgctaagtttgataaagatgtgatgttttggcatcgtagacttggacttgttggttttgatcatcttactaggttaagtggtttggatcttgttcgtggtttgcctaaacttaagaaagatcttgatttggtttgtacaccgtgtcgtcatgctaagatggtttctacttcacatgctcctattgtttctgtgatgacggatgcaccgagacagctattacatatggacactgttggtccagctagagtgcaatctgttggaggaaagtggtatgtgttggttattgttgacgatttttctagatattcttggcttttctttatggcaactaaggacgaagcttttcaacactttcgtggtttgtttcttcgattggagcttgaatttcctggttctttgaaaagaattcgaagtgataatggtggtgagtttaaaaatgcttcgtttgaacaattttgcaatgaaagaggtcttgaacatgaattttcttctcctcatgttcctcaacaaaaaggtgttgttgaaaggaaaaaccgtgttttggttgagatggctagaacgatgttggatgaatataaaactcctagaaaattttgggctgaggcgattaacactgcttgttatatttcaaatcgggttttcttgagatcaaaacttggaaaaacttcttatgaacttcgatttggacatcaacccaaagtttcacatttgcgtgtttttggttgcaagtgctttgtcttgaaatctggaaatttggatgagtttgaggcacgttctaccgatggattgtttcttggttaacccgcacatactcgtggctatcgtgtacttgttttggagaccaacaaagtttcttttgatgaggctagttcaggtactagacccgatattgcaggtacactctcacaggtttagggggaggatggtcatatttttgaagacgagagcgacgacaacgaccacgacgaggtcagctcggccggtcagactgggtgccaggccggtcggactgccggcacacctccggtcagaccgacccatgaggagcggtcagactggccagggtcgtcgggttcgggtactgttgatgctgttcgagatggtcctccagagattacaacttcgaccagtactgatacagaacgtggatcaacttcagaagtcgctgctcctttgcacatttagcgacgacatccgccggaacaaatcattggtaatataggtgagcggactacaaggtctaaggtaacggctcatgatgtttgtgcaaattctgcttttgttgcttcttttgaacccaaagatgtgtcacatgcattaactgatgaatcgtggattaatgccatgcatgaagaacttgaaaattttgagagaaacaaagtttggactttagttgaaccatgtcacaccctaaaaatcccaaatatataaattgttgtctaaattggaattattagaatttattttaaaagcctagaagagaagatctagttttaattaataaattccaatataaaatggggccagataaaatttcattaaatactttgcttaaaatttcattaaatactttgcttaattctataattgctagatttttctgggatttatttgagctaaggaagtatttttaataaatggaattgcatttcatgaataatttaaattggaaaaggttttaaattttctcttttggctttgggccgaaagtcggcccaaaaccttccctctctctctcctcttcggctcagtcagcccgcgcgcgcgctcggccgctgacaggtgggtcccacctgtcggactcgtcgtcctcctcgcgtcgaaaccctagccgcgccgcgccgccgccgtctccttccaaattcggccacccctttccttttccggtgaaatcaatagaggggaaatgatcttcggaatctcctctaccttttctcttttggaatcgtcggctaaaatcgtttggaaatccgtggattcgagtttgattcgaatcgatctctctcctccgaaccctagactttccttcgcgtcgccggtcgccgtgggccttcgccgccgcctcctaacccctataaattgacccccaagcccgccgctacccgccgccaccctcgccttcgcctctcgtcgccggtagagccctagcgccgtgtagcctagcgccgccatcgccgtcgttcgtccagccgtgcgccgccgccactccggtcgtcatcgtcgctcggggatgtcaccatcgtgatcgccaagccgtcaccaacctcatccgcccctccgtaggtcgccggagcaccgccgtcgtcgtcaggccgaaggtcgccgctgcttcttcctcgacgccatcgccgtccgttgatcttccgccgccgttttggtcaccggtgagttcgccgcgtcgccctctacgtgttggttccctccgttcgcgctgtcatgccatcgttcgccggcgagcatgcatgcccgagccgccgccggtggtggcgtcatcgccgacgtcatcgttgccatctgtcgtaggccgctcgtggaccgatagatctcggccgttcgtttttggatggatcggtctcggccgttcgtttccgtgagccgtcgccgtgcacccggtccatcgcgaaccctagctgctgacgcaataattcccttttccttttcaaaaataattcattattgcgtcataattcaattaaaatccatataagtgttttaatccgatttaatctttaaaaattcataactaattcatcttagctcggatatagttggttgaagtctctaaatttttctaaaattgagatctacatgttaaaaatatccacatgtactgttcatgcttgtttatgtgctgttttggtgattttgctcttttctctttagattccgacgttttcggagagtctgagtttgcaggagaagaatttgaagagtcccaaggctagcaaggcaagtcacacagatcccaaacaaccctttgagcatgttgatcccatttaaagctattgtttctattcaactattgcatttattttcgaatgtcattgggtggaattaacctattatttgttatggcacttttgttcttgattactttattccttgataccttgggatattgtaacttgactagttgagctttatatattggttcaactagatattagatatgattgcttagccatgcttagaaactttagcacactattgggataacttatgactcactattatttaatgatggcttaatgatagttcacgatggtcaatcgtgattggttaattaattaaattgccaactaaaacctgattaaaggtgggttgtgagcacatggttttgttggtcgttctcatgacaattaaggatcggttcacgagtttcggttgtgagacattaaccgtgccaaccacaagccagcgtgggcaacggctttaccttttgtataacatggttcattgcggggcaccagactaagaagtggcggaggtaagcccacgggggttgctggggagtccatgccttgtttataagggggtgattatgatccaggaacggtgcgctgtggtggattgtgttgtgtgaggggtactgtcacagctcctttccgaggtaccgtggtggtattgaggcacatggtgacatgttgtggggctgtgtcttgtgggtatagtggtacacctctggccagagtaaaactattcgaatagccgtgcccgcggttataggcgggtctaacaatgtctttcgtgattagtctcacacttctcatcataataaaagatgctataattggtaataatttgattagctcctggtttggaatggttaattcctggtttggagatagaactgtgcagccgggatggttgttcagaatggttgggcctatgcaatagggtatgttgtatagcgttggattaatattgtttaattattacttaactgttttaataaattctgaaatgtttattaaatgttgtttatgcaaatgaaaccctactatgccatcctttgttatcctgtgcacttgcatatttgctgcgtggcttgctgagtatgtcatatactcaccttgcaatcattcttcagaggaggagttctacagtgatgctgatggtgtggaggattaggtgtagccctggtcaagctgcctgtggagtagagtcgtctgcgccgtttatcttatttttccgctgcttagatctttattgattgagaggaactatctacctctgtaatgacattttattcgcttattaattagagtaataattgttctctattattgtcacgcccggaaattcactagtaatttccgaacttatttgtgcataaaatcctcgtccaggaatcagccgaggtacacaaactgacaatttaatatacagattcatcaaattaactaaaacgataaatacttacttatgaggcacttagtcctcattaagaagaaatttgcagcggaaaataaaatctagcgaagctccggctccactcccacaggcagctcaactggggtataagccaaacgtcttctccttctggatcctttttcttcaactgaggttgattgattattgcaaggatgagcatataacatactcaacaagccacacagcaaatatacaagtgcacaagcataatataggttcatttgcaaaagcagcatttagcaaaacttttaagagaagtaaaaacagtggagtaattaatcagaaattttaatcaacactgaacagcacacccatgctgcacaggcccaaccagctaaacaaattattaccaggtataacatccataattattgtgagaggtgtgggactaatcatgaaaaacattgctcaacccgcccataaccgcgggcacggctattcgaatagttttactctggccagaggtgtaccactgtacccacaagacacagcctcaacatcatgtctaccatgcgtcgcgatagtggaaagtacccgaatagaggctgtgacaataccctctgcacaacacaactcaccacagtgcaccattcctggatcataatcacctcctcaataaccagaggcatggactccccagcgacccccgtgggcttatctccgccacttctcagtctggtgctccgcaatgaaccatgctgtacaaaaggtaaagccgttgcccacgctggcttgtggttggcacgattaatgtttcacaatagtagctcgcgaaccggtccttaattgtcatgagcacaactctcaaaaccatgtgctcacaacccaccattatcaatttttagttggcaagtaattaattaaccaatcacgattaaccatcgtggactatcattaaaccatccttaaataatagtgaataataagttatcccaatagtgtgctaatgtttctaagcatggctaagcaatcatatctaatatctagctgaaccaatatatatagctcaactagtcaagttataataacccaaggtatcaaggaataaagtaatcaatgcaaacaggccataacaaaggaatagattcacaccacccagtgacattcgaaaataaatgcacagttgaaataaatagagaatttaaatataggatcaacatgctcaaaggattgtgtttaggatctgtgtgacttgccttgcaataatcggtcttcaattaatcttctgaacactcacgacgcactcacgaaccttcgcaacgacggaaacgacaagctaacacgcaaaacgaaaaaaaagaataataaaaaccaaataaacaatacataaaaagtaaacaaacatgtagatcataattttagatgaatttagcaacttgaaccactcaaaaccgagttacgatgatttagttatgaatttccgaagatttaatctattagaaaaacaggaaaaagaaaaacgatgatgacgtcatgatgacctcatcaatggccggaccatgatggcgacctcgccggagattggatggtcggctgcgactttggaggacatgtacacgtagaggacgacgagacgaacccaaaggtactcaccctcgaaccaaacgacgaacgacgacggccggcgacgaggtctagcggcggcgcggcttcggtcgacggcggcgacggggctccggtgaccggcgacagcggggagggagcggccgagcttgcccacacctcggcgcaccttacagcggtgacggcgaccgacggcaacggcggaggcgacggcgcgacacggccgaagttcggccggcggcggcggcgaacttggcggcggcggcggagaggctatggggcacgggagaccacgggagaggggcaaacgaaagaggaagactagggggtcctatttatatccttggattgaagagatcggactcctcccgcaagaaatcgatccgggaaatcaaaaactcggttttggagataaactcgaaaacgagttcgattcggatgagatactcaacgattagctccgattttttgggggtaaagatagaggaggataagaggaatatttcccctcaacaaaattggaaaaaaggagcaacggggaggcgagattggtgggaggaggcggcggcactgtgcacgggctggagagctcgggctctgtctggaggtagaagaaggagcactgtagcgacagggacgaaaaacagacttctatgcgggctgagaggaagggagagagaaggggaggcaaattagacttttcgtgttgggctggctgaaaacaaagcaaagaaagaaagagaagggggaagctcggctgggccgacttgggctgtacggccgagcacacaaaagagggagatgggctggaaagggcccaagactaggaagaggattattattacttttcgaattaaattaatcaatgaaatgatctttgaattgttaaaaatacttccaatgcccaaataatttcaagaaaaatcctgaaaatacttggactcaaagtacttaacaaaattataattagaccatttaatgattaatttaatatgtgggtaattactgaaatgctctttgtatgattaaaattaggaattgagcttcgaaaaatctgagaaaattccagagagtataattaaccatggagaatttaataaaaattaaatccatccatgctttatatttaggaaattttatttcccacatttaacttcacttgtaaattaaagatcatttaatataaattctaataataatttattaaataatttataaatcctgaaacgaaaatcaggatgtgacaattatcaatttgttattgtgtgcctcggctgattcctggacgagggttcacacatatgtaagcgtttggaattttggatagaaattccgggcgtgacaaaccaccttctggacataatattattggaaccaagtgggttttcaaaaataaacaaaatgatgatggtttgattgtgagaaataaagctagacttgttgctcaaggtttggattttgatgaaacttttgctcctgttgctagaattgaggcaattacacttttgttggcttttgctacttcaaaaggttttaaattgtatcaattggatgtgaaaagtgcttttctaaatggttttatacaggaagaagtttatatcaaataaccaccaggtttggaaaatccagattttcccaaccatgtttttaaattgtctaaagctttgtatggcttgaaacaagctcctagagcatggtatgataggcttaacaactttttgcttgcgaaaggttttacaatgggaaaggttgaaaaaacgctttttgttcttaagcatggtgataatcaactttttgttcagatttatgtggatgatatcatctttggttgttcgactcacgctttggttgtagattttgctgagattatgcgcagggaatttgagatgagcatgatgggtgagttatcgtactttttgggattgcaaattaagcaaacacctcaaggtacttttgtgcatcaaacgaagtatatgaaggatcttttgagacggttcaagatggagaactgcaagccaatttcaacaccaattggttctacagctgtgttggatcctgatgaagatggtgaagctgttgatcaaaaggaatatagaaatatgattggatctttgttgtatctaactgcttctaggtcagacatataatttgctgtgtgtttgtgtgcacgctttcaagcttctcctcgtgtttcacatcgtcaagcggtcaagcgaataatgaggtatttgaatcatacacatgagtttggaatttggtattctacttcatcttctatatgcttaagtggatattctgatactgattttggaggttgtagaattgataggaaaagtactagtggaacatgtcattttcttgttacatcattgattgcatggtcttctaggaaacaatctagtgttgctcagtcaactgctgaatctgaatatgttgctgctgctagttgttgttcacagattcttggcttttatctactttgaaagattatggtcttacttttgagaaagtacctctcttttgtgataatactagtgctatcaatattgctaagaatcctgttcaacactcacgcataaagcacattgatattcgttttcactttttgagggatcatgttgagaagggagatgttgaattgcagtttttggacacaaagttacaaattgctgatattttcactaaacctttggattctaatcgctttgcttttcttcgtggtgaattaggtataattcatccttttggtatggtttgagggggattttgtacctcatggttttatcgagcaataatatgacaatgagaaaaattgagaaaagagagctttgtttatacatatggtattttcttgtacatgctagcaatactttgaaggtttatttgtctctagcatagcatgtatgtatttttgtcttttcatgagatttagattttgtttttaagggagatgatgcatgacacttaaattctatacttgaattaagcaaatatgcaatgttgatgctagcatatggtttgatgtataaatgctatatatatatgctttattgactttttattcctcaaatagttttaattgctcattgtgaaaagataataaaaaatatgaaaaaaatgaataccgaatctttagaaacagtcttgacgattcgatgtgagcaaaataatgggtgccgaattcctggaaaaagtcttgacgacagggacgtacccggaataaaagagaaaaatatgagcaaaaaggctcaagaaaaataaaaagttaaaaaaattctcttggttgttttgtgctaaaggttacttgagaaagagtgataaatgtaataggtatatgtgtttagtgtttatttttcaacctatatgcttgttaagatgttgcattaaaaatcatatgaaatcatgaattttgactgttgattcaagcataattgtaaaatctttggttcatggttatactttaatgcatgattgttatattatagatgggtttatattctttttattgcaacacatgacttgatatgctatatgtatgctaaactcttgaacattaatgaacataattcctatgcttgatgaaatcattgtccaaagggggagaagtaatgtgaaaatttttggatttttggagaagcaagatgaatttttggagagttgttgagaagagcatgtttctggttcaattgggaatttcttactttttaaaaacggggagaagttttcttttggatttttgagcacgatgtgtacatttgtacgaagtgtgctttttaccacttttgtttttatttttccaaacaccaaaacattttttatgggtttgccaatgtgttcatcaaggtggagattgtaaaatcaaaggtgtttttgattattattctatgataaacaattgggcattagagattattggttttgttatttggaatttattcacgaagtggttttggagatgattggattcacaggtgatcgcaggattcattatttcatgtgaccggtcagaccgggctctggtagccggtcggaccggcggtatgcgcgcggtcagaccggccagcccgcggtctgaccggccgacactgtgtcgatttcggtttcgggttgtttgtttggatatccgtgattatttcatgattatgacttctagatggatactagatgtatataatactgttgtttgctactaatgagtcaagttggagatagcttggtttcggaatatggtttctttgtttgttccatgtgtaggtgactcgatgcctcgggagagtatttgcggtgatggaccgggagtcggcttggggataagacgacgtccgtggtggtcagagatcatgcgggatacttaggctagagttgatgcacgtggttgatggagattccatatggcatacgatggagttattgtgtgcgtatgggatgcggagtcaaatttggaaggagtccaaattttgtacgattggttatgtaaagtttctttcttgtactagagggtttcctaaggtgtttaggactcttagtatgagtttggttcgtggctttaggctgcctacctcatgtataaatagagggggagcgtgaggtttccctgtatcgctttggagagcaattgagttgagttttgagttagggtttcgagtttagttgaaatttttgtaaggagtgctgttggtgcactttgtaaacacagagagaatcaataaagtcatcatttactttaagagttcttcgatttgtgtttaccgggtttcggcggtcagaccggcgggagcacggcggtcagaccggcggcggcgacagcgagcagcagctgatctcggcggtcggaccgaagatataatcgcggtcagaccgatggcaaccaggcggtcagaccggcaggacaacttcggtcagaccgcgatccgtcgatttcgagggtaacttttatttccgctaaaagttttcggtttttgggtataccaaccattcacccccctttggttggcttagttcttgtgattcgattctacagaaatttgtggcattgaaggatttaccgaaggtgcgatgcccatttcggcctgtttatcgtgaaatggtgataaacggccgcagctataaggtttttaaggttgccgaatggcttcgggtgcaccccgggcgaaccttagaagactacgatctttgttcattcaagacgtttggaggatatggctcacttttggcgaaaccatcaaaagactgatcggcaggaggcgatctcccagcatcgttacagtctagtctgtgtttcaccctcttctcctcttagggttgtgtatgatattagtagtgatgacgaacctagttcgcctgattattcctaagagagagagaatgtgatcgcgggggcgaagatgtaatttatctgtaagctgggctgtaacgccattgctattttcttgtcacttgtatcattgtaatgggtttgtatttttcgatacatttttatttaaaatcaataaaggtgcgttttatttccttttcgctatttttgcattgtcacttcgcgtgcttttcgttgggtcggaacgtgtcggctcctttgcatatattagcgaaataggttttgacttttcagctttcggcttccgttttcgatccgttttgttctacgttgtaggaagcactcgtgctttccttttgatcgagtgtaacggtgttcggctagttgttctccgaaacaagctgttgcggtttcaatcgtttggcgagcgatgcttcgcctgattcgtttcgcccccctggcctttttcgctgatcaggcgtttgccttggggtttttccacaaattatcaatcgcacaaacaaataaaaagaaggcagaggacatagagattttatactggttcgggccttcgtggtggataatagccctacatctagttttttgtctttttttcattttcatcttttttttctcttttttttcttaccgaagggcttacataacgatatatacatttttacaagttggcgatatgggtgccatccgttctagacataaaaacgcttgagagaggcagcgttctaggaatggtcgaactcttcgccttccagtgtcgccagtcgaaaggaccccgtcctggacttgtgcttgatgaggtacggtccttcccacttcgattcaagcttgccaacggctatcgggttcgccttcttccttaagacaagatgaccaggcaacagctccgtcggtcgaacttttttgttgtaagttgccgaagtgcctatggcatacttgcgcatgtgctcgagtgcttcgactcttaccccctccaagagttcaagcgacacctcgcgcccctcttcgcccccagagaacgtcacccttggtgagttagtccttagctctgttggggtcattgcctcatcaccataaagaagcgtgaacgggctgaacttggttggtcttgtgggggtcgtccgaagggcccaaagaacagatagaattttctctggccatttgcccttcgctgccccctcaagccttttctttagtgcttttaggatcttaccatttgtatgtatggccgccccatttgactgcgggtgcatgaccgacgcgaacctgatttccaggttaagcccttcgcacatttctctgaacttgtcagagttgaactgcttgccgttgtcagtgataaactcttttggtactccaaaacggcaaacaatgtttttccatacaaacttctgtactgcggccgaagtgatatgagctagcaggctttgcatgtattgctttatctcgtcgaacgctgcttggcattcgggtgtccagttgaattttcccgtgccctggagggttttgaagaagagcaaacctctttcggctgcctttgagaggaatcgactgagtgccgcaattcggcctacgagcttttgtacttaacgtacgctcgacggaggcttcatttgctgaatggcatcgattttctcgggattcgcctcgatgcctctttcagaaacaaggaaacccaacaacttgcctgcgcgaacgccgaaaacacacttcccaggattcagtttcatacccgctgcacgcaagttgttgaaggtctcctgtaggtcggacgcgtggttgaaagccttccggctttttacggcgatgtcgtcgacataagcttccacgtttcgccccaatttcttgtaaaggaccttgtacaccagcctggcgaaggttgctctggcattcctcaggccgaaaggcatcctgaggtgacaaaaggtgccaaatggtgtgatgaaggctgtcttggggatgttggccgtgttcatgtggatctagtgatagccggaatatgcatctaggaagctcatgagttcgcagccaactatcaaatccacgagctagtcgatccgtggcaaggggaaatcgtccttcggacatgctttgtttaaatatgtgaaatcgacacacatgcgccatttgccgtttgacttccgcaccagcactggattctccagccactcaggatggtcaactcaggatggtcaatctcttgaatgaccccagccttgagcaatttttggacttcggcttttgctgcctcttggcgatcagcggacatcttgcgtagcttctgtttccttggcttggcatccggcttgactgctaggtgatgcatgatgagatctgtcgaaacacctcctacttcatcggggcctcaggcgaagatatcaatgttcttcttgagtacctctaggatgttctcagcttcttcttcgcccatgtcgccccccagcgatacgagctttgtggggtcggcatcatcaatctgtatcttgattatcttgtcgtgtggggcgggctttggcgcgtgcttcgcacggtcatgcggttcggcctcaacattgtgcactacttatggccagatcgccttttgaagcagccaaaggctgaagccccttgaccacgatcactcctgtcgggccgggcatcttgagcttgagataattgtggtgggaaatggcttcgaacttgttcaaggttgcacggccgaagatggcgttgtagttgtacgggatgtcgacaacgtcgaacaatacttgctcttcgcgtctgttttccgccatgctgaaggctaccatcaactgtgcttggccaagaacttgaactgcttctccgctatcagggcgggcatcttgagcttgagataattgtggtgggaaatggcttcgaacttgttcaaggttgcacggccgaagatggcgttgtagttgtacgggatgtcgacaacgtcgaacaatacttgctcttcgcgtctgttttccgccgtgcggaaggctaccatcaactgtgcttggccaagaacttgaactgcttctccgctgaaacgtcggagcgatgctggtgctggggtaagggcttgggtggctaaccccatcttggcatatgcttcggcgaagatgacatcggccgaagtccctccgtccaccaggattcgccggacctcgaaaccagctatctcggctgagatcaccagaggatcttgatgcgggaacattactccttcggcatctcctggcctaaaagaaatttgctggttcagatactgcggggccccttcgccagccaaagtgatattgtggaccgttcgtagctgcatcttcttttgtcgcttcgacagctggatcggcgggtcggcccttgtaatcacttggattactctgcgctgcgcgtcttggcactgttcggggggtgcttgttcttgagctgcttcacgaggtgcttcgacagctgctccctgctgcggccttggatcttgcccgctgacacgttgccgaatgtttcggcattgctctgtggtgtgtgaagagcgtctgagaaaggcgcagtagaggtcttttcggaccttcttgcggacaggctgctgatggttgcttgcttgctgggcgtcgaactccttgcggagggcttgcacttctttgacagccatcactgccttgcccgcacggtcggttctgaacttcctctagatcatgggggggggcttgaccttgccttggcggttgtccttggatggctggggctggcgaacagcgagaggaggtggttcggcaacttgaacttgtgcttgggcttgggctgcggcgacggaagccttatgatactcatcttgtattgcttgccatcgcttggaatcctcttcgccccttgcgtacccgtcaatgatgcaaagtaggtgctcaagcgtctgtggctccttattggcgatttttcttatgagttcaccctcgagtagaccggtcgaagcggcgtttatgacagatgcctcggttatgtcttgaacttggcaccgggcttgcgagaagcgacgcatgtactcccttatcgactcccccggcctctggcgaatgccgagcagatgttgctgcgtcttcggctcctcataggtgcctcgaaagttaaggacaaagatatcgcgtaattgctcccatgagtaaatgttattggctggtaaattgaaataccaagaacgggcaatgccgtctagagcgagatgtattacctttgccttggtattttcgtcgccatgagccgcttcgatcgcggactcataaatggagaggaattcctttgggtctgtttcacctgagtagcgtgggacgggtgggaacttgaactagggtgggattggacgggtcttgattcccccactcagcgatagccccttttcgctccctgccctgttcacggcaccttgctgcgggtatggcgtggcgaagggcgaaatcatggcttgcgcgtgaggttgggccatggcattcggctgcccggctccgattggtgatgcttgctgagctaccatggatgggtcaaaagttggctgtgaccgtgtcatggcgacctggtttggtgcctggtttgctccgaagcctgacgttggtgcttgcggccgaatggttggtgcctaagaagcattgatgaagttgaactacggtccttgactccacggcgaagctcccagacttggctgattcgacggcaaccaactcggtgcatcatgacttgtattcccctccgggtgtgctgaaggggctatacctgaaatgctatggggttggctgagctgctgaaggaaagcttggagctgcgcccgcagagccgaagccccttctgccattgtttgtggtgcttggccaggtggttgaggttgtacttgtgtaacaccctgcctccaaaatccgcattagtccactctacacgttgagcggacccactttcgcatggtatcgtgcttacactttcgtcctcgcttcgtgtaaaagggttaacctggggataccatggttggagcaccaaggcttataagtaggccttcacccacctaaacttccaaggtggtactaaaccaccactacacatccacttctgggccacatgggccaaactcacactactaacaggcttcaaacgggttggggtgttacattcacccccccttaagggctgacgccccggcagctcaccgtttacacggcagaggcctagaaccccctccggtgcagaccatggccttttaccccccttaagggctgacgccccggcagctcaccgtttacatggcagaggcctagaaccccctccggtgcagaccatggcccaaagcacatgcatcacacaacggaggtttatgctctgataccaactgtaacaccctgcctccaaaatccgcattagtccactctacacgttgagcggacccacgttcgcatggtatcccgcttacactttcgtcctcgcttcgtgtaaaagggttaacccggggataccatggttggagcaccaaggcttataagcaggctctcacccacctaaacttccaaggtggtactaaaccaccactacacatccacttctgggccacatgggccaaactcacactactaacaggcttcaaacgggctggggtgttacaacttgggcagcgaccggctgagcttgcagctgcacgtgaggggccggatgcgctgctgcggtcgatggctgcccgacgaagtacattggcgcttgcgcgacttgtggcggaaggggctgggtcggcacttgtggatagacttggggtgggacataacctgccgaatactggaggattggtgctgaagcgaccttggatcgtcttgccgtctcgtatgcttgctgttgttcttgcatttggcgaagcatgtcttggagtcgtgtcatgttctgtcgcatggcttccatgttggcttcggtttgtgtttcggggttagggttgacttgggcttgcacagcggtgagcgcagttggggccgctgccgactacgacggagcggcttggggcaccagcagttggcttgtcaaaaggatctccgccctggtctggagtgcccttgccgccgcagccgccttcgccataccagccatgttcggcacctgcacagaggtggcaggggccgaaggcggtagtgatggtgcaggtgcggaagctgatggcgctcctccatcttcggcaacgggcgccgaagtctctgctccctcttcggtggccatatccgccctgacgtcactttcctttcgccttgtaaccttctccttcacgaccttcttcggtggcattcgctctcaatggtttcgcttggaggtccccacgatcgacgccagctgctgtcgaaacgacaaccgcatacgtcgaaagacgtggtcactcaacagtggttgggaaagaagttgtcacgtcctgataaatttatcccgaaataaaaatcattctctaaaaggaataatagaattaattaaaaatcgaaaagaaattgacaaacactaaaatacgtacaagaaaaattcgaatatggtccagagaatttttgttaaattctccttggtctaaaaggagccctcaaattttacttgaattttcagagcaccggaaataattattaagcaacaaaaacaattaacaaagtttactaaaaagaaaaactaaaaataatccccctcctccctttgggccaagtctggcccaaagtcctccctctctctctctcggcctgcggccaaagtcctcacttcctccctctctttctctccctctcctcctctccctccttctcttgggcctcctctccttcccctcggcccagccccctcctcctccctctctcccccaggtcgcctctccctcctctcctcctgggccggccgcccggcccaaaccgcgccacccagccgcccctcccgcgcacgcgcgttgcacgcgcgctaactgcgcgcccgaccggtgggtcccacccacccggtcgtctccttcctcccgcccggcatcctttctctcttctctctcccgtgaaacctagcgtcgattcctcccctaaatccacgcgaatcaatgcccttccttccaaattgattggggggaattaatccccgttccttccacatcaattccccctaatttcccccttgattcgtgcccccaatcgtcgggaacgcccacgccaaccccggccaccttccaaggccgccggccggcttttccgccgttgttccctcctctcccgtccccggctccctctcctaccctataaaatggaacaccctcgctccgttctatcgttttagccccctcctgcgctctcccgtggcctcaccacctctccccgcagccctcctctctctcccacaccgccggccaactccagccgccactgccgcgccgctcaggtgcgggctggccgtgccgtcgccgccagcggcctcgcagccgcctcctcttccccggcgtcgcctccgtttcgcgggaaattatcggagcgacgtcctcgcagacgaccagtggtgtcgccaccactccaccgcctccagccgcctgtgccgcctcgccggtgcagcggctgtcgtcatcgccatcctccctcaacgtcgccgcgtcgccctccacccaggactgccctcggtttcgccggaacgccgtcgcccgtggcgcctctccctcggtctcgccggagttccttcggcaacccctttcgctgtgccagcgacgcatcacctccggcatcgcagcggcgagccagcgacgtcatcctcagcatcgccttccctccatctgaacccctccactgtccatcgtcgtcgtctccgttcgtcctcgtcgacgactcctccggtcggtcgttcgtcctcaccggctcatcgtctcgcggcgccgcctccgtcttcggattcacagcggcgtgttccatgccgtcctcgtcgccgtgcagccactgccggctgcccacgtcgcctcctcgccggccccggtcctcgtcatcgtcgtcctcccgtcgttcccggtcgtcgtggcgttcgtccctccgtcaagccgttctcgttcgtcgtcctcgctacgtcaagtgccgcagccccgtcatcgtcttcgtcctcgcctctgcgtcgccaagcgttgcgccggccgcgtctcgccttcgtccaaggatcgccgccgaagtcgtcccctcgcctttcgtctccatcgttcccggccgtctccgccgcgcccgttcatcgttgttgttccctcgcctcgtcacgtggtggtaaggatctctctccctcatcgccctcgtcctcatcctttcggtgtcgcccgtgcccgttgtgcggttgtcggccccggtacccatgtattggtgtcggtagtcgttcgcttgtgcgtgtggtgaccgtgttagtgtgcccgctcggtagccgcgtggtttccacgtgtgcagcccgcgtagtgtctagtggagtccgtttgtcggccactcgcctcggttgacacacagggtccgcttccgtcgacccgtggaccgtctctgtgtacccggtcagccgtggtcccttaggttgacaagtggggtccgcatgtcaacggcgcagccttcctgtcttttccaggctagcgcttatacatgttttatagttgtaaaacctaattataataatccgcaaatctccatataacagcattaaacttcggatgaccatgcattggtcatacgagctccgaatcgatccgttcaagtctcctaatgtttgttataacctaaagaaccctgtgctttatttttatgtattgttattgcttctttataggcttgtagctttgcttgtgtgcttcgcgtagcttctgtcgttcctgagtttcccgaagcgtggttcgcggtcgtcgccgaaggttcggaaggccattatctttgagcaaggcaagtcacatcatccttgagcatattgaatcccagtttataaaattattttgatttaaattattgcattatcgctttattcaaattcccgcattatcactattttatttagccatgcctatttatctttgttatgaccttatcattgttgttattgttattattgccttgttcaccctaggataaacaaaactccaactagtgggtaccctattcatggttccactagtatgaatttaggtagatgcttcgctgactaattaggcaacattaggtggttttataactttagactttgggaattctcatatcatttggacactatggtatggttggcttatgttggaattggacacacacctccccctctattcaaaacccccaaaatggttttaggctgggctcgaggtccgtggttgggttttgttagtcgtacctcgggtactataaggattaagctcgggcctctgttggaaagcactaccgtacttccacatgtctagtgggtaaggcttagtttgtggctcagtctggttataaacaaaggtacacggatggagatggacgaagtcgggggtcgatggacatctttaggacaaataaaggctacacgagttgcggcccggtagtcgagatatcatggcacagggctggtgtcctgctgctaggggctcaatcttgcctgtctgtcccggaggttctggccgtaggcggggctgggtcagtactcttgtttatggctaggatgggttgggaactatgtcgcatcttcagtccgtatgccgtggtggtatgtggcacgtggttacacgtgaggaagatgtgtcttgtgggtaaagatgtacacctctgataagagtataatctattcgaatagccgcgccctcggttatgggcaagcctagcaatgtacccaagttagtgttttaattcttaaaacctgcttaacaactaaaatgtggaatggttggcctgggttggcttgggatgagctgggacccagggtcgggttgccagttcggtctgaatcatcgtaggccttggattaaggcaggttcgtgagggtttacggccttgattaataacactttgtagctctaggatcatctttataaaatggctttgggcaactaagtgacttttaaatgctgtttactgcaaaacttaacccctatattattaccccttgcacccccttgcattaatcatgcatctgccggtgtggcttgctgagtactgtggttgtactcattcttgctcaatctttcccccccttcagtaagagaagctttggagaagaagtcttaggtggagtcctggcttataccccagttgagtgcctgtgaagatagagccgtaggcccgctagtccgctgctgtttatttttgattgtcaggccttaagtgcctttgtaataatttaaatattatcgatataataaagatgtgccttttgtatcatgtttgtgtggtgtaccccagcttttcctgggacggggattaatacactagtgttcgggaaaatgtatttttctcggtcgcgacaagatggtatcaaagccatatcgactgtaggataagccaagtggataaaacctaaggtcatattttataaataaaactatttgcgaaagttctttttttctccttcccctaatgctatttgcaaaaggtttactcttttcttccttcttcaaatttctagtagtactagatggtcagctttgcgaagaagaagatgtcgtcaatttctgccgaagctccggaagattgcgggatccgctagcgaagtggaggaagcagtgaagccagctgtgaaggagtgaagatcttggataacccgtcgcagaacctaagccaccctctagggtagagtcgttagtcgtgtgttcctttgcttgtatgtgtagcgcgtggtttgcatcagtgggttgtgatgtaaccatgctaggttgtttgcttaatcaacttgcagaataagcaaaacaaacaacacatcaacaaaaagagttagttcctttaaggtcttgtccctagttctggtctattctttccttgtttgcttcctctctcaacctctacattgtgacagatggataacactggtaacaaaggctatgtgaatgatggatccgatgactcaagaacccaagccaatgggaatgagaaaagcatcaacgaaacctcaccagagctaatccaaattgtggttaaccaaaccaacatgttggcaacagcatttcaactattacagaattggaacaacccagcaggggcaaccaacgttcaagtacctacagtccagcaacagtgcaagttatcagaatttctaaaaactaagcctccaacctttgccattgccgtcgatcctatggaagctagtgattggttgcgcacagtcgagaagaagctggggttgattcagtgcacagaccaggagcgggttgtctttgcaactcatcagttggttggaccagcttcagaatggtgggatagctacgaagcatcacggccagaaggacataccatcacctgggatgagttttcagccgtgttgaagagatcacatgttcccgcaggaatgatcacactgagaaaacgagaattccgctacctgaagcaagaagatttgaccgtcacagagtacctgcatgagttccatcgtttggctcactatgtaccagaagatgtggaaactgatgaagacaaacaagagaagtttctctaggggttaaaagatgagatcgcagtgcaactactcctagaggaatatgaagattttgagaaacttgtggacaaaaccatacaactcgaaagtgagcataatcggatgaagaactgcaagagaaggattgtcagcatcccaacatttccatgtggtaaccaaagacagcgcactgagccacttcagatcaccggatcttctattgcgcatcaagagttcctgccccaagaagacggacacaatgcagacaataacattagcaatactaatgatgatgataccaccaacaaccatgcttcttgccccattagtgaccactcgaatcaagcgtgcaatgtcaacatcattcaccaaggtgtcgacgatagtatcaatgatggcacccagaatgacaaccctagaaattgtgatagcaactatggtaccactgatgccaatgttagcaaggatttccaaccaccaattccaactccaagtcagaatgatcgtccccagacggacagctcaataaagaagacgttgatttgttacaactgcaaagaaccagggcatgacttgagggactgtctacaaccaaggcaaagtcggcctccacattaccgccaatttacacgaagcagacatcctaatcgtattgtggtcactggagcaaacgccatacctgtgaggcctcgtgttaatcataacccatagcagaaacaatgtaccgatgctaagcacctttccttttaggcagtgcttagtattcattaataagggagaaatttgtaatatagacatgttctatgaggattcttttggaagatgcggatatgggattatgtgtataattgcttactaataaaggagacctagggtctcgtgtcagaggaactatattctaacctcgagttaataaccaacctgttgatggaaaagaaaaccaattaaactgtgttggattaaaaagccaatgagacagtagttggggataagagtttggatacgccttttacggatcaagataaggattgttggatgaaacccataagggtacctcccatgcctctacattgataagttcggatatacctgcaaacagttaagaagatctaggagacatcaatatttgagaacatagtagtcgatggttggtaattagtctatcaggtatcagaaaaggttcaaaggtgatatggcagaagaacaatttggatgctccccatctcgaggaagcactaaagatgatcatcggcaattaaaccctagtggcatagatacagatagcaagcgatgtatttccctgaaggtagtcagtgcagctttttgacgaaccacttcaaggtttcactgaaaggcagcaggccaaaggacctcagttctctagccggaaagaagtaggccgaaaggtgattgataaaggataatcagaagcatgctttgcatcactcgaggaagacccctgatcaccctgcaatagtcaccttgtcattgaggtagaaaaaaaaatttcatgagtaagcaagatgacctaggtaaaagtgtttgtttgaaggcaaggaatgaaatctttaactcggtatcagatgctacacggagtgaaaagtgcaggcaccggttaccaggcaatgccatgtcttggaagatgatccaatgggaatgaacccttcaaggtcgaaggtgtaaaggaatacgttggatgctaaataatgacaacatgaagataatagtgggataagttggttctgttgagaaacataattcaaaggcgaaattatcgacccttgcatcgaatagcagaagtagctagcacccggagaccaggaaagctaatatgaggcagttggtggcaagttagaagtaaatgacaaacatgatattctcatgatgacaagcatggtatcctagtaatgacaagctgatgtcgacgcataacgtgaagtgggtaacttgtatgaggttgatgccaaagatatgaattataagaagttctggaactaaagccccatcttcaagtgccacatcccagtcgaagtcagctaaaggttcaaccagggacaagtcaggtgaagagaagattccatctgcaagaggagatcgagccaagcagtccagagtggagaagttttgctaggcaagtttgttatagaagacgcgacggaagaagtcagacaagaagagaagactgcccaacctatcttcttgctagcctcctcgaatctcggggacgagattcctgtaagaggggtggatttgtcacgtcctgataaattcatcccgaaataaaaatcattctctaaaaggaataatagaattaattaaaattcaaaaagaaattggcaaacactaaaatacgtacaagaaaaatttgaatgtggt

SEQ ID NO: 8106 - DNA, 26883 bp, Oryza sativa
  unsure (1)..(26883): unsure at all n locations
tgtctcgagagcaaaatgtagaagctaatgatttggcccaaggagtatcagggtacaagctgatcttacctgatttagccttatatttcatgtgcttaattggtatgcttgatctgccttttatattgagatcttgttgcttttaggtatattaagcttcttgtttgatatatttagcttgctttaatatcttaatatagagtagtatcagagtattagcctgtacttgctagatctatctgatcggctatgctataaacatttataatctccttgttagtatatatttcgatctaagtgatttatactgtttcggcatggcgaccgatatgtcccaatcacttgatttaagtatatatcgacataagtattgtatactgttaatatctatagccgaccgagtagatttagttctttattatttattaacatatgccgatcgatgcaaagatgacatcggctcaaagataaatgatatgtcatcggcaactagccaatcggctatcgtttatggatttaacctcggtttctttgtcttcatttcttgttgattacaggatcaaatcaactggcacgctcatagttccaaaggcaagatttcttggacatgcactggagttaagcagatctcccaggcctcgtggttttcacatcaacagggtgtccgtggatgagggcgaagaggtgattgggcttccacgcctcgttcttccttccgacacccagcgtgagtttttcttttgattttcgacatgcttttcgacgtcatcttcattttcttttatgaagatatgtttcgactcactccgcttttccttgttcccttcttacgcagttcgcacattggaagatatggaagcggaagcggcaaagatggtcggagctctgaccaccaccgaattcggctgcttgcttcagcgccaagccgatgggagggcgaaccgcgtctatgtcggcgacctggctgttcggtcgattatttcgaacgccaccgatgacgacgctgggacatcgaaaaaaagcaagcgggccgttgcgaagggtgtgcgagcacaagctcatcgcgccagcaaggacacggtcgacagcgacgcggataacgaggacgaagaggccgggtcagacgaggatggcggatcgcgcggctacacccccagtcccgtccaggcgaaggttggagcgggtgctcatgtttcgcccgtgcgtccgcgagacgtcgctggtgcgaatgggctcctggcgatctccagttctgcggcgaagccaggggcgccagctaggaagaagaagggggtggtgcaaatcgccgccggcttttctaacagcgaggcgtcttccgacgggacgcctacttcgcccgtgctgcggcgcgctggtcctcggaggcgccggtcaccaccgcccgctagcgacgccgaagcgccaacaggtggcaatgtttcggcccctgctgccggctccggttggggtgatcgaatcggcggcggcgaatgccccaggtaccgggagtgttgctgcagctccttcgacgagccatcggcgggacggaaaggggccggctgtcgaaatgactgtgtctgacatgacactttccgccccgcattttgtttccgccgatttcacctctcggaccaaaattacccccttcgtggatggggtgtgccaaattgtggccccatccgacggtttgagtcttttcaccgagctcaacgagttcggcaaaaactacgcagttacagagagcctttttgagcgggtatggactattattattgtgttccctttcgcttgcgcaatgcttttatccttttttgcctttgttataataaatggcttcggcttctcttactcagggtcttgcggcgcatctaagcgcgaaacggtccgcctcggagcgactagacgggtaccgactccgtcttcggaaagctgaggaggaccttcaccacaaagaggacgaacgccgggtcgtggcggacgccctgaagaaggcgaacgcggagaacaaatccctcacgggggaaaacaagtctcttcgcgtcgacctggaaagggcgaacgggagggccgccgaacaggagcgtcaacttgccgcggccgaggagaagattaggtccctcgagacccggcttattgcggccgaagctgctactgaggctttggcgccggcgacggagtctgccaagcaagcctgctacacccttcggctggctctcaatgacatcggcgcgcgtgcggaaggcgctccgggtgaagatgggacggtgttcaacttctccgagtggacgcaggatgcggccggctcggttgtcgaagtggctagcgcctatggagattgctgcgcgcgcgtttctgcgggttttgtgctcagcttgcttcacgagcatggttgcggccatgttgaaaatttttccgagctcgtgaaaggggactggcctgaaaactcccagccttccggagcggctttgatggccttccgaaagggcttttgggaggatggcggtaaagtctgcgcgaagacacgtctgcgcgagaaactcgagaagatggtgaaagccgaagacgccgctgccgccaacgctggggaagaccctgggccgtcggagcctgctgttgagcgtgagggcgaaggagacgaaggccaagaccaccctgaggtgtgagaccgttcgctctcgtgttccttttgccttttaggctttttgtagtttttgtttatgtatatagttttgcatgtttggctaatggccgctatcgccttgtagccgttatggctgtcctttattaatgaaaagtttgtatttcgccaatcgtgcgtttttattggaatgtgggattgatttcgttagcatttctcccttttgcactgttcctttgtgccttgctggcagggttgtagccggaaaatgtgagttcggcctcccttcatggattggcgaaataagaacgagaagttcatggcggagaagggcatacccaagactaaatgtcctttttggcccgtttatcgcgaaatgttaaaaaacggcaacagctacaaggttataaaggttgcaggatggatgcgagcacatccgagccgaaccctagaggattatgaccgctatcatgtggtgcgtcgcgaagatagcacaattttttggcgaaactttaagaggtcgattcgctaagaggcgatcgctcgtcgccgttatagtttggtttgtgcttggcccccatcccctttaagggttgtgtataatgttagtagtgacgacgaaactggttcgccgggttgtaatatagatgagggcgaaagtgtaaacgatgatgtaatctttttgtgaggttctcacgtgaatacaacatgttttttattttgtttagtttatgctttgtaaattttggaacacatcttcatgctatcattcgcatagtcactgtcgtgctttcgttaggtcaaaacatgtcggcccctctgcgtactatagcgaaaagatatgtttatttctcagctctcttctttcgttttcggctcgtggcaggcgtgctgtcgagcatcgtggcctgtgtgtaagctgaatgcaacggtgttttgacttttattttcaaaatcgagctgtcgcggtttcaacgttcggtgagctatgcttcgaccgattcgtttcgcccccctggcgttttcgctgatcaagcgtttgccttggggtttttccacgagaacattattcacaaaaggggaggatgaaaaagatagaaagattttatattggttcgggcctccaaggtggataataaccctacgtccagtttttcttttttgcttttttcattttcctctttttttgtgctgaacggcttacatagtatgtacaactgtacaattggcgaatcgggtgccacccgttttacacataaaattgtctaagggaagcagcgtttcaggagtggtcgaactcttcttcctccaaagttgccagccgaaaagaacctgttagagatttgtgcttgattaggtatggtccttcccacttagagtccagtttccccactgccacggggttcgccttttttcttagcacgagatggccgggccaaagttccgtcggtcgaacctttttgttgtaggttgccgaagtaccttccgcgtacttgctcatgtgttgtagagcttcgactcgtaccccttgcaagagttcgagcaacacttcgcgcccattttcgcccccggagaacatcacccttggtgagttagaccctagttctgccggcgtcatcgccacttctccgtagagaagcatgaaagggctgaactttgttggccttgtaggggtcatccgaagggcctagagaacggatagcatttcgtctggctatttacccttcgccgccccctcaagtctcttctttagaacctcgaggatttttccatttgcccattcggccgccccgttcgactgcgggtgtgcgaccgaagcgaatctgatttgcaggtttagcccctcgcacatttctcggaatttctcggaatcgaattgtttaccattgtcagtgatgaactcttttggtaccccgaatcggcaaacaatgttcttccagacaaacttttgaaccgcagctgtggttattgtgcctagtggttcggcttcaaccgagcgagagaagtactcgatggctactatggcgaacttgtagccgtttcgcgccactgggaatgggccgatgatgtctaagccccaccttgcgaatggccagattggcgcgattggctgtagttcgtattgtggtgccgtttggcttcagccatgtctctggcagctttcgcactttttgacatgttcaacgcatactttaagtatggttggccaatatatgccttggcgaaatacttttgacgcgacggtccttgctgccaggtgtgctccgcacatcccttggtatatttcctttaccatctcctcacctttggagaaagatacacagcgaagcatgggctgtagtattccagttcggtacaattgcccagagattatcttgtacttcgcggttctgatctgcagctgttttgcctttggttcgtcatctggcagccatccctctttgaggtgcttgacgaagggcgttcgccagtcatctgggtcttcgcccagttcgcnctggtcgattgccataatgtgttggctttctgttggcacacttggtgaatacaggacttcaaagaagacccctagcgaatgcggccccccacaggcggctaattttgccaatgcgtcagcctcttcgttttgacctcggggcaagtgttcgaccgttatgctggcgaaagttttttccatagatcgaacggcttcgaggtattttctcattccttcctcctttgcttcaaaggatttatcgacttggctagcgacaagttttgagtctgttcggattagaagcctccgaacgcctaacgactttgcttttctcagccccgtcaacactgcttcatattcagccgtgttgttggttgtgtcgaactgcagtctagctgcgtagcaaattaatacgtcccctggcgaagtcaggattgcggcgatccccgcccccttgtgagaccacgagccgtctaagtgcatgacccatggctgttcgacgggcatccgtgctctgggacggatgcgggtgtccattcagccatgaagtcggcgaggagttgggacttgattgcagtgcgagcgacaaagtgtaggtcgaagggtgatagctcagcagcccacttgcttcgacgccccgtgatttcttttcctcaaagcacttcgcccaaaggatactgcgaaggtaccacgattttgtcggcttggtaatagtgcttgagctttcttgaagccatcatttgggcgtaagcgagtttttccatttcgatgtatctgaccttcgcccctggagcgcttcggagacaaaataaactggcttttggccaacttcagtttcttgtaccaaagctgcgctgacagcaacgggcgaagccgctagatagagccagagttcgcttcctgccactaagctaactagagttggagggctttggagatactgcttaaactcgtcgaaagctttttggcattcgggtgtccaacagaactttcctaccccgcgaagggtcttgaaaaaaggcaagcctctttcggctgcttttgacaggaattgactaagtgccgcaattcgccccgtgagctttcgtacttgtcgtacgctcgatggtggcttcatttgctgaatggcatcgatttttttggggttcgcttcgatcccccgttcggatacaagaaatcccaacaacttaccaacacgaacgccgaatacacacttatctaggttcagtttcatgccgattgcgtggagattgtcgaaagtctcttgcaaatctgatgagtggtcgaaggccttgcggctttttacgacgatgtcatcaacataagcttcaacatttcgccccaattgggaccccaggactttgtacactagcctgacaaacgtagcccctgcatttctaagaccgaaagacattctgaagtggcagaaggtgccgaagggcgtgatgaaggctgtcttcgggatgtcagccggattcatgtgaatttggtgatatcctgagtatgcatccaagaagctcatgagttcgcacccggcggtcgaatcgactagctgatcgatccggggcaacgggaagtcatccttcggacacatcttgttgaggtccgtgaagtcgacacacattcgccacttgccatttgacttcctcaccagtactgggtttgctaaccactctgggtggtcgatctctcgtatcactcccgcttttagcagcttgttcacttctgctttcaccgcctcccggcgatcggccgacattttcctcaacttttgcttcttcggccttgcttcaggcttgactgcgagatggtgcattatgaggtctggcgagacaccccctacttcgtctggcccccaagcgaagatgtcgatgttcttcttaagcacaaccatggtgttgtcaatttcttgttcgctcaggtctccaccaagcgatatgaccttggtggggtcggaatcatctatttgtcgctagatgaccttgccgtgggggtgggcttcggaactggttttgttttctcttgtccttcaacctctacggtgtggacttccctaccgaaaggggccactgtagcggtcgaaggctgggaacccttgacaactattacgccggtcgagcgtggcatcttgagcttgaggtagttgtgatgagagactgcttcgaacttggtcatagtgcccctgccgaagatggcgttgtagttgtatgggatgtcaacaatgtcgaagagtatctcctcttctcttctattctcttgcaagccaaaggcgactttgacgagggtttgtcccagaacttgcactgtttcacctccaaatcctctgagcgaagttggtgcttgggatagcgccaatgtcggcagacccatcttggcgtatgtcccggcgaacatgacatcagccgaacttcctccgtcgatcaggatgcgccggacttcaaaaccagccatttctgcagaaacaaccagcgggtcctgatgcgggaaaagaactccttcggcatcttctggcccgaaggatattggctgtgacaagtatcttggtgccccatcttcggccgaaacgatgttgtgcactgttcgaagttgcatcttcttttgccatttagacacttgtgaggggggatcagatcttgtaatgacttgaatcactcttcgccgcacgtcttggcgttgttctacttgaggtgcttggttagggatcgcttcgcgcggcgcctcttcgacccttccttgttgctgccttggcgcttgagcgttacattgctgtcggatgtttcgacattactcggttgtgtgcgaagagtgtccatgaaaggcgtagtacaagaccttcttgactttcttgtggaagggctgctgctgtccacccgcctgctgggagtcgaactcctttcggagggcctgcacttcctcgaccgccattaccgccttgccagctcgttcggtcctaaatttcctccaggttatcggggcttggttcgaccttgggtgttgtccttgattcgccgggagggttggttgaaccaggacaggcgccgaacttgcaacttgaggcggaacctgagcttgggcgttggcttgcgaagtggctgctgcagctgcggcggccttgtcatattcggcttgtatctcttgccttcgcttggtgtcttcttcgcctcgagcgtatccgtcgattatgcgaaagaggtgtttgagagttttgggttccttgcgtgcgagctttcttgtgagttcaccctcgagcaagccggccgaagttgcgttgacgacagatgcttcggttatatcctgcacttggcaccgtgcttgcgagaatcggcgcatgtattcccttgtcgattcccccggcctttggcaaatgcccaaaaggtcttggtgagttttcggctcctcataagtacctcgaaagttaaggacgaaaacgctgcgcaattgctccaatgagtaaagctattaacaggcagattgaagtaccaagatcgggctatgccatcgagtgcgaggcgaattacctttgccttagtgttctcatcgccgtgagccgcctcaattgcggactcgtagatggacaggaactctttcagatccgtttcacccgaataccttgggactggagggaacttgaactggggtgggatggggtgacttttgattccccagctgaggggcaaacccttttcgccacctggcttggttgtagccccttgttgggaaggccagttcagttgtgggtacggaggcgtgaatagcgaagctacagcttgcacttgaggttgagccgtagattgatgtcccatgccgaacatcactgcctgattctgctggtctgtcgaagtagcttgcctcgccgtagcagggtcaaacatagcttgattccaggcttggctttgcggtggggctgttccgtacccatggggtacggccaatgcgaaagtcatgggtgcctgggccgctgtgcttgggtcgaactatggcggtgggccttgagcttgacttagcaaagcgaactggctggacagctgtcccgtcgaagcaccttgacttgggcctccctcggccgtggccggagatgaatttcttggtatattgttgtggggttgattgagttgttgcaagaaggcttgaaactgcgcttgcaaggtcgaagctgcttccatcatagcttgcggcgtcacgccgaaaagcgtggtagcaggcttcgggtattgggcttgaggtgccgccgggcgaaccggtgccgggatcatttgaggcgttggacgcgcggcaatggccggggcgggcttggcgaagtacaccgacgcctgcatagcgtatggagaaagaacttggggctgagcgtagaactgttgggtgtgagccttggcttgtcttgctgcttcgtacgcttgttgctgctcttgcatctggcgaagcgtgtcttggagttttgtcatattctgacgcatggcctccatgtcagcttcggcttgtgcttcaaggttggtgttggcttgcgaggtggtgatcgctgttgatgtcgaagctggttgtgcgaaaacggcggtcgaagggccccccgctacttgggatgaaaagattacgtcggccttcgccgctgcttccgctttcaccgcttccgcctcaatcgaagatgtgggcgccgaagacgggagagttggtgccaccggagttggtaccgttccggcttcgcccgtggaggccgaaggctctgctccctcttcggctaacatctcgtcttcgacgtcaccttcctttcgcctgacaactctctccttgacggttttcttcggtggcatcagtggtttcgctcggaggtccccacggtcggcgccagctgttgtcgaatggacaactgcgtcacgccgaaaggcgtgattctctcaacagtggttggaaataaagacaattgtattgctttgtaaaattttttggatccccccattacaaggcctaagggggctatttatagccctattacaggttccttcctttagggtttaggttttacaaggcaatttacatggctacccttatgataggaacattattgggggtacacagtgtcctttacatgtatgggcccttattgggcttagatggcttggcccattcatccggcaaatcctcctcgagagtgtaacggcccgctaggcctcctcgcggtggggttcggcgctcggcgaagcccgtgtctccgtgctaaggctttcgcctcaccatcttcgcccgcggagcccttcgacaaggtctttgcctggcgaagcccgcgttaacccgagccacagccttcgcccgtacggtttcctcttcggccttggccctttgctttcggactgagccttatcgcccgagcgggtggtttcggcaggtctggccgaaggcactttgtggtatacctccaacaatatacataaaagaatattaacacgagagtatttatattggcatataaaacataaaatatatttttttgaagttaatacgtgcaaaatgaaaaatcttgaaatatacacactgttatattaagcaaggaggctgcataaaaaatttcatatttattcaaaacttctagtaagttcgtcaactgtaacctcttgtaagtcttgaagagcattttaggtattttttaaaagtatccacccctaatggtatattgtagaaaaaattgacaaagtcagtggcatattataaggaaagacaaagttgatgacaaatcatcgaactagactaaactcagtgacatagaatggattctatgttttatcgctcatctcttgatctaactgtagttttcttgtgtgtaggtctagattatttgcataagggttgcaacctgccaataattcatggggatgtaaagacaaataacattctcttgggtcggaatttaaaagcaaaaatagcagattttgggctttgaaaaacctaccatagcgactcccagactcacatatcagccactgcagcaggatctatgggctacattgaccctgagtatgagcttctttgtacgcaattaatgctaattttgtgctgtgtttcatatatattaatgattctattcaattttatccttaatcacttggtgcaatcattgtgtttaacaatgtgggccatttttaggtactacatcaccggtaggctcactgagagtagtgacgtctttagcttcggtgttgttttactagaggtaactagtggtaaacctcccataatacctgaaaatggccacattattgaacgtgtgaggcagaagatggtcaccggtaacatcaactcagttgccgatgcacgtcttggaggttcttataacatcaactccatgtggaaggttctagatgctgccatgatgttcacagcagatagctgctcaaaggccaatgatgtcggtcgtggtcatgcaattgaaggaaagtctggaattggaggaagctcatggggacatgggcgacatggaaaatgtagcaagagataacaagtctttgatgtccatgttcggtccatcgccaagatgaagaattaaccattgataactagctttgggacatatagtgggttctctgcttcaagtctaaaataaaaaaaactggtttgcatagatgatttgttttgtgttaagacacaataatttatacagtttgtattcgtgacagagctgacagtaagctgtttgtttcaatgtgcaacagtaagctattcgtgagagtagatcagccaaatgctgagaaggtggttgtttacaaccaaagattatgtactagaatcctctgccattttataatttgatcgaaatgttccacagcctcatggataattcagcacaactgcaaagggcagcacctcatgacagagctgaggagcatgtcaggactcgaccatcaagcaagaacgaatgatctcgttattcccgtttccttttttttttttttgggggggggaggggtggtttctctaatgtgtaaaacctatgtagatgtcgttattcatactgctccaacgatgcagttatgaaacttacaaatctaaaagacatgtttcgttgattttggttaggcgtagttgcataacacattgcaaagtcaaggtaagaagatctttacttaggtggatttcttcctaattctaatcatgtgagataggatatctcataaattgatttttctggacgataccctttttaggttgtagacggaccataactgcttctgcctgcaaaaatccctcacacggggtgagttcaaagcgctgcatgcaaaataacatttgcatgcggcctcttaagagatccacatatacaaatagactaaccttttcaggtgagcctccttagtggctacatgcgaaaatcagattttcacaagcgcctccttaagaggtccacttggaaaaatcactgcaaactaaatataaaaacgaaatccactccactcctccacctctcctctcttatcttctccccaatctccctctcgtgagcgcggctggagcagcgggagggtcggcgattggtggcgggcaggagcgaccaacgtcgggctggagtggtagtgagctcggcaatgtgggatccagcgtggaggacggtgggagcggcggtggcggcacactcgtattgggcatcggtgccctcggctacggaatctgacgcggaggacggcgggctcgggcggcggtagcaacgctctcggctagggattcagcgcggacgacggtgggagcggcggcggtgccctcggattgcatggtggtgccctcggttgcaggatgtggagctcggccgcgggatttgatacaaaggacggcgggagcaacggtgatggtatcgggtgacgacggcggtgtcctcggctgtggggtctggccggagtgacaagctcgatggcgaaggatctagccacgccgtcctcgagaggggcggatccaccaccctcatccacgaaaggggtgaccacgacattgggtagcgacagtggatctgacggcgccacccttgggatgggcggatcagccacccctggccccgagagggtgtcgactgcagtgggtggagtttgagggtagcggatccatcccccctccccccagcgcgggttgatgggccttctttatggcactaaaagagatcttatgatagatgacgcttcatttacgttataaacattgaattttttgtcatgtttcataatatgtgacgctcgcgtgacgaaaattcattcgtcacctatcatgcgtctctaatggcgttctatgacgaaaccttattttttcattaatctagtgacgatccttctgtcatcgtaactttgtgatgctcatattcgtcattatctagctaaaaaacgtcataaaatatctgatggcccattaaaatcaatgtattgagcactctgtttatgggctttagcccaatggctagcccgactagattttagcctggcccatctatgatgtagcatattttcagcccaattctattatatccatttgctttaatatcaaataataaatgggccaagtccattgcaaaagcccatataggcccaaacattataccacactattttcagcccgtcatattatattcattatattagtatcaaataacaagtgggctaagcccatataggcccaacaatcaaacataataacaacccatataggcccaacaatcaaacataataacaacccatatagcacaaaggtttcagcccaattagcatccaacacaacccgacaaacatccaatacaacacaaaatttacaacacagcaaatcagcaaatcaactggttggccactcgtgggaagtgtttgaactgtggcagggataggaagtgcttgaactgcggcagggacagggacaagaagtgcttgaactgcggcagggccggcctcagcttgctcaggaacccctatatcaaatacacaaagtgcaacagattaggcaccgattgactcattacatgataaaattgtgcacagctcagaacgcgctataatgtacggctccattatccatttgcaaacaagcctaaatagaagaataggcattgaaaaatacctcaagtaatgaagtttcagcaataaatcacatatatgaatcagggaggatagatatacatagaatctggaaaaaggagagcaaggattgattagggactgcggaggattgaatcaggaggaatgtcacttgcttctacttaccatgctgctgctgctgcttgccttccgcctgctgcatcgcgcctgctgcctgctgcctcgccacttgccacgcgcatgtccctgccgcgtagccgtgctgccggacaccagcgctggatatgagaaacacataagattgttgacaaacaacatactatattcaaccatgaaactacttttgaggtgctcataatcccaggcgcccagcaaacaaacctaatattgcatcttcgatatatttacaggatttgagccttatgagcttcttattagatagagctatgggctttgagcccaaaagagcttctgagagctcatgagctagctagatcttggcttgttaagaagacaccgactcgtttaattaattttacgagtcgagttgagcccataataagaagatgagaacaagcttagcttttacagtaagtttgtaactgttaattggcatgttcttgtcaaaaaagttttttaagtggccatgtttagtaacaggactaatccagaatgcatatacctgtaaatattattcagtaagtaagttttttcaaggcaatcatcagtatgtaagcttattttttcttgggatgtatgataaaagtggttatgaagaactttggaacataaagggggtaaagaaagttgtgcagactcgtatgaaaaaaaagacagatttttcaaagaaccttttctctgaagcatactttgttggtcttcatctccatgctcagttacttgagcaacctactaacctcgtcagcatgcagagatccagagtttagatgagccaagaaatctgcacaagaaaaaggtatcacaatcttctttcatctgcatgagaaataatgccaagagaacttcccagtttgatcagtttgggagaactaatgcagttgccctccctctgaagaaaggtactcctatatctgaacaaataggatttttaatagatttatccttgcgatatgcccttgatgtgtttaaacatctgaataaattttgctccatgcatctgaaattctaaatgtctgatgctgcaatgtcgtgctaattgatgttggtactactacattacaggttacaaattacaagtctttgcacttctcattttttaaaaaagaaaaaaagataggaaaaagaacagacctagacaggctgctgcaagagaggacatggtgaagcagcagcagtaatcagccgccgccggtgccggtgacgccgaggtctggcttgccgtcgtcctcgctgcttgtatgaggccagctccaagaacccccgctgcttgctcctgtaaagcagcctgcgcagcacccacccgaacacaacacgccccagccatcaacaaccgccgccgacgacgaagtatcagggggaaagaaacaagtagagaaaaacgggatgggcgcacctgttgatgaggcgacggcggctctcgtcggaggagaggtcgatggtggtggtggaggcgctgttctgctgggtggtggtgctggtggtggtggtgaaaccgaagaggacgcggtggggggggagggagtcttgacgaatccggtggcagtgcgggaagaggaggaggagaggcgctggtcggggtcgctccaccacggcacctggtcgagcgtcacggccggctccacccggcccacgcccggcgccgccgccaccgaggaggccgaggccgacgcggccgtcagcgagcgctggatcagagccgcgagcgcgagggtttggggaaaggaggaacgagatctggactcagatttggaatcgtggctgagggaagtagcaattttgatgcgattttaccagaataaccctggtatttggaaacttattatacaagttacttggataaaatggtcatttaacctgaaaattttaaaatactaaaaattcgaatcgaattttatcatactaaatgaacttatgtgaaaaaattgtcaaaaacaaagttgtataacttattgagatctaccaattttattttggttatttctccgtatgagtttgattgaccaatataaaattcggattttaaaatataagaaattcaaatatttttttttcaggtagttaatgattttaactgaaaaagtcatcaacaacaaagttgtataacttattaagatatacaacttttgttttggtcattttgctatatgactttgtttcaataaattaaatttgaattttaaattataacaacatcaaacaacattttcaaataataaatgatttcaactgaaaaagtcatcaacaacaaaattgtatagctcatcaatatctgcaacttttgttttggtcattttgctatatgactttgtttcaatatatttgaatttgaatttcaaattatgacaacttcaaacaacattttcaaatattagatgattttaactgaaaaagtcatcagtaacaaagttatataacttttattttggtcatttcttaatccagcaaactgatagtaatattattcacaaattttacacatctcttatgtggttttataaactataagagagatgtaattttcgtgaacaatgttactatcactttatcggataaagaaatgatcaaaatataagttatagatattgatgagttatacaactttgttgttgacaacattttaagttgaaatcatctagtacttgaaaatgttgtttgaagttgtcataatttgaaattcaaattcaaattattgaaacaaagtcaaatagcaaaatgatcaaaacaaaagttgtagatattgataagttatacaactttgttgttgatgacattttcagttgaactcatttagtatttgaaaatattgtttgaagttgttataatttgaaattcaaattttatataggtcaatcaaacccaaatggagaaataaccaaaataaaattggtagatcttaataagttatacaaccttgtttttgacaactttttcacataagttcatttagtatgataaaattcgatttgaaattttaatagtttgaaattaattgagaggagagagccaaaatgaacttctggttggagggaggaggggaaggggcagcttggctgctgggccggcaagttgagtggcgcggcccatggaggagtagaggaggccttcacggctcgggccgaggtgggccgagggagaaaggagggagagggaaaaaggccgagcgggctggcggggatttgaataagactttgggacggattcggcccaaatgacaaaggagggtttgtttttagtttttatttttaataaactctattaattgtttttttcttaataaatatttcggtgctctgaaaattcaagtaaacatccaggacatattttagaccgatgagaatttatgaaaaatactttgtgccacattcaaattttttcttgcacgtattttagtgtttgccattttcttttaggattttacttaattatattattcattttagagaataatttttaatttgggtgaatttatccggatgtgacaattattttagggcgttacaaagggcagttcaagcattcatcattttaaaaagaaaaaaacttatgataaaccagcattgttaggaacttgtgacgtttgttggtaggtctcttatgacaaaataatattcgtcacaatgcaccattagactagtttatgacgatctgtatttgatcttagtgacgaccaccctatttttgtcactaaccagcaccaccccctatcaaacgtcataaaacgaaatggcatagtgacgaaaagcaccgtcgtcacgaggaattcgtcatagaagatcatatttcttgtagtgtggatgggcaataaaatttactttcaattctgacaaagctacgtagcaaggtagtacatggtcaggactatactagccaatttttgcgtgagctgcttaggtttgtgaacttcttccccttcatgcttattattctctttatatttgaggaatatctagacggtaccttgatgctctcaggcattcaaacatactttccttctcttccttgctcagggtgtagctagctggactcaagtaatggcttcctttcttcttcggttccgaatgatggccctcgcgttgttccttatgcttgagatcattatgtgcttcaaatgtatctttcgacttcctatatacacctgaagcccagcaggttgacgcaaaggttcttagtgaggtgcatcacatcgattgcgtgatgggcgtccaagagttcccaatagggtaactctcaaaaaatagacttcttccacatcgccgtgtgactatcttcgctctctataggttggctgccaagtccctttccaaatactactttcagatctttcaccatagcaaacacgacttttccattgcgatgtttaggcttagtacgatggtctgccttctattcgaagtgcctgcctttcttccgtatagagtggcttgcaaaaaggaatcgacaatggcccatgtacataactttcctacaatgttttagatatgtacttttagtttcatccatgcagtgggtgtgttaacaatggaattttgcattagattcagaaaagaaggaacaagatcaaagtggatttgatgaaggagcaagttgtatttgaggtctgactcaacatctactgggcatcgtatcggctggagacagaataaaagtttggcttagccgatatggcaagtggtcgataggatataaattgggcacggtttggggctagattggaataaccgtcattgccaattagagataggatatttatgtcaatttgttagagatttggtaagagaccaccatatggtcttgtttgtatcttatctttaggaaagtttgagtcgtgtctatcatggactaagtttgtacttggggtataaatatgaaccccaaaccattttaataagggaaacaatccaatacaacttcggcgcatcatcatccttttttgttctacttttcgtcaagttctcttgacaagaggtaactcgtctcgatggcttgcgctatcggggttactatgtcgttttagatgttttagtccttttatcataaccatctgctatcatatgtcttagttaatctagtcttagtatcttaattgaactctatcggctggtactcgttttagggttcttgctggtattggctaaatcgttttactatattagattaactaaggcattgtcacacccgaagtttttccccctttcccttagtttctaaatcattgctaaatcgtctatagaaaaaactctgttaaccaggaggaaaccttaaataacaatgtgtttaataatcaaaattgtcggggagaattttttttcgaattctctttgcttgaaatcactaacaggatgttcagtgaaatattcagagtagaggaagtactaatgttaatttaaaatgtcaggagttgaattaataattccttcccctctctcctttggtcgtgaaccgcccccggttcactctccctgttcgtggtacgctgtatccgccaatcccgttgctgccgcggtttcgttttgtataacgagccgagtcctattctttctcgggtcccgttcccttttcctttcccgaaacggcaaagcatctatttatttttcctttccctttttggtaccctattctattaggtttttccccttctccctctcccctagccgccgcacaccacctcctactccccatgtcatgcgcgccacctcctctctcccaatccgactccccttctctctcctttgccgagtaaattaaggcccacctaatccatcttaattccccctatataattattcatacccctctatttttcctatttttccctcggttgtgaaaccctagctgaccctagtcgccgctgccgccttgttgccgcgccgctgctagctgtcgccggtgagctcccattcgattccctcggcatggttgtttccgtagtttccgcttgatccgtctaacctaattaatcttgctttgatctagcgtcgccgtctctccgtgtgttgccgccggaccgtcgtcactgtctcctcctctccgatcatcttggtttggtgaggctcctaaccgtgatctcctggtttaggttttaattttcttagcgttgttattgtaaccctaatcatgtcgctcccaagccttgccaccgcctagcgtcgctgctgccgcagccgtgcgccgccagccatgccgccactgccgggtgccgtgcgtcgccgttgccgtgtgccgccctaccgcgccagccgccgctgctgccgcccgctgccgagtgctgcagccgagcgccgccgccgctgtcctgcgtcgccgtcgctgccttgtcgcgtcccaaaacgactctaaaatacatcctcgaaattatgcctagaataattaaaatccgtgtgaaagcctccaacaattaaaatgtgcaaagttaaaagtcaaataaggcttggaggatttttgtatatttcctaaaagcctaaaatgcgtaaataaattttagtggaattttcagagcacaaataataattattaagaaataaacaaagttaaaatgattttataaaaagaaaagctctaaaaagtccttttccccccttcccctcttgggccggctcggcccagttccctccccctctctcctcctccccgcggcccacccggcctcctccccgcgcgcgcgccgctgacgggcgggcccgcccgccaccctcgctgacgggtggggcccacccgtcatccccttcctcccgccgctcccgccgctcgcccgtgccctagcgccgccgccgccgcgaatctcgccgcctcccgccgtccccgcgcgcaataaagaggggggaaatattccccacgattccctctctctttccccccgtttttccctctctctctccctcggattcgcttggattcactcccgcaaacctcgccggcgccatcaatggcggccggatcctccgcgccggtttccatctcctccggccgccttccctcactcccaaccctatttaaaccacccccgtgccctcctccaccgtttccgccactcgccgcctctcctccccatcggaatcgagcccgcgccgtcgcaccctctctccgccgtcgccgccgagctccggtcagccgccgtcgtcgctccggaccgtctcccgccccgacgccgcctccttcggcttcgccgcgtccccgccgacctcggccacccctccgcttcgctcgccgaccgccggaacgtcgtcgaccccgtcgacccgacccgcgccgttgccttcctccgctccggccgccgttttcgtcgtcgccgtcaactcggggtgagccgtggaccgccgttcgttttcccctttccctcccctccctcggccgctgctccgccgtgccggtggtcgccggcggcgaccatcggggcgagggcgccgcctcccgccggtcgcgccgcaatggccgcccctcccccgggcgcaccgagcggctgccacgtggggcccggccgtcagccgcccgcgccctcgggtgcggctgacgcctggggcccacggcgccggtcggcgtgatccgcgtgcgcccggtccaccgtggaccgtgaggctgccgcgtgggccccactcccgtggacccggtccgcgcgccctctcccctcggctgacgcaataaatccgattttaaattaaaatttaaatgaagaaattcgcaaatattcatttaaagagcatataaacttcaaatggctataacttggccatttgaactcggaattggaccgttcaagtctctaatttttccttaagaagtcaagaacccatttttgtgatttgtttctgcttgttatatggagtttattagagtaaaagccttttcttttccgttggtcgtgtagacgctgcagcttcggaggatccgctcttcgtggaagttgaagccggcgtttgggaaagcgagcaaggcaagacacatcatccttgaacatattgaatcccaatttatgaaattattttgatttaaattattgcattatcgctttatttaaattcccgcgttatcactgttttatttagccatgcctatttacctttgttatgaccttattattattgttattgttattattaccttgttcaccctagaataaacaaaacccccaactagtggacactctacttgtggtatcactagtatgattttaggtagatgcttcgctaattaattaggtaacattaggtggttttaaaactctagactgtggtaatattcatatcacttggacactggaattgttggattattgtggaattggattcaccccgccccctctattcaaaactctcaaaatggttttaggctgggctcggggtgcatggttttgatagtcgcacctcggccatataaggaccggtcttcgggcctctattgcaaagcaccaccgtacttccacatgtctaatgggtaaggcttagtttgtggctcagtctggttataaacaaaagtacacggatggagatggacgaagtcgggggattcgatggacatctctaggacaaatgaaggctacacgagctgcggcccggtagtcgagatgtcatggcacagggttggtgccctgctgctaggggctcagtcctgcctacctgtcccgggggttccggccgtaggtgggattgggtcggtactcttgtctatggctaggatgggttgggaactatgtcacgtcttccgtctatataccgtggtggtatgtggcacgtgggtatacgtgaggaagatgtgtcttgtgggtaaagatgtacacctctgatcagagtataacctattcgaatagccgcgccctcggttatgggcaagccgagcaatgtacccaagttagtgttttaattcttaaaacctgcttaacaactaaaatgtggaatggttggcctgggttggcttgggacgagctgggacccagggtcgggttgccagttcggtctgaatcatcgtaggccttgggttaagacaggttcgtgtgggttcacggccttgtttaataatatggtacggctctaggatcgtgtttacaacatagttttgagcaactaagtgtcttttaatgctatttactgcaactcctaacccctatattataattccattgtactcctttgcaattacgctgcacttgtgggtgtgtcttgttgagtacggtggttgtactcagtcttgctcaatttttcccaaacccagaagaggagcccctggaagatgaaggctttggtgtctagctcgtgcctgccgtcaagtgcctgtggtcgtcgccctagtcttccgctgttctccgttgtctttgagtgtgctgggccgtcgctgcccatgtaataattaactatttacgcttccgcttgttaaactctgaattgtatcaacttttggtgtaccttgcctcctgggacaaggaataatacacgcacgtaaggaacgcccattgggttatttccggtcgtgacatgcctagccactgtttgtcgctcggtagttgagttgcctagctgcagtcgtaaacccgagtctctaccggcctattgtttgccgtaccgggccattgccgcaaaccaagttaagtctactggtcatgtcgcagccattcgctagccgctaatcgttcgttcgcacgaagtatagtccaaagcctcgttcgttcggtcatcccgagtcgttctttagtaatagagtcattctaagccaccggttccgttcgttggtttggttgaccgtttgagtggtcccatgtcacggtgggttgactcgttgagttgataacccatggggcttgattactgttgttatatttccattgatctatttcgcctttgggcattaatatgtaataattaataaggtttttcggttaatagtaattacacagctcatattctaaaattcatatctaaattatccaagctccgttttaacccattcaagttgtagtgaattctttaaaaagtatagaatccattaaaattggtttcttttgctgtttcaatagacttattggatgtatattattgtatgctttgtttgtcatttagattctggcagttccgatgctccagtttatttcgaagtggttgccgaggttccgtcagctcaagagcaaggcaagtcatacatacaacattgatcatgttgaacctattttataaaatcccctgatttctattaaatcgcattgtgtttagaatgtcatgtgtgatggatacctatcgtacgcagcctgttgataccttatgccattgatagcttgggatataattgattagatgattggtttagggatgcttagaccaattagctcacaatgggattcattataatttagtccttaattatatgatgatgtaccaccatggttatggtttaattaaactaaaatatgctttaatggtgggttgtgggtgtatggttttggaaagtcgtgcccatgacaattatggaccggttctcgggaatccctggaagatataatcgtacttaccacaggccagcgtgggctccaggctaaatctagagtacaacttaacctagctgacataccatggcaagggtagaggcgatggtgcagtttggacttggctctagtctctgctgttttcggatttacctaggcacgagaggggactgccgggcttttctaaaaaggagggggtgaaacctaaggtggttatgttcggttagggagggttatatgaagggttttgtcacgatgtcccccgttgcagtatcacggtggtacttcggggcatggtaacatgtgtggaatcgtgtcttctgggtaaagttgtacacctctgatcagagttaaaactattcgaatagccgtgcccgcagttattgggcggtcaaccagctcaccatgagtagtctcatctttaaataatatgacttaatgaactggtgtagttcaggtggtttggttgggcctgttgcaacgtggtttagtgttgggtagtgatatttaatattgcttaattacaattattgttttactgtattcaaattatggtttataaatgctgcttttattgcaaatatcatataaccattcctttgtgaatatcttgcatcataccttcccgttggtgtgacttgttgagtacggtggttggtactcagtcttgctttattttttccaaccccagaggcagagagtggctgagatggtgagttctatgaggattgagcttgttccggacgttgaggatgcctgtggtttacggaagatgctacgctttttgtcgtgaagattaagtttaggttatttttttatttctgttgtgtatcaacttgtcgtttgtgtaccctggctggtcctagacagagattataataaacattctgcttgaaattcgggtagtgaatttctgagcgtgacatgtagctatcatcttgaaaagtaattaattccttaattgtttagactttaggtttctttacctactttgagatgcatcatccctagtcttgtctagaaccctagaaactaacctgaaattaattataattagagatagtatcagagtcttacctaatatacatgctacttttacatgttttatgtgtatttgccacttatatagatagatcaccatatataaatacatcaagtctagatcaataatcagctaggttatcaaacctggtaattgatctatatttgatatatttctataaatttatttgtttatataagtttgtactagactattagttagtccattatctttatttacctatcttgctctaaatattgttccatcggctattctcatgatatcgtcttaaatctatattatcaaactaagcagatgatatttagggttttatattcattgatctactcagtctatagccgatttggtctaaccacatcggctgagaccatcaatgatacgtcatcggcctatcgaccaatcggctatcggctaactcacattgtttcttgtttccttgctggttgcaggatgaaaccagctggcacgcccttggagcactcgaggaaagccttggacctgcactggagttaggcagatctcacaggccgccgtgttttccgtcaacaggtacaagccttataccccgtgtttgactgttcggataggttgctaactgcaggccaatcgttaatggtaacgaacaacaacgcttgtaggttgaattgcttctatttgacctcatcccacatgaggacacattctttcttccacagcagtttcggatcgtcaaccaatggtcttaggtactcatcaggccaggtgctatggctgttgctcatctcttccaaatagattcatgtcatccatacttaaaccgaaccttacgtttcatgcatcctctccgaagtcttcaaatgttccgtcggtggggtgtctcagcaccctgtcttgttaacattattttgcatgccagcgcatcattctagcatgcgatttgttcctgaaccaacgcccgagccatggtattatagggaaataccacatcaccatagcaagaactcacttcttcgaaggatgtctgttaacatcacctgg

SEQ ID NO: 8107 - DNA, 16708 bp, Oryza sativa
gggatgacgggtgggccccacccgtcagcgagggtggcgggcgggcccgcccgtcagcggcgcgcgcgcggggagaaggcccgggtggcccgcggggagaaggagagagggggagggaactgggccgagccggcccaagaggggaaggggggaaaaggactttttagagcttttctttttataaaatcattttaactttgtttatttcttaataattattatttgtgctctgaaaattccactaaaatttatttacgcattttaggcttttaggaaatatacaaaaatcctccaagccttatttgacttttaactttgcacattttaattgttggaggctttcacacggattttaattattctaggcataatttcgaggatgtattttagagtcgttttgggacgctacaaggcagcgacggcgacgcaggacagcggcggcggcgctcggctgcagcactcggcagcgggcggcagcagcggcggctggcgcggtagggcggcacacggccacggcgacgcacggcacccggcagtggcggcatggctggcggcgcacggctgcggcagcagcgacgctaggcggtgtcaaggcttgggagcgacatgattagggttacaatatcaacgctaagagaattaaaacctaaaccagaagatcacggttagaagcctcacctaaccaagatgatcggagaggaggagtcagttacgccggtccggcggcaacacacggagagacgtgtgccccttgttcagtgatggattattgctaaatggccagtgatgaatgctcaataacattatgtctagacttgttcatttttttatgtacacttgtccttttttttttgatgaattgctgcccctgctgcccctgtgccccttgttcagtgatggattattgctaaatggccagtgatgaatgctcaataacattctgtctagacttgttcttttttttatgcataagaacagattatctacacttgttcttttcttatgcataagaacagattatcaacacttgtcctttttttatgcataagaacagattatctacacttgttctttttttatgcataagaacagattatctacacttgtccttttttttatgcataacaacagattatctatgattgttcttttttctggattgataagagactatatacactttgggtctttttcatcctagtagttgatttcctctttttttcccttcatgcaaatagtggtaattgatgcataatttctgagcaaaaccgaggccatatctttcatggtatataatgctaattagtataatgatagaaaatttataagctttttcggaaaaattagaccatgacaacgcccggcgcaaacccgtcttccctgacacctgcgaggatacaggaagaagcaaacccagccacagagactgttgccgaaggtcatccctcgacaacggcggtcgaacaacccgaaagtcatggtaatttataggataaattttcactacatgaccacataaattttagctagcaccccttagcatatgttgccttctgtgtgctgcagaatcgccccagcaagaacatacgtcaatatcgggtgggacaagtacgagtaaatcgagtagaaaccccccggacacaaaatatatggccgaccacagcgcaagttataagagaggttgacgctagtggtaggcccacggcgccgaggactgtcattggaagatggtctaactgctacgggctggcggcacgtgtgaatttcgggatcctccataaagatatcggcaaggtcacagaagccgagaaggagcgagcttggacggcaatggagaaatggctcacatttaaggctaaagcaaaggataggctcaagcggaagtcattccataagatgggcaaagcttggaagaattggaagtcgaagctcttcaccgagtttgtcaacccgcccggcaatcatacgccgttcgatgtttaccctcaaataaccgaagaggtgtgggaagaattttgctctctgaagaacacccaagagtttagggaatcaagcgagaaacatcaccaactgcaacagcggaatgagcacccgcatcggctgggcaccgcagggtacatcggcaaggagccaatatgggcccaagaggatgctgccactgcagcagcgaatgtccctgccccgttttcggacatccctgaacacagagctcgcaactgggcgcgggcaaggggtaaggtcaacccggacggctctgtcacatttcagaacaaaagtgatgtcgtcgtctatcaggaattggtgagttcactacttaacctaactaattaccattcgtatgaagtagaagtttgtataaacgactcttgttgtttatagttggggttggttggtgaacaagcttcacaaagcgaggttgagtccgtgccgaagaggcgcgaagatgacatcctcacaaaggcgctcggaaccaaagaacatactggccggactcggggaattggcagcgatgtgccctgaaagcacggactctcgcagtacaactcccaatacaggaaacggaaagtctccaacgaagagagggacgctcgtttcaaggccgagcttaaggtggaggtcattcaagaactacaagctagcatggaagatagggtggaagaaagggttaacaacgtcctcgccgacatgaatataccccgaggcacaacacctgctgtgcatccaactcctcgtgcacaacacgacgcgagtctgtcatagcgtaggagtagttgtgcatccacagaggtgccggccccaggtctcccgatcgcaccactagctgcagtggaccacatagaggtaattgatgttatccgatccatatctaatcaaaaacatttacacattccaatattaaattcaaacttttacatatgcagggcgtagcacagtgtgtcctactggcgaggatccaccaactttcgctcctgaagtcgctgagggcatggctttcaaaccctcggttacagataaggtccacggcgcagacctgctagccgggtatgccaaggtgtccatcgatacagtaaaggacacctggtcaggctatcggttgcccatgccccccaatgatgaaatcatgactttgggcgttgggcgcaagacgttcatacaatggcccaaagaagacatagttgtgaagatgacttctcgtccaaatcgaccgacggagcttacacctcccaaatctaagctatcaattgaggctccccgtggaccggcattgtcagtacctccttctcctgatggagatgatatggacttgggagatataactcaaagcttggctccaataaagaccacaagaaaggccgatagctccccaccacttgtgaagggccagaagcgtgaacgcgtcaaggggaaggtcggggagttagcaccggtgccaaaaaggggcaaggctgcgacgtcgatgccggagagcaaagcggggaaggtcgtgagggcgcctgcccaatttgagctaggcatgccattggtgaaggacaatgtgttagccgtgatgggtattacttgccgagagctacataagcaatacatggagctaagcaatgcctagcgaaaaatgagggagtcatccatagttggacatcacaaccaccagccgttcctatcgtcgcctgcctatgtaactataggctttgatgacctctccaaccttttcaggatccggaagttggacacaggacttctaaaatgctactccttgtaagtgctgaccttccatacttgtgatatgattggactatatctcctaattaaattagttctaatacgtaaatgtttttaggttgtgttggatcgagagtcgttgccatggtaaataggttgggttccttgatccatccatggtgaacgaggtcaatttacgccagagcttcactgatgtggttgactatgtcaaccgatgtttatgggcccaccaagacaaggagtacatcatgtgcgcacacaaccaggaataagaggataatacccttcgtgtatattgtttttgaagttaaggttcttattactaacgctacataaccactgcgcaggcgacattggattctcttagtcatcgtacctaagtggagtagggtttactaccttaactccaataagacgaaagattatgatttcactgatatcaccaaggccttaaatatggcttgggacccatatgtggaaaagggtggtaggcacaaggagggcaaggacgaactctattatgacactaagtttgcatgcgcacaacagatcagagaccagtgtggtttccacgtgtgcacaacatgtcaacactactaagagaggtgaaagatttcgaccctgagattgttactaatggcgaataagctcatttcaataccaatattgctattctaaatgtgaaaacatctgatttattaaacagaaaggtagagctggcttcaagatctcacccatcaacccccccgctatcagaggcgaagtgtgcgccttcattcttgcagaaataatgaacaagaaatgacgttttcacgtcaaatagactcatgaacttggctagataatttattgtgatataaaaaaattgtttttattatggagtgcaatgtaatttactttcatatgtgcaatatttatggtagttcgctaatttgtcatcaaatttgatcaactacgatttatgttgtactattcatttgttttctgctttttttttctaattgacaggtcatggaggtcgaggacattatgactttaatccatttggtaagtatatatgcggttctatgagcaacgaccgaaattatagctttcaatgggtataaatttgatgtgcaaaattgtggcatttgaactgcatatgtgaatgatgtcaatttttaggatggatctgtgatgttatattgggggtgactggaatatatctgtgatgtttctgtttttcagaaggcatggctagcaaatcctgaggctagccaatatttaggatttattttttttctgtgattaactcatcagtgacgggtcggaaccaaaatccgtcacaggtgacctcacatgtgacggactcgcaaataaaggcccgtcagtggtgacctacctgtgacgggcctttactttcggggccgtcacaggtagatcacctgtgacaacttctatctacggagaccatcacctctgacggcctttatttaaagggccatcagaggtaaatcacctgtgacgggtcctaactggccctaggctagcggagaccaacacctctgacggctgtctagtaacttgcccgtcagaggtgggtgtcacctgtgacggccgaccacccgtcaaaggtgactggactcaccagtgaccactgatcactgaccatgctcaaagccgtcaaaggtgagggtttgggcccgtcacaggtgaccttggccagtgtagtgtctgcccgaggaagtagcggtcggcttctccgcggtcaccgacgcctgcatcgagttgcatcatgatcaggtgctgtcctggtcgttcatctccactctagaaccagccacaaactcaactaaaattttccaccctgtcacatcgaacgtttgcacagaagtattaaatgtagactaaaaaaataactaactgcacagattgtgactaatttgcgagatgaatctattaagcctaattgctccatgatttgacaatgtggtgctaaagtaaacatttgctaatgacggattaattaggcttaataaattcgtctcgcaatttacatgcggattccgtaatttgttttgttattagactacgtttaatacttcaaatgtgtgtccgtatattcgatgtgacacgacgaaatttttcacccgtggatctaagcccaaatctcgcgaccattgcagctttgacagacacctcctcttggccagataggtagtacaaaataattaattactactccctctgtcctataatataagggattttgagtttttgcttgcaacgtttaaccactcgtcttattcaaaaaaattttgaacttattatttattttatttgtgacttactttattatttacagtactttaagcacaacttttcgttatttatatttgcaaaaaaaatttaaataagacgagtggtcagatgttgcaataaaaactcaaaatcccttatattgtgagacggagggagtagcaaatgacgatgataatcttagtattatactcattttgttcaacttggttgattaacagatacaggatcatcctaggtctcggctctgcgctacgctatctccacacggagtgggatcaatgcatatatattgcacggcgacatcaagccaagcaacattcttcttgactctttcaggcagcaccaagctggaggattttcggctggcaaggctcgtcgactatggcgccgacccacggactacgcaggttgttatgggcaccacagggtatattgaccaagcatcgagcttgacgtctacagctttggtgtcgtcatcctggaggtagtctctctggccgctggccggagatggagcagacggaccaggttatcccgctactacagtggatttgggatctgtacgatcgggacgcagtcacggatgtgtacaatcgcagtacgatcgtagacacgaagctagctgcaggaggttggccgagagtgtggcaccgtagaccgtgactgcgattggcagctccagcgtacggtcaccgtcgggctcgagtgaacggccgtccattacgagagccatgaacgtgctgcaatcagacgatgtgactctgcaggtcctgcaacggcggcagacttcgtgtcccgacgatttttgcagattgcatagcggcggcgactggttgtcatcagctactactagcacgggcaggtgacacacgtgtaatgtagggacctgggctagataagtactcctccgttttttaatatacgccgccgttgactttttctcacatgtttaaccattcgtcttatttaaaaaatttatgcaaatgtataagatataaatcacacttaaagtactatgagtgataaaacaactcataataaaataaattataattatataaattttttgaataagacgaatggtcaaacatgtgagaaaaagtcaatggcgttatctattaaaaaacggaggtagtactagatagccagctgccagcacttgcacattctaattttattggcaactatacatttgtgacgccatttttttactaaaaataatctattcgtttttactttacgcttacactgtaaatttcagtagttatatgctataaattttctaatacacattacacataagaattatgatagtaaatcaatccaatatgggatataacatattctactattacgaatgtgttaaagagctagtgttattcaaacttcagagctgtacaggctaacgagtaggattctaatcgactaagggtgtgtgtttagttatttcggtgtaaagttcttaaagtatacggacacacattcgaagtattaaatgtagactaataataaaataaattacaagttccgcctgtaaactgtgagacgaatttattaagcacaattaatccatcattagcaattttttactgtaacatcacattttcaaatcatggcgtaattaggctcaaaagatttgtctcgtaatttacatgcaaactgtgcaattggtttcttttttcttacatttaatgccccatgcataggtccaatcatttgacgtgacattttttgccaaaatgtttcaggatctaaactaggcctaaactaggcctaagtaaatagttattaaaaaaattgaccaaatagattaatgtgtaatatatcacttgacaaatttgcaagttcaaaatcgacttctataaattgtaacaaaaatgacaaattaaactctaactagtataagtatatttatagtcaaatctgttattttgttacaaattccagtagttgaatttaaacttacattacatgtttgtagagtgatatattattattagtattctatattgtcatttaaagaaaaacataaccaattagttcatatgcaatgaacaagtactccaaatttgaattcttttgatactgcttgttatcactacttggacctggaccattttgttcggtcttgtaagatgtaggttagatgcaatatgtgttttgaattgggccacattaggtagttttgctctcaagcttgttctaaatgggccttttctgttacatcctgattttcgttttaggatttataaattatatttataatttatattaaatgttcattaatttacaagtgaagttagatgtgggaaataaaattttctaaatataaagcatgattggatttaatttttattaaattctccatgattaattatactctctgaaattttctcggatttttcagagctcaattcttaattttaataatacaaagagcatttcagaaattatttaaatattaagttagtaattaaatggtttgattataatcttgttaagtactttgagtgttcaattagtttcaggatttttcttgaaattatttgagcattggaaatattttaacaattcgaagatcattaatttaattacaaaagtaaattaaatccccttttccttttcgggctgaaactggaaaagttcacctttagttctcggcccattctcccttcctttcagctgcctttattcctcctccgaagtccatttcttgtccctccttcaatcgggctggataaaagaagcccagacaaagtctaattagccttcctgctacagtatcgtcttcaagcttggacagagcccgtgcagccgccgagccgtgtgtgccgctgccgattcctccgcccgatttgctcgattctctcagccgtttcttgaattagttgaggagatttgtttcccttatcctcctctatcttttcccccaaaaatcctattttatccctttgaattcgacgcgaatttggattcgttttcgagtttatctctccttttcccggcgcgattccatccgttcccgagccgatctctccctcttccggctataaatagcagctcctaaacctcctctttcgttttccaccctcgcccgagctcgccgtcgcccgtagcgccctagccgcctccaccctagcgccgccgccatcgccgtcgccgagtctccagccgtgccgctcgtcgccgtccatcgttgccttcggtcgccgtcgccaccaccgggttcgcaaggaggagctgcacaccgtccacccctcggtcgaagccgaagcctgccggagcgccactgacgccgtcaacccgagcccgtcgccgcctcaatctcgtcgccggccgttttccgtcatcgattgtcgtcgccgtcaccatcagtgagttcctctcgtcgtcctcatcgcgtagatgtcctcggttggcccggccgagtcctccatcgccggcggtcatgtggtccagtgccttgttccggcaatgatgtcatgccgacgtcataaagcccctttttcccttctaaaaataaatcttaattgtgtcataaatcgtaaatccttttccgtataaggctaaaatcagtttaatattgtaaaattcataactaattcatatgaagtcggaatgaggccgttcaagtctctaaattcatctaaaatcatgatctacatgtttgtttactttttatgtactgtttatttagtttttattagtctttttcttcgttttgtgtgttagcttgtcgtttccgtcgttgcgaaggttcgtgagtgcgtcggaagtgtttaagaagactaattgaagaccgattattgcaaggcaagtcacacagatcccaaacataatcctttgaacatgttgatctcatatttaaattctctatttatttcaactgtgcatttattttcaaatgtcaacgggtggtgtgaacctattcctttgttatggccaatttgcattgaataccctattacttgataccttgggtaataaattgattagcttgaaccttatatattggtttggtttagctaaatgctatatatatatatatatatatatatatatatatatataattgcttagccatgcttataaacattagcatatgattgggataactaatgttacactaccacttatgattatatttaatggtagctcacgatggtcaatcgtgattggttaattaattacgtgccaactaaaacttgacaatggtgggttgtgagcacatggttttgaaggtcgtgctcataacaattaaggatcggttcgcgagctactgttatgagacattaaccgtgccaaccacaagccagcgtgggcaacggctttagcttttgtatagtatggttcattgcggggcaccagactgtgaagcggcgagaagtccgtgggggtcgctggggagtccatgcctctggttttttgtttttgagggggtgattatgatctaggaatggtgcgctgtgtggattatgttgtgcgaggggtattgtcacagtcccgtttcgaggtaccgtggtggtactgagggcatggtaacatgttttggggctgtgtcttgtgagtacagtggtacacctctggccagagtaatatttttcgtgattagtctcacacctctcacaataattattgatgctataactggtaataatttgcttagctcctggtttggagttagatctgtacagccgggtatggttgttcaggatggttgggcctgtgcagcatggctgtgctgttcagtgttgattaatattgatgattaattactctactgttttactacttctaaatgtttgctaaatgctgcttttgcaaatagtctatattatgcgatcctttggtatttttgtgcacttgcatatttgttgtgtggcttgcggagtattccatgttttcaccttgcaataatcaatcaacctcagttgaacaaaaaggatctagaaagagaagacgtttggcttataccccagttgagctgcctgtgggagtggagctgaagccatcgctagaccgttttttccgctgcagtttttttctttacttttgtaagtatgtaacgttatcattatgatggatttgtatattaaattgtcagtttgtgtacctcggctaattcctggacgaggcttttatgcacaaataagttcaaaaattactagtgaatttctgggcatgacattttctaaacctaagcccactagcacggagaagggaggttgttattggttaataaatctgctgggtctcagaataaatagtttgggtaaaagaaaagctcccctcttctcctagtgtctcttctcctcctcctgcaatagcaaaaccccaatccaatctcacctgatcgccggtgaatgctgttatggcgaataccaacgctactgtagaagttatctttgccgggatggcgaaaatcacactagtcccggtcaaataggaactgggactaaagaacatttttagttggataaaaaagggcaatggagctttatgatttttagtcctgattggtgttaccaaccggattaaagacagccggggctaaagataaaaacatttttatacttcttcttcctcctccagcccgagccattgctacaaaggtttggaggaagaagggaggtgctaccaaatttttttgtgaaagtgtttcggtgataatatacaaatcgaaggaatctaaaaggttagcaactccatcctctgataatgtatgcttagtatattacatttatagttatggttatatacattattgtctctgaaaaggtttatggaaaatgacaagagagaaaatttgttaggataaaaataggttacttttaaaattagaaacatgtggataaaaatgttataaaatagatgacaaaggaaaaatatagaaaattaagataaaagaatagaaaacaaagttaatttaataaaatagttagaaaaagtacaatacattaaacatatcattagaactttaaaaataattaataatattaataatatgtgggattattgtatgattatttgtatatagttattgtatgattatttaattagcttgactttcgtggattttatttttacgatttttgtgcatttcaggtagatggatcggcaatggatgtacaccgcggaacgacggtcgacaaagtttattgaaggcttgcattattttttgagtgttgccaatgctaacaagcataagggttttacatgttgtccatacaaaaagtgcaaaaaccaaaagtagtattctacatcatgaactatttatgcccacttgtttcagtcgaggttaatgcctagctaaaattgttggacctcgcacgaaaagttaggggttgcgatggaggaagatgacgtaaaagacgagaacattccggactgggctcaatacggtggatttgatgaaaatacaacaaacgaggcggacgagtgttgacgaaaaatacgaggcctgagagatctgcttaactccagtgcaggtccaaaactcgccttcgggtatgctagcgtgccagttgatttgatcctgcaatcaacaagaaacaaagacaaagaaactgtagttaaatccataaacgatagccgatcggctgagtgccgatgacatatcatttatctttgggctgatgtcatatatgaatcgatcggcagtccttaataaataagaaagaactacatctactcgatcggctgtagatatcaccaatatataatcctgacgtcgatatatacttaaatcaagtgattgggatagatcggttgccatgccgagacagtataaatcacttagatcgaaatatgtactaacaacaagattatatatgttcatagcatagccgatcaaatagatctagcatgtatcggctaattctccgataccactctatattaagatattaaagcaagtagaatataccaaacagaagcctaatatacttaaatgcaataagatcttgacataaagggcagatttaatatgtcagtaaagcacataaagcaaatatagttaaactaggtaagatcggctgaaaccccgatactaccctaatcggcaaccagaagacagggtagagattgaaattctaagcacgacttaatagatcaaactcaactgatgcagtattaagtatgaaaagaagagcaatatctagacaatcaagtcgttggatgtttcatagagtggtggatatcttatataatccaagctaacgtcgctatttaacctaatcggacgccttctattaacagaagttagccgattgtaggttagatgacgatattatcgaagattatataagatatatgataactcgacgaattacataaacaagattagagtgtcataaagatggaagcactaatcccgagaacgcaagccgccataacaagatttacctcttgttgaagatcgaaaccgatgcagctcaacccgaaagcaagaactcgccgaaataaaacgaaagcaaaaagggtggcgatgcgccgaaattgtattgaacgtgtgttagtttgattacatgaggttcggggctatttatacccgagaattacaaaacatgcccataccggacacgactcttatctctaacaaactctaagataccacaagtatttacggcagacttttgcccaagcatatctctaatgaaattacataaaatatcctaattagtagatacaattgccttcccaggactccatccatgtgtggcaatcatcttgaagcacttcaacccaacccgatgttgtacaccaagtcgtattgtcagaatcggctgcatcacctaaccaagtctgactccaactcagccgatccaatcgtagccgatccggactccagccgattcttactctgtttctgcgacaatcttcatcttcgatttcgcttcaatctagtcttcatctccgatactgatattaccaaatttggtcgttaacacatgccccccaagtccggaatattcgataatgtttcggatttgccgcatatcgactccgagcaagtttcgcactccgccgttttccgaccgttatcctccgtgctttaaatactaaccgccaccctgaaaaatctttaccccgttacttccgttttcaccgccgaagcaaaccccgtcctctctctctccggcgatttcctcggtgcgcgaggcgatccccaagcgacttcatctccggttagatctccgcccgcgacgatgtcttcttccgccagcccgtctaccgcaccgtcagctgagtacgctgaggtaagttcccgtcggctagatcccctttctcagcatcagattgatcttccaacacttcatcttgttttccccttcttggttcttttggatttgtagcatctttccaacctagttgcaattcccagcctgtcgcacgaaaattattactttctcggcccagtcggcaaccctgatcccaccgagttcattattggcgaaaccaataggattactttcggattgaccaacccagatttaggtcactagaaaaacactttcaaatcctggccatcccttgagaaaacctcacccgagaaaagttggatcacatggttcaagcgcatgtcggctagcaaaagatttcattgggatgaaattggaatcggccaagcacttgatctcaccatagccaactcagctaaagacgagcccctaatggcagctgcctcctatttttggtccaacaaacaccatcaatgccttcttgttcaatcaagggccgatgactccaactctcatagatatcataatgattacgggtctggatgtcacctcatcggctaaccctatgagcttgaacacgaagaaccaatatgacttttttaccaagagcataggcggctggtcaggctatgtagcggcatatatgggccaaggttctgtcactcctcgagaacatgtagcttttctgctaatgtggctagaaaaaatcctcttttgtggatcaagttgtggccctacaaccaactggcagttcgcagccaaagccttggagacaaagagacaatttcctttaggcaaaatcctcctcggctatttgtaccaaatgctaaacaatacatcggctaagttggccgtcggctcagtagtcggagcaggtggaccatggtggctattacagtcttggctgaatctagtagttatgaagtttgtcaatcggccatctgtaacagaagccgaattcccaagactggaaccgactgtagatgatgatggagaagaacgcactcatcgtagatgcacattttacggagaatatacctccacaccaaccgatgcaggagcaaagctatcggctgaactgctcaaggactggttctgtagtttttatgagggtttccaaaaagacactcgagtttggttcctctacgaagattcaacacttctggagaatccattggactttaggttcgaagatatcaatcatgaaagatatcagaaacccagagaaatcttttcagctgcaatcagtccatgtatcctccctgttggcattcatcatggatgaaacatccaagtttcttatgtgttttatcacccaatgagctcaaccagacaactaggaatgggccaactcccaatcggcttattctttgctgataagatccagtgccgaggggaaatttcatcaaccttaatgatggatcggctgcttaatctccaaggaccccctctaggcagcattgacaacatagagctggcaaccttcaggagcaaagcatttgacagatggtggggtgagtggaaactacacctattccatcaatcggcttctatgtatatgacagacctctttccagatgttgtccctcaggtatgtcttgacttgcttaatttcatttgaataattgtttaaccgactaatcttgattaattttccttttaatttgtagacaacagagtcatctcctcctcactagagcaatagtggcagaaatattgagtatgccccggggctgattccaaagggggtggaccatctcctcctattattggttataatgcccccaggacttcaactctccttcaagggctcgtcagagaaccagccgatgccggtaaaaagagaagaaccagatcatcggctgtggacacatcggctccagccccaaagaagaaggttaaattaaagaagcacaagccaaccgatgatctgcctgccctggatctgtccatcgaacaagctctggacgaagaagagattgaagaggacattgatcaagcggcagccgaattgagtgatattggaggaaaaacaccgtcagcctcgcccaagcaaactcccccaactcctgttgcaccggctaacttctcaagggtaaacatctctccttaattaccttttgcagttatcctattcatagccgatcactcataaaacttgtttttgcagaaaaagaagactgctgtgagaaagaaatcggcagcgacaacacttaaaccagccccaccagtaagattcccttatataaattctttcactaatctgatcatggccgatatttattcaacactttgtctttttgcagcctcctcctccttcttcacctcctgtgcagcaaatgtcaagtgatcgaactccatcggctgcagggagtcacaatgtcgaggaagaggaacaacccgctgttcctaacatcccagtaaatgtc

SEQ ID NO: 8108 - DNA, 31037 bp, Oryza sativa
cattgcatggatctgaggatgtataatctgtggtgtatttatttggtgtgtaatttttttaaggatttgtgatgtagttgatgtgtttgtataagtaacttaggctttgtgatgtgaatgatttgggatttggggtgttacattgatttggggatttggggtttgatttgggatatgcagccaattgatttgggaggaaatacaaggattaaccctggcaagtagcaaaggagcaatgaaaataaaaaaaaagaaaaggggatcaaccgggacgtggctctgccatctttagtgccggtcggcaccgaccgggactaaagatgagtctttactcccgggtatttgaaccgggactaaagactggcatctttagtcccggattctttctcccggttcgctacccgggagtagagggggttgctaaccgggagagatatggggttctccagtagtgttaatgatttgccactcgctgtctatgacatgtgggccctcatgtgtttatgacatatggccgttcagtgggaaattctttagaactactcataagagtggcaaatagttaattattccgtaattaaagtggttcgaagcatgattcctgatacattaccatgtttgccggcccttcatataaaaatttttagtggataaatttgtttgcagattgttaccaagtcaggatgtctattgtttaatgccagattgtatcccactttatacagaaacttgtcatgcaaccaactaaccgggacaattccagactacctccgcaaaagcaatggatcgattgttttcaggtgtgcctactttcattattattgatttcccttttagtattttccagattgtggggttgttcttcctgtaatctttggacatcctaaaagaaagtagggaagggaagtgatactatgcttctcaaataaaaacttgcatggaaattaaagcacatcaatggtggagattaaaagtggattaacagagtaatcctcccattagcgagggggcaattttatacttagaaaaactgagcccctatccatatcgatcgagcgaccgactcgcggcggttaattcgctacgattccatctctccgctgccacccatcatgctccttgcaggctgccaagcgcctctgcgttcggggtggcagcaaagctccggtgagtagggatgccagctgccgtcatcggggccatgcgctgggacgaacgccctgtttggctgttgggaatagtcccacattgcttatttagggaaaggccggtcgaggtggtcaggagttcgattgtccttgagggttgatatttgcttgcagagttgcagttgattgatgtttagaaggaagaatcgttcgaaaaatgtttacaaggaagacaacctcttatggttgtgatcatgtgggatgatctgctcaatgtggtcgtgaagctgctccatagctagttgggagcgtgaggggtagcagcagagaggcggaaggagcctggtagaggaagaggcggcggttttgctcgttgccttggtggatgaagcttggcggccgctgctcacgggagatcgcggccatggcagcgcgagcgaactgccgcctgcaccgtgaatccatcgctcgatcaatgggaccaacatgaatacgggctcagatttttctaaggacaaaattgcccctttctaattcccaccattgatgtgctttaattttcgtgtcggttttaatttgcgtaggatcgaattcaagtaaccaagccaaccagaggggggtgaatggtagattacgtcagcggaagtcaaataatcgaatctaaatagaataaaacacaccccaaccttgtggagattatggataccacatatctacacggcgattatatttagactggatataggataccgaatatagatagaatatctttatctgtatctcgggtttgtttcttaacttgtacgtcaaggaaataccctgagacttagtcggttacgattgtattttatctgtactctcatattctgataaggatatgagttataccttgtaatacggactccttcccctatataaggaggggtccgagtccttcctgggacatcaacttttctggagattatacatccaataatacactcggcggattcatccccggacaggagtagggtattactccttgaataagaaggcctgaacctgtataaatcctttgtctccaaacccatccacttttctagcttgatagccacccccttttagtattgccgaaatcttgtttcgacagttggcgcgccaggtaggggttgcgtcaagcttttcaccgatcagtgcaatgggttccgtctccggcatcgacgacctcgtcttccaacccgggcaggcgtttcggttcggcagcctcgacttcgtcaccaataacttcggcaagatctctctcctcgactcggaatcggaccagtcgggagagagccggatctcagtcccgtttggagttccaaacgcggctgaaatctactccaagtccatctcaatcgagtcggcttcaaaccactcgggcgagattgcatcttctccaacgtcatcagatcgagatgatggggcttacccaccgatcctaatgaagctccccgacgatttggcggccgtcttcaccaccacagcgtccccatcccgtaggcctaggcggaaatcggcttcaacaccgatctcgcctagctccagggaagtcggcgtcatccaccagccactcggctcagtttcgacggaccagctggatggctactggagctctcccgccgtcgactcgcgtccgaccgagatcgtggagtacaatgagttcggctttcgcaacaacgacccggatctcgacgacttcgatgaaagcctagaagacaactacacccctctctatttcggcgtctttatggccgataacgagacggaggagcaacgccaagcccgggaaaccgaagcacgacgcgagtccgagcgatgccgactggaggaggagcgtcaagtacaagaacaagaacggctacggcgtgagcaacaggagcgtgagcgggctgcaaaggaggctgaagaccggcggctacgagccttggaaacagggcaccgagcgcgagatcttatcggccaacaagacgttgaggggacaccagttttccgcaccccacaacagaatgctgttgccgcgatcaccctcctcgacaccctcctcaaggaaaacgagctcaatcaatctgaccacgtcgtcaacatcttgaaccagacaaagaccatgattgcggcttcggtcccagttaactccggaagcgtccgcacgccgagcggcagccgagtccctcatcttcgatctcacgactaccaccagccaagcctcagcatcgctggcgcgggatctaatcgcaggagcaggggtcacgacgagcgatctgtccactcgcctcccgaccatcatagggagcgccgagtggaacgacctcgttcgccacctcgtcgtcgccccgtcgatcttcgcgagacgatcatacaacgccgggcagctcgaggccatcatcattcggcggatcgccacgacaacgaccttgacggagtagccgctttcaccaacgacctgcgtcgagtggattggccagccggctttaagccgactagaatagagaagtatgacggtaccaccaacccggaatcatggcttaccgtctacggtctcgcgatccgcgcagcaggaggagatagcaaggccatggcgaactatttaccagtggctttagcagattccgcccggtcctggctccatggattgccccgtggtacaatcggatcttgggccgaattacgcaaccacttcatcgccaacttccaaggcaccttcgagcgccccagcacacaattcgacctctacaacgttattcagaagtccggagaatctcttcgagattacatccggtgattttctgaacaacgcaacaagaactctaacatcaccgacgatgttatcatcgccgcattcaccaaaggaattcgccacgaagaattggtcggcaagttcgggcgtaagcctcccaaaacagtcaaacttatgtttgaaaaagccaacgagtacgccaaggctgaagacgccgtcatcgcatcaaagcagtcgggctccagttggaagccaaaaaaggatacgccggctacgggagggggtggaagtaacaatcataaggaccgcaagcgtaagcctgaggaacttgttgcaactgctactcactcttctcgacagcgttcgcgcgtcaacacattcgacaagatcatgaactcccaatgcccgcatcatcctaactccaaccacgcggccaaagattgtttcgtctacaaacagttcgcggaacaatacaccaagactacacggaagaactccgacgaagaacaaagcacgtcgaagaagaaggacgatggcgaccccccggcaggttttcaagaccaccgcaaggagcttaaccacatcttcggcggccccttggcttatgaatctaaaagaaagcaaaagttgaccgaacgggagattaacgccgttcagcccgacacaccccaatatcttcgatggtcagagacagcaatcaagtttgaccgctcggatcatcccgaccgagtggtccacccggggcggtaccccctggtactagacccagtggtccgtaatgtcaagcttcgcagaaccctcatcgacggtggcagcgcactaaatatcctcttcgccaaaaccttggatgacatgcagattcctcgctccgagttaaaaccaagcaatgcgccttttcacggagtcattccagggttatctgcaactccactcggccagatcacccttctggtcacctttggcactcgggaaaacttccgcacggagaatatctgcttcgaagtcgccgatttcgagacagcgtaccacgccatactcggacgcccggcgttagccaagtttatggccgtcccgcactacacttacatgatgatgaagatgcctggtccccgaggagtcctatccctacggagcgacatcaagcaagccgtcacatgcgacaaggaaagttgcgagatggcccagactcgcgagatggcgtctgcccgagaagatatccgactggctgcaaccacggcaagcgaaggagaagtgcccgcgaccaagatcttaaagagcggagaaagcgaagccaagactaaaaagattcccctagatccttctgatcccactaaaactgctgtaataggcgccgagttagattgtaaataggaaagcgcactcgtcacctttcttcaaaataataaagatatctttgcgtggaaaccatttgatatgcctggtattcctagagaggtgattgagcactccttacatgtcaaagaagacgctaagcctattaaacaacgactccgccgcttcgcacaagacaggaaggacgcgatcaaggagtaattaaccaagctgttagcagcaggcttcatcaaagaagtccttcatcccgactggctggctaacccggttctagttcggaagaaaactgggcaatggcgcatgtgtgtcgattataccgacctcaataagtcttgccataaagatccttttgggttgcctcgcattgaccaggtagtcgactcgaccgccggctgtgagctactcagttttttggattgctattcagggtatcatcagatccgactgaaggaatccgactgcttgaagacttcattcatcacacccttcggggcctattgctacatcaccatgccattcggactaaaaaatgcaggagcaacttatcaacgtatgattcagagatgcttctcgatgcaaattagccgcaatgtcgaagcgtacgtggatgatgtagtcgtcaagactaagcagaaggatgatttaatctcggatctagaagaaacctttgcaagcatccgcgctttcaggatgaaactaaaccctgaaaaatgcaccttcggagtaccgtcagggaacctgcttggttttatggtgtctcatagaggcatacaagccaacccggagaaagttactgctatcctcaacatgaaaccgccaagctcccagaaagacgtccagaagctgactggatgcatggcggcgctcagccgattcgtttcacgacttggcgagcgggggatgcccttcttcaagctattaaagaaaacagacgatttccagtggggacccgaggcacagaaggccttcgaagatttcaagaaactcctcaccgagccaccagttttggcctcaccacacccgcaggagccgttgttactatatgtatcagccacctcccaggttgtgagcacagtcttggtcgttgagcgtgaggaagaaggccacgtccagaaagtccagcgaccgatttgctttgtcagcgaggtcctagccgactccaaatcgagatatcctcaggttcagaagctgttatatggtattctgattactaccaggaaattatctcactacttccaaggtcactcggtaacggtggtcacatcgtttccgctcggcgatatactgcacaaccgcgaagcaaacggacggattgctaaatgggctttggagttgatgtctttggacatatccttcaagccccgaacttcaatcaagtctcaagcattagccgacttcgtcgccgaatggaccgagtgccaggaggatacccccgcagaaaagatggagcactggaccatgcattttgacggatcaaaaaggctttcgggcactggagcgggagtggttttaatttccccagctggagaaagattaagttatgtgctttggatacatttttccgcatcccacaacgtcgccgagtatgaggcgctcctccatggactacggatcgcaatctccctagggataaagcgtctaatagttcgaggcgattcacagctggtcgtcaaccaagttatgaaagagtggtcctgccttgacgacaacatgacggcatatcgacaagaggtacgcaaattggaagacaagttcgacggacttgagcttagtcacgttctccgacacaacaatgaagccgccgaaagacttgccaactttggatccaagcgcgaggtggcgccttctgatgtattcgttgaacacctttatgagccgaccgtacctcagaaagaaacagctcaagttgcggacactcataacatagctatgattgaagccgactggagagagcccctcatacgatttttgacttctcaagaactcccccaagataaagatgaagccgagcggatttcaaggcgaagcaggctttatgttattcatgaagccgagctatacaagaaaagcccttcaggaattctgcaacgctgcgtatctctagaggaagggagacaattgttgaaagacatacattctggaatatgtggaaaccatgccgccgcacgcaccattgtcggcaaagcttaccggcagagttttttctggcctactgcagtgtccgacgccgacaaaattgtgcgcacgtgcgaaggttgccaatttttcgccagacaaatccatttaccagctcaagagttgcaaacaatcccactgtcttggccgtttgcggtttgggggctcgacatggttggcccgttcaaaaaggcagtcggcggttacacgcatctctttgtggccattgacaaattctccaagtggattgaagctaaaccggttgtcacaatcacagcagataaagctcaagatttcttcatcaacattgtgcataggtttggagtgcctaatcggattatcaccgataatggcacacaattcactggcggagtttttaaagacttttgcgaagacttcggaattaaaatttgctatgcctcagtagcgcatcccatgagcaatggacaggtcgaacgagccaacggcatgatacttcaagggataaaagcgcgagtttttgaccggctaaaaccctatgctggaaaatgggtggaacagctgccatcagtactttggtccttgtgtactacacccagtcgggccacaggccagtcaccttttttccttgtctacggggcagaagcaatgttgcctagtgaagttgaattcgaatctttgcgctttcgcaattttcgcgaagaacgctacgaagaggaccgagtggatgatctgcaccgattggaagaagtccgcgaagcagctttaattcagtcggcccgatatttacaagggttgcgacgttatcataatcgcaatgttcgatcccgtgctttcctagtcggcgacctggttttgaggaaaattcaaactacacgagatcagcacaagttatctcctttatgggaagggccatttatcatctctgaagtcacccggccaggttcctatcgactcaagcgcgaagatggtacactcattgacaattcttggaatatcgaacatcttcgtcgtttctacgcttaagtttatccatgtatctccctatcttgactgtcaacatcaagcttacttcttgaggttgtcagtcgggggctaccataataataatggagtgtgattttttatcaatttagtttgcttacttggtctatcattgccttgtttgatttttctacttagtttacgaggactgaaagtttttaatagcttttgcgggttttaggctcaacaaagcttgataaaggcttttaagaaatcaacagctaagccagaaacaccaagcacagcataaatataccggtattgtacaaattgagcctcatcattcgtcattcgatgcatttacatttaatcagtatcagtcttctcatcatcagagttattgttactagtcggccgaaggtcggtatcctgaaaccgatctacgacgtcaccagcaatcttgtcggctgctttttgagcgtcgttgataagatcaagggcagcctcttcgcttgtcccgtccgcaaaaccatcaaaatatcgatcttagggtacagggatttggtcattgctaatgctaagcctactcccatgcttccggcttctctaatgttcttgaaataggtgtccggagcgattctcagcttgtcaaacacttcggaagcatcaagtctactcgggccattgttattatagaacatcgcctggacaagtggggtagcggcattggcgacctcgtccctggctccttcaagtcttttgatcttgccaaccaggacgtcgaactgggcttgggacttgatcttgcggtctacaaaaacaaatttatgtcaatgatctgctgcatcaaagagagaaacttaggttgttggctgacaataccttcaacctccttcaaagccgagtccctttgtgcagccaattctgccttgttattttctaaggcctcaattcgtttctccagttgagctatcttggcagcttgcactgtttggattccagacggttgaggatacaattataacagcacaaattaatggggcagatcttgaggttaccttttgatgagccactcagttcaaagttcgaatcctggagttgggtaatccggtcccttagatcatgctctgtctttttggcaagctctttggcttcgtgtagctgatccctaactgcttcaagggtccctaaatgaggaaccagcttttctaaagttgtggttttggcctcattacggagatggattctctgcgcgatgattcacggtttagtcttgctgagaaaaaacaaggtcaccaagggcagccacctggaagacttacatttacaatacgggtagcttctccgagtgctttcttcagctggcacacctcctcgtcttctttctgtcggtttatgacaatgcctgcaggttgcgagttctcgtcccaccatttgattaagatagggggacgagagtcagcagctgcctttatgcgagggatttcctctccgtcaccgcctagtggtcctgatgtattcccagacattagacaagtgaatcggagttattcagattagcattacttgagaagatgggttacctgaggtgatttccggttgagcgtgaggtgatccttgccctttatctggagacccaagcgttgggtcgttaccagcgtccggtccttgggaagttgtagcctgaacttcaacttcaggaatttcttgatctggacctacttccgactgattgccagtcgggggctcttggttttttgcggtttctgcttctgccgactggtttccagtcgggggctggtcgcttggattgacgttatcagctgaagtctgggcgctagtcggctggtcctcagtagtcggcccagcttctttggatgaacctgtttctgtgttagccggatcagaatccttcccggatggatctatgtcggacggtttcttgcaaagtttccttccagttttcaatattatcttcatgagagaagcatgttgaagtgaaacggtaccggatggtttatacctggaggattttctaaactttggcatggggcggctagacagtttcttcttcggagcagtgtgctttggtaattttttgggtgatcccttatccccaaatttattattgtcgtcgccttcgtcgtcgttcagcataagctttctcttgtgagaatctgtctgcccagtcggattgggagtttgggattgggagtctgacctgatttttggtcctccactcccctgaccggtctgatgacgaggagatcggcgttgagcgattggggggtcagactttatcaaagcaaattcctgaatgaaatgcctccacggtcagttaattcaacaagaagacaaaattatgttttgatcacggtttgaagagttctgatacataccagcggaggtggattgaatgcattgtatggcacgactggcagcagatgcgaataactgacgacaatggcgtttgagaatatcttgtacatcctctccttcatgatcttaaagtccagagaatctgggtcttcacggtttggatcatgcttgccgtcaaactcgaatgctgtgcgagatctctctttgattggagctaatcggcacttaatgaaatgtcgagtgatttgctctccctgtaagccttgctctttgagcttcaacatgcgttccatcagttctaaggcttgggcagcttcatctcccatgggaagagagttccaggtatcttggtatactgggggaagacaggagtactcgggaagagcgggctcgggattttgaatataaaaccagttggcgtgccatcctttgtttgaagtcttgaagggcatagaaaaatacttttggctcaaggtccctctcagttgaaatccagcccctccaactacgcatggtttgtttttgttcggttggggcttaaggaagaagattcggcggaacagagcaaaatgaggcctaatgcccaaaaaagcttcgcagacatggacgaaatttgcaatatggactatggagtttggattcaaatgatgtaaactgattccatagaagttcaatatcccacggaagaactttgaggttggaagagcaaatccgccatagaaaaagtgagaaaaaaccacgacctcatgtgtatcgggggttgggaaagcttcaccacatgctggccgccatccgatgatctccttggctgggagaacgccgtgcgccaccatctccttcaagttttcctctgtcacgtcggacgacgcccattggccttcaaagctttctttttcttccgccatcgatttgatccgaatgagctgatctgattcgagggatggctggggagagatgtggaattgaagcggtgagtcgcggggaggattttggtgaactttttgaaggtggattggagcagaatggtgaaccctagtttcgccggcgcagttctatactatagcaaggaatggggaaaatggcgagagtcccggtggggaagacgaagcgcagcttagatttcgggattttctgttaagggtttcgggggtgctaatgggcctaggcctgaacagtacttcagcccaatattattaacagcgtggcccgttgtgctccttagggacttaggcatttttgctttggcaatttatgctcacaatggtgtggctcaatgctgataaaatcctttttaatgcggttatataattctttggaattattgcaatgcaaattaaaaggtacccgacagaaaagtgttatactatttttgtaagcttttttaggctgcaaaagctgtctgggttaatttgggatgacttgtttttacaatggtcattctcttggcgtgttatatgcctattttaattatggtgaagagtcatagcctaggctattagacttattaattaccataatttttataatatttgatgggttatctttagagttttctactcgggtgcctgtcaaatgtgttcatttgtgaactttttagagtgttattcactcagattctttttactatggctggaaagcagtcggctaaatgccttgttgggcgccgcatatgcttttgtcatatgatacatgattatgctataattttgttctcgactacatgtttcgtttgttaactaatcatatagtcgggggctacacctaattaggtgcatctattcgatgcacaatgttttttatcttttcgcccattacagtctttgtcttcgctactcggcaggccttagcaggaagaaattaaagcactcggattattatttttgagaaagctatgattgttgactgcaaaggtctcgggggctactgtggagattatggataccccatatctacacggcgattatatttagactggatataggataccgaatatagatagaatatctttatctgtatctcgggtttgtttcttaacttgtacgtcaaggaaataccctgagacttagtcggttacgattgtattttatctgtactctcatattctgataaggatatgagttataccttgtaatacggactccttcccctatataaggaggggtccgagtccttcctgggacatcaacttttctggagattatacatccaataatacactcggcggattcatccccggacaggagtagggtattactccttgaataagaaggcctgaacctgtataaatcctttgtcttcaaacccatccacttttctagcttgatagccacccccttttagtattgccgaaatcttgtttcgacaaacctcaaaagccaatggaacacacgtttggcggtctatccgacctactaggatcggtctgaccgaactctaaccggtctaaccgcaggtcctctcgcggtctgaccgtcagcctgaaaacagcacgacagcgcttcggtaaaaacacgatttctcttaaaccaaccgttggatcgagttgaaaacttgacagaataaactagacaaactaaggaacaactttactggagggatttgcaaattaataaacggtttaagagaaaacaccctcgaaagttagatgtatcagaattgcagcaaatctgaacaaaacctaaaagttaagcaaattcaaatctaaccagaaccaatcaacgaaactttccagatgtgatctatgaagtattagaaaggttttggatgaattaacttgaacaaaatcacagcaacacgaacaatcacaagttaataccaaaaccaaacataaacgtaaaacttacgaaaccggaatagatcgtcgatgccttgacgattgaatatgatctttattgctaaagtatattgttcacaaggtgcagccagagaacccctcaaaagtttctcacaaaaccctatctaatatctcaaacttggcttcctaaaactgatacaggagggccacaccctctccctctatttataccgaaaacttcctactcaaattaggagcataactcctagttccactaggactttatccaaattacaatctccaaactcatctaaaccggaatcctgatctcagcggactccatccaacgcaagcaaatcgtctccagttcggactgcctcctcggccgactcgatctccatccaaccgagccgctgcatgctgctattgcacagaacgcacaaacacacacgcatgccaacctactagctgcacatgtacagccacatgtacatgctagcccacacagtacgcatacacatacatgtacgtactgcacgctacagtacctccacgtactgtagcacatcttttatccttcatgaacaccgacggttgcacgcacacctcgtgaagcccgttgtgaagatctctcccacacggtgtccatccaccgtatgccatctcgtatccaacttcgtcatccggtatccttgaccgtctgatccccaccgttgaccgaagttgacctccaagaatcctgactctagtcaccttctcacatggtatcccgaccgcactagacctctgctcctccctgagcatagtcccagtcctcaccattgaccaaggttgacctcaagtcacctgcacacaatcagacaaaacaaccgtttctgggcacagatatcacaacatgacccacattagtcacacgcactcacaccaacatccacacatctttttaaaccaattcattgattaaatcatttacacagccaattgtttatcacaaatattaatcatgacaataatttcacaatttgacgagcataccaatttaaaaccatggactgattgttttatgtaatttcagctacgagtctgacgaagatatgtgcaaaaaaccaataacttcgtcctcatcaagaaaaagagcagctaccttagctgtttatgtagtggctccagtgcttgtagtcgccatgcttgttgtagcatatttgatctggagagccaaaagaaagccccattgtgtgtactactataatctgcattgaaaaacacattgtttaatatctgcattttaatactgctaaatctgttctttctgcaccagtttctacagatgattctcccatggtaccagaacagataggtcctcccagacattggataaatcattgggaccatctacaaaaacctaagaatcatcgattcacatatgaggaactagcgaagttcactgatagcttcaaacgtttaattggacatggagggtttggaaatgtctattacagctgtttagaagacagtactgaggttgctgtcaagatgcgaaccgaatcatcgtcccacgggcttgatgagttcttagctgaggtgccaaatatagttagtattatgtttaaccacaaataaaatcaatatttacagtttttcagtaaaaaatattcaatatttagaatggcatatatgtgcatgtaaacttagggtgagtttgagagacaggggattgagaagattgggaagatacgtaaaacgagatgagccattagcgcatgattaattgagtataaactattttaaatttcaaaaatagattaatatgattttttaaagcaactttcctatagaaaatttttgcaaaaaacacatcgtttagtagtttgggaagcgtgcgcgcggaaaacgaggtgttttctcaccctatctcacacaaacgaacacagccttagtcacatccactgtgaggtttcgtacccatcaagagatttgaccatttgttttatcacattacataggttcagagcttgaccaaggtgaatcacaggaatcttgtttctttgattggttactgctgggagaaggatcatttagcgcttgtctacgagtacatgtctagtggcaatcttagtgattatctgagaggtttgtccattgcaatctttaagtattgaatatttgggaaatctgcactacgccggaccaggttatctctgacgggcccaaaccctcacctttgacgggtttggtcttggtcactgattagtggtcactgatgacaaaatcacctgtgacgggtgaacccatctctgaccggtatataagtcatctctgacgggttaaaacttgtcacccgtcacagatgagtcatcagtgacgtgtcgtaactaccgtcactgatgactcatctctgacgggttgtaacttacgacccgtcactgatgacaaagcaagaaatataatttttgaattttaaacgcaacaataaaaacctcaaaaaaatattttgaattttaatagccatcctatacatcactacctacaaattcacaatttttcacacaatataacttgcatgctacacgtgagattcgaactcaagacctcaacctccatatagagctcccttaccaatacacctactcagcacatattgactactcacccaatgttgttattttgtctatgcttgtctgaatcatttaacatatatttaacaccctaaatgacttcaaatgaaaatattatcaactaaatagttatagatctcatcgtgttttataacttttacatagaaaatatcttcatccgatgttgtttgaagaattcaaaatttcatttttcaaaatatatctcactttataacatgtattttgaacatgtaaactttgtgaaatgaaaatattttcaattataatgttgtagatctgattgagttctatgactttgatacggggcatgtatccatccatgtcatttgaaaaaaactcaaaattttgtttttaaaagtagatctgatcaacttgtaatgcatgttcggggatgtaaacgatctctaatagaaatgttgttagttataaagttgtggatatcattgagagctacaacttttatgtaagacatgtctcaatctgaggttttttgcaaaattttaaaatttgaattttcactcatcactgacgggtcataactaccacctgtcagagataacgttatctgtgacgtgtgttagttaaagacccgtcagagttgagtggtctcttttgtgatggttcataatactacacccgtcacagatgacatgtcatctgtgatgagccatggttgtgaccgtcacagacgatctgtgacgggttacaagtgcaagccgtcacagatgacctcacatctgtgacgggtcctccctggtagccatatattgaagaggatattttttcggcccgtcagagatgactcatctttgacgagttgcgttggcctgtcacagatgacccgtcactgaagtccggatctgtagtagtgctgagggaggatattggacatatacattacgcagacaaactagttggctatagtcatctttccttctttacaacttaaatactccgcgtgtgcccgcagacaaactagttgactcatgttgcacaacagtttgcagaactatgacaagtagtactgcttacctggagagagcatagttagactttttgaggaaaaaaaagactggagagagcatagtttttttttttttttttttttttcggggatggagagagcatagttagtctctacctaaggggcttcatggccatcgcttaaactcactaaagatatcataatatatttagagcaatttttggatactaaaatgtgccctaccaatcaattggttttttgaatagtagatgtgagtagttcgcattaaagctaaactattagcaatgcctaaattaatatggtaactctacatgtaccaatcaaatttgactctaaattggttctaaccaaagatgatccatgcaactctaccctaaaaaaaaaattagtagtacccaaactttccatggttctaatagtgccaattatttagtacgatagaaaacaaaaaactacccttaattctgccctcacgtatggaatatgttaatcttgcagtaccatttttttgtcataattgttcatcatctcattatcaagacatctcattaagacaacacaataataaattgcgtggatgtttaaaattgtatacaaaataattgtttttgcattattgatggtctatctcgactgattgtgcagacatagtaatatcaagacatggttgtatctatctaataaatcattacattgattctatccttttgttaaaggaataatactgttttgacttgtcaaataacaccccccccctcttcccctccctcccccaccttctaattgcgtataagtaatgtatgaaggcaaaactagcatgggtggaaccatgaattgggcaacacgcataagagttgtgcttgaagctgcacaaggtatgctacagtaagaaggcaatgacaaatacacagagaaagaatctattatatgccactgaatttatcctactttaacaatttgtcatcaactttatctccctctataatatggcactgactttacactactacaataagcattttcccgtgcggatgaattcaatttttgcgtgcgcaggtttcgactgtctggaaggtatcgtctgcaaaaatcgtgattttttcgtgcgggcgacgcacccgcacgcgaaagtcgcgtgcggcgcttaagccgcccgcacgggaaaatgaaaaatcgaaacaaaaaaaaaagaaaaaacaaaccctaaccctaatccagtcgccaccgccgccggcaccgccaccctagccgaggcctgccgccgtcgcccccgcggtcgccggcgacggatccgccgccggctaccgtcgctgatgccggatccgccgcccgtgcactcccgcggctgccggggaggggatgggaggggagagggaggggaggagccgcggccgcccatcgtcgccgccgcctgcgcccgccgccgcctcctcacgtccgctcgccgcgagcccgctgccacgagctcgttgccgcacgcacgccgctcctgcccgcctctcccgccagccgccgtcgagcccgctgtgtggagaaggaggcgtcggccatatggtgagaagaaggtgagagagagaggaaaatgagaggaggagaaggaaggtgagaagataaaagagagagagaggagagaagggggcctggggggagagagagaaggaagttaattttcttttaatatgatgggagagaagtctattttcctgtgcgggtggattaggaggcccgcacgtgaaaatagggttattttcgcgtgcggacctgttaagtgacccgcacacgaaaattaatttttgtgtgcgggcgatgacccagcttcgctcccctcatttttccgtgcggtctaacttacggactgcatagaaacaaaatggggtggtgtccagaaaaatcaatcctgtagtagtgttacagtatgctattgtggtggatacttttctgaaatgcctagaatgcccttcgagttatccaagagttgacaattgtttaacccactagaagttttgaaaaaatatgaaagtttttgtgtacttagccttcttacaaaatatagaagtttgtgtgtatatttcaaatttttctttcaagttttttaaataataatttcatatagtgtttgaaagaggaatcatatacacaaaagatagccacatcacaataaaaaaggaacaacatgtgaatgatgatatatgttgtcgaatggacaactacgtcacgccgaaaggcgtggttttctcaacagtggttggaaataaagacaattgtattgctttgtaaaaatttttggatccccccattacaaggcctaagggggctatttatagctctattacaggttccttcctttagggtttagattttacaggggaatttatatggctacccagtgtcctttacatgtattgggcccttattgggcttagatggcttggcccattcgttcgtcgaatcctcctcgagagtgtaacggcccgttgggcctcctcgcggtagggttcggcgctcggcgaagcccgtgtctccgtgctaaggctttcgcctcaccatcttcgcccgcggaacccttcgacaaggtctttgcctggcgaagcccacgttaacccaagccacagccttcgccaatacggtttcctcttcggccttggccctttgctttcggactgagccttatcgcccgagcgggtggtttcgacaggtctggccgaaggccctttgtggtatacctccaacaagcccctcacgggaaagggtgagtaggaagcttcggccgagaccgtgcaagtcatgtggtataccgcgaggcgctcctttcggccgatgttcatgctgaaacctatgctacgcacctgcgatagtaaaaagtttgctcttgtgttaacgaaaaattttgaaggaaatttccttactatgttcgcaaatgggtggcgaaggggttagattgcccgtcatgctgttattgaacagtgatgggctccatgggctttgctgtttctgctttcggcttttcactgtttggcctcggcccgatgggaatttatcgtttcgtctaccaccggacacgtgtcgggctctgattggttggtagacgaaacgtcgcgtgacggggttatataaccctgccgctggttaccgcttctccccctccactttccatttttaccgctgccccatctctgcgctctctgccttttgctttcgcacttgctccttggacattctcactccctttcgcttttcgacccctcctttcgacacggacttaatggctccttgcaaacccaccaaagccgggtcaactggcaaagaccccgggggcctcggcgaaggttggtcgtgttaccttggcaagtcacttgtcaaggaatccgacctggctgagttcgtccactccggcgcccttgcaaggggccaggcaacgtgcgggggcgaggccgttgtcccttcgcctggtgataggcgaacgattgttttcgccgccttcctcaccgcagggcttcgccttccatgcgacaattttcttccgcccgtgctggagatgtacgagctcaagctaccccagctcagtccctcggcgttccctaagctggccgtcttcacatggatgtgccgaacatgcgggttcgctcctaccgccgagctgttcgccatcttgttcacggcatgcgctatgaccaaagacgtaaacataccggccagttcaaggaaaacggtcttcagctgtgtcaactttatgcttcggccggagcgttcggatgcatggccggtgcctgcgttgatggtgaaatgggaccgcagctgaatgcagaagtggttctacgttgccaacccgtaccctactgaggacgacaaggcgaactggcttcgctttcgacggctacttgtttccatcgtcgctaagccaagtgtggaggtcgaccgcacactcgagtccaggctcatcctccttcgcaaggttgcacggaggctaagtgcccgcgacctttgtgaggagttctgccttcttcgaatctctctccttgctcatgaatgagtggtgtgttaacaaccaaatttggtaattttagtatcggagatgaggatgaaaccgaagcagaatccaagagatagatcgtgctgaaagcagagcaagaatcggctaaagtccgaattggctacgattgaatcaacagagttcgagtcagacaaggttagccgattgagccgattctgacaatatgactcggtgtacatcatcgggttaagtttaagtgcttcatatggattgccatacatggctagtgtcctgaaaaggcaattgtacttattaattagggtattttatgtaatttccttagagataagcttgggcaaaagtctgccgcaaagacttacggtatcttagagtttgttagagataagagtcgtgtccgacatggacatattttgtaatctcgggtataaatagaccctgagccctatgtaaaaaactaacacacgttcaaatacaatctctgcgcatcgccacccttttactttcgttttgtttcgacgagttcttgctttcgagttgagctacatcgatttcgatcttcaattagaggtaaaacttgttatggcggcttgcgttctcgggattagtgcttccatctttatgatgctctaatcttgtttatgtaatttgtcaagttatcatatattctatataatcttcagcaatattgttatcgaacattcaatcggctaacatctattgctagaaggcagccaattaggttagattccgatgttgatctagattatataggatatccaccaccttatgaaacattcaacagcttgattgtctagatattattcttcttttcatacttatagctgtatcagttgagtttgatcttataagtagtgattagaatcatagtctctagcctgcttttggttgccgattaaggtagtatcggggtttcagccgatcttacctgatttagccttatatttcatgtgcttaattggtatgctagatctgccctttatattgagatctttgttgcttttaggtatattaagcttcttgtttgatatatttagcttgctttaatatattaatatagagtagtatcagagtattagccggtacttgctagatctatctgatcgtctatgctataaacatttataatctccttgctagtatatatttcgatctaagtgatttatactgtctcggcatggcgaccgatctatcccaatcacttgatttaagtatatatcgacataaggattgtatactgttaatatctacagccgatcgagtagatttagttttttattatttactaacatatgccgatcgatgcaaagatgacatcggctcaaagataaattatatgtcatcggcaactagccgatcggctatcgtttatggatttaagctcggtttctttgtctttatttcttgttgtttgcaagatcaaattaactggcacgctcatagttccaaaggcaagatttcttggacctgcactggagttaagcagatctcccaggccttgtgtttttcacatcaacacgcttttggcacgcccggtgggacaagggtttttgacaacttcttcccgatggctgagaaaccaccaccgtcaccggggacaggagtcaagcctcccgtgggtaaaacgggaagcgaacaaccgtcaactgaagtggatcccagcaacattgttccgatcacattggataagctgacgaccgagcaaaggggcgagctcgaacagatgatcagcaatgtcaaggatcagttcatgaattcttttcgggagactcgcaaagggaccatcgttcagagatacaagctgaaggtagttacagctgatgaggttggctcaagctcgtctcagggcgataaaggtgctgcagctggctcgggtgataaaggtgatggtcttcaggaggggatggtcgaagatcttggaccagatggcaatggactagaactgcagtttgacaatttctaggatcaggtcaattatgccgtgcaacatgctttgatcaaccaatctggagtgctggttaatactctaacaaacatggtgaaatctgtggtcgatggttcaatagctgagcatcaagctacaggaccagtgtatttgccaggtggtgttttccaaattacaggcctttggttacaggcaatcagcaaaatcctgctagtgcaccactaactcagccgatggcatcggttacggctcccgcttcagctgcacaagttgcaccatcatcggcatcaagacaaatgactaatcctaggctactgaccagggaacagccataggatgccggtcaaaacatcaatcggctgactcaggagcaggtggctaccatgttcttgccaaatccaccagctgccgatccagcactgccgattcagcaaacgccatcaagacagcaggctacccagccgattcagcaacaaaacttgctaaatgcatcggctaggatgaggacgcctgataatcagctaaggcagcatgttacaactcaagttgtcccggagcacctggttcataatgtgcaaccagatcagacaatgatacctcaagttatacctgaacacttggtgcgtaatatacatccgaatattcagaactataatgggggatacttgaattatcaatatcagcctccttcacctcatgttcatcaagggggatcacctcagcctcagtttgctcctcagttcaatcaattcgagcttgtgtcgcaacaagcacaaggggcacctcagcatagacagtgggccgatatgatcgcagatgtaatgagagagaaatttgggctcaagccgaaggatactgggaacttgtatcggcatccataccctgagtggtttgaaagaattccattgcctgcccgatacaaggtaccagacttctcaaaattttcagggcaagataatgtttctacttatgagcatattagccgattcttagctcagtgtggtgaagtatcggctattgatgccttgagagttaggctatttcctttgtccttgtccggatcggcttttacttggttctcttctctaccatacaattctatcaatggttgggccgatttggagaaacagtttcacagctattgttacagtggagtccatgagatgaaactgtctgatttgacagccattcggcaaaggcatgatgaatctgtgcaggattatatccagaggtttagagaaacaaggaatagatgctacagcttggctttaacagattctcagttagccgatttggcttttcaaggtttgatagctccgattaaggagaaattttcatctcaggagtttgagagcttatctcaccttgcacaaaaagtgactctgcatgagcaaagatttgcagaggctaaaaacaactttaaaaagatcaatcatgtatatccatgcatgtataattcggatgatgaagatgatgattccgaagtagcagcagccgaatgggttagaagcaagaaggttgtgccatgcccatgggagaggagttctggaaaagaagagaagtttgattttgatatcaccaaggctgacaagatttttgatttattacttcgggagaaacagattcagcttcctgctggtcatgtcataccatcggctgaagtgctaggaaaaaggaggtattgcaagtggcataattctggctctcattctactaatgattgcaaagtcttcaggcagcagatccaggtggccattgaaggaggaaaaatcaaatttgatgattccaagaagccgatgaaagttgatggtaatccttttccagttaatatggtgcatacatctgggagggcagccgatggaggaaggaatagaaattttcagatgaattcggctagaattatcaacaaataccagaagaagtatgacaagcagcagcaggagaggtattatgaagaagatggtggttttgatcctcattgggggggctgtgagtttttcagattttgctggaacgagggtatgagactaccatctattgaagattgtcctggatgcagtaatgttgcagaaagttcaatgtcacgcccggaaattcactagtaatttccgaactaatttgtgcataaaatcctcgtccaggaatcagccgaggtacacaaactgacaatttaatatacaaatccatcttaataataacgttacatacttacaaaagaaaagaaaacagcagcggaataacgatctagcgatggcttcagctccactcccacaggcagctcaactggggtataagccaaacgtcttctccttctggaacctttatcttcaactgaggtttgatgattattgcaagaatgagcatacttaacaagccacacagcaaatatgcaagtgcacaaggattccaaaggatggcataatataggctcatttgcaaaagcagcatttagcaaagatttaagataagtaaaacagtggagtaattaatcataaattttaatcaacactgaacaacacacccatgttgcacaggcccaaccattctgaacaaccatacccggctgtacagatctaactccaaaccaggagctaaacaaattattaccagattataacatccataattattgtgagaggtgtgagactaatcacgaaaaacattgctcaacccgcccataaccgcgggcacggctattcgaatagttttactctggccagaggtgtaccactgtacccacaagacacgattccacacatgttgccatgccccgaaataccaccacggcattgcaaagggggaaatcgtgacaataccctttgcacaacacaactcaaaacagtgcaccgttcctggatcataatcaccccctcaaaaaccagaggcatggactccccagcgacccccacggacttctcgccgcttctcagtctggcaccccgcaatgaatcatgctatacaaaaggtaaagccgttgcccacgctggcttgtggttggcacggttaatgtctcgcaacagtagctcgcgaaccggtccttaattgccatgagcacgactttcaaaaccatgtgctcacaacccacctttaatcaagttttaattatcaattaattatcataacacgattaaccatcgtgagctaccattaaatataaccataaataataatgtagtatatatgattcatccaattagtgagctaatgtttctaagcatggctaagcaattatatatatatgtagcatttagctaaaccaaaccaatatataaggttctagctaatcaaattataacccataggaaaataaagtcatcttcggccattaattaattgggaaaggttcaccacccggtgacattcgaaaacaatgcatagttgaaataaaataataactttaaacgggttcaacatgctcaaagggttgtttgggatctgtgtgacttgccttgggcttccgcaaacacttccgaaccttcctcaacgaaaacgctctccttcggaacgtcggaaactaaagcgaaagaacaaaattcaacaaaacagtacaaaaacaagcataaacagtacatgtggatatttttaacatgtagatcttgattttagaaaaatttagcaacttgaaccacctgaaacggatctacgattatttagttatgattttccgaagatttaatctattagaaaatcgggaaaaagaaaagccgatgatgacgtcatgatgacatcatcaatggccggaccaagatggcgacctcgccggagattggatgattggctgcgaatttggaggatatgtacacgtagaggacgacgagacgaacccaacggtacttaccctcgagccaaacgacgaccgacggtgaccggcgacgaggtgaacggcggcggcggctcggacctcgccggcggtggagctccggtggccggcgacgaagggggacaggaggccgggcttcccctcgccttggcgcaccccacggtggtgacggcgaccggcggcgacgacggaagcggcggcgcgacggcgccgaagatggccggcaacgacggcaagcaagacggcggcggcgacgaggctacggagcactagagagctcgggaaagagggcaaacgaaagaggaggactagggggtcctatttatagccttggattgaagagatcggactcctcccgcaagaaatcgatccgggaaatcaaaaactcggttttggagataaactcaaaaacgagttcgattcggataaaatactcaacggtttgctccgattcttggggaaaaggatagaggaggataagaggaatatttcccctcaactaattttgcaaacggagctcgggatgtggcggatttaacggaggaagcggtggctgcacagggcacagcacgggcggctcggctctgtccaagcttgaagatgaacagtgccagggaggaaagtagacttcttgccgggcttttctacttccaaggactgattaaaggagggacgcaaagcagacttcgggaaagagaggaaaagggctgcaggctgagaggagactgggccgagagtgagaggacttttcctaattcggcccgaaaaggaaaaggtgaattttaattacttttccaattaaattaatcactgaaatgatctttgaattgttaaaaatacttccaatgctcaaataattccaagaaaaatcttgaacatacttggacactcaaagtacttaacaaaattataattagaccatttaatgattaatttaatatgtgggtaattactgaaatgctctttgtatgattaaaaattaggaattgagctccgaaaaatctgagaggatttcagagagaataattaaccatggagaatttaataaaaattaaatccatccatgctttatatttaggaaattttatttccctcatttaacttcactagtaaattaatgaacatttaatataaattctgataataatttattaaataatttataaatcctgaaacgaaaatcagggtgtgacattcaagccgatcttacaatagaggtaatcggctgagacaaacaagagtttttgttcattaaagattaggcccagtaaaccaggggtatgatcaaggagatgatgaggatagaaaggcttaatagtgtccttctggtattttcacaaagaatcagaagaggagggttcaaaggttgaggaacagagaacgttttcgagaggtagagcaggagatcagtcatcggctgaggaagacaaagccagggcaagagtggcgtgttaagaaccaagctgccacagccgatgaggttgaagcggatgaggcaaagaggttggctaaagggaagagtgtcgtaattgcatcggtgaacatggtttttacactacctgccgaatttagggccaatcaagccgatgttgatgaagttgaggaaacctctgcaaaattggttttttcaccagagcaagcagtttttgagaagccagaggggacagagaatcggcatctcaaaccattgtacattaacggttatgtcaatgggaagccggtgtctaagatgatggttgatggtggggctgctgtgaatttgatgccatatgctacattcaggaagttgggcagaaattctgaggatctcattaagataaacatggttctcaaagattttgggggcaatccatcggaaacaaaaggagttttgaatgtggagttgacagtcggtagcaaaaccgtccctacaacattttttgtcatcgatgggaagggttcctatagtttgttgcttggaatggattggattcatgctaattgttgtactccttcgaccatgcatcaatgtttgattcaatgggaaggcgaccagattgaaattgtgccagccgacaggtcagttaacgttgctagtgcagatttagctatttgggagatgggtggaattgattgcctgtctggaaaagtttgggatggaggttttctaaaagtgtccgattgtgatatacagccaattgaagatggagagcccaagttattattttgagggagtcgtggagggttcaaacgtctacaacaaggacacggcagatgatctcgatgacaagcaaggacagggtttcatgtcggctgatgatttagaagaagttgatataggtccaggtgatacaccaaggccgacttttattaagaaaaacttatctccagagttcagaaccaagttgatagagcttttgaaagaatatagagattgctttgcttgggagtattatgagatgccaggactcagccgatcgattgttgaacatcggctacctatcaaaccgggggtcagaccataccagcaaccgccaaggaggtacaaagccgatatgcttgaagctgtcaaggctgaggtcaagcgtctatatgatgctggttttattcgtccatgccgatatgctgagtgggtttccaatatagttccatttatcaagaaaaatggtaaaattagggtgtgcattgattttcgagatctcaataaagccactccgaaggatgaatacccaatgccgattgcagatcaattggtcgatgctgcttccgggcataagatattgagttttatggatggtaatgttggttacaatcagatctttatggcagaagaagatattcataaaacaacttttagatgtcctggtgcaatcggcttgtttgaatgggttgtgatgacttttggtttgaaaagtgctggagctacatatcaaagggctatgaattacctaatcggctggttggttgaagtttatattgatgacgtggttgtcaagtctaaggaaatagagaaccacatagccgatttgaggaaggtttttgaaagggctcggaaatatggcttaaagatgaacccaacgaagtgtgcctttggcgtatcggctggtcagtttttgggattcttagttcatgaaagggggattgaaataactcaatggagtattaatgcaatcaagaaaattcaacctccagagaataagaagaagttgcaagagttgatcggcaaggtaaattttgtcagaaggtttatctctaatttgtctggccgattagaactgtttacacctttgttaaggttaaaggctgataaagaattcacctggggggcagagcaacagaaagctttggataatattaaggaatatcttagttccccaccagtgttgattcctctacagaaggggattcctttcaaattgtatctatcggctggagaaaaatcaatcggctcggtgctgatccaggagcttgatgggaaagagagggttgtattttatttaagccgaaggcttttagatgcagaaacaaggtattctcctgtggaaaatttgtgcttgtgtttgtatttctcttgcactaagttaaggcattatctattatccaatgaatgcactgtgatatgcaaagccgatgtgatcaaatacatgttatcggctccaatcttgaaaggcagggttggcaagtggatatttgctttaacagagtttgatcttcggtatgagtcaccgaaagcggttaagggacaagctatagccgattttattgtggatcatcgtgatgactcaatcggctcagttgaaattgtgccttggacattgttctttgatgggtcagtttgtactcatggttgtggtatcggcttggttataatttcctctcggggggcaagttttgagtttgcctatactattaagccttatgcaactaacaatcaagacaagtatgaagcggttctcaaggggttgcaattgcttaaagaggttgaagccgatgctattgagattatgggtgattccttgtttgtaatcagtcaattagcaggagaatatgagtg

SEQ ID NO: 8109 - DNA, 36638 bp, Oryza sativa
  unsure (1)..(36638): unsure at all n locations
gcggtgatatggagtcgccaaccacctcgatctagccaaaaggctaaattaagatgggtttttatagaaaacagttaaaccggctagcgaagccgatttagagatcaaaatcagcctctaggccgatttagatcgatatgaggataactacctgtctcgtgggcaaacggaaggttttcagaacaaatctacaaagaagtgtcgcactctcgtagtggcggcggacggtttacggcgtaaaccgacaaagatggactaaaactagggtaaaatagaaaacatagtaaaagaacgattcaagtagattgggttacaattgaaccggtcttatcccttaaataggggttggtcttgccctttacagaccctcctccatgtccaactcgggatagaaaccaaagtaaacccgaaacatgccttcccaagcaagaaaacacaagacccgatgaaaacatactcgggcttagactctgacggtctgaccggccacatacctgcggtcagaccgcccacatacctgcggtctgaccggccctctctggaggaaaccgacatagctccaaactttggcaatcttttctatttcaatcctaggtgtcaaatttgggtgtaaacagatagcatggttcctcattttacattgcaaatactgttttcgtcaatgtagattggtattttaaatcgagagtgagccgttctaccttttggtaatattagctgctggacacccacgatattattttattatatttgaaggacatggaaatagaaatatttgttttagacaggtttgcccatggagttcgacacgttcctcaatctcctgttggatcagagcagcaaccatgtgggcatcgacgtcaaccccatcagctccaaggcctacacaaacgtgtccgatggtctggtctcggaagacgccattatggctgcgagcatcagctacatatatacaacaacctcaccggcttcccggcttcctagctgttcatctccagatcggcgacggcaagccgtacaacgtcagtgcgccggtggacatctgtgacggcatacctctgatgggcctatgaactggtcagagatgaccgtcacctttgacgggtcgctagttttgccgttatcggtggggaattcggccgcgacccgtcataggtatcccatcacctgtgacgggccggaaggaaaagccgtcataggtataccagtgacgagttttgcttccaacccgtcattggtatcccctcacctgtgacgggccggaaggaaaagccgtcataggtataccagtgacgagttttgcttccaacccgtcactggtatcccctcacctgtgacgggccggaccggcccgtcacaggtgagaggataccagtgacgggcaactcaatcgaagcctgtcaaaggtatgaccaatacctttgacgggctttttttacctaacccgtttaaggtgtgttgggtctataaatactctccaaaccgccaactgctttccatcccgaccagttcactgttcacaaatcggttgggagggcaagagggtgaatttttgctaaaattcaaggtaaaaaacacattattcttcccttcattctcaatatatcaatcatcatatatttttcttcctatgttgttgatttcagatggatcgcagttggatgtaccatattcatcgttcgtctacagagtatagagagggggtcactaaatttgtcacatttgcggagaatgacagaaaaagtaggatgagcatgtacatattgtgtccatgtaaggactgtaggaatgaaaagatgatccttgatagctcaaaagtgcattctcatttgataacgaatggattcatgaagaaatatacctgctggactaagcatggagagcaagaggcgccggatgtcgcagctgaagaagtgttggatctggatgtagagaacaccgccgcagctcgagaaggcatgtttgtaccttctccgttaggtggagagaccatagatttggacactcaatgtctatctacaatgttgcatgacattgaagacgcagaggataacgacagagattttgagaagtttagtaagttggcggaagattgtcggatgcccttgtatgatggatgcaagtcgaagcacagcaagttgtcatgcgtgttggaactcatgaagcttaaggctagtaatggctagtcggacaagagttttacctagggttgacctagggttggacctcttctagatccagatcgaccaccactctctctcactctcactcactctctcgaccgccgccctcctctccaccgccgccgctcgccctctccgccctcctctccaccgccatctccgccatctccgtccatcgagaccgccgtcctcaccgccctcctctccaccgtcgccgcctcactctctccgccctcctctccaccgtcgccgcgcgccctctccaccgttcgtcctcggcgccgccccgccctccacgacgccgaacctcgacgtcgcgtcttcaccgccgaacctcgacgtcgtcttcgccgctctccctctccgcacgccatccccgccacgacatcggacgtcggccgccacgacgccgggatccacaacgccgggatccaggacgatcgggatccacaacaccgggatccacaacgccgggatccaggacgaccggcgaccagcgccgccatcgcctctcagacctcttctcctcggccagttctccctgaccaggtacgccgccacccctcctcctcctgatgaatggattgatttgagtcagtgatggatgattttggatccatgtgtatgattcggatgaatgcaggactagatgaattagcttctttgtattatatgattttgaatgaattttgatgcactggatgaattgctgctgctgctgctgttatataaccctatgttatagaatgaactcctgttatagaatgattgttatatacacttgttcttttttttttttgatgaattgctgccctgctgcccctgattgcctgattttgatgattgttatagaatgaatttgctgctgctgttgctgttatagaatgagtgttatttttttatgcataagaacagattatctacacttgttcattttgttatgtacacttgttcgaattgctgctgctgttatagaattgttatatgatcgaattgctgctgttgctgcccctgctgccccttgttcagtgatggattattgcgatttgatgcatgaattgctgctgctgctgcccctgtgccccttgttcagtgatggattattgctaaatggccagtgatgaatgctcaataacattatgtctagacttgttcatttttttatgtacacttgttcttttttttatgaattgctgcccctgtgccccttgttcagtgatggattattgctaaatggccagtgatgaatgctcaataacattatgtctagacttgttcatttttttatgtacacttgtccttttttttttgatgaattgctgcccctgctgcccctgtgccccttgttcagtgatggattattgctaaatggccagtgatgaatgctcaataacattctgtctagacttgttcttttttttatgcataagaacagattatctacacttgttcttttcttatgcataagaacagattatcaacacttgtcctttttttatgcataagaacagattatctacacttgttctttttttatgcataagaacagattatctacacttgtccttttttttatgcataacaacagattatctatgattgttcttttttctggattgataagagactatatacactttgggtctttttcatcctagtagttgatttcctctttttttcccttcatgcaaatagtggtaattgatgcataatttctgagcaaaaccgaggccatatctttcatggtatataatgctaattagtataatgatagaaaatttataagctttttcggaaaaattagaccatgacaacgcccggcgcaaacccgtcttccctgacacctgcgaggatacaggaagaagcaaacccagccacagagactgttgccgaaggtcatccctcgacaacggcggtcgaacaacccgaaagtcatggtaatttataggataaattttcactacatgaccacataaattttagctagcaccccttagcatatgttgccttctgtgtgctgcagaatcgccccagcaagaacatacgtcaatatcgggtgggacaagtacgagtaaatcgagtagaaaccccccggacacaaaatatatggccgaccacagcgcaagttataagagaggttgacgctagtggtaggcccacggcgccgaggactgtcattggaagatggtctaactgctacgggctggcggcacgtgtgaatttcgggatcctccataaagatatcggcaaggtcacagaagccgagaaggagcgagcttggacggcaatggagaaatggctcacatttaaggctaaagcaaaggataggctcaagcggaagtcattccataagatgggcaaagcttggaagaattggaagtcgaagctcttcaccgagtttgtcaacccgcccggcaatcatacgccgttcgatgtttaccctcaaataaccgaagaggtgtgggaagaattttgctctctgaagaacacccaagagtttagggaatcaagcgagaaacatcaccaactgcaacagcggaatgagcacccgcatcggctgggcaccgcagggtacatcggcaaggagccaatatgggcccaagaggatgctgccactgcagcagcgaatgtccctgccccgttttcggacatccctgaacacagagctcgcaactgggcgcgggcaaggggtaaggtcaacccggacggctctgtcacatttcagaacaaaagtgatgtcgtcgtctatcaggaattggtgagttcactacttaacctaactaattaccattcgtatgaagtagaagtttgtataaacgactcttgttgtttatagttggggttggttggtgaacaagcttcacaaagcgaggttgagtccgtgccgaagaggcgcgaagatgacatcctcacaaaggcgctcggaaccaaagaacatactggccggactcggggaattggcagcgatgtgccctgaaagcacggactctcgcagtacaactcccaatacaggaaacggaaagtctccaacgaagagagggacgctcgtttcaaggccgagcttaaggtggaggtcattcaagaactacaagctagcatggaagatagggtggaagaaagggttaacaacgtcctcgccgacatgaatataccccgaggcacaacacctgctgtgcatccaactcctcgtgcacaacacgacgcgagtctgtcatagcgtaggagtagttgtgcatccacagaggtgccggccccaggtctcccgatcgcaccactagctgcagtggaccacatagaggtaattgatgttatccgatccatatctaatcaaaaacatttacacattccaatattaaattcaaacttttacatatgcagggcgtagcacagtgtgtcctactggcgaggatccaccaactttcgctcctgaagtcgctgagggcatggctttcaaaccctcggttacagataaggtccacggcgcagacctgctagccgggtatgccaaggtgtccatcgatacagtaaaggacacctggtcaggctatcggttgcccatgccccccaatgatgaaatcatgactttgggcgttgggcgcaagacgttcatacaatggcccaaagaagacatagttgtgaagatgacttctcgtccaaatcgaccgacggagcttacacctcccaaatctaagctatcaattgaggctccccgtggaccggcattgtcagtacctccttctcctgatggagatgatatggacttgggagatataactcaaagcttggctccaataaagaccacaagaaaggccgatagctccccaccacttgtgaagggccagaagcgtgaacgcgtcaaggggaaggtcggggagttagcaccggtgccaaaaaggggcaaggctgcgacgtcgatgccggagagcaaagcggggaaggtcgtgagggcgcctgcccaatttgagctaggcatgccattggtgaaggacaatgtgttagccgtgatgggtattacttgccgagagctacataagcaatacatggagctaagcaatgcctagcgaaaaatgagggagtcatccatagttggacatcacaaccaccagccgttcctatcgtcgcctgcctatgtaactataggctttgatgacctctccaaccttttcaggatccggaagttggacacaggacttctaaaatgctactccttgtaagtgctgaccttccatacttgtgatatgattggactatatctcctaattaaattagttctaatacgtaaatgtttttaggttgtgttggatcgagagtcgttgccatggtaaataggttgggttccttgatccatccatggtgaacgaggtcaatttacgccagagcttcactgatgtggttgactatgtcaaccgatgtttatgggcccaccaagacaaggagtacatcatgtgcgcacacaaccaggaataagaggataatacccttcgtgtatattgtttttgaagttaaggttcttattactaacgctacataaccactgcgcaggcgacattggattctcttagtcatcgtacctaagtggagtagggtttactaccttaactccaataagacgaaagattatgatttcactgatatcaccaaggccttaaatatggcttgggacccatatgtggaaaagggtggtaggcacaaggagggcaaggacgaactctattatgacactaagtttgcatgcgcacaacagatcagagaccagtgtggtttccacgtgtgcacaacatgtcaacactactaagagaggtgaaagatttcgaccctgagattgttactaatggcgaataagctcatttcaataccaatattgctattctaaatgtgaaaacatctgatttattaaacagaaaggtagagctggcttcaagatctcacccatcaacccccccgctatcagaggcgaagtgtgcgccttcattcttgcagaaataatgaacaagaaatgacgttttcacgtcaaatagactcatgaacttggctagataatttattgtgatataaaaaaattgtttttattatggagtgcaatgtaatttactttcatatgtgcaatatttatggtagttcgctaatttgtcatcaaatttgatcaactacgatttatgttgtactattcatttgttttctgctttttttttctaattgacaggtcatggaggtcgaggacattatgactttaatccatttggtaagtatatatgcggttctatgagcaacgaccgaaattatagctttcaatgggtataaatttgatgtgcaaaattgtggcatttgaactgcatatgtgaatgatgtcaatttttaggatggatctgtgatgttatattgggggtgactggaatatatctgtgatgtttctgtttttcagaaggcatggctagcaaatcctgaggctagccaatatttaggatttattttttttctgtgattaactcatcagtgacgggtcggaaccaaaatccgtcacaggtgacctcacatgtgacggactcgcaaataaaggcccgtcagtggtgacctacctgtgacgggcctttactttcggggccgtcacaggtagatcacctgtgacaacttctatctacggagaccatcacctctgacggcctttatttaaagggccatcagaggtaaatcacctgtgacgggtcctaactggccctaggctagcggagaccaacacctctgacggctgtctagtaacttgcccgtcagaggtgggtgtcacctgtgacggccgaccacccgtcaaaggtgactggactcaccagtgaccactgatcactgaccatgctcaaagccgtcaaaggtgagggtttgggcccgtcacaggtgaccttggccagtgtagtgtctgcccgaggaagtagcggtcggcttctccgcggtcaccgacgcctgcatcgagttgcatcatgatcaggtgctgtcctggtcgttcatctccactctagaaccagccacaaactcaactaaaattttccaccctgtcacatcgaacgtttgcacagaagtattaaatgtagactaaaaaaataactaactgcacagattgtgactaatttgcgagatgaatctattaagcctaattgctccatgatttgacaatgtggtgctaaagtaaacatttgctaatgacggattaattaggcttaataaattcgtctcgcaatttacatgcggattccgtaatttgttttgttattagactacgtttaatacttcaaatgtgtgtccgtatattcgatgtgacacgacgaaatttttcacccgtggatctaagcccaaatctcgcgaccattgcagctttgacagacacctcctcttggccagataggtagtacaaaataattaattactactccctctgtcctataatataagggattttgagtttttgcttgcaacgtttaaccactcgtcttattcaaaaaaattttgaacttattatttattttatttgtgacttactttattatttacagtactttaagcacaacttttcgttatttatatttgcaaaaaaaatttaaataagacgagtggtcagatgttgcaataaaaactcaaaatcccttatattgtgagacggagggagtagcaaatgacgatgataatcttagtattatactcattttgttcaacttggttgattaacagatacaggatcatcctaggtctcggctctgcgctacgctatctccacacggagtgggatcaatgcatatatattgcacggcgacatcaagccaagcaacattcttcttgactctttcaggcagcaccaagctggaggattttcggctggcaaggctcgtcgactatggcgccgacccacggactacgcaggttgttatgggcaccacagggtatattgaccaagcatcgagcttgacgtctacagctttggtgtcgtcatcctggaggtagtctctctggccgctggccggagatggagcagacggaccaggttatcccgctactacagtggatttgggatctgtacgatcgggacgcagtcacggatgtgtacaatcgcagtacgatcgtagacacgaagctagctgcaggaggttggccgagagtgtggcaccgtagaccgtgactgcgattggcagctccagcgtacggtcaccgtcgggctcgagtgaacggccgtccattacgagagccatgaacgtgctgcaatcagacgatgtgactctgcaggtcctgcaacggcggcagacttcgtgtcccgacgatttttgcagattgcatagcggcggcgactggttgtcatcagctactactagcacgggcaggtgacacacgtgtaatgtagggacctgggctagataagtactcctccgttttttaatatacgccgccgttgactttttctcacatgtttaaccattcgtcttatttaaaaaatttatgcaaatgtataagatataaatcacacttaaagtactatgagtgataaaacaactcataataaaataaattataattatataaattttttgaataagacgaatggtcaaacatgtgagaaaaagtcaatggcgttatctattaaaaaacggaggtagtactagatagccagctgccagcacttgcacattctaattttattggcaactatacatttgtgacgccatttttttactaaaaataatctattcgtttttactttacgcttacactgtaaatttcagtagttatatgctataaattttctaatacacattacacataagaattatgatagtaaatcaatccaatatgggatataacatattctactattacgaatgtgttaaagagctagtgttattcaaacttcagagctgtacaggctaacgagtaggattctaatcgactaagggtgtgtgtttagttatttcggtgtaaagttcttaaagtatacggacacacattcgaagtattaaatgtagactaataataaaataaattacaagttccgcctgtaaactgtgagacgaatttattaagcacaattaatccatcattagcaattttttactgtaacatcacattttcaaatcatggcgtaattaggctcaaaagatttgtctcgtaatttacatgcaaactgtgcaattggtttcttttttcttacatttaatgccccatgcataggtccaatcatttgacgtgacattttttgccaaaatgtttcaggatctaaactaggcctaaactaggcctaagtaaatagttattaaaaaaattgaccaaatagattaatgtgtaatatatcacttgacaaatttgcaagttcaaaatcgacttctataaattgtaacaaaaatgacaaattaaactctaactagtataagtatatttatagtcaaatctgttattttgttacaaattccagtagttgaatttaaacttacattacatgtttgtagagtgatatattattattagtattctatattgtcatttaaagaaaaacataaccaattagttcatatgcaatgaacaagtactccaaatttgaattcttttgatactgcttgttatcactacttggacctggaccattttgttcggtcttgtaagatgtaggttagatgcaatatgtgttttgaattgggccacattaggtagttttgctctcaagcttgttctaaatgggccttttctgttacatcctgattttcgttttaggatttataaattatatttataatttatattaaatgttcattaatttacaagtgaagttagatgtgggaaataaaattttctaaatataaagcatgattggatttaatttttattaaattctccatgattaattatactctctgaaattttctcggatttttcagagctcaattcttaattttaataatacaaagagcatttcagaaattatttaaatattaagttagtaattaaatggtttgattataatcttgttaagtactttgagtgttcaattagtttcaggatttttcttgaaattatttgagcattggaaatattttaacaattcgaagatcattaatttaattacaaaagtaaattaaatccccttttccttttcgggctgaaactggaaaagttcacctttagttctcggcccattctcccttcctttcagctgcctttattcctcctccgaagtccatttcttgtccctccttcaatcgggctggataaaagaagcccagacaaagtctaattagccttcctgctacagtatcgtcttcaagcttggacagagcccgtgcagccgccgagccgtgtgtgccgctgccgattcctccgcccgatttgctcgattctctcagccgtttcttgaattagttgaggagatttgtttcccttatcctcctctatcttttcccccaaaaatcctattttatccctttgaattcgacgcgaatttggattcgttttcgagtttatctctccttttcccggcgcgattccatccgttcccgagccgatctctccctcttccggctataaatagcagctcctaaacctcctctttcgttttccaccctcgcccgagctcgccgtcgcccgtagcgccctagccgcctccaccctagcgccgccgccatcgccgtcgccgagtctccagccgtgccgctcgtcgccgtccatcgttgccttcggtcgccgtcgccaccaccgggttcgcaaggaggagctgcacaccgtccacccctcggtcgaagccgaagcctgccggagcgccactgacgccgtcaacccgagcccgtcgccgcctcaatctcgtcgccggccgttttccgtcatcgattgtcgtcgccgtcaccatcagtgagttcctctcgtcgtcctcatcgcgtagatgtcctcggttggcccggccgagtcctccatcgccggcggtcatgtggtccagtgccttgttccggcaatgatgtcatgccgacgtcataaagcccctttttcccttctaaaaataaatcttaattgtgtcataaatcgtaaatccttttccgtataaggctaaaatcagtttaatattgtaaaattcataactaattcatatgaagtcggaatgaggccgttcaagtctctaaattcatctaaaatcatgatctacatgtttgtttactttttatgtactgtttatttagtttttattagtctttttcttcgttttgtgtgttagcttgtcgtttccgtcgttgcgaaggttcgtgagtgcgtcggaagtgtttaagaagactaattgaagaccgattattgcaaggcaagtcacacagatcccaaacataatcctttgaacatgttgatctcatatttaaattctctatttatttcaactgtgcatttattttcaaatgtcaacgggtggtgtgaacctattcctttgttatggccaatttgcattgaataccctattacttgataccttgggtaataaattgattagcttgaaccttatatattggtttggtttagctaaatgctatatatatatatatatatatatatatatatatatataattgcttagccatgcttataaacattagcatatgattgggataactaatgttacactaccacttatgattatatttaatggtagctcacgatggtcaatcgtgattggttaattaattacgtgccaactaaaacttgacaatggtgggttgtgagcacatggttttgaaggtcgtgctcataacaattaaggatcggttcgcgagctactgttatgagacattaaccgtgccaaccacaagccagcgtgggcaacggctttagcttttgtatagtatggttcattgcggggcaccagactgtgaagcggcgagaagtccgtgggggtcgctggggagtccatgcctctggttttttgtttttgagggggtgattatgatctaggaatggtgcgctgtgtggattatgttgtgcgaggggtattgtcacagtcccgtttcgaggtaccgtggtggtactgagggcatggtaacatgttttggggctgtgtcttgtgagtacagtggtacacctctggccagagtaatatttttcgtgattagtctcacacctctcacaataattattgatgctataactggtaataatttgcttagctcctggtttggagttagatctgtacagccgggtatggttgttcaggatggttgggcctgtgcagcatggctgtgctgttcagtttgattaatattgatgattaattactctactgttttactacttctaaatnnnnnnnnnnnnnnnnnnnnnnnnnnnnnnctatattatgcgatcctttggtatttttgtgcacttgcatatttgttgtgtggcttgcggagtattccatgttttcaccttgcaataatcaatcaacctcagttgaacaaaaaggatctagaaagagaagacgtttggcttataccccagttgagctgcctgtgggagtggagctgaagccatcgctagaccgttttttccgctgcagtttttttctttacttttgtaagtatgtaacgttatcattatgatggatttgtatattaaattgtcagtttgtgtacctcggctaattcctggacgaggcttttatgcacaaataagttcaaaaattactagtgaatttctgggcatgacattttctaaacctaagcccactagcacggagaagggaggttgttattggttaataaatctgctgggtctcagaataaatagtttgggtaaaagaaaagctcccctcttctcctagtgtctcttctcctcctcctgcaatagcaaaaccccaatccaatctcacctgatcgccggtgaatgctgttatggcgaataccaacgctactgtagaagttatctttgccgggatggcgaaaatcacactagtcccggtcaaataggaactgggactaaagaacatttttagttggataaaaaagggcaatggagctttatgatttttagtcctgattggtgttaccaaccggattaaagacagccggggctaaagataaaaacatttttatacttcttcttcctcctccagcccgagccattgctacaaaggtttggaggaagaagggaggtgctaccaaatttttttgtgaaagtgtttcggtgataatatacaaatcgaaggaatctaaaaggttagcaactccatcctctgataatgtatgcttagtatattacatttatagttatggttatatacattattgtctctgaaaaggtttatggaaaatgacaagagagaaaatttgttaggataaaaataggttacttttaaaattagaaacatgtggataaaaatgttataaaatagatgacaaaggaaaaatatagaaaattaagataaaagaatagaaaacaaagttaatttaataaaatagttagaaaaagtacaatacattaaacatatcattagaactttaaaaataattaataatattaataatatgtgggattattgtatgattatttgtatatagttattgtatgattatttaattagcttgactttcgtggattttatttttacgatttttgtgcatttcaggtagatggatcggcaatggatgtacaccgcggaacgacggtcgacaaagtttattgaaggcttgcattattttttgagtgttgccaatgctaacaagcataagggttttacatgttgtccatacaaaaagtgcaaaaaccaaaagtagtattctacatcatgaactatttatgcccacttgtttcagtcgaggttaatgcctagctaaaattgttggacctcgcacgaaaagttaggggttgcgatggaggaagatgacgtagaagacgagaacattccggactgggctcaatacggtggatttgatgaaaatacaacaaacgaggcggacgagtgttgacgaaaaatacgaggcctgagagatctgcttaactccagtgcaggtccaaaactcgccttcgggtatgctagcgtgccagttgatttgatcctgcaatcaacaagaaacaaagacaaagaaactgtagttaaatccataaacgatagccgatcggctgagtgccgatgacatatcatttatctttgggctgatgtcatatatgaatcgatcggcagtccttaataaataagaaagaactacatctactcgatcggctgtagatatcaccaatatataatcctgacgtcgatatatacttaaatcaagtgattgggatagatcggttgccatgccgagacagtataaatcacttagatcgaaatatgtactaacaacaagattatatatgttcatagcatagccgatcaaatagatctagcatgtatcggctaattctccgataccactctatattaagatattaaagcaagtagaatataccaaacagaagcctaatatacttaaatgcaataagatcttgacataaagggcagatttaatatgtcagtaaagcacataaagcaaatatagttaaactaggtaagatcggctgaaaccccgatactaccctaatcggcaaccagaagacagggtagagattgaaattctaagcacgacttaatagatcaaactcaactgatgcagtattaagtatgaaaagaagagcaatatctagacaatcaagtcgttggatgtttcatagagtggtggatatcttatataatccaagctaacgtcgctatttaacctaatcggacgccttctattaacagaagttagccgattgtaggttagatgacgatattatcgaagattatataagatatatgataactcgacgaattacataaacaagattagagtgtcataaagatggaagcactaatcccgagaacgcaagccgccataacaagatttacctcttgttgaagatcgaaaccgatgcagctcaacccgaaagcaagaactcgccgaaataaaacgaaagcaaaaagggtggcgatgcgccgaaattgtattgaacgtgtgttagtttgattacatgaggttcggggctatttatacccgagaattacaaaacatgcccataccggacacgactcttatctctaacaaactctaagataccacaagtatttacggcagacttttgcccaagcatatctctaaagaaattacataaaatatcctaattaatagatacaattgccttcccaggactccatccatgtgtggcaatcatcttgaagcacttcaacccaacccgatgttgtacaccaagtcgtattgtcggaatcggctgcatcacctaaccaagtctgactccaactcagccgatccaatcgtagccgatccggactccagccgattcttactctgtttctgcgacaatcttcatcttcgatttcgcttcaatctagtcttcatctccgatactgatattaccaaatttggtcgttaacacatgccccccaagtccggaatattcgataatgtttcggatttgccgcatatcgactccgagcaagtttcgcactccgccgttttccgaccgttatcctccgtgctttaaatactaaccgccaccctgaaaaatctttaccccgttacttccgttttcaccgccgaagcaaaccccgtcctctctctctccggcgatttcctcggtgcgcgaggcgatccccaagcgacttcatctccggttagatctccgcccgcgacgatgtcttcttccgccagcccgtctaccgcaccgtcagctgagtacgctgaggtaagttcccgtcggctagatcccctttctcagcatcagattgatcttccaacacttcatcttgttttccccttcttggttcttttggatttgtagcatctttccaacctagttgcaattcccagcctgtcgcacgaaaattattactttctcggcccagtcggcaaccctgatcccaccgagttcattattggcgaaaccaataggattactttcggattgaccaacccagatttaggtcactagaaaaacactttcaaatcctggccatcccttgagaaaacctcacccgagaaaagttggatcacatggttcaagcgcatgtcggctagcaaaagatttcattgggatgaaattggaatcggccaagcacttgatctcaccatagccaactcagctaaagacgagcccctaatggcagctgcctcctatttttggtccaacaaacaccatcaatgccttcttgttcaatcaagggccgatgactccaactctcatagatatcataatgattacgggtctggatgtcacctcatcggctaaccctatgagcttgaacacgaagaaccaatatgactttaggaccaagagcataggcggctggtcaggctatgtagcggcatatatgggccaaggttctgtcactcctcgagaacatgtagcttttctgctaatgtggctagaaaaaatcctcttttgtggatcaagttgtggccctacaaccaactggcagttcgcagccaaagccttggagacaaagagacaatttcctttaggcaaaatcctcctcggctatttgtaccaaatgctaaacaatacatcggctaagttggccgtcggctcagtagtcggagcaggtggaccatggtggctattacagtcttggctgaatctagtagttatgaagtttgtcaatcggccatctgtaacagaagccgaattcccaagactggaaccgactgtagatgatgatggagaagaacgcactcatcgtagatgcacattttacggagaatatacctccacaccaaccgatgcaggagcaaagctatcggctgaactgctcaaggactggttctgtagtttttatgagggtttccaaaaagacactcgagtttggttcctctacgaagattcaacacttctggagaatccattggactttaggttcgaagatatcaatcatgaaagatatcagaaacccagagaaatcttttcagctgcaatcagtccatgtatcctccctgttggcattcatcatggatgaaacatccaagtttcttatgtgttttatcacccaatgagctcaaccagacaactaggaatgggccaactcccaatcggcttattctttgctgataagatccagtgccgaggggaaatttcatcaaccttaatgatggatcggctgcttaatctccaaggaccccctctaggcagcattgacaacatagagctggcaaccttcaggagcaaagcatttgacagatggtggggtgagtggaaactacacctattccatcaatcggcttctatgtatatgacagacctctttccagatgttgtccctcaggtatgtcttgacttgcttaatttcatttgaataattgtttaaccgactaatcttgattaattttccttttaatttgtagacaacagagtcatctcctcctcactagagcaatagtggcagaaatattgagtatgccccggggctgattccaaagggggtggaccatctcctcctattattggttataatgcccccaggacttcaactctccttcaagggctcgtcagagaaccagccgatgccggtaaaaagagaagaaccagatcatcggctgtggacacatcggctccagccccaaagaagaaggttaaattaaagaagcacaagccaaccgatgatctgcctgccctggatctgtccatcgaacaagctctggacgaagaagagattgaagaggacattgatcaagcggcagccgaattgagtgatattggaggaaaaacaccgtcagcctcgcccaagcaaactcccccaactcctgttgcaccggctaacttctcaagggtaaacatctctccttaattaccttttgcagttatcctattcatagccgatcactcataaaacttgtttttgcagaaaaagaagactgctgtgagaaagaaatcggcagcgacaacacttaaaccagccccaccagtaagattcccttatataaattctttcactaatctgatcatggccgatatttattcaacactttgtctttttgcagcctcctcctccttcttcacctcctgtgcagcaaatgtcaagtgatcgaactccatcggctgcagggagtcacaatgtcgaggaagaggaacaacccgctgttcctaacatcccagtaaatgtcaccttcaaaatgttttcaatcggccgtaccgtgcaatctgatctataattatcttcaattttctcttctgcgggtcttagccgatctgttctcatttgatatcaaagactatcttgatgaagaaacagaaactgataccaccagcaaagctctagctcccttgtccgatgatgtgaaaaagactcttgaggatatctctcatcggctagaggcatcattagacaacttggtgactaactgtggttcgatcagggcaaggtttgcagatattcaagctctactcccagatgagctagccgatgccctcactccagctgtctaccttgagcaacaccgattcaagctggagaaggccaagcagagattagccgattgtcgggagcgaaaagacatcgaggtcacaatccaggccaatcggcagcttgttcatgaagagaaggccaagcttgatctgttacctgaaggaccaatcaaagccaatattgatcggctcgaagctcgcaagattgagctcttggcacaacttcaagaatgcaacaccgagctggatctggaacacaagaagctagccgatctcccacaagttgtcgaaggacagaaggcaagattaaaatcagctatcaagaatgtcgctgatatgaccaagtccttgaaagtcatccctagaatcgatgctcaagatgcccaggccatcgaagaactagaacaaattaggcagagggctgtatcggttatccagcgctatttatttcaatgacattttgtatagtagacttttggaaatttttgtaatcggctaagatactacgatactttacttaacttgtcttgataatcctttgtgccaattaatacaacttctgaattctgctcgaaaatcttcaaaattttgcaactgttgtatgtatgtgcccccctaattttgaaatgacgaaggcattgataaaattataacctagactaagggcgacataaccatatcggccattgaacatcggcaaaacacaaccgattacaaaaaaacaactaagggcgatataaccatatcggccattgtacatcagcaaaacacaaccgattacaatagaaaaacaactaagggcgatataataatatcggccattgtacatcggcaaaacacaaccgattacaatagaaaaacaactaagggcgatataataatatcggccatctcaaggcgatgagaagacatcggctatcatgcatcggcaacaccagccgatcatgcattaacctaaacacttgggtaatatttcttcaagtacttgccattcaacgctcgtccataaacttctctatcaagtcctagcagcatataagctatcttagacacgaccttatagatttggaacggtccttcccaattcggcgaccagttgccgaatttgctatcccgagctcctatcggcaaaatcaatttccaaacaagttcaccttcagaaaaagacttaggcaccactttcttgttataatgccgagcaacacgttccttatccttgataacttttgcaagggctcgcaatcttgattgaacgaagtcctccctttcatcgtccataaggttataatactcatcggctgtcaaatcattttgcaaatccgttctccttgagccgattctaacttcccaaggcaaaacagcctcgtgcccaaaaacaagcttataaggaggaacttggattgaaccatgacaagccatccgataggaccacaatgcttcggccaatctagtatgccactgccgaggataatcggaaatctttctcttaatcaatttgatcaaactcttgttagatgcctcagtttacccattagcttgtgcataatatggtgaacaattcaacaatttgatacccatgctatcggcaaactgaacaaactcatcggacacgaagatcgatccttgatcagttgtaatggtttgaggaataacaaatcgatagattatatgctcttgaacaaattgtatagcatccccagaatcgactttcttcaaaggaatcgcttccacccacttggtaaaataatcggtcgccaccaatataaacttatgtcctttactcgatggtggattaatcatgccgatcatatcaattccccaacctctaaatggcaatggcttaatgataggattcatagccgacgccggtgccctctgaatcgctccaaatttctgacaatcttgacatcccttgtaatatttgaaacaatcctccagcatcgtcggccaaaaataccctgcacgccgaagcaaccacttcatcttatgagccgattgatgagtgccacaaattccttcttgaacttcaccgattacaaccttagcttgatcggtactcaaacacttaagtaacaccccatcaatcgtgcgataatagagttcatcatccaataaagtatacctcaacgctttatatcttaatttccgagaagccgattgagatggattctgtaaatattgatgcacatcatatctccaatcatcggctgttattgcagcgacttcaaccttaacatctttcatcatcggcttataccccgatgccccttgggccaaatcattagcttcaatattttgttctcgggatatatgcttcaaagtaaccagccaaaattccttcattaattcttggcacttctcgttataaattaccaatgtatcattcttgcactcatattctcctgctaattgactgattactagcaaggaatcccccataatttcaatagcatcggcttcaacttccttgagtaactgcaaccctttaagaactgcctcatactcagcctgattattggtcgcataaggtttgatagtataagcgaactcaaaacttgccccccgaggggaaataataaccaaaccgatgccacaaccatgagtgcatactgacccatcaaaaaataaagtccacggcacaatctcaaccgagccgattgaatcatcacgatgatcgacaatgaaatcggctagagcttgccccttgacagccttcagcgactcatacggaagatcaaactttgttaaggaaaatatccactttccgacccttccttttaaaattggagccgacaacatgtatttaacaacatcggccttgcatatgacagtgcattcattggacaatagataatgcctcaaccttgtacatgaaaaatataggcacaaacacaatttctctataggggaatatctagtttatgtatccaagagtcgacgacttaaataaaacacaactctttccttcccttcaagctcctgaattaagaccgagccgattgacttttcaccgcccgacaaatacaacctaaaaggtatccccttctgtggaggaatcaaaacaggaggagagctaagatattccttaatactatccaatgctttttgttgttctgccccccaagtaaactgttgatcggctttcaatcttaataatggtgtaaaagactctaaccttccggacaaattagaaataaaccttctaacaaaatttatcttgccgatcatctcctgcaactctatcttgttccctggaggccgaatcttctggattgcattaacactccgctgggttatctcgatccccctctcatgaacaagaaatcccaaaaattggccagccgatacaccaaaagcacactttgtcgggttcatcttcaagccatacttcctggttctctcaaaaaccttcctcagatcggctatgtgatcgtctatctctttggacttgacaaccacatcatcgatgtaaacttccactaaccagccgatcaggtcatgatagatataattcatggctctttgatatgtagctccagcacttttcaagccaaaagtcatcacaacccagtcaaacaagccgattgcaccaggacacctaaaagatgttttatggatatcttcttcagccataaagatttggttgtatcctgtattaccgtccataaaacttaaaatcttatgtcctgaggcagcatcaactaactgatcggctactggcatcagaaactcttcttttggggtggctttattcaaatccctgaaatcaatgcataccctgatcttaccgttcttgttgataaccggaactatactagaaacccactcagcatatcggcacggacgaataaaaccagcatcatatagatgtttgatctcagccttcacaggttctagcatatcggctttgcaccttctcggaggttgctggtgcggtcgaacccctagtttgataggcagccgatgctcaacattcgattggctgagccctggcatctcataatactcccaagcgaagcaatctctgtattcttttaagagctctatcaacttggttctaaattctggagataagttcttactgatatatgtcggccttggccgatcgcctggtcctatgtcaatttcttccaaatcatcgggcaacatgaaaccctgtccttgcttgtcatcgagatcatccattgtgtccttggcgtagactcctgagccctccacaacgccctcaaaataacaatttgggctctccatcttcaattggctgtatatcacaatcggacacttttagaaaatctccatcccagacttttccaggtaagcaatcaagaccatccatctcccaaagagctaaatcggcactggcaacgttgactgacctatcggctggcacgatctcaatcttgtcgccttgccattgaatcaagcattgatgcatggtcgaaggaatacaacaattggcatgaatccaatcccttccaagcaacaagctgtaggaacccttcccatcgatgacaaagaatgttgtagggatagttttgctgccgactgtcagttccacattcaaaactcctttagtttctgatggattgccaccaaaatctttgagcaccatgtttgtcttgatgagatcttcagcattcctgcccagtttcctaaacgtagcgtaaggcatcaaattcactgcagccccatcatcgaccatcatcttagacatcggcttcccattgacatagccatttacatacaatggcttaaggtgccgattctctgtcccttccggcttctcaaagaccgcttgttctggtgataaaatcaacctagccgactcctcttcaacttcatcaacgtcggctcgtttaaccccaaattcggcaggcaacatgaagaccatgttaactgatgcagtcacaacacttttccttttagccaatctctttgcttcatcggctgcggctacatcggctgtaggaacttgattcttaacccgccattcttgcttcggcttcgtcttcttctgccgatgattgatttcttgctcaacttcctgaaaacgctccatgttcctcaatctctgaaccctccttttctgattctttgtaaaaataccagaaggacaccattgaatcttcctgtcttcattgtcctcttggttataatctcgatttactgggcccaatctttgatgaacaggcactcttgtttgccttggccgatcacctttattatgcgatcggcttggactttatgcaatattgccgcacccaaggcagtccttgatagatggtagcctcataccctcattccagcagaatctaaagaactcgcagccgcaatgaggatcaaaccaccatcatcttcctcataacgcctctcctgttgcttgtcatatttcttctggtacttattgataatcttagccgaattcacctaaaaacttctagatcttcctctttcggctgtccggccggatgtatgcaccatattgacaggaaaagggttgccatcaaccttcatcagcctcttggaatcatcaaatttgattttgcctccctcaatggctacttggatctgctgcctgaagaccttgcaatcattggtagaatgagacccagagttatgccacttgcaataccttcttttgcccaattcctcagccgacggaattgtatgaccagcagaaagttgaatctgtttctcccgaagtagcaaatcaaagatcttgttagccttggtaatatcaaagtcatacctctcctcttttccagaactcttcacccattggcacggtacaacctttttgcttctcacccattcggctgctgctatttcggaatcatcctcatcttcaccatccgatccatatatgtagggacagacatgattaacctttctagagttcttcctggcctctgcaaacctctgttcatgcaaggttaccttctgtgtaagatgtgataagctatcgaagtcttcagatgagaacttctccctgatcggagcaatcataccctgaaaagccaaatcggctaactgggcatcggtcaaactcaagctgtagcacttattcctcatctctcggaacctctgaatatactcatgcacgggctcatcgtgtctttccttgattgctgttagatcggacagtttcatctcatgcacgccactatagaaataactgtggaaatgcttctccaaatcggccccactgttaattgacccatatggcaaagaagaaaaccaagtaaaagaagatccagataaagacaatcggaacaacctaaccctcaaggcatccacagccggtgcttcaccgcactgggccaaaaaccggctgatgtgttcataagtcgatgtactatcttgccctgagaattttgaaaaatctggaactttgaaccggttagggagaggaactctctcaaaccatttagggtaaggttgccgatacaaatttccagcatccttcggcctgagcccaaactgctccttcatcacatctgcaatcatatcggcctatggtcgttgttgaggtgctccttgaggttgctgtggcatgggctcgaattgattgtattgaggagtgaactgaggttgagccgatcctccctgctgatattgaacttgtggcgaaggaggctgataccgataattcaaactacccccctggtaattctggaagttcggctgaatattgtgcaccaaatgttcaggaacgacttgaggtatcactgtttgatctggctgcacatggtgaactaaatgctctgggacaactcgattcacagcgtgctgccctagctgactgttaggtgttgcgaatccagccgatgcattcatcaaaccctactggtgaatcggctgaatagcctgttgcctcaatggcgtttgctgaatcggctgcaacacctgttgtctcagtggtgtttgctgaatcgtctgcacaacctgctgcctcggtggtgtttgctgaatcggctattgctggactgggtcaacagtaggttgaggtggtaaaaacatagctgcaacctgatcttgtgttagccgattcacgttctgtccactatgttgtggctgttctctcaccaacaaccgaggattaactaattgacctggtgctgacgatgatgcagcgggtgcaggggccgatacttgtgccgtcggctgagccgatggtgcgttaggagggactgtttgaacggcttgctgattgtcagtaattaagggtcgataattcgggaatgtacccccttgaagatacaccggccccgtagtctgatattcagctattgaaccatcaaccatcgacttcaacatgtttgacaaagtattgactaatatcccagattgattgatcaaagcatgatgcacggcatattttacctgattctggaagttgttaaactgtagttgtgccgcagtgccaccttgattaataccatcaccttgaacttcttgagagccgacgccctatactccttgagagccatcaccttgattttcttggaggtcgtctgcagcacccttatcactcggttgagccacaccatctggagtttgtttcacttctccatccttgggagaacttgtcccaaggacatcagcaaccacctttaccttgtacttctacacaagtgtccccttgcgggtctctgtgaatgaactcaagaactaattccgtgcttgctacatcattgcgtcaaggtccttttgctgctcaggtgtcagtttatcctgagtgacgggcacaatgtgttgacgtttgatgtcgcgattccgatatttgcatggtatggggatcattgatgctaggatatatgcgagactgaggtaaaagagatggagacgaagatttttatacaggttcgggcccctgaattgtcaggtaataaccctacatcctgttggtcggagccggcgttgcttttattcaccataatcacaccagtacaatatttggggtagcctatctaactgttgtcgacgtggcggtctgaggttctgactcgtagtcgacaacagggtagccttcctcctcgagttcgtgcccggcgagatcagagatagcgctttcgtctctcctgacggtatccagagacaccgtaggggactagccgtgcttatccctgaagtcgatattcggcgtcttgtcttggcatatgttagcttgtatgttgtggcttctgttgttccgtagattatggtggttgttgattgaggtggtcgtgtcccctctcctcctagggggccttgtatttatacacataggtgtccccttgtccaagtagaactagggaaacccatatggatataatccgagtagtccttgtcgtttccatatagaactctggttatctttccttatccggaactccctccatatccgaagtcagtttccgtataagacatggtatgtggtgggtcctgccgagatgttgtcgactactattaggtatgtggtatccataaccctgacagtagcccccgacttcaatgaaaatgaacaggttcatattctcaactgcagaccttggaagaactgttatcgagctcaagtgaccgttctctgtgagttcagagataatgttagactttctttatcagcctcgtgcgggaacctaaagggtttgtctgagtccatctccgacgtcaaccaagaaagtacagaacatacgactaagtctcctgtcttgctgtaatcgagaatttggattgaagtcaagaaattttatctcggcgggtacaccatctcttcattctgtattccttgtcgagatccaccaaccgttctcgagtgatcgagaaggcgcagagactgcgacggagccttgtcaacatttgtcgtactcgccttagtcgatcttggtgtagaaccatagagacatggagtcttccacaatgtcgaatagaattttcctgaaatcaatactcagaaaagaatattagatagaaatagcccccgagcgaatgctcaaagggtgacatgctataatatgtatggaaaactgaaaatgagttaaatttacagaccaatgttttgtatatgagcgtcttctctcttaccgacttcgatcagtcagtttgttgagttatacactctccctagcccccagccttgtcgtcagagaatcattctcggaggagaaggctcttggacccttgacctgccttggttgaacaagcactgatcctagcccccagccgtgaagttggaaaacccaatttccgattacacggcttggttaatacggacggcgagaactcttacacgaccagatcttacatggtcttttgtctctacaggatccgacaaggccttatcggctctgggcatcctcagctgaagttcccttaggttcctcgcaggccttgacaagacggcgtaaagggacatgaggataggtttcaacgctaggagtcgtcgtggtaagggatctctgggtaaaacacttggcaatattgtctacctgataccaactttgttggagtagaggtagtgggaggatcgctacacctctggtagtagtcgtaactcgaccacttaaagtaaatgtacgagagatcgctacgcttaactggttgagaaccagtgagtaggtgtctctcgatcatttggagtcgtggtacgaggaccactacgctgccgatcgaaaaccagtcatagctgttcctcaaccatctgaagtcatggtgcgaggaccgctgcgttattgatgtagtcgtacctcgaccatttgaaattgcagtgcgagagatcgctacgtactggttcgagaaccagcaagcgagtagaattatctctcgaacaccaatgtaagttgcggtgcgagagattgctacgtgctggttggagaaccagcgggcgagtagaactatctctcgaacaccaatgtaagttgcggtgcgagagattgctacgtgctggttggagaaaccagcgagcgagtagaattatctctcgaacaccaattgaagtttgcggtgcgagagattgctacgtgctggttcgagaaccagcgagcgagtagaattatctctcgaacaccaatggaagtttgcgatgcgagagattgctacgtgctggttcgagaaccaacgagcgagtagaattatctctcgaacaccaatggaagtttgcgatgcgagagattgctacgtactggttcgagaaccagcgagcgagtagaattatctctcgaacaccattggaggcgctaaagttggtttattacacgtgcatctcatgtggccagcatgactcacatacccaacttatagcatatccggatgtccgttcgcaatcatgtcgggtgatcaagccgacgacgttcgcgaggaattatccgttaacaaccttttcttgagtagtccagccatggccggtgctatgagataggtcgtcggtcttcgttggtaggttgggcgcgacaactccgcatttgtcgagaatgttctcgatggtggggtgtactcgaccacaacctactcgagtgctcgattgttcctgaaaaatattttctagaaggcaagacatatagcagagaatatcgagtatgtactcaaaaaactgcataaatcttctagtattatcaggatataacgagcagatgtaaatatcagggattatgtaaaccgtaaacaagcatgattcatacaaaagagaacagagcgagcccccagcgttagaccgtggttggcctaacatcggaagcactcgcacaataaatattgtataaaaaacatgctctaggtaaacataataaattatagatctgacaatgctgtatgacctgaataggtacgataaattgcatataaaatattgcgtacctttgtagatacatgccggatatatctacgaaattagtagatcaattaagttaattaactgtcacgcccggaaattcactagtaatttccgaacttatttgtgcattaaaccctcgtccaggaatcagccgaggtacacaaactgacaatttaatatacagattcatcacattaactaaaacgataaatacttacttaagaggcacttagtcctcaccatgaagaaaactgcagcggaaaaataaaatctagcgaagctccggctccactcccacaggcagctcaactggggtataagccaaacgtcttctccttctggatcctttatcttcaactgaggtttgattgattattgcaagaatgagcatatgacatactcaacaagccacacagcaaatatgcaagtgcacaaggattccaaaggatggcataatataggctcatttgcaaaagcagcatttagcaaaacatttaagagaagtaaaacagtggagtaattaatcagaacttttaaccaacactgaacagcacacccatgctgctcaggcccaaccatcctgaacaaccatacccggctgtacagatctaactccaaaccaggagctaagcaaattattaccaggtataacatccataattattgtgagaggtgtgagactaatcacgaaaaacattgctcaactcgcccataaccgcgggcacggctattcgaatagttttactctggccagaggtgtaccactgtacacacaagacacgattccacacatgttgccatgccccgaaataccaccacggcattgcaaagggggaaatcgtgacaataccctttgcacaacacaactcaccacagtgcaccgttcctggatcataatcacccccttataaacaaggcatggactccccagcgacccccgtggacttctcgccacttctcagtctggcgcactataatgaatcacgctatacaaaagataaagccgttgcccacgctggcttgtggttggcacgataaatgtttcacaacagtagctcgcgaaccggtccttaattgccatgagcacaaccatcaaaaccatatgctcacaacccaccttaaccaggttttaattatcaattaattaacatcacacgattaatcatcgtgagctaccattaaatataaccataattaataatatagtacatatgattcatcccattagtgagctaatgtttctaagcattgctaagcaattatatatataacatttagctgaaccaaaccaatacataaggttcaaactaatcaatttattacccaaggtatcaaggaataggacattcaatgcaaattggccataacaaaggaataggttcacaccacccggtgacattcgaaaataaatgcacagttgaaataaatagagaatttaaatataggatcaacatgctcaaaggattgtgtttaggatctgtgtgacttgccttgcaataatcggtcttcaattaatcttcttgatcacttccgacgcactcacgaaccttcgcaacgacggaaacgacaagctaacacgcaaaacgaagaaaaagactaataaaaaccaaataaacagtacataaaaaaaacaaacacgtagatcataattttagatgaattatgagacttgaacggcttcattctgacttcaaatgaatttattatgaattttacaagatcaaatctaattaaagcccatttaaaaaaaattaaataaatttaattcaatttatggacaattttaatatgtagatctttattttagaaaaatttagcaacttgaaccacctgaaacggatctacggttatttagttatgattttccgaagatttaatctattaaaagaaaggaaaaaggaaggatgatgatgtcacgctgacatcatccatggcagccacagcacgggtggcgacctcgccggagctagggtggtcggccgggattttggagaacacctacgcgaagagaacgacgagacgaacccgatgatactcaccaacgcgacgaacgacgacggatgacggccggcgacgaagaagcgacggcggcggctcggcttgcacggtggcgacggctctacgggtcacgggagaggacgggagagggggcaaacgaaagaggaggactagggggtcctatttatagccttggattgaagagatcggactcctcccgcaagaaatcgatccgggaaaatcaaaactcggttttggagataaactcgaaaacgagtttgattcggataaaatacccaacgatttgctccgattcttgggggaaaagatagaggaggatgagaggatcaaaacccctcaaaaatccggaagaaacggggtcggattggagcggatttggaggcggaaggcggcgcaaggtggcggctcgggctcggcctggctgcagccggctgaaggttagggacgacactgtagcagggaggcaaagtagacttttgtcgggcttcattttcctcggcccgattgaaggagggaggcaaaacagactttgacagagagagaggagggggcgggcggcggcagctgggccgattgggccgattcggccgcgcggagagagaaagagttgggccgaaatcggcccaacgacttagggaaggatttaaaaactttttccaattaaaataatcacttaaatgatctttcaattgttaaaaatacttccaatgctcaaataatttcaagaaaaatcctgaaaatacttggacaatcaaagtacttaacaaaattataattagaccatttaatgattaatttaatatgtgggtaattactgaaatgctctttgtatgattaaaattaagaattgagctccgaaaaatccgagaaaattccagagagtataattaaccatggagaatttaataaaaattaaatccacccatgctttatatttaagaaattttatttcccacatttaacttcacttgtaaattaattaatgaacatttaatataaattcttttaataatttattaaataatttataaatcctgaaacaaaaatcaggatgtgacattaacctaccaattacttgattagcctaggtagctgatttgaattcgtcctctggacacacagtaactagcacgtatgggtggcctacatgggccccacaacatgcatgctagtatacgtgtagatggcagtgcagtccgctgggttcttgctctcttcggctgtcctgctgctgcacgcctgcgcttgatgtcggggcaccgtcgtctgtcgacccgacttgtccacggtaagacaggcagggtgacgagttgtagttctcttgtgagttatctgctctccgttcccgagaagaggtcatgtctatacaaatagacgatttgaaagttggcctcgaaataatcggattcgatgcagttgtaacacgacagagaatttgatgacgacgtcgtggcaggaaacattgaattgatgttctccgtggcggcagcgacatctttggagattggatgatctcagtagatcaaaaaccgttgacgatgatggtttcgatctcgtcgggagacatactttggtcaggttagatctctccatagccgaagtcatcgagtagcttgttatcggagaatccatctcttgaacccatctcgtcgaaatcctaaagcaccaaaatccccctacctggcgcgccactgtcgacgtttgatgtcgcgattccggtatttgcatggtatggggatcgttgatgctaggatatatgcgagactgaagtaaaagagatggagacgaagatttttatatagcttcgagcccctgaattgtcaggtaataaccttacatcctgttggccggagccagtgttgcttttattcaccataatcacaacagtacaatatttggggtagcctatctaactgttgtcgacgtggcggtctgaggttctgactcgtagtcgacaacagggtagcatttttcctcgagttcgtgtccggcgagattagagatagagcttttgtctctcctgacggtatccggagacaccgtaggggactagccgtgcttatccctgaagtcgatatccggtgtcttgtcttggcgtatgttggcttgtttgttgtggcttctgttattccgtagattgtggtggttgttgattgaggtggtcgtgtcccctctcctcctagggggtcttatatttatacccataggtgtccccttgtccaagtagaactagggaaacccatatggatacaatccgagtagtccttgtcgtttccatttagaactctggttgtggataatactccgataccactctatattaagatattaacgcaagtagaatataccaaacagaagcctaatatacttaaatgcaataagatcttgacataaagggcagatttaacatgtcagtaaagcacataaagcaaatatagttaaaccaggtaagatcggctgaaaccccgatactaccctaatcggcaaccagaagacaggctagagattgaaattctaagcacgacttaatagatcaaactcaactgatgcagcattaagtatgaaaagaagagcaatatctagacaatcaagtcgttggatgtttcatagagtggtggatatcttatataatccaagctaacgtcgctatttaacctaatcggacgccttctattaacagatgttagccgattgtaggttagatgacgatattatcgaagattatataagatatatgataactcgatgaattacataaacaagattagagtgtcataaagatggaagcactaatcccgagaacgcaagccgccataacaagttttacctcttgttgaagatcgaaaccgatgcagctcaacccgaaagcaagaactcgccgaaataaaacgaaagcaaaaagggtggcgatgcgccgaaattgtattgaacgtgtgttagtttgattacatggggttcggggcaatttatacccgagaattacaaaacattcccataccggacacgactcttatctctaacaaactctaagatacgacaagtctttacagcagacttttgcccaagcatatctctaatgaaattacataaaatgtcctaattagtagatacaattgccttcccaggactccatccatgcgtggcaatcatcttgaagcacttcaacccaacccgatgttgtgcaccaagtcgtattgtcagaatcggctgcatcatctaaccaagtctgactccaactcagccgatccaatcgtagccgatccggactccagccgattcttactctgtttccgcgacaatcttcatcttcgattccgcttcaatctagtcttcatctccgatactgatattacaaatttggtcgttaacaacgaggatgttgaagacaacgacggtgcggatgatcttggtcagatgttgcatgacgtaaaggaggactgcaaaagtgaaaaggagatgcagaaactagagcgcatgtcagcggaccaaacatcgttgtacccaggttgcgaataggggcacaaaaagttgggtaccacacaaggcataaaattagagcgtatgttagcggaccacaaaacgtcgttgtactacgttggaattcttgcaatggaatgccaaaattggtctgagtgactaggcatttggcgagttattgaagctcgtaaagaacattcttcctgagggaaacgaattgtccgaaacaacgtacgaagctaagaaggtagtcttccctcttggactggaagtacagaagatacacgtatgtccgaacgattgtatcctctatcgcggtgaggagtacgagaacctagaagcatgtccggtttgtaaagcactacgatacaagattagacgagatgatccaggtgatgttaacagacatccttcgaagaagtgagttcttgctatggtgatgtggtatttccctataataccatggctcgggcgttggttcaggaacaaatcgcatgctagaatgatgcgctggcatgcaaaataatgttaacaagacagggtgctgagacaccccaccgacggaacatttgaagacttcggagaggatgcatgaaacgtaaggttcggtttaagtatggatgacatgaatctatttggaagagatgagcaacagccatagcacctggcctgatgagtacctaaga

SEQ ID NO: 8110 - DNA, 14004 bp, Oryza sativa
  unsure (1)..(14004): unsure at all n locations
cattccactgctcttaagatcctcgaccggtttcgttgctgcaaccgtggaccttgtggaagccgtcggagcagactttgtgggtagtagacgcctggtcttggggttagagtaagcaatcttcgtgtcctccgactgctgcataattccagctgttcgagcggcagcagatgctgctctgcgaagcgttgttggtttttcatggggcatctgctgctgttgctgttggggcagtgattgcttctgttgctgttggggcagtgattgcttcggttgttggggttgtgcttgctgctgtttttgtggatacgattgctgctataacaatatcaaaagaagaattcaacacgaaaaactttagtgaaaacacaaaaaaaaaataacaagtgttaatgacaaacaaaacctacgtgagaaataacagaggatgctgttagagaatgtgttaaggctactaatgccactatgacatatattaccattagcttcgaaggtttttcacatgtcagataggataatcataaattttctacaatttgtcttcaactgaaacaagcctttttacaatatcataacaatttctgggcaagcgatctagcagtacttgtcagataattactaggcaagtaaagatagcagcaatggggcagaatgtcacaggagtacaggaaaactggggaaattttctgatgtttcgatttgacaagataactacgaagcgagaagtactgccagaaaacaatcagcaatttctatacactatcaaactaacagttaattcccagtttcctcattcatttctcattgttaaatattttaactaaatgatctcatgcctttcgtgtttgctcaagtcagtcctaagtgtctcaaacttacataaggaagtgtaataaataggaaaagatatattactgctgatgagtgatcaacactaatcccacctaaatcttgtgttgagcagattattttctgaaggaagaaagaaaccaccctacagattaggaagttggaaacaaaatacaatatgttttactcaaaaacagtacatgctccttggtgggaaccaatctggtacaatttgtaaaattttcctatcattatgcaatttgtgtaaagtatttaatgaattggaagttggagcattttcaaccaacaaattaaactaaaaattaagtggcatgtccaacagagtacagatatgccaacttgaactgatattttaattattgttgatcttgaaggttattagtgtggtaacaactacatattagtttcaacatcacaaacgaccttcagaggagctaacagctacattagtagtctgctgatcttacattattaatataactaggaaggtaatccacgcgattgcgcgggcatatctttgtttctggtgtttgaatctcctgaagatgaagattaagtgtttcacgcaaaacaaggtggtaataacgtgtgattaattgagttttaattattacaaacttgaaaaatggattaatctgatattttagaacaactttcatatagaaagttttcgtacgaaatgcaccgtttagcagtttgaaaagcgtgccattttaatccaaaagtttatcctcaaatttcataggaaacgaacagggcaatgttaaaatcttttatgatgactgaaaatttctttatatctatatgtaaagttcccgtaaaatgttcaatacaaatagttagttggtcttggtacagttagttggtcttggtacttcaaaatttgattgtaggtaaagaattggatccttggttacacatataaacttagagtaataaaactttaactgagatcttcagataatacggaactgattattctttgaatttctctatttcctttaatgactcaagaggattttatcatgatttatagtagtgccaaattaatcattgacaaattttattgcagctatgataaatttaactaaatgtgttggcacttatcaatatgaagtttagaagttcctgtggtggatatccataggttggttaatcttcagcatgtgactccctagcccgttagcagcctatagaagaggtgaagttgaggtccatatatgctagaagatgttgtaattggtggtttaatacctccttagaattttaggtggatgaaggtctgatttaaatataatacctatgggttaactattttacacgaaaatgagaataaaagtataagtctatgcatatgtatgcccaatccatgaaggacttatgctgatgcaaattttggagctagtgtattacatggtcttattcttgttttcatactcaaatgatatttcgtaatattatttactatactatttagaatactgacattgtaataaatatacagtgcatcattaaggttttcgttagtatcgatctccaaacataacatgaagaagctttttaagtatattttcatcaaatactaccgtagcaaaatctcattaagtgctacatctagtaaactattttgaatatgattgtctacttgcactactcataaatagtataacaatacttcggaataagtagcacccaccttgcaaattggacggtattcacccaacggtttgaaccgttcactctatctatctcctttcaatgcttaaaatttaatattaaaattgaagatagaaatacctacttgagttattccttagtattattttttccagattaaggggcattaattgaatgttttgatatgtagcatctttattgcaaagatttactatgtttttgaattgtacatattcaagctgatgtgacataaataataatgtatagataagggagttcaaggaaggtttagtcatcacaaattaattgttatggtcttcgatcgcttgttgctttgtctttatttttattttttttggaccaggcttgctgctttgtcttggtggctgttgtgacccccactatgttcttttagtgatgcaatggatggctgccaaccttgtggaactgaaggctggtcattctttctacaaccctatgcaccttgtaacgggtcactataacctcatacggcaccttaaacgtcttgctattagataccacacgtggatgtttttttctattacataatgtttgtacaaatatacagagcaatttaaatattgtctcgctttaatttgattagttttgacttttgttaatttaatgcctttatcccaaacatagttgaaggaactgctaaatattgtctttcgtgacattatcttgctttaatttgattagttttgacttttgttaatttaatgcctttatcgcaaacatagttgaaggtgctgttaaatatcgtctttcgtgacattatcttgctaagagtttaggattgaagcaagttattatggaacatctttggttcattctattttcgagtattacaatcatctcaaacatacaaccacaataacaatgtaaacttctatttctcatggaacttaacacaaagttggagtagttgcacagaaagtttggagtactacggcatgacacttatctacgaaactatgatagcaggacacctgcaactcaggtattagcaggcaaaagagattgtgcataaatatgaattgtgaaccaaacgtaggagtgttcaaaaggcattgattgatgaatgctgttccattatcattcaacaaactagaagataaaacattctgcttgcaaacctgtgttgagcgcgaccttgatgaatgagctggtgactgtgcagaagcatacttcaaaatgttaaagaatgtagtctggccaataattgcaaccttctgccagtaaaccacaagcatgtccccagctcttactctcaaatcaagaatactgcagtcgatatcattctcatactgtgaaatgtatggcctaaagaaagtctcatagacataggaggttccctatcataagcacacgcattattcttgaaggcaatcatatattcagtacaagaaaaacatcattattaaagtaaagtacctttgtccttgggcaccataagtatataaagaacatcagctttgcttctgagtacagtggtagccttcaataaaaccagaatcaattaagcattcaaaacagtttgtaatcaacgactgaggaacaaagatctcagaaaaaactaaccatgatattgcaaaatcaccaaatcgttccaaaaccgtcagtagcgcgactaatatcctggacacaaacaacaattcaagtggcacttgcagtgtatggatgtgggcaaaccatgaatccacaagaataaaaatagctccttaccaatattgacaccagaaaataagcttctcaatctcgggcttgttcagctctacggttttatagcattcataagcaggataagcataaccaaaggccaacctgcatcataatcatcccatcagaaccagagtacatcgttttttctacattatgcagttccaaccaaagaaaccaatgtcctcataatccgaatgttatgaagatgcaacgatatagattccactttttcttttggtgcataaaaaaagataggcacagattttagggccgtgtttgaacaactgaactgaatcaagacaggagcaatcgcaagcgcaaatcgcaggaaacttaaaaccatgggcaaacaacagattcctttcagtaacatcgtaagagtatcttttaatactatcacagattcactacacagttttagtgtaccattaatcttcagcggaataaccattgaccttaaacactcaaaacaacaatgactatcctcctccaaagaacggacgaccacagatgtacagattttcacagtgtttgagtggtgtcgatgctattccaaaggaagaagatgccagacaaatcgacgcacacgcattccaaaaaaggcgaaaaatataaacacaaaagatgaaaaaaaaaagaaatcggttcttgaatccatccccacggtcaaacccacaaaaatcgtgaagaaacaccgggagatttcgtcagattggggggacttacagtaggaccctgnnnnnnnnnnnnnnnnnnnnnnnnnnccgatctttctgcacaagaacagatccagtgagatgctgctactccgaaacaaccaagaactgtgtagggcggagcaaggagatgtacagatggaagcgtggatggaagaaggttggtgacggggctgatagatccggaagggatgcaagaaatggggaggaactggaggagtgaagatcccctcgctcaccctctctctccctccagtagtccactcccgtctgactgcgaggagtgaagacggcgacagagctcttcaaactccaccaaacccaacgggcaacacttcactagtgtctctctctctctctcacctctttttctactcggccgtacatgcctcctgttctcagatggataatcatgctgtactccccaactaaatggtgtgttcctttttaaaaaatcactaatctctcttactcaaaatgagggctgatttggtttaaagccaaaactgccatacaaaaatattggtattttaaacagtaattttggcaatgtttggtctactaccaatacttgtcaataccacacaaatgttaccaaaatattggcattggcaaaaatttactcatgatttggcattggcatagttacaaaccaaacaagccctaagttaacataaaatatactaagttgatttattttggaatgaagaaaatagatgaaaccttattcattgttgcatgataattatatatgggttgtaaaattttcttttgtattcctatatatttttctatgcgctttttatatatggtacttgatcgattatctaaatattataaatggtttggaggtatagcgtagccttttttttataagagagtcgatatgcatttttttgatgaattatttaaaggctaaaaccaattaaaatgatatagcatcatgatagaaaaataattaacattaactattaactatatttagtgcagatgaaatttatagatattagatagatagaatttgtacacaagttttcttaaaaggaattgagtaactttatttttttatagtttgtaataatttatacttaattactatcaagtgtccaaacgaactcacccttagtccaaacaagtgtatatttcttttttaaaaaaatctatatagagatatcttagaaaagtttttaaaatctatttttttaactttcttatatttgatttatcctattttgctctagaagagttatcataaaatgaaaaaagctattctctctttctgtaaatataagcacttttggaatagagctcaaacttttaaagtttggctgcaaatagaaaaaaaatcataaaaattgatgatgtgagaattatgtttatcttcataaaaatcttaattcctgtttaacttatgaggttttctgtctttttactcagtatttacttttggaccactaagactaagactagaactaaaagcttcgcactaaattactattattgattatatcagtttcgatttataagccgcacggccgcggctgaaatgtggagattatgggtaccccatatccacacggcatggttatccgactagtaataggggataacatatatgtatggaatatgtaacagatcgtgacttgggtattacgtttccttgtatattacggaacggcctaaagtcctggtttgataatattgtaaaatagatttaggaaaccgatgccgtattggttaaggtttctatcttgtaatcctgccccccaccctatataaggtgggcaggagaccctctagggggcatgagacaacctgatcgtcagatctatactacacccggtggattcaaatccccaaacaggagtagggtattacctctcattgagagggcctgaacctgtctaaatcctgtgtctccacatccatccacttttaggtctcgtgcgctaccccgttttattattgccgaattcatgtttcgacagttggcgcgccaggtaggggtgcgtcgagttcctcgtcgacgagtgcgatggaaccaatcttcaaatcaccgggttggtcgttccaatctactgctgttagattattttttgcgacaaattgattcgctttattgtctttttacatgcatgtaccggtgcctgatgcttttgccgatccaacgaacggcgctatcatctgctctgcgcctatgtgattctcgcgtcggcctcgtgatccatccactttaagatgcatcttgtgtccatgcatgcctgggatcgatcagcagaaaagcgggcatacgtgcattgctatatgcatctaatcttcctgctacatgctaattagattgattttggattatagattattaatcttaattttgctggttatttttgcctgcatgtctgcaccggttgacgaggactgacgaggacctatgtgtttccgcctgcacggctggcctttatgccgccgttgttgggcgtctatgacttcaccgccggcctgcctccgtcgccgccgactggtgcctccgcctacacggctggcctattatgccgccgctgttgggcgtctacgacttcaccgccggcctgcctccgtcgccgccgactggagtccccgcctatacggttggttggtcacaccaccgttcatgggcgtccacgtcttcaccgccggcctgcctccgtcgccgccgattggtgcctccgcctacacggctggcctattatgccgccgctgttgggcgtctatgacttcaccgccggcctgcctccgttgccgccgactggtgcctccgcctacacggctggcctattatgccgccgctgttgggcgtctatgacttcaccgccggcctgcctccgtcgccgccgactggtgcctccgcctacacggctggcctattatgccgccgctgttgggcgtctatgacttcaccgccggcctgcctccgtcgccgccgactggtgcctccgcctacacggctggcctattatgccgccgctgttgggcgtctatgacttcaccgccggcctgcctccgtcgccgccgactggtgcctccgcctacacggctagcctattatgccgctgctgttgggcgtctacgacttcaccgccggcttgcctccgttgccgccgactggtgtcctcgcctatacggttggttggtcacaccaccgttcatgggcgtccacgtcttcgccgaccggctggccttcgccgccgccgactggtgtttttgcctatacggttggcagacttcgccgccgttaatgggcttcatcatctacaccactggcttggttccactggcgccgactggtgtttttgtcaccattgatggactgctttattcccacatcggctacttctgctgtcatcgagggaatacgacaaagctaagtcatcatttattttattctttatatgatattttgtcttttcctttgcctcactacatcaactggttcgccgttgactagtgagtcgggggctatagatgttatatcgtattttttaaacaattttcataatatttatcttgattgcttgcgacataatctgagtacaaaagtacctatcgagttatggagttctatcttcctatgctttccgtttggtttgccaatggatggttgcctttgggccgattcctagcacccgggggctcgttggatggaccgagtaacgcaaggtgctaagtattattcggaataaatcaaaagcatagagatgagataaatttattttctgctcttaataatcgcaaaagtacccgagtagtaaattttgatccgtgaaactttgttctattaatggtgaactcatgtcactcatatgcatgtttgggaagtgcttaggccgactcccagtgcttggtggctatgactagtcgggcagagtgtttaaacgtaatgagtcatctgctcggggaaatcaaaattaacaagaggagaaatatatatttataaatattttaaaatacttgatttttttctcgagtattatatttatatcagatactactcatcctatatgtttgttctgcaggatccagatccagatatgcacaaaagggattcatggctttaagcttatctcttacgctctaggaatggatcagtcagaacatcaccgaccggccgcctcgtccgccgccgactggtgtttccgcctgcacggctggcctattatgccgccgttgttgggcgtctacgtcttcaccgaccggccgcctcgtccgccgccgactggtgtttccacctgcacggctggcctttatgccgccgttgttgggcgtctacgtcttcaccgaccggcttgccttcgccgctgccgactggtgtttccgcctgcacggctggcctttatgccgccgttgtcgggcgcctacgtcttcaccgaccggcttgccttcgccgccgccgactggtgtttccgcctgcacggctggcctttatgccgccgttgttgggcgtctacgtcttcaccgaccggcttgccttcgccgctgccaactggtgtttccgcctgcacggctggcctttatgccgccgttgttgggcgtctacgtcttcaccgaccggccgcctcgttcgccgccgactggtgtttccgcctgcacggctggcctttatgccgccgttgttgggcgtctacgtcttcaccgaccggcttgccttcgccgctgccgactggtgtttccgcctgcacggctggcctttatgccgccgttgttgggcgtctacgtcttcaccgaccggccgcctcgttcgccgccgactggtgtttccgcctgcacggctggcctttatgccgccgttgttgggcgtctacgtcttcggccccggcaaacccgaccggccggccgactggtgtttccgcctgcacggctagcctttatgccgccgttgttgggcgtctacgtcttcaccgaccggcttgccttcgccgctgccgactggtgtttccgcctgcacggctggcctattatgacgccaactgatgctatcttcttcacggctggctacatcaccgtcaccgctaataggcatcatcatcttcaacgcaagctgtctacgtctactgctgactagtgccctcacctctacgtctggtttatacagctaccactactgatggacatcatcgtctaccgtcgccgactggttatgccgccgtctactgcaatgcaactttgtcatcatggtggagcgacttcatctttattatcttcggcaccggcaaacccgtttgctgctacttcgcaagtttttctacttcatcaaccatgacgtctcggcatctcggcatgcgatgccgtgttattttactacaacaagtggctctccaatattcagtatttctacttggacatcttcaacgcatatcttcaatcaagcaatgactattcaacgacaagaagctacagtgctcgactctatgttcagttgtttcccaactaaccaaagagtcgggggctacacaaatataagactcttaaaatttgacaaattttatgtcaagctgaagaaattaattcatcaactcacaagtcaactccaggagtcattatcctcgtctttgctttagagcagagttatcaaccaatcagctcagtttcgacgagttggacaacatcatctactttcctccaagtgaagcatctgcaacagctataacaacaatttgatggattattgtcactaacatcatcaccagcacctctgcttcatcggccctaacatcagctctgttgctaatggatgactacgtcttcgccgacttattatttcactttcatggttgctattgactggatcaccgacatcgttatcttcatcaacatcctgtcaagcctcttcaacatagcccactctattgctattgatgggcaacttcgtcattatatttgatcatctatgattgctgcttatcatcattacagtcggttgcgtttgtcgtcgccgactattttcttcatcttcatgattggtggatttcgtcattgtctttgatgcatgtctacatcttcaccgtcggcttgctttcgtcaccaccgactggtatcctcgccttcatggatggcttattatgtcgccactaatgggcatcttcatcttcttcacctgctgcatcgcctgtcaccgactgattatttcgctgccatagctacacaactttatcactgagcgccttcatattcattgctggctgatctgattgctgccgactggtttcttcgcctccatggctgtgcaacttcatcacttctgattggtatcactatcttcactatcaccaatatttttgccacctctgctgggcaatattatctctgtattggtcgtcttgtctctatgccaactgcgtcagctaccatcaatgaacaattgtgactacgtgctcaggggcttactagctcaaatacaagtattatatcttcaatttggacttgctctggatacatgcaacatgaattcatgatcatgggtctattttatatgctcaaagactggactatttattattccccgtaagggttatcaactgaatacttgcgccagttgggattcaattgttacatctattttggagtatcccataagggataatcactcagatcagaagctattcatatgagctacgcttggtctatattacccggaagatttattactcgggagcatgttatatgcgtcatcctttaaagggtgtcgaaggcatattttttggcctaggcctaatatgtctgcagcccatattttcaggtgtggcctgtcacgttcttttagggacttaggcactttttgcttaggccaaagtgcgcgtgatcaagtgcccaataccttaaaatccttttataccgcagttactcgactttttaggagtcggtacaatgcatcttaaaaggtgtcaaacagtaaagctttatatagctgccccgctgacttttttatatagtcaaggtgctgtttgggtttatcaagcaattgattggatacaatatcattgctttttgccacgtaagtgtgcatttttattgaccaatattatggcttaggctgattatatattatggtcatttttcaggcggttggtaaatcctttatgagtttacttactcggatgttataccacatgtgccatatatttccaggtgtggtgaaaccatgtgtcttttagggacttaagcacatctgttaaagcagtgtgcgcatggcgtatgcccaatactttggaaatttctttattcacagcattcaagcttctttatagttgtcttgctatgtgaactttcaaagatgttgtcaactttaggttgtatgcatcatattttgccaagcagtcggtatatcacttggatcatattattcggggattcacaccgcatatgctatatattgatatcaagtcacttggttgattacaattatcaaaaccactcggttggttagattatttattccttgactatatgtttggttggttcaattaaccacatagtcgggggctgcacctattaggtgcatctattcgatgtacctgactttatttttcagccctccacagtcttcagatttggtaaaagtactcgggagaccatggcgaagatgattgaagcactcggctttggagtaatctagttcgagagaagattatattttcgactgtgaaggtctcaggggctactgtggagattatgggtaccccatatccacacggcatggttatccgactagtaataggggataacatatatgtatggaatatgtaacagatcgtgacttgggtattacgtttccttgtatattacggaacggcctaaagtcctggtttgataatattgtaaaatagatttaggaaaccgatgccgtattggttaaggtttctatcttgtaatcctgccccccaccctatataaggtgggcaggaggccctctagggggcatgagacaacctgatcgtcagatctatactacacccggtggattcaaatccccaaacaggagtagggtattacctctcattgagagggcctgaacctgtctaaatcctgtgtctccacatccatccacttttaggtctcgtgcgctaccccgttttattattgccgaattcatgtttcgacatgaaaaatgccttccaatcacgtcccatccaaacttttgcatttcatactgttcctgttttgcgttttgccaaatcctttgcataaatgtaataaatgcctattactttagttgaccgtcgatcatcgatatttaaccgttaattctctgcaatgactttctttaaatttatagcacaaagaaaagagcttcctcactaaagaataattcacaattatgcaaaaatattagggtgggccaaaatatacgaattcactaaatttttaatttcccttgaatttgaaaagaaaatgaatcgagtaaattccataaaactagaaacatactaagaaaactatcagaaagccatatttttttaaaacgttataattagtagtgaaaaaactactactccctccgtaataatatgcagctctctttatttaaaacatcatacttttatagatattgttggttaaagtagcattttaaaaaccgtgtcaaggtctaaaaatgtttatattttatgacggaggaagtacataattagttgtgaagttatcacatagaagagaaaatttgattggtagcgcagatcttatcttagtgaaaaaaaaatagcacaacaatcatgctcctccggctaaaggcatgttacaaacaaggatctgaacaccaaaagatattaaaaaaaataaaaagaagtcctcaagtcaactccttcctccttcccaaggacccaatcccgtcaccatggcgaaaagaagcagtggagagacatacatagtgaagagaatccattacatgccactgactttgtcacacgtctatgatttaccactgattttatcacattctaagatataccatcgacttttgcttaac

SEQ ID NO: 8111 - DNA, 7970 bp, Oryza sativa
  unsure (1)..(7970): unsure at all n locations
atctcttacgctccaccggctcgccttgaccgccgccgactggtgtttccgcctgcacggctggcctattatgccgccgttgttgggcgtctacgtcttcaccgaccggcttgccttcgtcgccgccgactggtgtttccgcctgcacggctggcctattatgccgccgttgttgggcgtctacgtcttcaccgaccggcttgcattcgccgccgccgactggtgtttccgcctgcacggctggcctttatgccgccgttgttgggcgtctacgtcttcaccgaccggcttgccttcgccgctgccgactggtgtttccgcctgcacggctggcctttatgccaccgttgttgggcgtctacgtcttcaccgaccggccgcctcgtccgccgccgactggtgcttccgcctgcacggttgacttattatgccgccgttgttgggcgtctacgtcttcaccgaccggccgcctcgaccgccgccgactggtgtttccgcctgcacggctggcctattatgccgccgttgttgggcgtttacgtcttcaccgccggcctgcctccgtcgccgccgattggtgcctccgcctacacggctggcctattatgccgccgctattgggcgtctacgacttcaccgccggcttgcctccgtcgccgccgagtggtgcctccgcctacacggctggcctattatgccgccgctgttgggcgtctacgacttcaccgccggcctgcctccgtcgccgccgactggtgtcttcgcctatatggttggttggtcacaccaccgttgttgggcgtctacgtcttcaccgccggcctgcctctgtcgccgctgattggtgcctccgcctacacggctggcctattatgccgccgctgttgggcgtctacgacttcaccgccggcctgcctccgtcgccgccgattggtgcctccgcctacacggctggcctattatgccgccgctgttgggcgtctacgacttcaccgccggcctgcctccgtcgtcgccgactggtgtcttcgcctatatggttggttggtcacaccaccgttgttgggcgtctacgtcttcaccgtcggcctgcctccgtcgccgccgattggtgcctccgcctacacggctggcctatgatgccgccgctgttaggcgtctacgacttcactgccggcttgcctccgtcgccgccgagtggtgcctccgcctacacggctggcctattatgccgccgctgttgggcgtctatgacttcaccgccggcctgcctccgtcgccgccgactggtgtcctcgcctatacggttggttggtcacaccaccgttcatgggcgtccacgtcttcgccgaccggctggccttcgccgccgccgactggtgtttctgcctacacggctggcctattatgccgccgttgttgggcatctacatcttcatcgccggtcgtctcatctgctgctgactagtgcccttacctctacgtctggtttatacagctaccactactgatggacatcatcgtcttccgccgccgactggtgcttttatcttcaccgccgctgactcgtgttcacttcatcacggcaacacaactttgtcatcatggtggagcgacttcatctttattatcttcggtaccagcaaactctattgctgctacttcacaagttttgctacatcaccaaccatgacgttgttgtgaatctcgacatctcggcatgcgatgccgtgttattttactacaacaagtggctctccaacattcatgatttctacttggacatcttcaacacatatcttcaatcaagcaataactattcgacgacaagatgctacagttctcgactctatgttcagttgttttccaactaatcaaagagtcgggggctacacaaatataaggctcaaaatttgacaaattttatgtcaagctgaagaaatcaattcatcaaccaacgagtcaactccaggagtcattatcttcatctttgattcggagcagacattctacttcaacaacttcaaatatttcggtttagacgagttgggcaacaacatcaactctcctccaattatttgtcttcacggttggcctactacgcaactgccgatagaggatctcatcgttatcatcggctgctacatcgctattgactggatcaccgacatcgtcatcttcatcaacatcttgtcaagcctcttcaacatagcctactctgctgccgttgatgggaaacttcgtcatcatagtcggctatctctgttgccgctaatcatcattaccgtcggatgcgtttgtcgccgccgattattttcttcatcttcatgattggtggatttcgccatcaccgttgatgcgcgtctacgtcttcatcgtcggtttgcttttgtcatcaccgactgctctttcgttgttgttgggcgcctacatcttcactgctagctgacctgactgttgccgactggtttcttcgcctccatggttatgcaacttcattacctttgattggtgtcactgtttttactaccactgacatcttccgttacttctgatgagcaatttcgtcttcatgttggtcatttcatctccatgccgactgcgtcagcaattgccaatagacaattttgactatgacagaaggacaagctatatgctcaggggctcatcaactcaagcgtgaggattatatctccaatttggacttgttccggatacattccacatggattcatagtcatgagtctattttctatgctcaaagactggaccaattattattccccgtaagggctatcaaccgaatacttgcgccagttgggattcaattattatatttattttggagtatcccataagggataatcattcagatcagaagctattcatatgagctacacttggtctatattacccggaagatttattactcgggagcatgttacatgcgtcatcctttaaagggtgtcgaatgcatattttttggcctaggcctaatatgtctgcaacccatattttcaggtatggcctgtcacgttcttttagggacttaggcactttttgcttatgccaaagtgcgcgtgatcaagtgcccaataccttaaaatccttttataccgcagttacttaactttttaggagttggtacaatgcatcttaaaaggtgtcaaacagtaaagctttatatagctgtcccgctgacttttttatatataagtcaaggtgctgtttgggtttttaagcaattgattggatacaatatcattgcttttcgccacgtaagtgtgcatttttattgaccaatattatggcttaggctaattatatattgtggtcattttctaggcggttggtaaatcctttatgagtttatttactcggattttacaccacatatgccatatatttccaggtgtggtgaaaccatgtgtcttttagggactaaagcacgtctgttaaagcagtatgcgcatggcgtatgcccaatactttggaaatttatttattcacaacatacaagcttctttatagctgttttgctatgtgaattttcaataatgtagccaactttaggttacactcatcatattttacaaagcagtcggtatatcacttggatcatattattcagggattcacaccgcatatgctacatattaatattaagtcgcttggttgactacaattatcgaaaccactcggttggttagattatttattccttgattatatgtttggtttgttcaattaaccacatagtcgggggttacacctattaggtgcatctagtcgatgcatctgactttattttttcagccctccacagtcttctgatttggaaaaagtacttgggagatcatggcgaagatgattgaagcactcggctttggagtaatctagttcgagagaagattatctttccgactgtgaaggtctcaggggctactgtggagattatgggtaccccatacccacacggcatggttatccgactagttataggggataacttatatatatgaaatatgtaacagatcatgacttgggtattacgtttccctgtatattatggaacggcctaaagtcctggtttgataagattgtaaagtagatttaggaaaccgataccgtattggttaaggtttctatcttgtaaccctgccccccaacctacataaggagggcagggagcccctctaggggcatgagacaacctgatcgtcagatcaatacacactcggcggattcaaatccccaaacaggagtagggtattacctctcattgagagggcctgaacctgtctaaatcctttgtctccacatccatccacttttaggtctcgtgcgctacccctttttattattgccgaaatcatgtttcgacaccaatgaaagccaccaagaatgcgaaaggtggttggggttgtgggattgaacacaaaaatagctttagcttaatgaagttgtttggaactttgtgcattttatcttgtgaagttatatggaactttggcttaataacttctgttctttttttttatggtaatgatttttaatctggaagaaggataaatgcattttatctttgctaatctacctaaaaaatatgggttaaaaagtgcatgtatttgttgtcgtgcgcggcgtgtcgccgcgcatacccttctagtaaactaagaatggattcgctagaattgtgtcgccatgttctccagcggattacagtccgattttcgtttggacagattgtttttagagttaattggatccatgccattgcaaatatgccaaattaagaaaatgccactactattcgtgagcactcttgagtgccactgcaattctgggaaattgaattcatgccactcctttgtgttttccatccactccctattgacgccgtctctcagcggcgcctcttcgcgttttcacgtgcatggacgcgccgccgccgccgccactccactccatcgacgacgccgacagcggaagccacctcacaggcgtcgactcggcgaccatcgtgctgtcggggcgcgcagcgaggaagccgaggcagccaaggaggaggcggcagagtgggccgcggctgcgccgccgcctccggccggcggcgtcggcgtccctagctgaggacgcgcgcgacgaggtccttgcggcagtggatgaccggcggggcgacgaggagcagccacgtcgctcccctgcagcgtcctcaaccgccgtcatggcataggggccgctccgcacgggattccagtcgacactcacacctgtgccgccaccaaaaccctaagccgctgctgccgctcgcgcctgcgttgccacctgaacccggagctccggctgaggatgcgtgcgacgtggtccttgcggcggtggcggcgacgggctgggttgcgtgacgttgtcatcctcgtcctcctcacctctggatcttcgcacacggaggcggcggctagaaggacaagctatggcgctgcacgctgcagccgctgggtgactacgtcttcggcaagcgcagtgtctgggaggacggtgtcgtcctcttcatggtctccaagccacgctgctcgccctcgccctcgccctcgcatggctgaggggcttccagctccgctcgtcacggatcggcgccgcgaacgtgcggtcggagcgagacggcgtcagcaccgagttggaggccgctgtgctcgaccagccccggtgtcggcttctctttctgtaccttcctcgttggcgccaccccgctgcccttttatagccaccgaccaccacctcaccgagcctgacggcggcggcggcttccacgcacaggaacagggaagttggcaccgtggacggggagtggatggaaaatgtgatgaagtagcatgcatccaatttcttaaaatttcagtggcatccagccgatatcccgaatagtagtggcatttttctaatttggcatatttgcagtggcatggatcgaattaacccttgtttttaagattcatgctatattgtgtgggtgcatgactgcgtggtttaaaagtgcgtttgctgcctatcagctttcaatgagtgattaaaatagggtcttttagataaaaaaaacgttaaatataattatagtacaaatctagtgtaattagagcaactccagcagggcccttaaactattttaggggctggataggaaaaaacgaggtccatcagggcctctactccagcccctagaatgggtggcggggggaggggggggctatgggctcttctctcgtccccaaacactgttcacacagggtccacgcctccaacgacctcccttctcgcagcgcctgttcacgcgtgcacggtgccgccgctcaccctcctccacctccagctgtgcttggcgccgccaccaccggccagatccatcgccgccagactcgggtactgccccgccgcctccaccgctcttcccgcgtaggtggcaacaagtgccctcgccccgctgcctgccaaccggatctgagccgccctccctctacctcatctagcgcggtggcggtagtggcttagcagctcgcactcgaggaggcagcagcggctctggcgtcctgcacggaggaggcaacagcggcttcagcatcccttgcggaggcggtggcagcccgcgggtgaggaggcgacgggggcccatgcgatgggggtggtaggggccacgcatgaggaggtggcagcagtggagaggaggaagacgaggaggaaggaggcagcggtggaggcgaggggtggagtttttattttaggaatttttttcttgaagaaaattttagagaaaaagtaggggttgttaaataggggctattgctggagtaggaggctgaatttgggtgctctgacatggtgcttgcccccaaaaggtatatgtaaggtagtgtaattatatagataagtaagactaaaattgtaaatacacaaaaaatatttgggtgtaatttagggagttaaatgtgtaattttggaacttatattgtaaacacactaaaattacatatatgtaatataggcattgtaaaaatacatggtgaggctgtgtttagttccacgccaaaattgaaagtttgaagaaattttaacgatgtgacggaaaagttggaagtttgtgtgtgtagaaaagttttatgtgatgaaaaatttgaaaatttgaaaaaaaaattggaatctaaacagggcctaactactttttcactaaaaatatagcatgatatttataggcagtcccaactaagaatccatgtgtcgatccacgagatcctatggacgtgatatttcacgatactcccacgcacgatccgcgcgaagcctttttcgtggaaaaattgcctccccctttccttcgcccgttccttcggacggcgtcctccgcagagcatatctcgccgagtcgccgaccccctcctgaccgccgcgctcccaccccgcctccaccgctgacaagctcctgctccctgcgcttcgcatcgccgccgttgcgtgctcctgctcctctccgtttttaataccgtcgcctctgctgctgctgctcaacaccatgcaatcatcgtcacatatttaaggtcctcattcttgaatcaacaccaggcagcaaacatatgatcaaaacatcagtataggttgactagtaggcatgtaatgccagcgctccatcggtcttagtggagagaaagatactttgtcccaaaataagtaaccttccaatttatcgtgctaacatcgtgaatagaagcatacaacccattcaccattcaaatgaaggagtctagtgtgacctggtaaaaaaaaaacaatgggatgtcaacatatacgttggccctatattaacccaccaattagtggattgattaactcaacaattgtatgcaaatcaccacccgtttctatctgcagtatggttaatgatgnnctgcttgcngtcgaagnagtcgtatcaacaagccgtg

SEQ ID NO: 8112 - DNA, 15559 bp, Oryza sativa
aaaactatccgaatagccgtgcccgcggttatgggcgatttgagcaatgtttttcgtgattagtctcacacctctcacaataaatatggatggggatacttgctaataatttgcttagctcctggtttggagttagatttgttcagccgggtatggttgttcaggatggttgggcctgtgcagcatgggtgtgctgttcagtgttgattaaaatttctgattaattactccactgttttatttctcttaaatgttttgctaaatgctgcttttgcaaatgagcctatattatgccatcctttggtatctttgtgcacttgcatatttgctgtgtggcttgttgagtatgtcatatgctcattcttgcaataatcatcaaacctcagttgaagataaaggatccagaaggagaagacgtttggcttataccccagctgagctgcctgtgggagtagagccggagcttcgctagattttatttttccgttgctgttttcttttcttttgtaagtattaacgatattattatgatagatttgtatattaaattgtcagtttgtgtacctcggctgattcctggacgaggattttatgcacaaataagttcggaaattactagtgaattgctgggcgtgacatcctgctaagggcatcggctacaacatttgctttccccgggtgataatggatttccatatcataatctttaatcaactctaaccatcttcgctgacgcatgttcaaatcaggttgagtgaaaatgtacttcaaacttttatgatccgtatatatctctgtacggttaccgaaaagataatgacgccaaatcttcaatgcatgcaccacagctgccaattccaggtcatgcgttgggtagttattctcatgaggacgtaattgcctagatgcataggcaaccacctttccttcttgcatcaacacacaacccaaaccgagtcgggatgcatcacaatacacttggaaacctttcctcgtatcaggcaaaattaatacaggcgcagtcactagccttttcttcagttcttggaaacttcgttcacaatcctccgtccacttatacttcacttccttctgaagcagacgagtcattggtctggcgatctttgaaaagttctcaataaacctgcggtaataccctgcaagtccaaggaaactacgaatttctgaaaccgtcttgggttgcttccaacttaatactgactccacattgcttggatctactgccactcctccagacgagatgacatgaccaagaaactttacttcggacaaccaaaattcacatttactgaacttggcataaagctgatgctcacgtagtttctctaaagctagacgaagatgctcttcatgttcttccttcgtcttggagtaaataagaatgtcatcaataaacactacgacaaacttatccaaatattccataaacaccttgttcatcagattcatgaaaaaggctggggcattagtgagtccaaacgacataacggtacattcgaacaaaccataccgagttgtgaaggcggtctttggtatatcttcctcacggattcgaagttgatgatatccagaatggagatctatcttggagaaaactgtagcaccttcgagttgatcaaacaggtcatcaattctgggtagaggatatttattcttgatagtaacctcattcaacgctcgataatccacacacattctttgagtatgatctttcttctccacaaagatgactggtgctccccacggcgaagtactgggtctgatgtatcctttctgaagcaaatcatccacctgtttcttcacctcagctaactcgttagctgccattctgtatggtctcttatggatggggttggttccaggtaccaagtctatccgaaactctatgtctctcttaggtggcatacctggcaaatcctcgggaaacacgtctgggtagtcttgcactataggaatctcttgtagagcaacttggtttaagaccacaccatgagatttaggagaggatgcaaagaaagaaactgtttccccattgctattggttaaagtcaccttacgattggcgcaatctataactcctctgtgacgagataaccaatccatccctaagataacatctaggtctttggattctagcaagataagagaggatgggaaaggaacttcttctatttctatagtaacggaaggacaatactgtgtcgaaaatacctgattgcccggggtattaactagtaaaggtctcccaagactaacaacttccatcccatgtttgcttgcaaaacttttagacaaaaaggaatgtgtagcaccggaatcaaaaagcacagttgcgggtatagagttaacaggaaacgtacccaaaacaacatctggtgcattctgagcttctgctgctgcaacatgattaacacgtgccttcggtgctggaacattggggttgttcgggactggagcgttcttcacacgccgaggcttaggacacttatcagcataatgtcctggatcaccacaattaaagcatatcactggcttgcttccctgttccttcctgacaggctggttctgaactggagttgctgcaggacaagcaaccatattgcggttgtcattgccacgattactagtattgttgttgtagaactggcgttggggacgggcaacagatgaagatcctccttgagggtacgatggagcttgaggtccagtaatgagacgcggcctttggttactgccctgttgtgccttaaattgggcagccctgcgcttcttctgctctatacggttatacttgtcttcctgacgaatcgccttgtccaccaattgttggaaatcccggaaatccgtagccatcaaagcataagacaactcatcatttagtccctctaaaaacttctcctgacgctcttcatcggtgcgaacatcctctggagcatagcgagctaaacggttaaaatcatggaggtactcagtgaccgaacgagatccctggttgagtgctctaaattctctcttctttagagctacaacacctgacggtatatgcgtcttcttaaaagcagctgtgaattcctgccaagtaataggttctcctcccgccctgccttggcgaaaatgatcccaccattcagcagcgggtccatgcaactgatgcgaagcaaaagaaactttctcctgctcagtacactggatcaaatccaacttcttctccaccgcatgcaaccaatctcctgcttctactggattggtggtgcttgaaaaggtagggggtctcacacgtaagaaatctgccagcttattttggggaggtgggggtggattctggttctgattatttgcttgctgattctgtgcctgctgcactaacaggttgatcagttgtgtctgttgagccagaatctgagctagcgtgggttctcctccattgttagtagctccacttccacttccacttccacttccggtgcgcgtgttcaccatctgacgataagcagagacaacaggaaagaatgacagagagacacccttagaacggagttatttaattaatttaaattctatattgctcttaactgtgtatgattacatttaagttgcattaacactatctcaccaactatcttacactctgacaagcaaaagaactagactcatgctgttacatcccaccaatgatgtaagcaacaactaaacccacacactcacaagcaaacttaaacaagcaatctaacacaacgaactatggcaacgttctaactaagcgtctacttccgccttgcgtcggaacgaaacgatgaatcttcttcctctggagtagctggctccctttctttatgatcttcctcttcttcctcatcacttatgatgtcgatgacaggttcagcacgattgggcatagcttcacccatcacgcgaatcttcgaagctaactggagacgaggtggcggacaggttctctttcttgcagtgaggcgaagcttggatattggcggcggcgtttctcctttaagttcagctaattccttctgtagacggtgcaccttgctcttcaacttgcaaatcttgccttgattccagttttccctgtcatgagctgctttgtctcgctccacacttactgcatccatagcactaagcatatgcaccacatgcatcagagtggcactctcttcaccatcaggacaggtataggttccatagtcttgaccatgagccttgtgaggatgatactggaaagctgatgaatccaactcttcttcaaagtgttgtcgcaactctccaatggccaccaaagctacttcttgacaagcatggcagtacgatcttcctccaacttcgaacttaaaggacggaaggtcttcactatcactagccaatgtcacacgaacacgacacttctcctcgtcggggtcatgggaaatttggcgatactcgggagcaacttcatagcctacctcaaaagccatcaacctcaactccctgacgaatcctaacacctcgatcaaatttctcggtgaatggggcggcatctaaagaaacatagaagagaagaattaatgcatatttttctaagttagctgcaccaactagacttaactgatttttgacccaaaaggaagaaaaataaaagaaaagacacatacaaagctattttataaatattttttttagaatttaactttttagacaggggcaaatatattattattttttttaacaaatatttaaaataaagctaagataattatgatctattataagcacggtacaatgtcaccataggaaagataagtagtactagtgctaacatgattaattcgataccataataaatgtacagtgccgactaatcaataaaattttgggtaaagagaaaaagaaacattttgaaaagaacaacctttttcttttaaaagaaaagaaattgaattaaataagttttgtgcataacctcgcatgtgctgccaacttaattaatttgtaagagaatagagaagagcagttctatttttttttcaaaatattttgaaggctacttaaggtttaccatttggcttatcctaaggtcaaggtggctctgataccaacttgtcacgcccggaatttctatccaaaattccaaacgcttacatgtgtgttaaaccctcgtctaggaatcaaccgaggcacacaatgacaatattgataatagagtacaaatgaataactatttaatattcgcaaataataaattattacagaggtagatagttcctctcaaagaaaaataacattctacgcagcggaaaaataaaactaaaacaatctacggaacagcgatggcgactccactccacaggcaacttaaccgagaacaagcctaatcctccagatcatcaccttcactgagatactcctcttctgatgaatgaatattgcaagaatgagcatataacatactcaacaagccacacaacaaatatgcaagtgcacaaaataacaaaggatggcacaatatagctcatttgcagaaaacagcatttaataaatatttaagagaatagtaaaacagttgtataattaatcaatattaaataaacaccatacaacatacccatgttgcataggcccaaccacatttgaacaaccaaccccggttgaacaaattaaacctccaaaccaggaattaaccattccaaaccaggaactaaattaattaccacataattaccattaatgagtagtgtgagactaatcacgaaaaacattgctcaactcacccataaccgcgggtacggctattcgaatagattaaaactctgatcagaggtgtaccactgtacccacaagacacaaccccacatcatgtcaccatgtgcctcaataccaccacggtacctcggaaaggagtcgtgacaatacccctcgcataacacaattcaccacagtgcaccgtacctggattataatcacccccttataaacaaggcatggactccccagcgacccccatggacttctcgccacttctcagtctggcgcactataatgaatcacgctatacaaaagataaagccgttgcccacgctggcttgtggttggcacgataaatgtttcacaacagtagctcgcgaaccggtccttaattgtcatgagcacaaccatcaaaaccatatgctcacaacccaccttatccaagttttaattatcaattaattatcatcacacgatttaccatcgtgagctaccattgaatataaccctaattaataataataattatgtaatataatttatatttaaccccatttagttagctaatgtttctaagcatggctaagcaaacctacatatagcatttagctgaaccaatccaatatataaggttcatgccaatcaaattataacccataggaaaataaagtcatcttcggccattaaataattgggaaaggttcaccacccgatgacattcaaaaacaatgcatagttgaaaataaaataatagctttaaacgggatcaacatgctcaaagggttgtttgggatctgtgtgacttgccttgggcttccacaaatgcttcggaaccttcctcaatggaaacgctctcctccggaatgtcggaaactaaagcaaataaacaaaatcaataaaacagtacaaaaacaagcataaacagtacatgtggatatttttaacatgtagatcttgattttagaaaaatttagaaacttgaaccacctaaaacggatctacggttatttaattatgattttccgaagttttaatctattagaaaatcgggaaaaagaaaaagaaaaggaaacgatgacgtcagccctggagatgacgtcatgctgacgtcggcacggcggccggctcgggttgaggagctcgccggcgctagagcgatcggccgggcgattggagggcatctacgcgtagagggcaacgaggcgaacccgttggtactcaccactacggcaaacggtgcacgacggcggccggcgacgaggaggaaggcggcggcggttcgggtcgacggcggcgagcgggctccggtggtcggcggcgagagaggaggggcggccgggcttcctctcaccacggcgcacctatcggcggcaacggcgagcggcggcgacggcggagacggcgcggcggcgttgccgaagacggccggcggcggcggcgaacttggagcacgtcgcggcggcgctaggaggcacgggagagctcgggaaagggggcaaacggaagagaagaacaaggagaagctttatatggcattggatcgaagagatcgagctccaaacgggaggaatcgattcgggaagaaatcgaactcggtttttagggataaaacaaaacgaattcgattcggagagaatactcaacggatttctttgtttcttgaggggaaagaaagaggagatcgagaggaacaaaacccctcaatcaattggaagaatccgggtcggatttgggcggaaacggcggcgcaagacggcggctcgggctcggtctcggcgtcggccggaggaaggagaagggcctgacatgtgggccccacatgtcagtgtcccgagagagaggggcgcgggcggcggcggcttgggccggcgtgggccgcgcgcggggagagagagaaagagagagttgggccgaaaacggtccaacggttaaagaaggggttttttaaacttttttgaataaaacaatttgtgaaatgttgtttcaattattaaaaatacttcccttgctcaaataattcccagaaaaatctagaaaatagaggagcaagcatagtatttaataaaattttatctagctcacttttatgttgaaaattttcctagaaaattagggtttagcttgtaggcttttaaaataatttctaaaaattccaattaaacaacaatttatatatttaagatttttagggtgtgacaaacctaccccccttaaacggaatctcgtcctcgagattcagaagaactagcgaatagatgaggatgagctgacttcaattcatcttctcgctcccaggtggcttcttcttctgaatgattactccactgaaccttacagaaccgtataacgcgattcctggttttcctctcgctttcttccaaaattcttactggcttctcaacataagttaaatcttcttgaagctctatacgatcaggatcggcttcctccgtaggtacacgtaaacatttcttcagctgagacacgtggaacacgtcatgtattcccgccattgacggaggcaactctaactgataagctacttcacctcttcgactcacaatcttaaaaggtcccacaaaacgcggtgccaatttccctttggtttgaaaacgatgaacacctcgtaacggcgtaacccgaaggtatacataatctccttcttcgaaagccaaatctctgcgacgattgtcagcatagctcttctgacgtgactgagcaacgcgcaacctttcttggataatcttcactttttcttctgcctgtcgcaatatgtctgtcccgaagacttgacgttcaccggtttgatcccaaaggagcggcgtacgacattttcgaccatataatgcttcatacggagccatttgcaaactagcttgataactattgttatatgagaattctgcgtacggcaaattcttatcccaacttccaccaaaatctagaacacaggctctcaacatatcttctaaaatttggtttactctttccgtctgaccatctgtttgagggtgataagcagtactgaaattcaaacgggtacccaattctaattgtaatttctgccaaaacttcgaagtaaactggctacctctatctgacactatctttttaggaacaccatgcaaacataccactctggccatatataactctgcaagcttatgtcccgtataggttgtcttgacaggtatgaaatgagcgacttttgtcaacctatcaaccactacccaaatagaatcatgtcctgccgacgttctgtgtagaccggttataaaatccattcctatttcttcccacttccactctggaatcttcaacggttgtaacagaccagctggcttccgatgttctgccttgacccgctgacatacatcacacagagccacatattctgctatctcacgtcgcatactggcccaccagaattgttgctttaagtcctgatacatcttagtgtttccagggtgaatcgaatacaaagtttcatgagcttctttcatgatggtatccttcaactccttattatctgggacgcaaattctttctcctaaccatacggttccttgctcatcttctacaaaaccgatggctttacctcttctcatgttcttctttatttcctggatatcaggatcattcacttgagcttctctaatttgatcaaacagagtaggtttagcttccaaagtagccactaaaccttggctgactattcccaagttcaactttcaaattcttggcataactcccaaggtaaacgtctaccttctgacatattacagtaacttttcctgtgtcacaccctgattttcgtcttagggtttataaattatttaataaattaataatagattttatattaaatgttctttaatttacaagtgaagttaaatgtgggaaataaaattttctaaatataaagcatggatggatttaatttttattaaattctccatggttaattatactctctggaattttctcggatttttcggagctcaattattaattttaaaaggttaaaagagaagatcttttttttaatttgctaaatctcaatataaaattgagttagataaaattttattaaatactttacttgttcctctattttctagaattttctgggaattatttgagcaagggaaatatttttaataaatgaaacatcatttcacaaattgttttttttaaaaagttccaaaagccctcccttaagttgttgggccgattttggcccaacattccttctctccctagcggccgagccggcccaaaaccggccgagtcggctcaagccgagccggtcacccctctccctcaagccaccgacaggtgggccccacctgtcgggagcttcttcaagctctagcagccggccggccgaagccatgccgtgcccgagccgccctcttctccactccaaatccgctccgatctctcccaatttcttccgattgattgaggggttttgttcctctcaatctcctctatctttcccctcaagttttggaacaaatcgttgagtatcttgttcgaatcaaactcgttttcgagtttatctccaaaaccgagttttaatcttctcggatcaattcctctcgtttggagttcgatctcttcaatccaagcctatataaagcatcccctcatcctactctttagtttgccccctttcccgtgctctcccgtgctccgtagcgccgccgccacgccgagcaagccgccgccgccgccggccatcgtccagccgtgccgccgcgcctcctcagccgtcgccgccgcttcccctcgccgccgttaggtgcgccaagccgtggggaacctcggcagcctctcccccttcgctgccgaccaccgtagctcaccgtccacgtgcaagccgagccgccgcctttgtccgcctcgtcgccggccgtcatccgtcgtcgttcgtcgcgttggtgagtaccaacgggttcgtctcgtcgtcctctttgcataggtgtgctccaaagtcccggccgaggtcccaatctccggcgagcttgccaaccctagccctagccggccggccttgctttgctgatgtcagcatgacgtcgtgatgacgtcatcggtttttctttttcccgtttttctaatagtttaaatctttggaaaatcatatctaaataaccgtagatccgtttcaggtggttcaagttgctaaatttttctaaaataaagatctatatattaaaattgtccataaattgaattaaatttatttaattctttttaaatgggctttaaatagatttaatcttgtaaaattcataataaattcatttgaagtcagattgaggccgttcaagtctcataattcatttaaaattatgatctacatgtttgtttactttttatgtactgtttatttggtttttattagtctttttcttcgttttgcgtgttagcttgtcgtttccgtcgttacgaaggttcgcgagtgcgtcggaagtgttcaagaagattaattgaagactgattattgcaaggcaagtcacacagatcctaaacacaatcctttgagcatgttgattctatatttaaattctctatttatttcaactgtgcatttattttcgaatgtcaccgggtggtgtgaacctattcctttgttatggccaatttgcattgaatatcctattccttgataccttgggtaataaattgattagcttgaaccttatgtattggtttggttcagctaaatgttatatatatatataattgcttagcaatgcttagaaacattagctcactaatgggatgaatcaaatatactacattattatttatgcttatatttaatggtagctcacgatggttaatcgtgttatgataattaattggtaattaaaacctggttaaggtgggttgtgagcatatggttttgatggttgtgctcatgacaattaaggaccggttcgcgagctactgttgtgaaacattaaccgtaccaaccacaagccagcgtgggcaacggctttatctcttgtatagcatgattcattatagtgtgccagactgtgaagtggcgagaagtccatgggggtcgctggggagtccatgcctctggttgtagagggggtgattatgatccaggaatggtgcactgtggtgagttgtgttatgcagggggtaatgtcacagcctctattcgggtactttccagtatcgcgacgcatggtagacatgatgttgaggttgtgtcttgtgggtacagtggtacacctctggccagagtaaaactattcgaatagccgtgcccgcggttatgggcgagttgagcaatgtttttcgtgattagtctcacacctctcacaataaatatggatgttaatacttgctaataatttgcttagctcctggtttggagttagatttgttcagccgggtatggttgttcaggatggttgggcctgtgcagcatgggtgtgctgttcagtgttgattaaaatttctgattaattactccactgttttatttctcttaaatgttttgctaaatgctgcttttgcaaatgagcctatattatgccatcctttggtatctttgtgcacttgcatatttgctgtgtggcttgttgagtatgtcatatgctcattcttgcaataatcatcaaacctcagttgaagataaaggatccagaaggagaagacgtttggcttataccccagctgagctgcctgtgggagtggagccggagcttcgctagattttatttttccgttgctgttttcttttcttttgtaagtattaacgatattattatgatagatttgtatattaaattgtcagtttgtgtacctcggctgattcctggacgaggattttatgcacaaataagttcggaaattactagtgaattgctgggcgtgacaagttggtatcagagccatctcgactgtaggataagccaaatggtcaaacctgaaggactatttttccgaaaaaaataatttgtgaaaatttctcctttcttccttatctagaattctttgcaaattgtttcattgtctactctcttccctctttcaacttgagtagttgttaaacttgatggagaaactcgaagacgtcgatgttgtcaacttctgcaagtcaagtggatcgaggaataagaagatgatagtcgaatcaaagtgttcagctgtcaagatagagtgaagtttggaacctagtttagaacctatgccgccaaagtgtctttgaagaatagttagtagggtagaacgctgttgtttgctttgtgtgtaggtatggttgcattcccgtcattgatgtagtccagtgatgagcgtgcaactgtactaggttgtttgtttaatcaacttgaacaatataacgaactacacacatcagatcagtggtaacctagttaaggtcttatctttagtgtaacccctctccttctatcctttctaatctgcaatagatggtgaacactcgcgccagtggaagtggaaacaataacaatgaagagaacccaactcttgctcaagtgctggctcaacagacccaattgatcaacatgttagtgcaacaaatgcagaaccagcaagggaacaacaatgtcaatcctccgccgccgcagaacaagttagctgattttcttcgtgtgaggccacctaccttctctagcactaccaacccagtagaagcaggtgattggctgcacgctgttgagaagaagttggaattgctccagtgcacggatcaggagaaagttgttttcgcttcacatcagttgcaaggatctgcttcagaatggtgggatcatttccgaatgaacagagcagaaggacaaccaatcacttgggcggagttcactgaagcattcaagaagacacacatacctgcaggtgttgttgctttgaagaagcgtgagttccgggcgcttaagcaaaaggatcgtaccgtgacggaatatcttcatgagttcaatcgtctagctcgctatgctccagaagatgtgcgtactgacgaggaaaggcaggagaagtttttggaaggcttaaaggatgagctgtcagttatgttgatctctcatgactacgaggattttcaggagttggttgataaagcaattcgactggaagacaagaagaacaggatggacaatcgtaagagaggaaggattgttttccaggaggcacaggatagtagccagaggcagcgtatcaagccactccaaattggtgaaccttcttccgctagtcaagggcagtcgcaacagttgaacatcgctggtgagatcaactcagagactaatgcaagcaataaagacaatgatgagcaagctactcagtcagtgtcagttcagcaggatcagtctcaagtgaataacagtaatggaagggagcagcgggtgtgtttcaattgttatgagccaggtcacttcgtaaaagagtgtccgaagccgaagcgtcaacagccacaaggccaagtcaacaacattgtcttcacaggagcgaatgcagtgccggttgtgtcttcaagtgttacagctcagcgaccagtttcaaagcagtagtagttttctttaaagccttagaataattatcggagttatggaataagatagactgcagtttacctatgcctttttctttctagccgttccgaatctcgggacgagattctttgtaaggggggtagacttgtcacaccctgattttcgtcttagggtttataaattatttaataaattaataatagattttatattaaatgttctttaatttacaagtgaagttaaatgtgggaaataaaattttctaaatataaagcatggatggatttaatttttattaaattctccatggttaattatactctctggaattttctcggatttttcggagctcaattattaattttaaaaggttaaaagagaagatctttttttttaatttgctaaatctcaatataaaattgagttagataaaattttattaaatactttacttgttcctctattttctagaattttctgggaattatttgagcaagggaaatatttttaataaatgaaacatcatttcacaaattgttttttttaaaaagttccaaaagccctcccttaagttgttgggccgattttggcccaacattccttctctccctagcggccgagccggcccaaaaccggccgagtcggctcaagccgagccggtcacccctctccctcaagccaccgacaggtgggccccacctgtcgggagcttcttcaagctctagcagccggccggccgaagccatgccgtgcccgagccgccctcttctccactccaaatccgctccgatctctcccaatttcttccgattgattgaggggttttgttcctctcaatctcctctatctttcccctcaagttttggaacaaatcgttgagtatcttgttcgaatcaaactcgttttcgagtttatctccaaaaccgagttttaatcttctcggatcaattcctctcgtttggagttcgatctcttcaatccaagcctatataaagcatcccctcatcctactctttagtttgccccctttcccgtgctctcccgtgctccgtagcgccgccgccacgccgagcaagccgccgccgccgccggccatcgtccagccgtgccgtcgcgcctcctcaaccgtcgccggcgctttccctcgccgccgttaggtgcgccaagccgtggggaacctcggcagcctttcccccttcgctgccgaccaccgtagctcaccgtccacgtgcaagccgagccgccggctttgtccgcctcgt

SEQ ID NO: 8113 - DNA, 25131 bp, Oryza sativa
tcatcatatttaagtatgcctgttcctgacttcctatccctgccggttcataggattacattgttgattctaaaagaaccggtagtgatgggacggtttggaaggccatttctacaatagcgtgtcaggtataatatgacataaattagtaatcccttcatcccaaaatataagcaattttagaatagtgataaatcaaatatttttaactttgactattaatagaaaaaaatcaaacatgtaaaaatgatattactagtggatttatcattaaataaactatcataatatgtaacttgtttatttaaaacatcatttttttaaaaaaaatattgttggtcaaagtatcatctcaaagacggtgttgaagtctaaaattacttattttttttttaaattgagcgaggatttgtttgctttctatttgcaactatgaaggccatgtttagttcccacgcaaaaacttttcaccctgtcaaatctaatgtttagacagatgtatggagtattaaatatagacaaaaaaaactaattacatagattgtgtgtaaattgcgagacgaatcttttaaacctaattgctctatgatttgacaatgtggtactacagtaaacatttgctaatgatggattaattaggcttaataaatttgtctcgcagtttacacgtggaatctgtaatttgttttgttattagtttacatttaatacttaaatgtgtgttcgtatatccagtataacacgccaaaacttttcacccctgaaactaaacattgccgaaattatttgcttgtatcgactgttatatggtctcggataatttaaattttgttcatgtaactcgcaggttataacccaagaccacaaaaacataattgctctcgacaatgtggaacaatcgttgtcccatttccttttggccttgaagagggttgtgccgccagggaagtgtttcagctctcgtgcctaggcaagccaaattctgtgctgcagtacaatgacttcatcggtgttcagtatataaatgtcagtgaggggcttgttggcattaaatacaactcatctttcgtggagatcttattcaatatgttttcgcaattcagattttcatctcaaggagtagtatccaacatatttggtaaagggcctaacctgtatgtggatccaacggaatcagcctcggtgcagtgggcagttgccaatctgacctgccaacaggcgcagcaaaacacttcgacatatgcttgtgtaagtaccaatagctcctgctccagggtcatcagcaccatgcaaggttatgttggctacaggtgtacttgtttgcctggttatgatggaaatccatatatcccagatgggtgtaaaggtaattatctctttgaccaacttagaattcaaccagatgggatacatatatatatatatactatatcctcttatagttttctggtgtggaattctgtcttgtacaaatatgaagtctctaattttaatgtttcaaatatttttattgaataaacatttactgaatagttatttgatcaggtattggtacactatacattgacatgctgagatatggttgcagatattgacgaatgcctacaaacaccacggatttgcaaggaactttgccacaatactgaaggaaactacagctgcaccatgtgccctgatcatacagagtatgacgttataagaatgcagtgcactccaagaagaaaccaaagtctcttgttaggtagtctcataataatcaattccacactgacaaaagggtgtatgaagatattacaaatgcgatgttatcattgtaggtattataattggccttaccattggatttggtgtgttgattcttagctcgattgtaatagctatcattagaagatggaaaagagatgtccataaaaaaatacggagaaaatatttccaaaagaaccaaggcctcctcctagaacaattgatatcatcagatgaaagtgctagtgagaagacaaagattttctccatagaagagctaaaaagggcaacaaataactttgattccacacgtatcctagggcatggaggacatggcactatctacaaaggtatcttatcaaaccaacatgtggtagccataaaaaaagccaaagtcataaaggaaggtgagatcaacgatttcatcaacgaggttgccatactttctctaataaatcacagaaatattgttaaactctttggatgttgtcttgaaactgaggtccccttattagtctatgactttatcccaaacggttcattatttgaacttcttcatcatgattcaagtagcacattcccattgtcatggggcgaccgcttaaggattgcagcagaggccgcaggagctctatgctatctacattctgcagcatctatatcgatcttccaccgtgatgtgaagtcctctaatatactgttggatgcaaattataccgctaaagtttcggatttcggcgcttcaagatctgttccagttgaccaaagccatgttgttacaaatgtacagggcacgttcggttacttggatccagaatattaccaaaccgggcagctaaatgagaagagtgatgtctacagctttggtgtggtactcttggagcttcttctaagaatgcaacctatttttacaacaatgtcagggatgaaacaaaatttgtgtacttacttcctttcggagattaagaccagaccaattatagatttggtagatcctccggttcttgacaaggcaaatgaagaagatattagacaagttgcctcccttgctgagatgtgcataaagctaaaaggtgaagaaaggcctacaatgaggcaagtagagataacactgcagcttttacgaacagaaaagatgaccccatcacatgttagtccagacagaaaccaagagatagaatcactactgactcaaggagccattgaccaagtgattcatgctttagtaaatgttgacagagctaatgtagcatctcaacgctctcaaacctcatgctatagcttggagaaagaattcttgtcatctgctagcctaccacggtagaagtgtttatcctttgtcccttgtgtttggcgttctttgtacttaaaacatttcctgtgttcatagcacaaatttacatacatgtgtaccgtttatattgtaatgtttgtatatggtagttgtactcggttcagtataaaccacatcttaatgtatggactcaagaatgtttattgcataatattaatttagaggattaagttagttatatttttagacggtgaagtggcggtgcttcagctctgtggaaaacatgctggtgctagtcttgttatattattttttacaaaaccaatctactgatattgctccagctgcttccagatcacatggcccagccggttctagtgagaaggagatgaaaatactgtaaaacaccaaatatttaaaatgccaatataactatttcctccaagcttcttctttcccttcaagcacctgtttggacgagattctagcagctacaacttctcctagaatcagaatcttcccaaatagtctagcttttgtccagattctaaaaagttgtagtcgtaaaatctaaaaaatgaactagaaaccgaaaatttgaaaacctagtttcttcagattctcagaggatagctacaaccagctttcttggaatcataaggtccttcaaataggctctcaatctctcaaatttttacctgattcctaatgcatcttagtgaaagcctccttctgctatagtgctataagcctagcacttgctctgcataggactcgttttgggtgtcagggcataacattttacagtctataagagaacagtgcagcttcagtagaaatgtcaccacctcaaaagccaaaaaagcataggaaagatgataaatctaccattttgggttttggtagcacaattattgtagctaccattgaatactttgtgacactgaagaatttctttgtggctaactggtttactttacttacaaaagtgaaccagcttttgtgtctcatacaatgaaaccaaacagatgttaggaaacaaagcaactcacacgaatacaggctacactaggcaacggggaagaaacacaaacacaggcaaacacacatgagagctttgtggcaccgaaacaacttgtgcctttttctctttttcttctcataaacacaagctagttatagatatatatactccgtatatagaaacacatgtagtcacgagctggttagcacgtgttccactaactacattctcagccagtatacccggtaactaaccactaactaaacctctaagctaatgcatattcacacaactcagtctccgatcagtgcatgcatgcaaactgaccatttcctactcctaaacttgtgctcttacctcctggctgtttattggcgcactactcactaagccacgcagcaccaacgtacacagctagctctccacgccatgcaacacacacgtatgcatctagataaacatgctgatattaaaaaaacaacagattcgtgtgcagcattacagaggtaatcaagattaatttataataacagattcgtgtccagactactggagaaaccatctttcgtcggtcgtccaaaaaccacaatagtcccggttcgaataggaaccgggactaaaaatgtttgaccaaccgggactaaagatcatttttagtcccggttcaaagaagttaccaaatctagttaggccccaattaactttagtcccggttggtataaacaaccgggactaaaaatatatctttagtcccgtttgtttatcccaacaggtaccaaaaatcctcccaaaccgcgcgcgcgccaagtccaagacttatcgatccccttcccttcctctctccctctttaatatcggcctcatctcgatccaaatccaaccgcgtatgcacttcccctctcctctccccttcctccgcttcacctctccggatcccccctctcctccccctccctaccaagtcctctcctcttgctctctgggtcggcggcggccgctgggtgggcgcgatggcgggtgggtgggagcggtggcgaccgggcgggcgcggcggcggcctcgcgctcccctccgccagatccggagcggaggggatggcggcagcggcggccggtggccggaagcgccctctccagctgtgcgcgcatgcatggaggccggccgggcatccctctgccggagatttgtcttcttttttaaaaaaaaattgtgattcattgtattgattgagatgaagaatttgtgattcgttggatggattgagatgcataatttctttttttgttgagaatatgtaattcattgcatggatatgagatgtataatctgtgatgtatttgatttgtggtatttgggatgttagtttgatttggggatatacatcccactggatttgggagaaaatcactagaaaaaaacaataaaaaaaaagaaactaatcgggactgccgctgtactctttagtcccggttattccacccgggactaaagatatccatcccggatttgtaatcccggttggaaaaccgggactaagggggttcccaaccgggactataaaaggtttatccagtagtgagtagtggcagcattacagaggtaatcaagattaatttctaacaacagattcgtgtgcagcattacagaggtaatacaatcagaatttgggccatattcaggttcatgtaattgtttttttttttttgcctgctgccttcatttcatcaaggactaagtctacgtgtctccctcatcaaatagcatccctcaactataaaactgggtataacacctccctcaacgtaaaaaaaatagatcaaagataatcccaaggtagtactaacccggttttggccacatggcatctacatgacacttctcaatgtgaaaatcgattattgcatgcggccaataactcgctggctgtttgggaagatcgtgtcccctatgtgatataatacttcccgctatttctaatctaaatctgaaatactatgcatagaacctaactgagttattgttcttagcatataataattagaatttttgcattgacaaataaacaaactttccatatataaaacagaaaacatttatatacatatatctgttagtgatatgccctagaggcaatcatagaaatgattgtatcacatactatgtttacatatttatccgacattgttccttgaaatagataactcattattggttaatgaatatgtgattctttcatgagactctttatgttgtttgttactatttctaaaggatccctgatcaaatatcatatgtggaacaaatatgattagatgatcagcacatgtattaattgatgatcgtgtctcatggatcatggtatagagataccaaattaataatgtggacacatgttagtgaacatgttgttggatagacccaacatgagacactgcaagagccatatgtgttgtgtcattagtgatctcatttagtgttggtgttgaatccttagacctgagattatcatggttcccaacatatgtagtagcttacttagggactgctaaacgctacttcgtaatagggtagttataaaagtagttttcggttatgctatgaaacatgtagtgagatatgaataatcaagatgggatttgcccgtcctatggagagatatctctgggcccctcgatgttgtagattatggaagtaaatggccatgccacaggtgattgaggagtcaatcacaagttatataatctatcaacaagttcgagtgaatgattgagctattagaggatggcacatatctagccttgagcttaatctatatcgtgaggcaaaggggttcatacaagtatacactagaggttcagccgatatgatctttatgtatgcccggtgggtcaatacgttctgctaggggccgctgttgacacgtggactgaaaaggagttttcgggttacagccgagtgtacatgaacctacagggtcgcacgattaatgggccagaataaggggattggatggagatccaatatgagtttaattcggacagggatccgaataggagtccaacgggccttggaggcccgagtgatggatcctatatattcgtgagaggtgtgaccggcggaggcattgcatcacgtgagaaactctagccgtcacttccctccccgagcaaaaccctagccgcaggcgggtgctagcacatctgcgcgtggcgttccgtccctgtatgtgtggataccggtagaggcgccactggtttgcggtgctaattggtgtgggagtacggcgaggagaacgcacgagaagaagaaggtcgagtcggtgcgatcgactacttcctctacatcgatgcgcgctacttcgcgagaattccttcgacttcttagcgcccttttccgctgcgcagcgcgtcgagtgctaacgatatatgatctaatacttgcatggttcctggtttatgtgatataaaattttgatttatgctatcgtagcctacgcgtatcccaacaatatctatacatttaaacatttctgtcccaaacattacaaattagcgattgtttcaacacaaacgaaatagtaaatttttactgcatatgttctttccccactctcttaggggcttgaatttatcttctaatgccagctgactctcattgtcgtaagattgccctagtgcgttgcagcaatcacagcggataaagtggcaaatgtcagcgcataccttcataattgttgtgttgtcgaaccggtttgctacataagagatttcaggggtctgaggaaaaaagacaataaatattacaaattgaattgcgatgaaatattctgtatagagaacaatgttaggacttacgtgattgatgtttgttgtgtacctcctgttgaccctaagcatctccaacatgtaatacccacataggttagtgctcgagggttgcttgaagcactgcgaacataataattacaccggtcattataaacaagtaatcattcaaagaatttgtgttcatggaatatgtcagtaccaccgacctatcttgacgtgtagctttgtcctttccggatcctttactgccccgtgatgtttgcggtaaaacctaagtgtgctatgctaataaaatatttgtttgagttacttaaaaattctagagggtaaatttagaattgtgaggaactccatgaaggtttccttgttttagtgtgtcgggtcgagtgctacaaccgattagtccctcgtatatactacgaataagatatagtggtcgctacaaacaagaaagatttattagagacttcatttgttattaatgatgtattactacataaataatgatgaattaagacatttatgtctttgtgcgagagcgtcccaagtatgtcgctacctcggtcatcttatccttgtgcaatttcttaatgtatgcttccttttcctccgatgtcttatccttgtgcaatctccgtctagctctcccctctcttccaggtgatctctaggccaacggccggtgaggagaggaccagcggccggtgagagaagaccaaggaggcagcatctcctgtctcccgggtgtggaataaggagggccaagacacacagatcatgcgcgcatgcgtggattacagctgcatgctccaccaccgcgccccaccatagcaccagcgcctcctctagccctcctgtggccacctgttggtattttctactatcatagataaatacgtaagaccatgaatacttctgtagcacttcaccttagagtatttcaagggtatcgaatcacaggaaacgtgtgtctatatctaacaacaaaatcctctccgagcacaacaacaaatggtaggcttcggctagagggaatgcatatggtttaattaaggaaaaagtacgaattattcccccgccccctgaactatcatggtcaaccgaattacccccataaacccaaaaattagacaacgttcaccctcaactttcaataccggacaaattatccacctcgaaccaatctagagcggttttgtcctatgtggcatacgcgtggcaatctagttatcattttatttattaaaaaaatatgggacccacctgtcgtactcctcttccccctcttcctctctctcttctctctcccctcttctctctctctctctcagaagttgccgagagcaaccggcgatgggcgcggcaggtgatgggcatggcgggggcatggcgtgcggcgagcggcgagcatggcggatctccccaccaccgtttcctgttctcccgctgcccgccaccggatctccctgccaccgactcctccactgccgccgccccccgccagatctccctgccaccgacgcggcgacgcctcttggaagccgtcgccgacaccgcttctccatcgccgacggggttcgcctccacctcagctgggccatcatcgtcgaccaccctacccaagccatcactgcccgctaccggcgtcatccacatcggtgcaccacaccctcctccaattcctgatccaccgccggcctcccttggctgagtcatcaccgcccgccgccggcgccatcctccgcatccctaggtagagggcgggcccgatccaaccggctgtgcccccgccacgcccgctgcccaccgcgcccccgccatgccagccgccggccaccgggtcgcactcacgacgggcgtctgagagagagattgtgaggaagaggggaaagtgataggtgtgagtgcatgacaggtgggccccactatttttaaaaaagaaaaatgctgactggattgccacgcgtacgccacataggacaaaaccactatggattgggtcgaggggggttattcgtctggtatagatagttcagggtttaaaatatccggttttatggttcaggggggataattcatactgttgtcatagttcagggggtacttcgtacttgttcctttaattaacaatacttaagttaaaggtaaaacactataactctatgacataccgaccgtttagggatacaaagaatggacatggctatcaccacctgctgcctccctcacttccaggaagcacacaacaaacgaaggtaaccactaacctagaccaacgtctaagttattgattactactccagcctcacacaagaactttcttcttcatctagaattctagtgctggagcacttaaatactaggcgacaaacctgcaatgatggaaatatatctcactaatatagtaaattaaataccaaaaggaaacctcaaacacttactttattaaaagaagcattcgccgaggtacaaacgagaagagagcgccgacaattcaggcactcctccggaacttctcctcactctctacctaatttcaacactactaaagtgagttctactccactttgttgtgtttttgcgattgaatgagttcctccttttatagcctctaataaaggttggaatgacggttgtggaggtcagtgcacccacaaccgccatcaccatcaaatgtgcagctgccacgtgcaagggggtggccagggtgccatgtttggttcagccgaaccaggccgccaccttcagccatcgaccttcttcaaggaggttggcatgtggggccttatggcgatgcactgtggataagaccctttctggtcgattttgactatcatgtgggccctccaatccatgtgctcgcgtatgattggctggaggtatatttcgttgcatggaggatgtaaattctttgaaaatcacctacatgcatatatttaccaatacaagtggaaacaattagtaataaacccctaccattgagtttaatattaaatttaacaaccattaacaatacccccacaattatcctttacactcgctgagtgaagctcatggatttcaacagtgcaaggacttcctgtataatggtacaaacgtacaatgtattccagaccatacctggacccgtgaactttgaagtgtctaccatatcatcttgggtgcaatggctttgactcaagttgcattcttcccttgttgtcaagaaaatagtgagaatgaggcgatgttctgaagagtgtcggaattgtcggtgttctctgctcgcttgtacctcgacgaatgcttctttaataaagtaactgttcgagaattccttttggtattaatttagtagattaagtgagatatactcccatcgtagcgggttcgtcgcttagaaattatattaactgctctagtactaggactctggatgaagaagaaagttcctgcacgaggctacagtagtaatcaataacttaggcgtggtgtctaggttagcgatacatttgtttgttgtgtgctccacggaaagtgtggtggcggtaggtggtgacagccccgtccgtcctttgtatctctccatgtttgggtacatcataatgctacaaaccagactctgcttggcagactaggggagagccggtgcccaaagcaatcgatagggttttatctttatctttggtatagttaattaatccaaaggaaacctctctttcctaagcctaccattaggtattgtttttggatagaatttagttcctagatatacacacatgttcccgcagattcgatacccttggaatactctaaggtgaaggtatatagcggtattcatgcatttacaaatttatctatcaccgtaacaaataccaacaagcatttcttgtggcgttgccaaggaatggttgttgtatcatcttcaaacttggttcatcctctattttttcatttattttattcctctcttattaccaaccatagagcatcaatctattcaaaacttttctgctccaaagcgcgagtcctgtgaaccacctctttcttcaaaagcaattcattcatctagctatgaactccacctaactttgtagccatggttcggcaacaatccttctcgggtgttgatggttgttaagtaccaattccgatcgccaactagcacaatgagtaaagggaaaattagcatttcgtacatgtataccaataataaataatgtagatgtattaggattggtgaattaaattggttgcagaaattatacacaaaagtggaggagaaatgatgccggcatgcaaagaaacacacttgaggggcccacgagtcagctcaaaccgactcaaattgcggccaaccacttgttatccaccgaccaaagtcggtggagtaaggcggttactctagtgcgaactaggcctggcgtcgctcatctccctcctccacatggacgctccagatgatctcctattgacgattactatataataggtcggtggcctacaaaccaccttaatcaaccgtcactgaagcgtatttaaggagtggagattctcacttcacaacacacacctcaaggagcaattccctcttccactttgtaatctctatagtttctagtagtaataaagtttaggagcttctatcctgtagacttcctggagttctgggtacgtttctagtactttcctcattttataagactatggctgaattaatagaattatcttctttatttatttatgctcatggtttatatatttatttattgagtatgtgttctaagagtagtgtatgctttgtatatctgcttcatcctaggctagtcgatcaatgttacggtaatggtccaatgacctttataggttgctctagcttcaacttgttcatcggtaaggtgaaagtcctgaggagttagtgatattatttactggcataagcatggtttttaggctatataaatgccgttggatgcgagtctgccccacggaaaagtgaggtaggcagcaagtttgacagccatgtccgtcctttgtattcctcctcgttcgggtatgacataagagtgcgtaaatgccataaccacgctggcagaccagcagggagtggtctctcggtagtacctgggtgcatggaactatgtcctatgttgtaactgttgacggtcgttatcgatcagttttgaccgtcaatactaccaaaataggagagaactagtgatgcttgcaatgcataaatatgttagagtaataattttccactagtattaggtttactaaccttttgcagagaatgacaataaagtggaggagaatcgacatcaacttagatgataaatcaataggacgatgtcgagaaccagacttatgaatagatgggccaagaactcagaactaacacgatgaattgggccaaaattcacaagtatgcggactggagcaatagaggaggccaccagccgaaattgggctggattgggccagccccaggatcggccgaggccgaaccaatcttggcgccgttggatctaggttttggagtggacgtccaggattgcatcccaataacgattggagggcactccggagaattccccttccacaaccgtcataactacctttatataaggagctcactctcttcacttcacacacacctcaagcaatagctctctcttacgtcaaaaaaatcaatagccctctcatttctctcaagtttagtttagtagtatttagctggtggaataggaatagagtagaaatcagaatccggaagccttcggaagagttcgagtatggctctagcagcttttctcttctcttttgtaagctttgtacttttattagaatactcttataaatacatttatggtattgaaatactttccaagtatatgagtacctactttacgttatgttcttgttatattgtatgtacggctagcttatttaggagatgctttggtgcgggtataatgtttgcttgtgcaattactctatgtcatgacgatgatattagagtagtatctggtagtttaggcgtggtgtcttagattacgggatatcattatttggggttatatattgcggatgagtggttggccgctgatggtgacaactcagtacggttattcctccgggcctatatataatcctaagttaattccctggggagggtattcctccgtatttagccccggttgtatggtcatgacgggctgtcgtaaggaactcggcagtcaggggtggtttctcgacttactaggagggcatcggaaagagggtattagctagtatatcagttaaataggatgtatgtatactatgtatattagaagtataggaatagattatctttctcttttctttccacctagcctagataatatatatattgagaatgagtagttaatgcttgtatgccactctacccttggattatcttaacccctgcttagaatataattatcacaagcaatgcataaattattagtccagttctctctacatgatcttcccacgagataaaatatgatcttcccacgagataaaataaatacgatacccttggaatactctcgggtgaaatgctacgatggtatatccgtgcgctcgcggatgaactctataaccataatataccagaagtatttctgcgccattgctgggaattatatttctagtaatgtcgttaagaaaatagtaaccatggataagttaagtgtatactagacatgattactataaaagtacatatgaatcatagttacctaaagaaaactccgtactagatatttttatagacgtgaatcccttgtgtgtgtccactaccatatcattatttatcctaacctctgtttagactatggtgaattaattatacattgattaagagatataaaagaaagaacatatctttatactgtcgccttcccagcgaaaatataaatacgatactcctgggaatactcttgcgaatttatctgtgattgtaagaaataccaatatcgggcgcgaaagaaaaaatccctaccatcatccgcatgatcctgagcaattatattcatgcctaacaatagcgggcatgacacaagaaaccttaaagtggaaatcgtttcccttctttcttacagagggggcaaaaaagtggtacacccataccttaaaatattacatggcgaatgagaggaattaaaaagcaggttctgccttggtgtcttcccactaacgcgtgtagtctctctacgtatggaggttctctgcttccgacaaaatgagaaggaatccatcggtgtagcctaggctcggtttttcttcttaactcaagatggctagacttgtctctgcccgatcatgtgttgttacaacatttttggttgggtttaggcaagccatgtatctcgttacatccaccggaagttcgttcgcacacaaaacaacatcaaaaggaaggaaactcttatatcgtatcctggagaacacctctttcgtttgttgcgacaatatccaggaaatcaaggatacaaatgaggagccatcaaccgtcaaatcggaacatacatcctccacatttcaaccgttgaatcctcacccaaaccatggaaacaggacaaagaagaaattcagccttcaaaattacctttcctgtttgtgggtaactttttttttgaagattatggaaatacctcaaactattcttgccaaaagagaccaccagtctcgtgcagttctcctgtaccactcgagaaaattttcctcaaagatatggtgtaggaattaactaccgtcatgagtgatgagtggttaagggaggtggaactttcctctcaagcaattcagatttttgttcccgtccttaactattccttgcctcatgagagaggtcatggcgcaaaccctttataatcccactattggttcaaacattatgtccataacctttgcattaaatttcttaggggatgaaccattagcaccaatggataaaaccttccgagcccatctattcctatcatcaaaggtcatgttactcttcgttgtgccaataagacaaaaagatgtcaaggctatcctggattttcatgcattcaaattctccaaattctatattctcatagaccatcccatagaaaaacttcttacagatgtgccgcaaaccggtgtcatcaacatcaaactcgggataaatgtgtttccatcccgatcttatgatcgtgaaactctttgacagaacctataccccgatttcgagccaatcgaggaagtgttggctgtagattgtggttaagtatcgatttcgactgtcaactatgttaataaataaggggagaactagcatttcttatacgtatatcatttataaataatgtagttccacctgtattgcagaaatactacggatgcaggaattatacactatattaaatgagaaatgagctagcatgcaaagaaacacatgtccggcgaatcatgtgcgagcacacggattaatggtcccacaagtcagaccaaaccgacttaaagtgggaccaaactctcgtgcactgaccaaggggctcacctgtcatccactgaaggcggtttcccttgttcggccaaacttggagtggcacccctcggccccccatcctccacgtgtcaactccataactactcttaatgacggttaggggggtgcactgacctccctaaccatcaagtatcaaagtatgaagaatggacagaggacagtgctctgacatgtaatttttgtgatgtctattatattctttggaattctgtttacatgcaattttttctgtccctttttttatatttagagaggttttttttcaactacaatttgtagttgcagacatgcagctatgctagttgcacttccggatgttgtagttgacgttataaattttatgcaagttcagtgataaatttgtgcaactaatgttttttcatccactctctcccatctgctttttttttatcgatttatcactttcttgtttctcttctccccgtgggatgaatctggtgcttttttcccactagcttcatgtgaatggcaaaagtaaccccaattcgcatgcgtacccaggaaattagtttattgtgtcggcccacaccaaaacatgggccatgaaacaaaacataaccagaaacctatgagataagtttattttgccttcctcatgtcttgatccctcaaccacaaaacgtatattgcctgccccaagtgtaaaactagtgaaaaatgactcccctggtggtttttgacagtggtttcactgatgaggcagccttgtcatctgaaaaaatttaaaaaaatatgtcaaggcccacatataagtggcacttctcttcttccccctccaccactcacctctctcctctcccatctctctccccgcacaaagcacgacctctaccaagggacgtgcaaccaggggaggcaccaaaagcgcaagaggggcgtggaccgcagaaggatgcaggcacggaccgcaggggagaggctcgccggctgcggcgcacgtgtaggtgagggttcgcctaccacggtgtgcacggggggaggagctcgctggccacagcacgcgcgggggaggggctcatgagctaggacagcatggtgcctcctctatggtcagctccgccgacggcgatggctacagctgcttggcggcggcgttgccgacaaccttgccggtgtctggctgcttgagctcgccatgggaggagacctccgaggaatcctccttgagcttcttctccttcctcttggtgattagcttcttcagtcacctcttcttcttcctcttggtgggatgggtcatcaaatcgccgttgcagccgacgatgagatggctcctctcatcgctgtcggtccaaagggaggagatggagacctcgctccccttgtcgagatttgcagagctcaacctggtcattaccaacgccacctcccggatcgacgagaaaacgcgacagccacacaaatccagtagctcagcggtggtctccgccatgggagggcatggttggggccggcaacaggaggagtaggacctagcaggcagcagtgtcttgacatcgatggcagcgataggagccatggtgggagacagcggcacatggggttgttgaggaaaggggaaggggcggtgtcaccacagaacccgcgagcagccggccgacgatctcctccccacacacgtcacagctggctaatgaggtcctctttccacacgtggttgtctcactgcccgacgaggcatcgccgcctagttcctcttccgacaaaggtgccgacaacggccttccgcactcggagccatcaaatgtcacgcccagaaatttaacccaaatttccagactattttgcgtattaaatccctgtccaggaccagccagggtacacaaaacgacaagtaatatacagttccaaacgtaaataaagcgtaaaatacttacggaagaggcacttagtcctcacaccgaaacagaacgacagcagcggaaaaaggcgatcctagcggggcttcagctccactccataggcaaaactcaactggggtctgagccttggtcctctaactccatcttcagctcagaagcactacacttctgaaagggggaataatagcaagactgagtacaaccaccgtactcagcaagccacaccaacgatgcagatgtgcaaggggatacaaggatggtttgtggctatttgcataaaggcggttgtaaaacattttattgagcaaacagtaaaactgttgagtaattaaagtaacattaaatctccactaatcaacgctacaccacgttgaacaggcccaaccaacccacctgaactacagtgtattgggtcgatttattaattgtgagactaatcacggtgaatctggtcgaccgcccataaccgcgggcacggctattcgaatagttttactctgatcagaggtgtacaactgtacccacaagacacagccccacgacacgtttccgtgcgccgacatgccaccacgacataccggaaagaggccgtgacaggacccttcgcataaccccctctagccaagcacaccacacctcaggtttcacccccgtccccagcaggcaacgggcagtcccctctcgtgccaaggtgaatccggaagcgacagaggccgtcgcagggcccgccccgctccatcacgcccacccttgcctggatgcgtcgactagaggaaagctacactacaagcccagccgttgcccacgctggcttgtggtaagtacgataagttcttctagggcatcccgcgaaccggtccttaattgccatgggtgtgactagcaaaaccatgcacccacagcccaccattcagtcgcattttagttggataattacgaccatgaagcatggccagatgtctcgagcacacagctcaacaagatactagaatgtctaatactgcaattatcccatcgactgagctagtggtaattaagcatggctaagcatatagttctagctaggtcatcaaagtaacaccagctaggcgatttattacccatggttgacaaaggacagatgtcaagtaaacatggcacaagcgagcagataggtaaaaccctgaccccatgtaattagcaaaacatgcatatttatttgcaaacagtaaaacatttgtaaattgggatcaacatgctcaaggggaatgtgtgacttgccttgcttcttcacttggatcttctgaactcttatccttgcgaacgcgatcttccgaaacgacgggaactacacgctggcacgcaaaacgaggaaaaactctaataaaaaccaagaaaacagtacataaaaactaaacaaacatgtagagctcaattttagatgaattttgcaagttgaatggctcaattcggagttcgaatgaattaggtatgaattttagaagttttaagccatttaaatgaatttctagaattaaactcgatttattgcgcaattattatttatttttacaaaggaaaaaggctatgctgacgtcagcaaggggtgaggcgcggaccgcgtcacaaaggggcgggccccacatgtcagcggcaaagcccaccgtggaccgagtccacggcggcagccggccacgtgggcgcgcacccgacgctccggatcggccggggccgatcggacggccgggggcagccgagcggcacgaccaggcaggcacgcccacaggcggcggcgaccgccgagcctagaccaccggcgacgacgccggcggcgagcggcgacggcgcgagagccggcgagagagtggagagggaggcggttctcaccgagcgaatggggcggcgagacgaagacgaggaggtggccggcggcacggattaggcggtggcgggctcaccggggatcgaaaggaatggagcaccggtgggtttccggtggtttggagcggcgaccgatctgtggcttgaagcggccgagccggtgaaggaaacggcacggcttggcggtggccagggcgacggcagaggtgcgactggaggcacaaaagtggttgtggctcgggttcaccgtggagcgggcagctcgggggtggaatggaggagcggcgtggtggccgggcttgccggcggagcagcgaagctagtggtggtggcggcgcggcttgaggtggacgggaacggcggcaagaggctgccgaaggcggcgaaacggcggcggtgctcgggtgagcgatggaatcggtgtattgattgtggtttggggaaacggagttgcggacggtgtgcgacaatgcgtggcgaggccggtggcgcaagcggcgtggcgcggggacggctacggcggctgaggtggccggccggagatggcaaccggcggcggcggagggaggttggtggtggcggagtggtttcgggcatggggaagcttgggaaagagggggaaacggaggaggggagcccgggggtcgtttttatagcctcgagagtcgacgggggggccggttggcgacggatttgaagggggaaaggggcgccggcgacgtgggtgagtgggggcagtttggcgccggttttggaggggagaagtgggggaaatggtggaggaaggggatgacgtggggtggaccacgcccacacgcgcgcgggaatcggaagacgcgcggggaggggcggcgacgtgggcggctcgggcggccatggcagttgccggcccgggctggaggttggggatgacaggtggggcccacgggtcccacctgtcggcctgagtgagaggggaggccgggagggaggaaaagcggacttgcaccaaaaggggaggcaagccgggccgcgggaggggaaggagagaggattttgggccgagcccgaaagggaggaaggggaagtttattttgttttctttttatttaaattagtttaatgaacttggtgactttaaaattatttcttgaactccgaaaattcacggaaaaatccggagagtattttagggcacaaagaatattgcgaaatattcccggccaatgatttttaagggaaaattttaattctcccattatttcacttgattaaattgatttaacttttatttaatttctagaaaatacattatttaatgatttttaaacccgaacgaaaatcggggcgttacaaatctaccccccttacaggaatctcgtcccgagattctgggatggctagaaagaaagctggtgctggcaggcggtctgactgatctgcttacacatgctgcctctttctgattcaactgaccgattgctcgatgaaccaaacctgcataagcttgctattctgttgcttcccataaactgacggaccgactctgattagtctgaccttgaccagaactgctggtgctcatagaacttctatttttttttttggactgaattgctaatgctggcaattagataaactgaggattcactttgctgaccggggatcggtgtagtttttccgaaaccttgaaactgacttccgtaacccacagacaatgactttgctcgacttgctcttgattcaaaccacaagtattttcaggaaactggcttggtctgtcctagtctggattgcggctgttcctgatgctacttctttaagccaaacggttgacctggcctcaccggcgtaccttcgaatttaattagacaacttgggatcagtgttactctgctgacgccttgcagctggctctttcaagtactaaccaacttgctgcactgggttgaatctttaagggaaacggcaacaaggtgaaccaaaactcatctctgcgacctaccccctcttacagagagtagtcatactttcgcgtgaccgggaataattgaactattgtccttgaagaaaaatcgacacttctcgaatttacgaatggccctgactttgaaaatagaaaacttcaacgatcaatcaaaataaagcaatgacgatgcactttcatccaggacaagacttggaacttaacccttagttgctgataggaaattccacataaggaaattctcatttagcatatgatctttctaactcttgactacttccccatcagttctacggctggcataactagcatgcttctggactcgactccatatacttctgacccatgtattggaacaatttctctttcaacttctgggaaacctcatgagaattttttttttctggaacttatagcggttgccttgaactatggaaaccattcttgtttcataatcacaccactagggtgtaattgccgcttaccatcctgtaacagcttccaaggttagagagttcccaagagtctctatatgatgtcaccttcaaatattccatccctcttttcatttgagtaccactgatgttgcctttagagagatctcatcatgtcgagtgttgagggtctaaccattttcactccgttggttaatcctttctttactggctcgcaaacaggttttggagcacaacaaaagtgcgatgagttagaagggaaactcttggtttcttgtaacttgcagatacacaagttaacttgcttttgcatactcaaaggtgaaaaggaaagaaccgcttgactcctactctattcaatattccttttccaactatatcactagattggaacttctatgcgcgaggacggtatttgaacaccaaaggcctgtgcacaattgttgactcttgcttaccgaactgctaatcagtagcacatttacccattgtgattctgacatggttgacttgtccttttgttggttacgagctgaagctcccataagaacaaaactttgactgatgacgttcctaagacaaccatcaatcctcttggtagctgaaaggaacgagaccttctcactgttggtgcaactcttctattaatttcttgccagaccactgagctggagcagcatgaggtgcatggctgatgttgataaccacattgaagtctgatgcttgagacattgactgcagtcgctgttgaagaattgagctgtctctctgtagttaaagtagatcactgattccctgacattgattgccctactaatgctgattctgtagccttgaagcagttgctagcgaaacaatagaatctttatcggtgcccttgaaacccataccttctgtaggtatcacttgttgctcctaggattagtggcggcttggctgtgctggtctgctaagggcttggtggtctactgtttagggttgcgggtgcttgctcttggaaaacaaactggctttagctctgatcctgattccggcttgcatctgagcttgtacctgttgttggagacactgtcgttgcatttgctgcatcggactctgtggttgctgcatcaacatctgacacatccatcatctgaccttggctaaccataatctgaccagagcgaggtgctctgactcagctggtagcttgttgtctcggactgatccactgattctgacctcaacacactgcggctggagttactttcgctacatttgaccttgcatcaagctttgcatctcctgcatcaatacacccatcatctggtcttggacaccaaaagttaatcatgagcgggggttcttctggcattgggataccttgcagctttcaactgaaccatcgatctgtgactttaatacaccgtcgttgctcttctctctaacactgaccatcttctgcagggcggaagagaggtggaagagaggggttgctaaagataagaccttaaaccacttgactaatggtctgttgtgagtagatttttattgattcaagttgcttaagcaaacaacctagtatggtcgcatccccaccaatgacgcaaaccatacccctacacacaagcaaacaacacacgatctagaagctaacgaaactactcttctgggacagattgggtttaggtcatctctggggaaacttcacttgacctttgcggaacgacggctctggactgatcttcttggtccttgctgcatgaagctcgaggctcgacttgacttccgaacaggcatgacgctggcggtttgtcctccaggtttgacaactaaaagaattggagggacagggaagagaactttaaaagctgtttcgcaaagaaatgccgaagggcgagaggagacattttgcaaatagggttttcagaaagcttgtccttaggttttgaccgtttggctcaacctacagtcaagttggctctgataccactttgtcacgcccagaaatttaacccaaatttccagactattttgcgtattaaatccctgtccaggaccagtcagggtacacaaaacgacaagtaatatacagttccaaacgtaaataaagcgtaaaatacttacggaagaggcacttagtcctcacaccgaaacagaacgacagcagcggaaaaactcgatcctagcggggcttcagctccactccacaggcaaaactcaactggggtctgagccttggtcctctaactccatcttcagctcagaagcactacacttctgaaagggggaataatagcaagactgagtacaaccaccatactcagcaagccacaccaacgatgcagatgtgcaaggggatacaaggatggtttgtggctatttgcataaaggcggttgtaaaacattttattgagcaaacagtaaaactgttgagtaattaaaagtacattaaatcttcactaatcaacgctacaccacgttgaacaggccccagcaaccaactgaactacagtgtaattgggtcgaattatttattgtgagactaatca

SEQ ID NO: 8114 - DNA, 37818 bp, Oryza sativa
gcatccctaccctccacttctacactcgctcgctgtccaaagagatgcggcaaattgagcttcgattatccctttggcataggacaaggttgtttccgccatgtcgatttcagtctcacatgcgacatggccactcagcctcctaaactcttcctgaacaatggatcgacagaggttcttggtgatattggggtagatggtctgaatatctattttatccacttcaacttaattccgatcacctccacccatgtcatccctataaattccggtggtgatgtctacaacttttcatggaaaaatccaggggattcttttacctttgcacgacagggcatgacatttgttgtcaccagctgtgacttggatgtatacatggtagatcaagaaaaaagcacacctattttgcttggcactatcgcttgtcccagcaaagagattgctgagatggtatacagacaggattctgaaggccctggttggtacactatagattcactaccagctcggacagttcagttacagtttgttcgtcacaagaccggtaatacccaaaagtactttaatctaaccatgttgtgggatagaatcaacattactgtgaaggccaaccttgcttggaatattgtggaccaaacaagatgcttgaataacatggaggatgacaggaagaaccatgcttgtatcagcaatcacagttcatgtgtctcctcgcagtatattgatgttggctatgcatgccggtgcaatgatggctacgttggaaatccctatattatggatggctgcaaactcgatgacggtaatttcttcatcatagcttttttttttttaatgttgtatcatatagtacctgcaaaagtccaaaatcagtgcctttatactcaaaactaagttacgcaaaaatagttttagtatatcatttttatacaaccctacggatataacacttcttctacatgctaactcacttgacttcttgataactcaatgctataaacctatatatttagcactaaataaaaattatcaagaaaaaaaatacaaatttagatttagcacaaaattgtttcatgcacaaagcaacaggtttattctataatatcacaaagctaagagggtcaactactaagagaggtatctgccccatgattaattaaggctctatttggtagtacaacttaaactccaagagagaattggatatcattagcttcaagaaatctagcttggagcttgagttatggctggattagagtttttaggttgagatgacttgttcacatttgagactagttttaaagatcaaactgctttactttaggttacaaacaagattttctccaacaacgtcttgttgttggaggcatagcaaataaaacatgccactatggttgaagttggagaaaaaaactatgaatattttgatatataaatatatatatatatataaatatatatatatataaatatatatatatatatatatatgcttggtacaatctcaagaattatggtattagtacagttaacagaaccacatctagtttatagctactctctccattttatattataagccgtttgactttttcttagtcaaaattatttaggtttgaccacgtttatagaaaaaattagcaacatctactacactaaattagtttcattaaattgaacattgaatatattttgataatatgtttgttttgtataaaaaatattagtatatctttgtataaacttggtcaaattttaagaagtttgactaagaaaaaagtctaatgactgagtagttgtttcttttatgtgggatatgtttctgcaaattttttctttcaaattttatactacatagcagatttttatggggtagaggtattacccacttgcatccctactagtgggctattttaagtggaatgatcgtagcagttggctgatggattccatatgtaaggcccggtttatatggcaaaatttttttgttttggggtgtcacattggatatacggacacatatttgaagtattaaacgttttctaataacaaaacaaattatatattccgccacaaaactgcgagacgaatttattaagtctaattaatccgtcattaacaaatatttactgtagcaccacattgtcaaacatggcgcaattaggcttaaaaatccgtctcacagtttacatgcaaactgtgtaattgtttttttatatttaatactccatacatgcgtccaaacatttgatgtgatgggtgaaaagttttttgttttaggaagtaaacaggcccaaagaattgctaaacttgttaaaagtgtagtcaaatgatactctagtgccacagttgttacataaatttgttaaatgtggattccatatttataagaatagctaaattgggtttcattaaacttactatttttccactatctcccggatcgaagtcttaccatttgatgcatttttcttcaatttagcttagccggtgttttacttgcaaaaaaatatattttgtgggcagtgatactagtgtccgcactacaggagaactcatcttttatccaatgccgcaaactacaattacaccggatgtagtaagaactgttactaaaatcactttattaccagttctaaaagcccaagtcctcaaaaatatctttagtttgctaaagatacatttttagtaccggctggtattacgaaccgggactaaagatatttttttttaaacatgcctctagggttagtttaaaaagaatgtatctctatccaagtcaaatttgtatagtaggtggaatggtaatacttatgagggttgaggttagagattttgagttcaaatcccatatcttcacatattttttgattttaccggaactaaaaattaagaactttagtcacgatttctttgtctcagttgctacaatcgaaattaataggggctgagaagtggtaccaaatatcatctctcctagtgccagatacaacatatgggattcgaacccaaaacctctctccacgtatacatttcttactttgtttcatacagggcacttgtgtaaaaagcatctgatattcttttgactctttaatttggtccaaaatttttaatgcatatttgacactatggatgatttcaaatgaaaaagttatcgactgtaaattaggtcatagatttcgtcaagctctacagcgtactttattatattatatgtgcacgtctagtagatattctccaaattgacttgagcatatctaatgcatactcaggtatataaacaatctcaaatattaaagttgacaagtacgtacaaagtttgttgatacaatattgataataaaatgtgttttgatccagcttcatgtctagttaataatcttttaaaacaagaaccattatttaagtatgcctgttcctgacttcctatccctgccggttcataggattacattgttgattctaaaagaaccggtagtgatgggacggtttggaaggccatttctacaatagcgtgtcaggtataatatgacataaattagtaatcccttcatcccaaaatataagcaattttagaatagtgataaatcaaatatttttaactttgactattaatagaaaaaaatcaaacatgtaaaaatgatattactagtggatttatcattaaataaaccttcctacttggtacctggttaattaaaaacatcttgtttttaagaaagacttgatgggccaagtttccttttaaagacggtgtatgaacctaaaattactatatgttttttaaattgagcgaagattcgcttgctatctatttgcatctatgaaggccatgtttagttcccacgcaaaaacttttcaccctgtcaaatctaatgtttagacagatgtatggagtattaaatatagacaaaaaaaactaattacatagattgtgtgtaaattgcgagacgaatcttttaaacctaattgctctatgatttgacaatgtggtactacagtaaacatttgctaatgatggattaattaggcttaataaatttgtctcgcagtttacacgtggaatctgtaatttgttttgttattagtttacatttaatacttaaatgtgtgttcgtatatccagtataacacgccaaaacttttcacccctgaaactaaacattgccgaaattatttgcttgtatcgactgttatatggtctcggataatttaaattttgttcatgtaactcgcaggttataacccaagaccacaaaaacataattgctctcgacaatgtggaacaatcgttgtcccatttccttttggccttgaagagggttgtgccgccagggaagtgtttcagctctcgtgcctaggcaagccaaattctgtgctgcagtacaatgacttcatcggtgttcagtatataaatgtcagtgaggggcttgttggcattaaatacaactcatctttcgtggagatcttattcaatatgttttcgcaattcagattttcatctcaaggagtagtatccaacatatttggtaaagggcctaacctgtatgtggatccaacggaatcagcctcggtgcagtgggcagttgccaatctgacctgccaacaggcgcagcaaaacacttcgacatatgcttgtgtaagtaccaatagctcctgctccagggtcatcagcaccatgcaaggttatgttggctacaggtgtacttgtttgcctggttatgatggaaatccatatatcccagatgggtgtaaaggtaattatctctttgaccaacttagaattcaaccagatgggatacatatatatatatatactatatcctcttatagttttctggtgtggaattctgtcttgtacaaatatgaagtctctaattttaatgtttcaaatatttttattgaataaacatttactgaatagttatttgatcagttattgttacactatacattgacatgctgagatatggttgcagatattgacgaatgcctacaaacaccacggattgcaaggaactttgccacaatactgaaggaaactacagctgcaccatgtgccctgatcatacagagtatgacgttataagaatgcagtgcactccaagaagaaaccaaagtctcttgttaggtagtctcataataatcaattccacactgacaaaagggtgtatgaagatattacaaatgcgatgttatcattgtaggtattataattggccttaccattggatttggtgtgttgattcttagctcgattgtaatagctatcattagaagatggaaaagagatgtccataaaaaaatacggagaaaatatttccaaaagaaccaaggcctcctcctagaacaattgatatcatcagatgaaagtgctagtgagaagacaaagattttctccatagaagagctaaaaagggcaacaaataactttgattccacacgtatcctagggcatggaggacatggcactatctacaaaggtatcttatcaaaccaacatgtggtagccataaaaaaagccaaagtcataaaggaaggtgagatcaacgatttcatcaacgaggttgccatactttctctaataaatcacagaaatattgttaaactctttggatgttgtcttgaaactgaggtccccttattagtctatgactttatcccaaacggttcattatttgaacttcttcatcatgattcaagtagcacattcccattgtcatggggcgaccgcttaaggattgcagcagaggccgcaggagctctatgctatctacattctgcagcatctatatcgatcttccaccgtgatgtgaagtcctctaatatactgttggatgcaaattataccgctaaagtttcggatttcggcgcttcaagatctgttccagttgaccaaagccatgttgttacaaatgtacagggcacgttcggttacttggatccagaatattaccaaaccgggcagctaaatgagaagagtgatgtctacagctttggtgtggtactcttggagcttcttctaagaatgcaacctatttttacaacaatgtcagggatgaaacaaaatttgtgtacttacttcctttcggagattaagaccagaccaattatagatttggtagatcctccggttcttgacaaggcaaatgaagaagatattagacaagttgcctcccttgctgagatgtgcataaagctaaaaggtgaagaaaggcctacaatgaggcaagtagagataacactgcagcttttacgaacagaaaagatgaccccatcacatgttagtccagacagaaaccaagagatagaatcactactgactcaaggagccattgaccaagtgattcatgctttagtaaatgttgacagagctaatgtagcatctcaacgctctcaaacctcatgctatagcttggagaaagaattcttgtcatctgctagcctaccacggtagaagtgtttatcctttgtcccttgtgtttggcgttctttgtacttaaaacatttcctgtgttcatagcacaaatttacatacatgtgtaccgtttatattgtaatgtttgtatatggtagttgtactcggttcagtataaaccacatcttaatgtatggactcaagaatgtttattgcataatattaatttagaggattaagttagttatatttttagacggtgaagtggcggtgcttcagctctgtggaaaacatgctggtgctagtcttgttatattattttttacaaaaccaatctactgatattgctccagctgcttccagatcacatggcccagccggttctagtgagaaggagatgaaaatactgtaaaacaccaaatatttaaaatgccaatataactatttcctccaagcttcttctttcccttcaagcacctgtttggacgagattctagcagctacaacttctcctagaatcagaatcttcccaaatagtctagcttttgtccagattctaaaaagttgtagtcgtaaaatctaaaaaatgaactagaaaccgaaaatttgaaaacctagtttctccagattctcagaggatagctacaaccagctttcttggaatcataaggtccttcaaataggctctcaatctctcaaatttttacctgattcctaatgcatcttagtgaaagcctccttctgctatagtgctataagcctagcacttgctctgcataggactcgttttgggtgtcagggcataacattttacagtctataagagaacagtgcagcttcagtagaaatgtcaccacctcaaaagccaaaaaagcataggaaagatgataaatctaccattttgggttttggtagcacaattattgtagctaccattgaatactttgtgacactgaagaatttctttgtggctaactggtttactttacttacaaaagtgaaccagcttttgtgtctcatacaatgaaaccaaacagatgttaggaaacaaagcaactcacacgaatacaggctacactaggcaacggggaagaaacacaaacacaggcaaacacacatgagagctttgtggcaccgaaacaacttgtgcctttttctctttttcttctcataaacacaagctagttatagatatatatactccgtatatagaaacacatgtagtcacgagctggttagcacgtgttccactaactacattctcagccagtatacccggtaactaaccactaactaaacctctaagctaatgcatattcacacaactcagtctccgatcagtgcatgcatgcaaactgaccatttcctactcctaaacttgtgctcttacctcctggctgtttattggcgcactactcactaagccacgcagcaccaacgtacacagctagctctccacgccatgcaacacacacgtatgcatctagataaacatgctgatattaaaaaaacaacagattcgtgtgcagcattacagaggtaatcaagattaatttataataacagattcgtgtccagactactggagaaaccatctttcgtcggtcgtccaaaaaccacaatagtcccggttcgaataggaaccgggactaaaaatgtttgaccaaccgggactaaagatcatttttagtcccggttcaaagaagttaccaaatctagttaggccccaattaactttagtcccggttggtataaacaaccgggactaaaaatatatctttagtcccgtttgtttatcccaacaggtaccaaaaatcctcccaaaccgcgcgcgcgccaagtccaagacttatcgatccccttcccttcctctctccctctttaatatcggcctcatctcgatccaaatccaaccgcgtatgcacttcccctctcctctccccttcctccgcttcacctctccggatcccccctctcctccccctccctaccaagtcctctcctcttgctctctgggtcggcggcggccgctgggtgggcgcgatggcgggtgggtgggagcggtggcgaccgggcgggcgcggcggcggcctcgcgctcccctccgccagatccggagcggaggggatggcggcagcggcggccggtggccggaagcgccctctccagctgtgcgcgcatgcatggaggccggccgggcatccctctgccggagatttgtcttcttttttaaaaaaaaattgtgattcattgtattgattgagatgaagaatttgtgattcgttggatggattgagatgcataatttctttttttgttgagaatatgtaattcattgcatggatatgagatgtataatctgtgatgtatttgatttgtggtatttgggatgttagtttgatttggggatatacatcccactggatttgggagaaaatcactagaaaaaaacaataaaaaaaaagaaactaatcgggactgccgctgtactctttagtcccggttattccacccgggactaaagatatccatcccggatttgtaatcccggttggaaaaccgggactaagggggttcccaaccgggactataaaaggtttatccagtagtgagtagtggcagcattacagaggtaatcaagattaatttctaacaacagattcgtgtgcagcattacagaggtaatacaatcagaatttgggccatattcaggttcatgtaattgtttttttttttttgcctgctgccttcatttcatcaaggactaagtctacgtgtctccctcatcaaatagcatccctcaactataaaactgggtataacacctccctcaacgtaaaaaaaatagatcaaagataatcccaaggtagtactaacccggttttggccacatggcatctacatgacacttctcaatgtgaaaatcgattattgcatgcggccaataactcgctggctgtttgggaagatcgtgtcccctatgtgatataatacttcccgctatttctaatctaaatctgaaatactatgcatagaacctaactgagttattgttcttagcatataataattagaatttttgcattgacaaataaacaaactttccatatataaaacagaaaacatttatatacatatatctgttagtgatatgccctagaggcaatcatagaaatgattgtatcacatactatgtttacatatttatccgacattgttccttgaaatagataactcattattggttaatgaatatgtgattctttcatgagactctttatgttgtttgttactatttctaaaggatccctgatcaaatatcatatgtggaacaaatatgattagatgatcagcacatgtattaattgatgatcgtgtctcatggatcatggtatagagataccaaattaataatgtggacacatgttagtgaacatgttgttggatagacccaacatgagacactgcaagagccatatgtgttgtgtcattagtgatctcatttagtgttggtgttgaatccttagacctgagattatcatggttcccaacatatgtagtagcttacttagggactgctaaacgctacttcgtaatagggtagttataaaagtagttttcggttatgctatgaaacatgtagtgagatatgaataatcaagatgggatttgcccgtcctatggagagatatctctgggcccctcgatgttgtagattatggaagtaaatggccatgccacaggtgattgaggagtcaatcacaagttatataatctatcaacaagttcgagtgaatgattgagctattagaggatggcacatatctagccttgagcttaatctatatcgtgaggcaaaggggttcatacaagtatacactagaggttcagccgatatgatctttatgtatgcccggtgggtcaatacgttctgctaggggccgctgttgacacgtggactgaaaaggagttttcgggttacagccgagtgtacatgaacctacagggtcgcacgattaatgggccagaataaggggattggatggagatccaatatgagtttaattcggacagggatccgaataggagtccaacgggccttggaggcccgagtgatggatcctatatattcgtgagaggtgtgaccggcggaggcattgcatcacgtgagaaactctagccgtcacttccctccccgagcaaaaccctagccgcaggcgggtgctagcacatctgcgcgtggcgttccgtccctgtatgtgtggataccggtagaggcgccactggtttgcggtgctaattggtgtgggagtacggcgaggagaacgcacgagaagaagaaggtcgagtcggtgcgatcgactacttcctctacatcgatgcgcgctacttcgcgagaattccttcgacttcttagcgcccttttccgctgcgcagcgcgtcgagtgctaacgatatatgatctaatacttgcatggttcctggtttatgtgatataaaattttgatttatgctatcgtagcctacgcgtatcccaacaatatctatacatttaaacatttctgtcccaaacattacaaattagcgattgtttcaacacaaacgaaatagtaaatttttactgcatatgttctttccccactctcttaggggcttgaatttatcttctaatgccagctgactctcattgtcgtaagattgccctagtgcgttgcagcaatcacagcggataaagtggcaaatgtcagcgcataccttcataattgttgtgttgtcgaaccggtttgctacataagagatttcaggggtctgaggaaaaaagacaataaatattacaaattgaattgcgatgaaatattctgtatagagaacaatgttaggacttacgtgattgatgtttgttgtgtacctcctgttgaccctaagcatctccaacatgtaatacccacataggttagtgctcgagggttgcttgaagcactgcgaacataataattacaccggtcattataaacaagtaatcattcaaagaatttgtgttcatggaatatgtcagtaccaccgacctatcttgacgtgtagctttgtcctttccggatcctttactgccccgtgatgtttgcggtaaaacctaagtgtgctatgctaataaaatatttgtttgagttacttaaaaattctagagggtaaatttagaattgtgaggaactccatgaaggtttccttgttttagtgtgtcgggtcgagtgctacaaccgattagtccctcgtatatactacgaataagatatagtggtcgctacaaacaagaaagatttattagagacttcatttgttattaatgatgtattactacataaataatgatgaattaagacatttatgtctttgtgcgagagcgtcccaagtatgtcgctacctcggtcatcttatccttgtgcaatttcttaatgtatgcttccttttcctccgatgtcttatccttgtgcaatctccgtctagctctcccctctcttccaggtgatctctaggccaacggccggtgaggagaggaccagcggccggtgagagaagaccaaggaggcagcatctcctgtctcccgggtgtggaataaggagggccaagacacacagatcatgcgcgcatgcgtggattacagctgcatgctccaccaccgcgccccaccatagcaccagcgcctcctctagccctcctgtggccacctgttggtattttctactatcatagataaatacgtaagaccatgaatacttctgtagcacttcaccttagagtatttcaagggtatcgaatcacaggaaacgtgtgtctatatctaacaacaaaatcctctccgagcacaacaacaaatggtaggcttcggctagagggaatgcatatggtttaattaaggaaaaagtacgaattattcccccgccccctgaactatcatggtcaaccgaattacccccataaacccaaaaattagacaacgttcaccctcaactttcaataccggacaaattatccacctcgaaccaatctagagcggttttgtcctatgtggcatacgcgtggcaatctagttatcattttatttattaaaaaaatatgggacccacctgtcgtactcctcttccccctcttcctctctctcttctctctcccctcttctctctctctctctcagaagttgccgagagcaaccggcgatgggcgcggcaggtgatgggcatggcgggggcatggcgtgcggcgagcggcgagcatggcggatctccccaccaccgtttcctgttctcccgctgcccgccaccggatctccctgccaccgactcctccactgccgccgccccccgccagatctccctgccaccgacgcggcgacgcctcttggaagccgtcgccgacaccgcttctccatcgccgacggggttcgcctccacctcagctgggccatcatcgtcgaccaccctacccaagccatcactgcccgctaccggcgtcatccacatcggtgcaccacaccctcctccaattcctgatccaccgccggcctcccttggctgagtcatcaccgcccgccgccggcgccatcctccgcatccctaggtagagggcgggcccgatccaaccggctgtgcccccgccacgcccgctgcccaccgcgcccccgccatgccagccgccggccaccgggtcgcactcacgacgggcgtctgagagagagattgtgaggaagaggggaaagtgataggtgtgagtgcatgacaggtgggccccactatttttaaaaaagaaaaatgctgactggattgccacgcgtacgccacataggacaaaaccactatggattgggtcgaggggggttattcgtctggtatagatagttcagggtttaaaatatccggttttatggttcaggggggataattcatactgttgtcatagttcagggggtacttcgtacttgttcctttaattaacaatacttaagttaaaggtaaaacactataactctatgacataccgaccgtttagggatacaaagaatggacatggctatcaccacctgctgcctccctcacttccaggaagcacacaacaaacgaaggtaaccactaacctagaccaacgtctaagttattgattactactccagcctcacacaagaactttcttcttcatctagaattctagtgctggagcacttaaatactaggcgacaaacctgcaatgatggaaatatatctcactaatatagtaaattaaataccaaaaggaaacctcaaacacttactttattaaaagaagcattcgccgaggtacaaacgagaagagagcgccgacaattcaggcactcctccggaacttctcctcactctctacctaatttcaacactactaaagtgagttctactccactttgttgtgtttttgcgattgaatgagttcctccttttatagcctctaataaaggttggaatgacggttgtggaggtcagtgcacccacaaccgccatcaccatcaaatgtgcagctgccacgtgcaagggggtggccagggtgccatgtttggttcagccgaaccaggccgccaccttcagccatcgaccttcttcaaggaggttggcatgtggggccttatggcgatgcactgtggataagaccctttctggtcgattttgactatcatgtgggccctccaatccatgtgctcgcgtatgattggctggaggtatatttcgttgcatggaggatgtaaattctttgaaaatcacctacatgcatatatttaccaatacaagtggaaacaattagtaataaacccctaccattgagtttaatattaaatttaacaaccattaacaatacccccacaattatcctttacactcgctgagtgaagctcatggatttcaacagtgcaaggacttcctgtataatggtacaaacgtacaatgtattccagaccatacctggacccgtgaactttgaagtgtctaccatatcatcttgggtgcaatggctttgactcaagttgcattcttcccttgttgtcaagaaaatagtgagaatgaggcgatgttctgaagagtgtcggaattgtcggtgttctctgctcgcttgtacctcgacgaatgcttctttaataaagtaactgttcgagaattccttttggtattaatttagtagattaagtgagatatactcccatcgtagcgggttcgtcgcttagaaattatattaactgctctagtactaggactctggatgaagaagaaagttcctgcacgaggctacagtagtaatcaataacttaggcgtggtgtctaggttagcgatacatttgtttgttgtgtgctccacggaaagtgtggtggcggtaggtggtgacagccccgtccgtcctttgtatctctccatgtttgggtacatcataatgctacaaaccagactctgcttggcagactaggggagagccggtgcccaaagcaatcgatagggttttatctttatctttggtatagttaattaatccaaaggaaacctctctttcctaagcctaccattaggtattgtttttggatagaatttagttcctagatatacacacatgttcccgcagattcgatacccttggaatactctaaggtgaaggtatatagcggtattcatgcatttacaaatttatctatcaccgtaacaaataccaacaagcatttcttgtggcgttgccaaggaatggttgttgtatcatcttcaaacttggttcatcctctattttttcatttattttattcctctcttattaccaaccatagagcatcaatctattcaaaacttttctgctccaaagcgcgagtcctgtgaaccacctctttcttcaaaagcaattcattcatctagctatgaactccacctaactttgtagccatggttcggcaacaatccttctcgggtgttgatggttgttaagtaccaattccgatcgccaactagcacaatgagtaaagggaaaattagcatttcgtacatgtataccaataataaataatgtagatgtattaggattggtgaattaaattggttgcagaaattatacacaaaagtggaggagaaatgatgccggcatgcaaagaaacacacttgaggggcccacgagtcagctcaaaccgactcaaattgcggccaaccacttgttatccaccgaccaaagtcggtggagtaaggcggttactctagtgcgaactaggcctggcgtcgctcatctccctcctccacatggacgctccagatgatctcctattgacgattactatataataggtcggtggcctacaaaccaccttaatcaaccgtcactgaagcgtatttaaggagtggagattctcacttcacaacacacacctcaaggagcaattccctcttccactttgtaatctctatagtttctagtagtaataaagtttaggagcttctatcctgtagacttcctggagttctgggtacgtttctagtactttcctcattttataagactatggctgaattaatagaattatcttctttatttatttatgctcatggtttatatatttatttattgagtatgtgttctaagagtagtgtatgctttgtatatctgcttcatcctaggctagtcgatcaatgttacggtaatggtccaatgacctttataggttgctctagcttcaacttgttcatcggtaaggtgaaagtcctgaggagttagtgatattatttactggcataagcatggtttttaggctatataaatgccgttggatgcgagtctgccccacggaaaagtgaggtaggcagcaagtttgacagccatgtccgtcctttgtattcctcctcgttcgggtatgacataagagtgcgtaaatgccataaccacgctggcagaccagcagggagtggtctctcggtagtacctgggtgcatggaactatgtcctatgttgtaactgttgacggtcgttatcgatcagttttgaccgtcaatactaccaaaataggagagaactagtgatgcttgcaatgcataaatatgttagagtaataattttccactagtattaggtttactaaccttttgcagagaatgacaataaagtggaggagaatcgacatcaacttagatgataaatcaataggacgatgtcgagaaccagacttatgaatagatgggccaagaactcagaactaacacgatgaattgggccaaaattcacaagtatgcggactggagcaatagaggaggccaccagccgaaattgggctggattgggccagccccaggatcggccgaggccgaaccaatcttggcgccgttggatctaggttttggagtggacgtccaggattgcatcccaataacgattggagggcactccggagaattccccttccacaaccgtcataactacctttatataaggagctcactctcttcacttcacacacacctcaagcaatagctctctcttacgtcaaaaaaatcaatagccctctcatttctctcaagtttagtttagtagtatttagctggtggaataggaatagagtagaaatcagaatccggaagccttcggaagagttcgagtatggctctagcagcttttctcttctcttttgtaagctttgtacttttattagaatactcttataaatacatttatggtattgaaatactttccaagtatatgagtacctactttacgttatgttcttgttatattgtatgtacggctagcttatttaggagatgctttggtgcgggtataatgtttgcttgtgcaattactctatgtcatgacgatgatattagagtagtatctggtagtttaggcgtggtgtcttagattacgggatatcattatttggggttatatattgcggatgagtggttggccgctgatggtgacaactcagtacggttattcctccgggcctatatataatcctaagttaattccctggggagggtattcctccgtatttagccccggttgtatggtcatgacgggctgtcgtaaggaactcggcagtcaggggtggtttctcgacttactaggagggcatcggaaagagggtattagctagtatatcagttaaataggatgtatgtatactatgtatattagaagtataggaatagattatctttctcttttctttccacctagcctagataatatatatattgagaatgagtagttaatgcttgtatgccactctacccttggattatcttaacccctgcttagaatataattatcacaagcaatgcataaattattagtccagttctctctacatgatcttcccacgagataaaatatgatcttcccacgagataaaataaatacgatacccttggaatactctcgggtgaaatgctacgatggtatatccgtgcgctcgcggatgaactctataaccataatataccagaagtatttctgcgccattgctgggaattatatttctagtaatgtcgttaagaaaatagtaaccatggataagttaagtgtatactagacatgattactataaaagtacatatgaatcatagttacctaaagaaaactccgtactagatatttttatagacgtgaatcccttgtgtgtgtccactaccatatcattatttatcctaacctctgtttagactatggtgaattaattatacattgattaagagatataaaagaaagaacatatctttatactgtcgccttcccagcgaaaatataaatacgatactcctgggaatactcttgcgaatttatctgtgattgtaagaaataccaatatcgggcgcgaaagaaaaaatccctaccatcatccgcatgatcctgagcaattatattcatgcctaacaatagcgggcatgacacaagaaaccttaaagtggaaatcgtttcccttctttcttacagagggggcaaaaaagtggtacacccataccttaaaatattacatggcgaatgagaggaattaaaaagcaggttctgccttggtgtcttcccactaacgcgtgtagtctctctacgtatggaggttctctgcttccgacaaaatgagaaggaatccatcggtgtagcctaggctcggtttttcttcttaactcaagatggctagacttgtctctgcccgatcatgtgttgttacaacatttttggttgggtttaggcaagccatgtatctcgttacatccaccggaagttcgttcgcacacaaaacaacatcaaaaggaaggaaactcttatatcgtatcctggagaacacctctttcgtttgttgcgacaatatccaggaaatcaaggatacaaatgaggagccatcaaccgtcaaatcggaacatacatcctccacatttcaaccgttgaatcctcacccaaaccatggaaacaggacaaagaagaaattcagccttcaaaattacctttcctgtttgtgggtaactttttttttgaagattatggaaatacctcaaactattcttgccaaaagagaccaccagtctcgtgcagttctcctgtaccactcgagaaaattttcctcaaagatatggtgtaggaattaactaccgtcatgagtgatgagtggttaagggaggtggaactttcctctcaagcaattcagatttttgttcccgtccttaactattccttgcctcatgagagaggtcatggcgcaaaccctttataatcccactattggttcaaacattatgtccataacctttgcattaaatttcttaggggatgaaccattagcaccaatggataaaaccttccgagcccatctattcctatcatcaaaggtcatgttactcttcgttgtgccaataagacaaaaagatgtcaaggctatcctggattttcatgcattcaaattctccaaattctatattctcatagaccatcccatagaaaaacttcttacagatgtgccgcaaaccggtgtcatcaacatcaaactcgggataaatgtgtttccatcccgatcttatgatcgtgaaactctttgacagaacctataccccgatttcgagccaatcgaggaagtgttggctgtagattgtggttaagtatcgatttcgactgtcaactatgttaataaataaggggagaactagcatttcttatacgtatatcatttataaataatgtagttccacctgtattgcagaaatactacggatgcaggaattatacactatattaaatgagaaatgagctagcatgcaaagaaacacatgtccggcgaatcatgtgcgagcacacggattaatggtcccacaagtcagaccaaaccgacttaaagtgggaccaaactctcgtgcactgaccaaggggctcacctgtcatccactgaaggcggtttcccttgttcggccaaacttggagtggcacccctcggccccccatcctccacgtgtcaactccataactactcttaatgacggttaggggggtgcactgacctccctaaccatcaagtatcaaagtatgaagaatggacagaggacagtgctctgacatgtaatttttgtgatgtctattatattctttggaattctgtttacatgcaattttttctgtccctttttttatatttagagaggttttttttcaactacaatttgtagttgcagacatgcagctatgctagttgcacttccggatgttgtagttgacgttataaattttatgcaagttcagtgataaatttgtgcaactaatgttttttcatccactctctcccatctgctttttttttatcgatttatcactttcttgtttctcttctccccgtgggatgaatctggtgcttttttcccactagcttcatgtgaatggcaaaagtaaccccaattcgcatgcgtacccaggaaattagtttattgtgtcggcccacaccaaaacatgggccatgaaacaaaacataaccagaaacctatgagataagtttattttgccttcctcatgtcttgatccctcaaccacaaaacgtatattgcctgccccaagtgtaaaactagtgaaaaatgactcccctggtggtttttgacagtggtttcactgatgaggcagccttgtcatctgaaaaaatttaaaaaaatatgtcaaggcccacatataagtggcacttctcttcttccccctccaccactcacctctctcctctcccatctctctccccgcacaaagcacgacctctaccaagggacgtgcaaccaggggaggcaccaaaagcgcaagaggggcgtggaccgcagaaggatgcaggcacggaccgcaggggagaggctcgccggctgcggcgcacgtgtaggtgagggttcgcctaccacggtgtgcacggggggaggagctcgctggccacagcacgcgcgggggaggggctcatgagctaggacagcatggtgcctcctctatggtcagctccgccgacggcgatggctacagctgcttggcggcggcgttgccgacaaccttgccggtgtctggctgcttgagctcgccatgggaggagacctccgaggaatcctccttgagcttcttctccttcctcttggtgattagcttcttcagtcacctcttcttcttcctcttggtgggatgggtcatcaaatcgccgttgcagccgacgatgagatggctcctctcatcgctgtcggtccaaagggaggagatggagacctcgctccccttgtcgagatttgcagagctcaacctggtcattaccaacgccacctcccggatcgacgagaaaacgcgacagccacacaaatccagtagctcagcggtggtctccgccatgggagggcatggttggggccggcaacaggaggagtaggacctagcaggcagcagtgtcttgacatcgatggcagcgataggagccatggtgggagacagcggcacatggggttgttgaggaaaggggaaggggcggtgtcaccacagaacccgcgagcagccggccgacgatctcctccccacacacgtcacagctggctaatgaggtcctctttccacacgtggttgtctcactgcccgacgaggcatcgccgcctagttcctcttccgacaaaggtgccgacaacggccttccgcactcggagccatcaaatgtcacgcccagaaatttaacccaaatttccagactattttgcgtattaaatccctgtccaggaccagccagggtacacaaaacgacaagtaatatacagttccaaacgtaaataaagcgtaaaatacttacggaagaggcacttagtcctcacaccgaaacagaacgacagcagcggaaaaaggcgatcctagcggggcttcagctccactccataggcaaaactcaactggggtctgagccttggtcctctaactccatcttcagctcagaagcactacacttctgaaagggggaataatagcaagactgagtacaaccaccgtactcagcaagccacaccaacgatgcagatgtgcaaggggatacaaggatggtttgtggctatttgcataaaggcggttgtaaaacattttattgagcaaacagtaaaactgttgagtaattaaagtaacattaaatctccactaatcaacgctacaccacgttgaacaggcccaaccaacccacctgaactacagtgtattgggtcgatttattaattgtgagactaatcacggtgaatctggtcgaccgcccataaccgcgggcacggctattcgaatagttttactctgatcagaggtgtacaactgtacccacaagacacagccccacgacacgtttccgtgcgccgacatgccaccacgacataccggaaagaggccgtgacaggacccttcgcataaccccctctagccaagcacaccacacctcaggtttcacccccgtccccagcaggcaacgggcagtcccctctcgtgccaaggtgaatccggaagcgacagaggccgtcgcagggcccgccccgctccatcacgcccacccttgcctggatgcgtcgactagaggaaagctacactacaagcccagccgttgcccacgctggcttgtggtaagtacgataagttcttctagggcatcccgcgaaccggtccttaattgccatgggtgtgactagcaaaaccatgcacccacagcccaccattcagtcgcattttagttggataattacgaccatgaagcatggccagatgtctcgagcacacagctcaacaagatactagaatgtctaatactgcaattatcccatcgactgagctagtggtaattaagcatggctaagcatatagttctagctaggtcatcaaagtaacaccagctaggcgatttattacccatggttgacaaaggacagatatcaagtaaacatggcacaagcgagcagataggtaaaaccctgaccccatgtaattagcaaaacatgcatatttatttgcaaacagtaaaacatttgtaaattgggatcaacatgctcaaggggaatgtgtgacttgccttgcttcttcacttggatcttctgaactcttatccttgcgaacgtgatcttccgaaacgacgggaactacacgctggcacgcaaaacgaggaaaaactctaataaaaaccaagaaaacagtacataaaaactaaacaaacatgtagagctcaattttagatgaattttgcaagttgaatggctcaattcggagttcgaatgaattaggtatgaattttagaagttttaagccatttaaatgaatttctagaattaaactcgatttattgcgcaattattatttatttttacaaaggaaaaaggctatgctgacgtcagcaaggggtgaggcgcggaccgcgtcacaaaggggcgggccccacatgtcagcggcaaagcccaccgtggaccgagtccacggcggcagccggccacgtgggcgcgcacccgacgctccggatcggctggggccgatcggacggccgggggcagccgagcggcacgaccaggcaggcacgcccacaggcggcggcgaccgccgagcctagaccaccggcgacgacgccggcggcgagcggcgacggcgcgagagccggcgagagagtggagagggaggcggttctcaccgagcgaatggggcggcgagacgaagacgaggaggtggctggcggcacggaataggcggtggcgggctcaccggggatcgaaaggaatggagcaccggtgggtttccggtggtttggagcggcgaccgatctgtggcttgaagcggccgagccggtgaaggaaacggcacggcttggcggtggccagggcgacggcagaggtgcgactggaggcacaaaagtggctgtggctcgggttcaccgtggagcgggcggctcgggggtggaatggaggagcggcgtggtggccgggcttgccggcggagcagcgaagctagtggtggtggcggcgcggcttgaggtggacgggaacggcggcaagaggctgccgaaggcggcgaaacggcggcggtgctcgggtgagcgatggaatcggtgtattgattgtggtttggggaaacggagttgcggacggtgtgcgacaatgcgtggcgaggccggtggcgcaagcggcgtggcgcggggacggctacggcggcggaggtggccggccggagatggcaaccggcggcggcggagggaggttggtggtggcggagtggtttcgggcatggggaagcttgggaaagagggggaaacggaggaggggagcccgggggtcgtttttatagcctcgagagtcgacgggggggccggttggcgacggatttgaagggggaaaggggcgccggcgacgtgggtgagtgggggcagtttggcgccggttttggaggggagaagtgggggaaatggtggaggaaggggatgacgtggggtggaccgcgcccacacgcgcgcgggaatcggaagacgcgcggggaggggcggcgacgtgggcggctcgggcggccatggcagttgccggcccgggctggaggttggggatgacaggtggggcccacgggtcccacctgtcggcctgagtgagaggggaggccaggagggaggaaaagcggacttgcgccaaaaggggaggcaagccgggccgcgggaggggaaggagagaggattttgggccgagcccgaaagggaggaaggggaagtttattttgttttctttttatttaaattagtttaatgaacttggtgactttaaaattatttcttgaactccgaaaattcatggaaaaatccggagagtattttagggcacaaagaatattgcgaaatattcccggccaatgatttttaagggaaaattttaattctcccattatttcacttgattaaattgatttaacttttatttaatttctagaaaatacattatttaatgatttttaaacccgaacgaaaatcggggcgttacaaacctcccactgcggcggcgcactctgaccccaacctctagttctctgagacaggcgatgacttttagggtttctagtcaaggtcgccatgaggtggcggcgcggccgccaccaccaccctttagtctcgcatggggagaatcggagaagggaggagaggaagaagaaagggagaagtggggttgacaggtgtgtcccaccattttttatttttactcttgtcgtttacatgtgagaccctttttttattatttttttattttttaatgactgagatgccacatcagcatactcggacaagtcaacatgccatgtcagcaaaaaaaaaagctttcaaaaccactaaaggagttaatttgcactggtttctgggagacgtgttatacccggttttacagttgactgatgcaattcgacgatgggcaagacataagggactcaaaatagacttactccaaaacctattggagtggacgggtgaacccgataatgacccaagagcccgtttaagcaggattagtgatccacgggccactttttgctattgttgtatagctattggatgtatatatccaacggttagtagaatcgactaatggatctgactttttacaggcgattgaccaatagactgtcccgtattattacacaggcaaaatatagttccaataaaatcgcgtgaaaatgctactacctgacaggtaaggtgtggaagcgagacacaaacagatttgtctccaccaatcccctctcaggccattcatttcgatatcgttttctcgaactggaaaccgtcgcgaattgggtcttgcttgcaaattgcagtggtcgattattgcctgcccttgtcatcccctagcagaaacgtagtggtaacgctaacgtcgacgacgaacttaattagctgtactccttccatttcatttctgggtttcaatctgtacatataagtggatttttttaatagagagaatcagagagccccgtatgagtgggtccaatcggaagttagtttgtccggtacattacatgtcacgtactcgcatcctatcccttttttttcccatgcgtcaaccggtcaaacttggtgacgacaagttttgtgataatttggcaagttgattgtcaatacaagtatcaaatgtatggatttgatactgatatttgatagtgttgaatgctagagaacatgggattactatataatgtgaattattatatttaatcttaggagcaagtatacatagcagtatattgacagataagggaatggactagcgataagaaattactggaaacaaattaattgtattcttatattcctgtaactatcatatttatactcttaagcgcgagtaacgcgaactattttttttgattggagaagaaacaataaaagtgttcagcacaaatgatagttatttgtgcggtagtcgatatagccaaaacatgtatcatgaaggcaatggcaatgcgtccttcattctgtctgacctgggctaccaagtagacctcaagacataaggcccacaatgcattttggcctcgaatcagatccataaaaatctaaagacagaaattctttatctttgttgcccaggctccaccaacgcagtccgccgcctcgttttcttcttagttcccacggcgccactaacctttgcaaaaccgtcgacacagctcctcctcatctcggccgctccccttcccccatgggcggcgccgctctctccctctcctactggcagcaccgatgtgcctccccccactggcaacgcatctctccctccccatctccgccgcttcccctccccatctccgtagctcgaccgagttggcagcgactcgacgacggccactccataatcctcctcgcaagatccggcctgagagttgccggatctggccttggaaggcggcagtggtggcacaacgacagcaatcccatgcccccttcacggtaggcgtggcctcgatggcagctgctgccgttcaacgacggcggggcggccttgacgaaggtggttgcagctcgatacgatggcggtaaggggaccgtggcttcatgtttgggacacagcctcaccaacgttatttcgcccttcttctcgcgcgtcacggggatacgtcctgacaggttctaacgaggttcaggtggccaaatgaagctccctgatcttcacaagggctcgctgaacgccgacgtggcttggaatctccgaactggcgacgtgagggcgaacgccacctcaccgcactgtgaatggcatgacgtaatcgcgatcgaggtagccgcgtatggaggagtcgtaattaatgtagccaaaatgaaagtatggatatcgagatagcagaattgcatggcacacaagtgataccggccgtggagtgatcatggacgaatgacatggaccagggtgtgcagcagcgacgaggttggagatgtcaggcgagcgtgtgcatgcggctcaatcctctccggagtccgggagaaatcagtgaagataggtacgatatatatgaggcagtgggatagatgttggatccaatccaatgatttaaattttgcactgtaggactttgagtaagaaaatcttgtaaatgtgtagcacaagtagaccttagaatttacttaaagcacaagatactacgtcctccgtttcacaattaattaatataacactttctagcattactcatatatacatatcatatatacatatagatgttaataaatttagacatataaatgtgtctagattcacattaacttctatacagtggctaagccagaaattatataagattagggctaagaaatgacccgactaatggagtattagttttctgaaaaatttacatggtgaatcaacaaaatttaagcaagtttttggtggcaggtctagggctcaagccctagctgccctaggcctacctccacccctgcttctatatgaatatgagcaacaatataatatgaaacggagggagtagtatatttctcatcaaataaaagttactacttcctccgtctcaaaatataacaatttttaagtgggcgggatatatttagtattacgaatttggacaaacgtctatttagattcgtcgtattaggatatgtctcatccagttaaaaattgctatatattttaggacgtatatccagttagattcgaagtatattttaggacggagatagtaggttatattcttttgaggataattgttatacatgttttcgaattcgtgattaattaataatgtaacaacctaaatgtgcgctaattacatcatcatcaatctagtaacctagtaacacactgtattatctacgattgtactgacaaggcaggatctgcttcgaccttgtcgccgctaatatctccgagctccgccggagatggcggcggctgctgggcggtctcgccggcgtccctctcctgccgcttcttcgccgaaaactccgagacgtatccgatcacgtccgtcaggtcggcgtgcgacgacccgccttcctccatcgccgccctcgccttcgcggcgagctccttggcgcgcgccctcctcgccgtcccctcgtctccgccgtccatcagctcggtcaccgccttgaccacgccgtcgctggtgagctgcacgccctcggcctcggcggggaggaacatggggggcaccgtgacgcccgacctgacgccgacgcggagcacgtcgacgagcagctgctcgctgctgaactggtcggagaagttgggccacgtcagcgccggcacgccgtgggagatggcctccagcgtcgcgttccagccgcagtgggtcaggaacccgcccgccgccgggtgggacaggatggtcacctgcggcgcccacccgcgcaccaggaggcccctgtcgctgacgcgctcctcgtacccctcgccgtcgagccactcgctcacggcggcggccgtcgcctccttgatcgcccacacgaacggccaccccgactcctccaggccgcgggcgagctcgatcgcctgcgtcgcccggaggtgcgtgaggctgccgaagctgacgtacagcacggacgccggcggccgggcgtcgagccacgagacgatccgggcggcgtcgacgacggcgcggttgccacggctggcgctggagtcggcgtcgtccagcctggcggcgcacgtcggcccgatggcccacgccctcaggccgagcgccgacgcgtacgcgtccacgaagacgccctcgacgtcgcggaacgtgttgaggagcaggccgtcagcggtggcctcgccgtcgaccacgtcgcgcgccagcttctccgcgccgggccactggaagaagccgcggcacgtggccgtgttgacgacggcgcgcacggggaagcccggcacctcgaacggctcgagctggtcggcgacgcggtcgtacacgccgtgcttggcgaggcagtggatggcgaggaggaagtagacggaggggcagtgcagcacgaggcgcgggatggcgaggcgttcgcacacggccgccgtccacgggttgcaggcgtcggcgacgacgcagtccgggcggcgaggcagcgcgcgcacgtacgcctcgagcgccgcctccatgttccacacggccttgaagaaagccaggtacatggcgatgtccaccaactggtccatgttctccacgccctccggcaggccgaactccgggccggtgaaggtgatctcggcgagctcgacggcgagccctccccgccgcgctccctcgacggccgccctgttgcgcgcggcgttgaccggcgtggtgaccaccgtgacgcgcgcgccgcggccggcgaggaggcgcgccaggtccaccatagggatgatgtggccctgcgccaccagcggcaccagcaagaagtggagctccttcgccgccgacgccgccgccatcgcctccaactctgtttctcctcgcgcgcgcgcagcaagagcaagaaggtgaggaggcgtagggactagctttgcagtctagaggagtgtgtgttatacacgtcgacacgtcgtcgatgacgtcgacggcccgggttgttgcggggcgcggcggcggaagatgagatcgcggcgacgtggaagccggaaatacacatttattgtcacactctaaaaatcttaaatatataaattgttgtttaattggaatttttagaaattattttaaaagcctacaagctaaaccctaattttctaggaaaattttcaacataaaagtgagctagataaaattttattaaatactatgcttgctcctctattttctagatttttctgggaattatttgagcaagggaagtatttttaataattgaaacaacatttcacaaattgttttattcaaaaaagtttaaaaaaccccttctttagccgttggaccgttttcggcccaactctctctttctctctctccccgcgcgcggcccacgccggcccaagccgccgccgcccgtgcccctctctctcgggacactgacatgtggggcccacatgtcaggcccttctccttcctccggccgccgccgagaccgagcccgagccgccgtcttgcgccgccgtttccgcccaaatccgacccggattcttccaattgattgaggggttttgttcctctcgatctcctctttctttcccctcaagaaacaaagaaatccgttgagtattctctccgaatcgaattcgttttgttttatccctaaaaaccgagttcgatttcttcccgaatcgattcctcccgtttggagctcgatctcttcgatccaatgccatataaagcttctccttgttcttctcttccgtttgccccctttcccgagctctcccgtgcctcctagcgccgccgcgacgtgctccaagttcgccgccgccgccggccgtcttcggcaacgccgccgcgccgtctccgccgtcgccgccgctcgccgttgccgccgataggtgcgccgtggtgagaggaagcccggccgcccctcctctctcgccgccgaccaccggagcccgctcgccgccgtcgacccgaaccgccgccgccttcctcctcgtcgccggccgccgtcgtgcaccgtttgccgtagtggtgagtaccaacgggttcgcctcgttgccctctacgcgtagatgccctccaatcgcccggccgatcgctctagcgccggcgagctcctcaacccgagccggccgccgtgccgacgtcagcatgacgtcatctccagggctgacgtcatcgtttccttttctttttctttttcccgattttctaatagattaaaacttcggaaaatcataattaaataaccgtagatccgttttaggtggttcaagtttctaaatttttctaaaatcaagatctacatgttaaaaatatccacatgtactgtttatgcttgtttttgtactgttttattgattttgtttatttgctttagtttccgacgttccggaggagagcgtttccattgaggaaggttccgaagcatttgtggaagcccaaggcaagtcacacagatcccaaacaaccctttgagcatgttgatcccgtttaaagctattattttattttcaactatgcattgtttttgaatgtcatcgggtggtgaacctttcccaattatttaatggccgaagatgactttattttcctatgggttataatttgattggcatgaaccttatatattggattggttcagctaaatgctatatgtaggtttgcttagccatgcttagaaacattagctaactaaatggggttaaatataaattatattacataattattattattaattagggttatattcaatggtagctcacgatggtaaatcgtgtgatgataattaattgataattaaaacttggataaggtgggttgtgagcatatggttttgatggttgtgctcatgacaattaaggaccggttcgcgagctactgttgtgaaacatttatcgtgccaaccacaagccagcgtgggcaacggctttatcttttgtatagcgtgattcattatagtgcgccagactgagaagtggcgagaagtccatgggggtcgctggggagtccatgccttgtttataagggggtgattataatccaggtacggtgcactgtggtgaattgtgttatgcgaggggtattgtcacgactcctttccgaggtaccgtggtggtattgaggcacatggtgacatgatgtggggttgtgtcttgtgggtacagtggtacacctctgatcagagttttaatctattcgaatagccgtacccgcggttatgggtgagttgagcaatgtttttcgtgattagtctcacactactcattaatggtaattatgtggtaattaatttagttcctggtttggaatggttaattcctggtttggaggtttaatttgttcaaccggggttggttgttcaaatgtgattgggcctatgcaacatgggtatgttgtatggtgtttaattaatattgattaattatacaactgttttactattctcttaaatatttattaaatgctgttttctgcaaatgagctatattgtgccatcctttgttattttgtgcacttgcatatttgttgtgtggcttgttgagtatgttatatgctcattcttgcaatattcattcatcagaagaggagtatctcagtgaaggtgatgatctggaggattaggcttgttctcggttaagttgcctgtggagtggagtcgccatcgctgttccgtagattgttttagttttatttttccgctgcgtagaatgttatttttctttgagaggaactatctacctctgtaataatttattatttgcgaatattaaatagttattcatttgtactctattatcaatattgtcattgtgtgcctcggttgattcctagacgagggtttaacacacatgtaagcgtttggaattttggatagaaattccgggcgtgacaagttggtatcagagccaccttgaccttaggataagccaaatggtaaaccttaagtagccttcaaaatattttgaaaaaaaaatagaactgctcttctctattctcttacaaattaattaagttggcagcacatgcgaggttatgcacaaaacttatttaattcaatttcttttcttttaaaagaaaaaggttgttcttttcaaaatgtttctttttctctttacccaaaattttattgattagtcggcactgtacatttattatggtatcgaattaatcatgttagcactagtactacttatctttcctatggtgacattgtaccgtgcttataatagatcataattatcttagctttattttaaatatttgttaaaaaaaataataatatatttgcccctgtctaaaaagttaaattctaaaaaaaatatttataaaatagctttgtatgtgtcttttcttttatttttcttccttttgggtcaaaaatcagttaagtctagttggtgcagctaacttagaaaaatatgcattaattcttctcttctatgtttctttagatgccgccccattcaccgagaaatttgatcgaggtgttaggattcgtcagggagttgaggttgatggcttttgaggtaggctatgaagttgctcccgagtatcgccaaatttcccatgaccccgacgaggagaagtgtcgtgttcgtgtgacattggctagtgatagtgaagaccttccgtcctttaagttcgaagttggaggaagatcgtactgccatgcttgtcaagaagtagctttggtggccattggagagttgcgacaacactttgaagaagagttggattcatcagctttccagtatcatcctcacaaggctcatggtcaagactatggaacctatacctgtcctgatggtgaagagagtgccactctgatgcatgtggtgcatatgcttagtgctatggatgcagtaagtgtggagcgagacaaagcagctcatgacagggaaaactggaatcaaggcaagatttgcaagttgaagagcaaggtgcaccgtctacagaaggaattagctgaacttaaaggagaaacgccgccgccaatatccaagcttcgcctcactgcaagaaagagaacctgtccgccacctcgtctccagttagcttcgaagattcgcgtgatgggtgaagctatgcccaatcgtgctgaacctgtcatcgacatcataagtgatgaggaagaagaggaagatcataaagaaagggagccagctactccagaggaagaagattcatcgtttcgttccgacgcaaggcggaagtagacgcttagttagaacgttgccatagttcgttgtgttagattgcttgtttaagtttgcttgtgagtgtgtgggtttagttgttgcttacatcattggtgggatgtaacagcatgagtctagttcttttgcttgtcagagtgtaagatagttggtgagatagtgttaatgcaacttaaatgtaatcatacacagttaagagcaatatagaatttaaattaattaaataactccgttctaagggtgtctctctgtcattctttcctgttgtctctgcttatcgtcagatggtgaacacgcgcaccggaagtggaagtggaagtggaagtggagctactaacaatggaggagaacccacgctagctcagattctggctcaacagacacaactgatcaacctgttagtgcagcaggcacagaatcagcaagcaaataatcagaaccagaatccacccccacctccccaaaataagctggcagatttcttacgtgtgagaccccctaccttttcaagcaccaccaatccagtagaagcaggagattggttgcatgcggtggagaagaagttggatttgatccagtgtactgagcaggagaaagtttcttttgcttcgcatcagttgcatggacccgctgctgaatggtgggatcattttcgccaaggcagggcgggaggagaacctattacttggcaggaattcacagctgcttttaagaagacgcatataccgtcaggtgttgtagctctaaagaagagagaatttagagcactcaaccagggatctcgttcggtcactgagtacctccatgattttaaccgtttagctcgctatgctccagaggatgttcgcaccgatgaagagcgtcaggagaagtttttagagggactaaatgatgagttgtcttatgctttgatggctacggatttccgggatttccaacaattggtggacaaggcgattcgtcaggaagacaagtataaccgtatagagcagaagaagcgcagggctgcccaatttaaggcacaacagggcagtaaccaaaggccgcgtctcattactggacctcaagctccatcgtaccctcaaggaggatcttcatctgttgcccgtccccaacgccagttctacaacaacaatactagtaatcgtggcaatgacaaccgcaatatggttgcttgtcctgcagcaactccagttcagaaccagcctgtcaggaaggaacagggaagcaagccagtgatatgctttaattgtggtgatccaggacattatgctgataagtgtcctaagcctcggcgtgtgaagaacgctccagtcccgaacaaccccaatgttccagcaccgaaggcacgtgttaatcatgttgcagcagcagaagctcagaatgcaccagatgttgttttgggtacgtttcctgttaactctatacccgcaactgtgctttttgattccggtgctacacattcctttttgtctaaaagttttgcaagcaaacatgggatggaagttgttagtcttgggagacctttactagttaataccccgggcaatcaggtattttcgacacagtattgtccttccgttactatagaaatagaagaagttcctttcccatcctctcttatcttgctagaatccaaagacctagatgttatcttagggatggattggttatctcgtcacagaggagttatagattgcgccaatcgtaaggtgactttaaccaatagcaatggggaaacagtttctttctttgcatcctctcctaaatctcatggtgtggtcttaaaccaagttgctctacaagagattcctatagtgcaagactacccagacgtgtttcccgaggatttgccaggtatgccacctaagagagacatagagtttcggatagacttggtacctggaaccaaccccatccataagagaccatacagaatggcagctaacgagttagctgaggtgaagaaacaggtggatgatttgcttcagaaaggatacatcagacccagtacttcgccgtggggagcaccagtcatctttgtggagaagaaagatcatactcaaagaatgtgtgtggattatcgagcgttgaatgaggttactatcaagaataaatatcctctacccagaattgatgacctgtttgatcaactcgaaggtgctacagttttctccaagatagatctccattctggatatcatcaacttcgaatccgtgaggaagatataccaaagaccgccttcacaactcggtatggtttgttcgaatgtaccgttatgtcgtttggactcactaatgccccagcctttttcatgaatctgatgaacaaggtgtttatggaatatttggataagtttgtcgtagtgtttattgatgacattcttatttactccaagacgaaggaagaacatgaagagcatcttcgtctagctttagagaaactacgtgagcatcagctttatgccaagttcagtaaatgtgaattttggttgtccgaagtaaagtttcttggtcatgtcatctcgtctggaggagtggcagtagatccaagcaatgtggagtcagtattaagttggaagcaacccaagacggtttcagaaattcgtagtttccttggacttgcagggtattaccgcaggtttattgagaacttttcaaagatcgccagaccaatgactcgtctgcttcagaaggaagtgaagtataagtggacggaggattgtgaacgaagtttccaagaactgaagaaaaggctagtgactgcgcctgtattaattttgcctgatacgaggaaaggtttccaagtgtattgtgatgcatcccgactcggtttgggttgtgtgttgatgcaagaaggaaaggtggttgcctatgcatctaggcaattacgtcctcatgagaataactacccaacgcatgacctggaattggcagctgtggtgcatgcattgaagatttggcgtcattatcttttcggtaaccgtacagagatatatacggatcataaaagtttgaagtacattttcactcaacctgatttgaacatgcgtcagcgaagatggttagagttgattaaagattatgatatggaaatccattatcacccggggaaagcaaatgttgtagccgatgcccttagcaggatgtcacgcccagcaattcactagtaatttccgaacttatttgtgcataaaatcctcgtccaggaatcagccgaggtacacaaactgacaatttaatatacaaatctatcataataatatcggtaatacttacaaaagaaaagaaaacagcaacggaaaaataaaatctagcgaagcttcggctctactcccacaggcagctcagctggggtataagccaaacgtcttctccttctggatcctttatcttcaactgaggtttgatgattattgcaagaatgagcatatgacatactcaacaagccacacagtagatatgcaagtgcacaaagataccaaaggatggcataatataggctcatttgcaaaagcagcatttagcaaaacatttaagagaaataaaacagcggagtaataatcagaaattttaattaacactgaacaagacacccatgctggacaggccccaccattctggg

SEQ ID NO: 8115 - DNA, 24255 bp, Oryza sativa
  unsure (1)..(24255): unsure at all n locations
ctttgttattttgtgcacttgcatatttgttgtgtggcttgttgagtatgttatatgctcattcttacaatattcattcatcagaagaggagtatctcagtgaaggtgatgatctggaggattaggcttgttctcggttaagttgcctgtggagtggagtcgccatcgctgttccgtagattgttttagttttatttttccgctgcgtagaatgttatttttctttgagaggaactatctacctctgtaataatttattatttgcgaatattaaatagttattcatttgtactctattatcaatattgtcattgtgtgcctcggttgattcctggacgagggtttaacacacatgtaagcgtttggaattttggatagaaattccgggcgtgacatttatcccggtgcactgtgcacatgcccacgggcttctaggagatatgatccgggcgaccaagggtgaggtgtgcggctagccatggttcgttgtcgccttgccagagcgcctttagtcatggatgccccaactggctggtccctcgtgaacccaagactggacctctcttctttggccatttggccatatggtattctggtccttaggcttgctgctgtagatgcaccagcggaatcctggtgacatctcggcccaggacttaataaaattaatagaatattcatatcaataagttgtaacttttttttcggaaaccgatctctaaggaactctgaagttgcttggcctggagcaatttagggacgggtgaccgatcgggaaattcttctcgactgagcacaaagtgcgcagaaaagatctgtgagggcagtctatgacctatgtaagcgggcctggcctaggagaggcggagacgttacaatcctggagaaaatatgtatcatggaaactaggtatgtattgaaaacttggaaactactgctcaattgaaaaaattttactcacggatttacttataagtaaaaattttactcgcatattttctccattatcagcgtgaaagaaatatgaatccactgcggctgtatagctgtaggccatagcatagctgcaccgaagagcctcaatattattgtttttaataacgactaagcgtcaaattgtgcgttgcacgatattgttatattacattttaaacaatattaaaaaaaatctcttgcttaaattttagttccgacaaatgtttcaatttagtacttttttacaaggaatatttttcttaatttaaatttctttagttgtgaaattataaattactaaatatcgatatcgagttatacttgtatgtttttcactatacaataattttaaaatttggaactatccaatattgagttgggcttttgcagatgatatggagacaaaaataattgtggctttttatatgattaaaaaatacttcctatgtcctataatataagggattttggaggatagtgctagaaagtatcacatctctctaaaatcccttatattatgggacggagggagtagaacttatgaattaatcattaatttttaacgtagagtcttgttttgttattttcttaatgcaataatttcgtaacttggaatcaataaagggagtatctgaaaaacttgtcacaagtttcttgagtcaaaaacattcagatgtaactataatatcatgaaagtgtaattatactgtaactgcattataactacattgaaattacaatataatttatataacggtttggttagctagcactaaaatcttacgtgtgatatgtgtgaaaatttctttctagcaagtttttcctttcatgcagaaatttcgaggcaatccaatggtcacaaatctgaaagttttgggagcaaaaaaattgcaaaagtttttaagcaaatccaatcaataaaacatattaacccgtactccctccgccccaaaaaagaactcaattctagagtttgaattttgttccaaaaacataaacttctaccatcctaactaccttcagcacctaaaacgataagttttatctcttaaatactctttatctaaatatcatcattactactttttttcaataactagaaaggaaatccgcgcagttgcgcgggtaatttatttgttgtttataaaaagaatgctaaaaaaagttatatctcaccatatttactataaggatcgtagattaccttaattatactcataaaaaaagaaaaaaaacactttattctgcttacatatatggtcgcctatggccactacttattttcattgtcggtgtctttttaatagatagaattgcatttgtacctaaaaataaacataatagatcattaataaaatgagaagtccttcttcacttcgtaccaaaataaaatgctcatgtatgacttgtgtccaaatgcatgtataaatatttaaaaatatcatttttaccaattaatagataaaaccattaaaattagatataaatgctcgtctaatagatgaagcatagtataggcgctatggctttctactatgatggcttgaaacgatgtacccatcttccttaggaacagtatgaagcacaattttaacatttaagttcattgttagtacactcataaaggattgcatggtaagaaagccagtcgagcaatattgccaacagagccatctcaactcagcaatactatcatacttattgttcatacattgcaccctttacggaatgattaagagaaaatccaatagcttacgtcctgagaaccacatggaataatatttactcaagctataattcttcataaacatatgagttaatatgggtcttattattgttttcctttattgtagatcttactcatccatgcatgttcaacgtttaatatacgataaaataatctatgctgtcattttttttaattgttaagacaatttcgatgagaatgacatgaaaagagaaagaatatgttccatgtgatatttttttaataaaaatgtagttaacatatttttatttttatttaaaaaaaaatgaacaatcaaggttcgtaaataaatattgctgatcgccaaatctgtgaaaaattgctgatcttaatttgcttcttccaattgtccttttgattgatggattgacctgttggaataaataggctaggcccaatttaattcattaaaatctcaagaggccacaagtaatgttagagagaataatactgtcttgaaaatttagatagaagaacctcaacttaaatagggtgatattggagattccctgttgaccggttgaggtgatggttggactgccacacgcatgcgcgcgcgccgagtcggcctcggccgtgggcgtagcgaggcgaggcggccgaccgagccgagcctgccagctgctcttccgttttgtaacatacgagaataaagtcaccattaacgaatgaaattcattgtgttgtaacctccacaacaaaagagaggtttatttgttgtaaccttcacaacaaatgaaatttattttgtggtaaccttcacaacaaatgagatttatttgtgtggtaatggagatctctctctaaatataacacaagacagaggctctcaaagagtgtgtcttcctacgttccttggcgatactctccttgtgttcctacgttgtctctctgtttccccagttctgttcatctcgcgcgcacgggtgatcggaacgagcaggtgcctccgaaactccgtcggcttgagaacctgcacgggtagacgggcgatcaagtttttgggtagcacttcaagcgcgactgctttgcatcatcttcaccaacatgtcgacaaccggcgacaacaacaacactggagacaaggagaaggagcctctcgtcaacaccaacggaggcaatactgcctcaaactccagcagagggccattctcgggatataacgtttcactattaccgttcgttcttcgtttcctacaactgtcggtcgcagtattattgcgttctcttatctatgttgatgcttattctatattaagcatgctcatgttgtacacatctagcactgtcactagatctactcaaattacaaatgtcatgtttattgtcttaatattttagactaaaatatgccgaattacgaccaaatttccaacaatccaaaaacttgataggtctttttcggtagttggctttgttgcatcactaaaaccacatgctttcgatggttcaaattataaaaggtggaaagcacgtgcacttttgtggttgacggtgatgcaatgtttctttgtttcacggggcaaaccgagtgaaccgccgctctcccctgaggaagaggctaagttcgaggttgcggattgcttgttccgtggagcattgatcagtgtgctcgccgacagtattgtggacgtgtatatgcacatgccttcaaggaaggacatgtgggatgctcttcaggccaagttcagggtttccgatgccgggagcgagctgtatgttatggagcagttctatgactacaacatggtcgacgaccgttctgtagtggaacaggttcatgaaattcagatgctggcaaaggaacttgagaacagcaactgcgagttgctgggttgctggacaagtttgtggcgggtggcattattgccaaattgccaccttcttggtcggactttgctacttctctaaaacacaagaggcaagagttcagtgttactgatctcattggctctttgggtgttgaggagaaggcaagggcaaaggacaaccggggcaaaaaaaagaacgatggaggttctagtgccaatttggtgcagaagaagaaccctcacgcatctcacaacaacaagaagaaagtcaaacctgacgtcaaacctaaggctacaaccaattttaagaagaaaggccagggaaaggcaaaagtagatttctttgtgtgtggcaagcctgggcattgggccaaggattgtcttgatcgcaaagacaagaagtctgccaacatgatcattagcgagggcggaggaacatcggggtatggtaaatttttacctacagttctctgtctgtcactcacctgattggtgggttgatactggtgctaatattcatgtgtgtgccgatatttccctgttttcttcttatcatgtcaggagaggttcctccttgttgatgggaaacggatcgcttgcggctgttcatgatgttggtacagtcgatctgaagtttacttcgggaaaaatcgtgcagctgaagaacatgcagcatgtcctttcaataaagaagaatctagttagcggctctctactgtgtaaaggtggttttagacttgtgtttgaatccaataaatgtgtcgtatctaaatatggaacatttattggaaaaggttatgactgcggaggcttgttccgcttttccatggatgatatgtgtaataaagttgtgaaccatgtaagcgatgatgatgatgagtccaatgtgtggcattcgcgacattgtcacgtgaattttggttgtatgacacgcttagccaacatgagtttaattccaaaattcactttagtcaaaggctctaagtgtcatacttgtgttcaatcgaaacaacctcgcaaacctcacagggcatctgaggtgaggaatttggcaccactagaacttgttcattccgatctgtgcgaaatgaacggcgtgttgactaaagggggaaagaaatatttcatgagagtgatagataattgcactagattctgctatatgtacctattgaaaacaaaggatgaagcattacattactttaagatcgataaggctgaggtagaaaaccatctggaaaggaaaatcaaacggttgaggtctgataggggtggagagtatttttccaatgagtttaattctttttgcgaagagtatgaaattattcatgagaggacgcctccctattcaccccagtcaaacggggtagctgaaagaaagaaccgcactctaactgagatggtaaatgccatgttagacactgcaggattttccaaggaatggtggggtgaggcaatattgactgtgtgtcatgtcctgaatagaattcctactaagcataaggaagtaacaccattcaaggaatgggaaaggaagaaattaaatctctctcacctgcacacatggggttgtttggtcaaggtaaatgtacctatagccaaaaagtgtaaacttggacaaaagaccgtagattgtgtgttccttggttatgctatccacagtgtgggatataggttcttaatagtaaattctagagtacccaacatgcgtgttggtacaattactgagtccagagatgccacattttttgagaatgaatttcctatgaaaaatgcacttagcacttctagtcaagaacctattttatctcctgagcactttgtgccgatagaacacattgatcaaatgcttgaggaaaatcctgaggaggataacattgtagcaactcgaaagagtaagagacaaaggactgcaaagtcttttggagatgactacattgtatatcttgtggatgatactccaagaaccattgaagaggcatattcatctcttgacgctgactattggaaggaagcggtatgcagtgagatggactcaattatgtctaatggtacttgggaagtcgccgagcgtccatatgggtgcaagcctgtaggatgcaaatgggttttcaagaaaaagcttaggtctgatggtacaattgaaaagtataaggcaagacttgtggcaaagggttatacccaaaaagaaggcgatgactttttcgacacttattcaccagttgctcgcttgaccacgattcgagtactacttgctctggcagcctcttatggtctactcgtccatcagatggatgttaaagacagctttcctcaatggagagttggaggacgagatctatatggatcaaccagatgggtatgtactagaaggtcaggagggaatggtgtgcaagctgttgaagtccttgtatggtctcatacaagagcttaagcaatggcatgagaagtttgacaatacacttacatctgctggctttattgtgaacgaagctgacaaatgtgtgtactatcgctacggtgggggagagggagtgatcttatgtttatatgttgatgacatattgatctttgggaccagtctcaatgtgattggggaggtcaaggactttctgtccaaaagctttgaaatgaaggatttggaagtggctgatgttattcttaacattaaactactgagaggagatgagggtaggattacacttgtgcaatctcactatatggataaggtcctgagtcgctttggttatagtgactgcaaggcagctcctactccttatcatcctagtgtgctattaaggaaaaaccaaagaataggaaaggatcaattgagatactcccagatcattggttcattgatgtacttagctagtgcaacgaggcctgacatctcatttgttgtgagcaagttgagccggtttatttcaaatccgggagatgatcattggcatgctcttgaaagagtaatgcgtgctatctaaaagggacaatgagctatggaattcactacgccgggtacccaaaagtactagagggctatagtgattcaaactgggtatgtgttcacacttggagggggcgttgtttcctagaagtcttgcaagcagaccatcttaacgaggtcaacaatggaagcagaactcacagctttagatactaccacagttgaggccgaatggcttcgtgagcgcctgatggacctgccagtggttgaaaaaccagtaccagcaatcctgatgaactatgataatcaaacagtgattattaaagtgaacagttggaaggacaacatgaagtcatccaggcatgttaaaagaagattgaaatctgtcagaaagcagaaaaactccggagtgatagcattggactacgtctagacggctaaaaatctggcagatcagtttaccaagggactaccacgtaatgtgatagactgtccatcgagggagatgggcttgagacccacttagagttgcacaatagtggaaacatgtccattgtgatcggagatcccgtgaatttggatggcaaaacaaactattgtgtagctgagagaagacaccctaaaataagcttatcttcatgatgcaaatctggcagatcagtttaccaaggggctaccacgtaatgtgatagactgtccatcgagggagatgggcttgagacccacttagagttgcacaatagtggaaacatgtccattgtgatcggagatcccgtgaatttggatggcaaaacaaactattatgtagctgagagaagacaccctaaaataagcttatcttcatgatgcacttctcttctaatctgtatggtaggatggtatacaccttaatgtgatccgagtggcttttcataaagcagagatgttggcctacagaacatcttagaaggaacatacatatatgagtccgactgctagtcacagtctatgagatctgggtgatctctagatactcatgaaaaggccaggagtatgacttatatgctccaaacagaggggatgcaaacaacagcccagtaccagttaaggctttagtgaaacctgaatcgcacaagactgacatttcaaggcatagtccattgttcagttgtgatatggtgtagctcttttcctaggtggaagttcaacttaacagtctccatcgaaacactggtataactagacattgttcagttgtgatctggtaatggagatctctctctatatataacacaaggcggaggctgtcaaagagtgtgtcttcctcctaatattgttccttggcgatactctccttctgttcctacactgtctctctgtttccccggttctgttcatctcgcgtgcacgggtgatcggaacaagcaggtgcctccgaaactccgttcgctttagaacctgtacgggtaggcgggcgatcaagtttttgggtagcgcttcaagcgcgactgctctgcattaacttcaccaacatgtcgacaaccggcgacaacaacaacactggagacaaggagaaggagcctctcgtcaacaccaacggaggcaatactgcctcaaactctagcggagggccattctcggggtataacgtttcactattatcgttcgttcttcattttctacatctgtcggtcgcaatattattgcgttctcttatctatgttggtgcttattctatattaagcatgctcatgttgtacacatctagcactgtcactagatctactcaaattacaaatgtcatatttattgtcttaatattttagattaaaatataccgaattatgaccaaatttccaacatgacctagaggactccaaccatggcgaaaaaggtggacactgaaccacgccagcttgctgtgtcgtagaagaagttgggtatggcaaaattagcgtgtgaccgtgtgatcaacggcttaacgcaccctcttttctggagatacgagatatatacggagatataaaaagtttgaaaagttaattcaaagtggacctttgctttaggatacgtgatggaatagatggaatttttttccacgtagagtaggatacggtgtaaaatgtatcggatggttgaaaataaaataaaactgatggttgatatctttttgtcactacatctaatctaatctaatggtataaattatcaggcccaccgatttaaatgaaaactgatggttgatatctttttgtcactacatctaatctaatggtctaaattctcgggcccaccgatttaaatgaaaatcgacggtgagattacgcattgccatgtggcggtctaggagcgtttgtagaagtgtcatgtggcggtgttgacgaccaaatttggtaagttgtgaaccaggttcgacattaggatcgaggcggattcgataaagagatggttttaaaaaacaaagtatgcatcggctgcgaaggcatcggctgagatggatcggatagaggacagctgatacagccgatagaagtgatgcagccaattccgatgaagatggtttcaaggttgtttctagaatcgatcaaagtgcttcacagggattgccacgatgaagataagctctcagataggcaattgtatctgttaattaggatatttcgtgtaaatttcttagagatatgtttgggcaaaagtctaccgcaaagacttatggtatcttagagtttgttagaggtaagctttgtgatctttgtgactcatagtctgatccgctatgctataaacgtttataatctttgtgttaatgtatatttcgatctaagtgatttatactgtctcggcattacgaccgatctatcgcaatcacttggtttaaatatatatcgacagaaggattgtatatcattaatatctacagccgatcaagtagatttagtcttatcttatttttctataactgtcgatcgatctcaatatgacatcggcttaaagataaataatatgtcatcggcggctggccgatcggctatcgtttatggatttaaccaaggttttcttgtctttctttcttcttgattgtaggatcaaatcaactggcacgctcacgaacctaaaggcaagattggacctgcactgaaattaagcagatcttccaggccagtgtgtatttttcgtatcaacgggcggcttaagagcgtttgtagaaagtttaatggacttttagtatataatagatgaggggcattttggtcgcttttactcttcactaatttcaccttgggatgctagagatggtctttttttgttgagacaggagtacttcttcagctagcaggtttgccagaatccaataggtataggtggacctcttattagctgacgcgtgtgcgagggaaccgacgctcgtctggacggccacatggggccgattatagatggccaaatgggcctcccggcacggtacgacccaggtatgagtgggcccgtgctgaggtcaatcgggctgccacgggccaacctacacgcaggaccgggccgtgcttgcccacaagctataccaaaggcccacgtatggcccgataagacacgagccgtgcggccgtgccgagcctggccgaaggacgacaacccatcgagcttctccatagaataagtctatttttcctccctcatctatttgggctatgccttatatggctagaataagtctattttgcataatctatgctctttgggccatgtcttatatgtctaaattaagtctattttagatctctgaactatttttctttgacagtgctgtgccggaccagcccaccgtgccaaggcatcaaccaggcacggcccaactatcaggccgggccagcacgggcccaacaccagtcgtgttgtgtcgtacatgggccaggccaaatggccatgccatgggccagggcgtcgggcctatggccatctatagggccgatagttggggtcccgtccagaagatgtggcttttttcttccggaaagagaagcgagaggggcatagggcagagcattagcagcatgtcctctcctcatctgatattgttggtgatgcttgccaaacaaattccagagatttggaatttcagcaagattcattcatttgtcaaggaggatgtgctccatctgctatgagcttactttttttttttagagaagagtaattttttacccggcctttacatccaaccggatatatacaacattttttcaatcgggaacttagcccatcaaacaggaaacttagccctcaaataacttaatctgaaattcactccaatggagatttgaacttagaaccttggggatgcactcctatggagatttgatacatgccctttcacatgctatgcctttggaacgaaccggagacaaaatgtattgatccgaatgatataaatcaagtgaaagacccaaaaaatgtcctagtaaaagctatcatttcattgaacagagggaggaaattgaaatcaaagaaaaaacacaaaggaaaacaggataaagaaacatacagttcaacaactgattataaaatcaaacccccaaataaccattcagtggtatatatttcaggtagttcccaaaattatttctagcaatttcaagaaaattaatgcggcatgcccctttatcctcttcaagtcaaagcaagcaatcgcccatcttcagcttcatgtagcagcagtcaacaatttaacatgcatttcctcatagtcatagcgtagtggatttaacagctggtgacatgttgttttttgattgattgagcacaggctaaccatccacttcttttacctgtgggaatgattttcacctgttctctttagcttatgtcctaattcctgacttacaaatgcagaggatatgtcatgacatctagagcttgtcctctttacattacaggcattcagtctaaattaaaattcaatccaaaatcaaaattcagtctacaccactattaatctagtgccaacttaagaaattcaaaacgacctgggatgagaatcgcaaacatattgcaggttgattcataaaagtcggatcaccaacatcttccacttcctcatctcgcaacattttgaagtccacaatacatacataaacagcagatgcaagattctactacagacaatgccatagaactcaagaaacatccatgccagttgcttgcttgttcagtgggtgaaggtgtagaagacggtgccgacgtagacggcgagcgcggtggtgacgaggccgacgagccctgcggcggccttggcggcggcgcggttggtggcgcagccgagcgtgccgaggcggatctgcacgaccatgaccatggacaccatgaggaagacgcagccgacgacggagccgacggcggaggcgagcatcccgaggcggaggaggcgcgcgtcgatgtgggcgtgcagcgtgtcgtgcgggtccttggagttgatgaggttgagcgccagcttgagcccctgcgccacgaggctggagaagaggaaggaggagaaggccaccacctccagcaccaggagggaccgcgccaccccctgcccggcgtcgcacgacgcgtcgccggcgaggctccggagctcccccgggtccgccagggagaggcccacgaacacggccaccgtgaacagcgagttcacgttcaccaccccgtccagcgccgtcacgtgcacgctcgtcgtgttcgccgacagcgccgccggcagcttccactcgtacccgcggtgcccgccgccgccgccgccgttgctctgctcgtcagatctggtccgtgataagcatcattggatcagcactgaatcgagttcttggcgcatcttatttcaagaaatggagttcttggtcgaatcgaacaacgcaaagaggggattacttactcatccatggcgttgatgcgaagaggggattgatttgctttgctggttgggaaagaagagatcgatgttttgaggaaaaaaaaagaagggggacagtcgaatcgaaatcctgatgccttgtgccgaccatcaacatgggaacatattagcttttctagatactccctctcgctttgcattttttttttcccttccattctggagtacaagacattggccctgttattttctcctaggaaaactgcataatctttaaacggtacacgcaaaactgcacacgcttttcaaactattaaacggtatgtttcgtgcaaaaattttctatatgaaagttatttaaaatttaagattaatctatttttcaagtttgtaataattaaaacttaatcacacattattataacattattttgcgtgaaacacttaatttttatcttcatcttcattttcaggagattcaaacaccaccattgtaaacttcatttatttaattttaaattttttcattaaatatttatgaattcatagaaatgtaaattcctattttattttatatttttactcacttaaaataatctcctcatagaggaaacactaatggtaatatatggtgctgaaattgtgggtatggtgtatgactctattaaggttcaaatcaccaaaatttgtcacaggacattaaaacaaatatgtaattaggtgtgttaaatgattatagtgtgggtaaaggttgtgtttacaggtaactagctgtgcggcccgcgcaattgcgcggctagcacccaaacaaaattatatattttttaagtatgattttacttaaaatttattaaatagctatcccattgttttcagactttgaaagaccaaacattatcatcctcgtgtttctaattatatagtttttaaaagtcacaccagttgctacctctcatgtcatctctttatttatttgcttgctcgatctaccactatttctattcattctccttggaaatatttaaaaattggattttatagtttttagaatttattgtcacgttggattttgtttttataatttctagatgtcccatcaaatgtagccattatacttctctacggcccgtccattgtctcttctctttattgtcattgagattttaaaaatcaaacataaatactactttctagaaatccggccaaaccgtcagtggctttgccattgtactccactacgcctcgcccactgcctcccttctttattgtcattgagattttaaaatcgaacatgattatcattgttttttttttactttttagaagttccaaacctttaaaaattggaccttgtagtttttagagtttattatcttgttgggtttcattttttataatttttagaagtcccgtcaaacgataccactatactcctttacagcccgtccaccgcctactctttattgtcattgtgattccaaaaatctaacataactatcgttggaattcattttttattttctagaagtcccgtcaaccgtcggcggctctacaactatactcctatacaccccacccgctgcttctcatttttattatcattgagattttaaaaatcgaatatgattatcaattgggtttattttttttactttctagaagtcccggcttccaccttactcatttgcttcacgtcctgcctatcgtccctcttttaatcgtcattaggatttatttagtgttttattaatattttttaatatcgtatcaaccgctaccactctactcattcataggccctattactcaatttatctcgtcatgtgttttagatggctttttctttcaatagtctttatttttatcacaaaatttagttatttataaattgtattcctaactcaaatcttattttcctttttctaattttagatttttttttcaaattttagttaatatcgtattgtgttcttttaatatttttactttttattttcagttttagttgtttcaaaattgtattcctacttgaactctcttttagttttcctaattttggatattttttttatttttttctgaattttaattaatctcgtattgggttcttatatggattcttctttcaatattgcttttttttattccgaatttcagctaattttaaattgtattcctactttaactcttcttttttttgctaatttcagatttcatttttatttttattctgaattttaattaatctcgtattgggttcttctatgaactcttcttttaatttttcttatttttaattccgaatttcagctatttttaaatcgtattcctacttggactatccttttcttttctaattttagattttattttatttttatttcgaattttgattaatctcgtattaggttattatatggaaacttctttcaatattgcttatttttaattccgaatttcagctatttttaaattgacttggactctccttttcttttctaattttggatttattttatttttattttgaattttgattaatctcgtattgggttcttatatagaaactttcaatattgcttatttttaattccgaatttcagctatttttaaattatatttctacttggactctccttttttttctttttctccgattaatgtaggaatttctagccctacagcgaacgtggtgcctcctttcaaaactgttttgataatataatagatggttagtaacttattcctacactaaaaacaagttagctcattattagtggatgattaattattttaaaaattagattactataattttttataacaacttttctatagaatttttttaaaaaaatataccatttagcaatataggaaatgtgagcacagaaaagaaagatcgaagtttcaaggaaaaggaataagagggacagtcaaaagcctgatgccgagcgccgaccatcaacatgggagcaggggcgggcccagtatgtattcaagggtattcagatgtatacccaagatttttggacaaaaaataggtatatatattctatagttcgtatatgtattcaaaaaattaaaaaagagaccttaaactgcttatattgggccttgtttcatcatttcttctcaattgggcctaaatttctcactcccctccccctttcctctcagcccgcactctatttgggccgcatatcagcccatttcgatattttctccaattctcctccccatttaaccctaatcacctaatgcccaaaccctagaccacgggagcagagcggcaggcgcggcgtgcggcgcggtgtgttgcggcaggcgcggcgtgcggcgccggcgcggccgcgcaactcgtggggcggcaggcggctgccggctgccggctgggcgcaccggacctgaccggcgcagggcggcaggccccacgagcaggtccgccatccgcggcgcgtcgcggctcaggccactgccgacgggcagggccgtagcccccagtgcagcaacgcgtcatctcgccatctctttgtcagtagttccaatgccgctaatcattatttgctacggatttaaattgtgttagtgtgacttgatcaatagagctataaggtcaccctggtactgttaggcatttaggccggcttgccattggtcaagaatctagaggcattaatcccattcccatattgttggatttttaggtctaaaatatgaagagaaaaaatggtcttgctcttgaacaattgttcatgaattctaaatcagtaattcatgagtcccttgcctcaaacactgcacaattttcaatcatctatatatttcacatattgccactcttatgtgttgaacaattgtcaaatactcctttttgtcctataatatgagggattttggctatgcatatagccaaaatctcttatattatgggacggtttagtactttctatttgtacaattagtagtttaaatcaagtatataattatatgaaattatacctaattcatgttacataatttgtagtttagtactatgtgatacatgctaaaaaaattactccttcacatttcgaatacccaacctaaaaatcctaggcccgccactgcatgggatgggagcagattagcttttccggatactccctctcggtttgccttggtttttttttcttacttcccattgggtactgcacaatttgtatattggattttacctgtttcagtcagtcaaacatttatacttaaaactatatcaatacaaaagctttttaagtactaaagttattttgagatatcaagtattagcatttgtttatgtttcactcttttaaaacggtccataaataagcaaagcacgggttatttaatggtggccaccagggtttaaaagtcaaatcctactgccaataaaatattatgcacaggccagtgcactttcaacactgttttaatgagggtagataaaataccattaaactttatgccacaaatgaaagtacatcttcataacttatttttgtgattaatgatgacatttttaagaatgctctactgttgcctgagtgcttcaaaggaaaatggggttctgggttatttgatggaagaaaagacatgatcctagacaatggtaattcttgtatgtatttatttcttgagtctagataacgtacagagaatatagtgctcaatatcaagttttctctaagtttgagttgatttatggtcggaatttctgacactagtcggagtatttaacgcatcataatttccttttttcacggtgaactcgaggctctgtttgtgttttgttgaaagtgatcatagtataggctctgtttgtattttgttgaaagtgatcatagcatctgatgtaacattggaaaatccgatcaatcaggctatatgtttttgcaaggaactggatctatgtttaacttcaaacattcgatcaaaaacttcttacgttgaatcagaatgtccaacatcccaggcaatccgatattgcaaagaaattggctctcaggtcgaggcaacattatgaattataatatccaacttagtagtctgaaacttagtagtctgaagatcaaatggtcgaaatattcacttttccttgtaacccaagtctctgtttggatttatttcttcaatctgagtttccaattattaattggaatatctgatcagtattttttttttatggaatgggattatgttttagacattagagacctgatatgttgatcgaatatataaccttcaagtcagaatatccgaggtgtgatgaaagatcctcccaccccataatgggcagatttagggtgatgaaagatcctcccaccccataatgggcagatttagggtttcctatataagtcccaactctcactggctctatactagggtaagtctttcgcttcattcaaaatattcttggcttcaagcatgatgttggagtgcttttagctcttttcaccgcctctctcgaacccttctctgcttttgttatttggatacggatttggagttttgaatctagtgattgttcttctctcatggatcttgaacactaggttttgattccaaacgattatgtaggatatgttattcttggaggtcgaggacacctgtagcatcatctgaacacccattcacgggtagggcaccaaaagaagtttgaaggatccacaaggtaagagatactaccaatgaaagagaagtgtgcttgtgcaatattgaggatagggttaaaaaagactggctctttgtgagtttctcaatagagacattgaatcctctcaatggtttgaactcagggaatacattgttggttttaagacagtggactcaatttacactgctttataagttgaggtgctctatatttggttttgcgatttttaggcatgcaattgaaactcgacacttgtttgagggacccaaactgtacttttatcaaacaagaaaaaggagtagcccaaagaagagaaaagaataaagaggtggaactatggaagtgggctggtgggaaaagaagaggaagaacaagccaaaaataacccgagactttggagaatgattttaatttaaataatttctgaaatgttgtttcattttttaaaaaatactcagcatgctcaaaatgattcatgaatattgcagaaaatattagagaatgcaaagtatttaataagattttatctagctcaatttgaagtttaaattttgatttttattcaagcatttcctttaattattaaatgatttctagaaattgattttccacattaatttttaattaggatatttttagagtgtgacatgttgaacaggtctgatcaccacaaccattgacagtaaccaagaagaggaggcctagggtgattgcaagggctagggatgctgaaccaaaaggttgatggttgcgtatgtacacttgtgaaaggtgtgcaaattgctactacctctgccacagaatataagaagttttacagttggatatggttattaaaaaagtaggtggaattaaattggaagatgctgtgattggttaaaaagtagatgacggtggaaaaagtgaatggtggaaggttgtgactggttggaaagagaatttttttagtgaagttgggaagagaatgttggtagagaagttgtcatgttttaggataaatcctgaatgctaaaagttgttatattattgtgagtaaattgcacccatggtataacaacttggcagattggtgcgatatagtgcaagaacttgagaattaaacgtccgagtgcaataacttgacaagtaggtgcgttttagtacaagaacttaacaatttagtatttttgtgcatcaactaggctaagcatatgctaggtgagttttttttctcgatgtcaatatgccattacataataatcatacggatattatcttataatattgaatttaatctttaaaacttatgtagtacaatttacatctaatttactttaagaacttttttagttttcttcaccttctcaaatatcaaccaaaatataataatttctatatccggattaattgacttttaattattagttattaggataaaaatataaatatacttatacaaatccatgatagtatattgtcaaaataagtacttaaaaatgaatttatataaaaaatgctccaaataattaagttgccgcataacctttttatttgttctatgaaaatcgtacctaacttgcaagttgttgtatttataggatcacttataaaattcttatactaaattgcacatacctattaagttgttgtaaatgattatttctcaagttattgcaccaaattacatctacctgccaagttgatgtaccgtggatgtaatttactctattagatgagtacaaagcttttacatgttacctatcagctttgtgttttgcttcactaaggtgagatatatatatttatagacaaatctagtgaagcatggtagcattcaaaaactgtggatcattgtgctcacaggaggaggtgatcagaatataatgaggtgtctataaacgaatacgtgcgtgcaatgcatgcaaattattcctatacatctagccacgtacgtgtcgcatccacgtatgttatagatcagagcagttgactttagttttatgaaaaacttaatatttagctggttaagtcagtgtgcaagctactgtttaaaatgattaattgtattagtactttctttggtaacgtttagcgtaaggcttcaacaaatgtttgaaagtttggccatcaataagtttgaaagttagttatttaaaaaaatgttttgcatagatttgttaggaaaccgctatcataatatatatatcataaactttttatattttataatctttttctaatataaaatatggtcgcgtcaagtttgaaaagtttaaccgaatatttttttttctaaacatcaaatatatatttatgacaggatggtgtatcctctatcatggtacaaggaactctgacattgttctacaactaacatatttgataaattgatttgagtgtatatacaagggctattgttttgatcttgattaaagacattatgtgttgtaagcatttcaccgattcatcaaactgtattgtatatatgaaatatattattataatttttcaagtagtataataatgtaaaaatatacaatacgttaacactaatttaatttcagccaatcaggaaacatcacagccctaaataatgatcatttgacaatagcaaagtatttcataactatttgtgatatgaaccatatatactgtattacatttccatgatcattctcattatgactgcccgcttagtaaagttccattctgtaaaaaacatattttgaaattgaaccggcaatgaggcagtttcaagaatgaaccaacggttaagccggctcgccagctataaatataaataaaccgtgcctgtctatttatcccatctaaaagtcgctatctcccaaattccccatctctctagctcttacccaccacctacattttgctcgcccactgccgcatcctctctttcccaagtccagccgacatgcccctttttctagcaccgcttccacaccctcctccctatactcacatttgccacctccttttccccatccccgccatcggacccctcatatcccatgtctaagcatagacaccttaacttcctaagtcttggcaccagcccctcctttgtctctctgagcatagacattagcgactatgggccttatatgactagcatgtgctcaatgttgccagatatggctgacacgagcttagggcctctggatctgggtgtgatcgatggcaactatgagatggttgttgtcaatagcaacatcgactgcagcgacaacataaataaaggggggtttggaagggctagtagagttggatgggaatggcaacgacgtctgcgactgacttggcttagggagcctgtagtcttaactcatcgtttcatcccgtgaattgcgtgttgcttcatctcctcggcagtgaagggctgcgagtgtgctgattgatctcctggtaatgttgtgtggcaaatcacgtgttccgaagaccagctgtgacaacaactgactggtatacagatcgacaaatagccatcacgcttaggtccatgcataggcgaatttttccaccccacttttgtcattgtctgtgctcagagaacacacctctatgctgggttcgttctacaaacacctaggaggctgagaaccatctatgaacggagaaaatctaattcaaaacaaggtggaatatttatcagtttacaatattttatctttcctactgtggccaaattttaagctcatgcttatgacctttgtactgccaaatttcctatatctcctgtccttcaattgtgcagtccagaatagggcagcgcatatacatggttttgcgtgaggtggcacaggaatcccaccggtgacggtgatcgatgccgacaagtctcatcgcagttgtgacatgcataatcagcggctcagcctcgtccccatcaattacggtatcgagtatcctccgtcccaaaatgtaagcatttttagctatgtgtccagattcatagtaaaaaattgctatattttgggatggaggtagtagctttctcgacattgtcttgtctaaattgttgatgtggttgttcaacatcgaatcaccaattgcatcccagttgtttttccatatagccacatcatgatagcatgactaggggatgcacattttttttctaattgttagatttttcagtcctttgaacttctaaaaaaacaaaatgagttcggaactaatttacaatttatagtagatctaggatgcacaaaaagaaatccattgaaattttgcaagctcaatcctcttttagcaaacaaaccattggtaccatttatttcattttcatgtgcaaattagtccaactagtgccatatatattttcatgaaatgtgcttcccgaggctaaacaataagcacattagtaatttatctagttgaacaaaaatgcatacacaacatgtacaacacaatacaaagaaacaacccaacagtgcacaaataaggcatgcattctttcaatggaaagggaacatttattcataagcacataaggctttgcgatattacatagcactcactggaaggtaacagcaacaacggagaaaacaaacacattcaggaggtgcatatatatatatacttagagtgggcaagtgaagccaggagggcatgtcctgttgcatgagttaagaatgagagtgacatcaactagaacgtctacgttgataacaccaaggatattcgccttaagagcagcgcataggcaaagcgctgcatccaggtcagcgagcccttgaagcagtgtgcagcactgcgaggaaggaacatttaagctgagcacgttagcgcacaccgcaaggttaagcacattgatggggcatgtaccccctgttggtgttggcacagcgggcggcggtggtggggatgggtttgagcagctcgtgtcaccacagccattggcgacctccactgagagaaggctcatggtgatgacaatggcgagaagagctgcagatttgagagccatggttgaagtttgggcaaatgtatgtgtttgtgtgcttggttttgctggatgttgagtttgtgtcaatattgtgatgtatttatagtagaaactggagatgcttcatccctttctacttgtgcaggaggaacgaggtgtccgtcagaccagattttgcgcgcatgcatgcataccctttcttgttgatccaactacgtgtcccagccacgtattgatgaactaatgtaccaatgataggcgattngacatcg

SEQ ID NO: 8116 - DNA, 1946 bp, Oryza sativa
tacaattgatgttcccgcaactttcccaacaccagacgaatggtgctgatggctttcctctgatggtgagtatatcagaatgtcatcaatgaaaaccaccacaaacttatccaagtattccatgaacactttgttcattaagttcatgaagaaggcaggtgcattggttaaaccgaacgacatcactgtgaattcatacagtccgtatcgcgtggtgaatgcggtcttaggaatgtcttcttcacgaatacgtaattggtgatatccggaacgaagatcaatcttggagaatacagtggcacctttaagctgatcgaacatatcatcgatacggggaagagggtacttgtttttgatggtgacttcattgagagctctgtagtcaacgcacatcctcttcatcttgtctttcttctccacaaaaatcacaggagcaccccagggggaactactcgaacgtatataccccttttatttcaactcttccaactgtttcttgacttcggccagttcatttgctgccatacggtagggtcgcttgtacaaaggagtggttcctggagcaagatctatccggaactcaatctctcgcttgggcggcataccgggtagttcttccggaaacacgtctccgaactctctgacgatggggatttctgacagtcctatctgatgaagttctgaactactgacagaggttgggggtgcaaagaaaacaaccggttgttccggccctcggtacagagtgacagtgcgtctcgcgcaatccactactccttggaattgagccaaccaattcatcctaaggatcacatccaagttcttggtgtctagaagaatcagatccgagggaaaaggaatcccctgaatttctatagggacggcatggctatagtactttgctgtcataacccctccaggggtggtgattagcagagggtttctaagcctttctacccccaactgatttccccacaatggcacaaatataaacgagtgggaagctccagagtcgaacaaaatggtagcagggatggaatggatgaggaacgtaccaacgatgacgtctggagttgtcagcacgtcctcggccgtcacgtggttcacacgacctcgtatgacgtccttcccaccgttgttggagcgggaaggcgctgggccttgctgacgcctcggctttgggcattaatccacaaagtgcccagcctcgaagcagttgaagcacaaacgctgttggccttgagcgtccttgcggccttgaccaggctgcacagttggcgtaggaggacggggcgcacgagtccctggttgattctgctgctgctgcggctgtgggacgcgcaccacaaattgaggtcggggcgcggagcgaggttgctgctgctgttgttgctgctgcgaggaggatccccctggatagggattggtgtagcggaccctttggttagcaccctgttgattgcggaaattcgccaagcggcgcttgtgcgactccagttccttgtgcttggcttccaagcggatgctcttgtccatcagacgttggaaatccggatagtccccggagactaggcgcacggacagctcagggtccattcctgccaagaacttctcatgcttttcctcatcttcccgtacatcctccggggcgtaccgggccaggttgttcaactcatgcaaatactccatcacagagcggttgccttgcttcaactctcggaattcccttttcttaagggccacgactccggcgggacatgggtcctccgaaaagcggcggtgaagcgggctcaagtaataggctgccgctctggctgtgtagcctggaaatggtcccaccataaagatgcgggcccctgcagctggtgggcggcgaagatgactttctcctcatcgctgcactgcacagtgtctagctttttccccacggcatgcaaccaatccaa

SEQ ID NO: 8117 - DNA, 1437 bp, Oryza sativa
  unsure (1)..(1437): unsure at all n locations
aagttgctaaatttttctaaaatcaagatctacatgttaaaaatattcacatgtactgtttatgcttgttttttactgttttgttgatttttattctttcgctttagtttccgacgttccggaggagagcgttttcgttgagcaaggttcggaagtgtttgcggaagctcaaggcaagtcacacagatcccaaataaccctttgagcatgttgaacccgtttaaagctattattttatttcaactatgcattattttttaatgtcatcgggtggtgagcctttccccgttaattaatggccgaagatgatcttattttcctatgggttataatttgattagcatgaaccttatatattggtttggttcagctaaatgctatatgtatgtttgcttagccatgcttagaaacattagctaattaaaggggattaaatataaattatattatattattcttattaattatggttatatttaatggtagctcacgatgataattaaaacctggttaaggtgggttgtgagcatatggttttgatggttgtgctcatggtaattaaggaccggttcgcgagctactgttgtgaaacatttaccgtgccaaccacaagccagcatgggcaacggctttaccttttgtatagcatggttcattatagtgtgccagactgtgaagcggcgagaagtccgtgggggtcgctggggagtccatttgcctctggttttgagggggagattatgatccaggaacggtgcactgttttgagttgtgttgtgcaaagagtattgtcacgatttccccctttgcaatgccgtggtggtatttcggngcatggcaacatgtgtggaatcgtgtcttgtgggtacagtggtacacctctggccagagtaaaactattcgaatagccgtgcccgcggttatgggcgagttgagcaatgtttttcgtgattagtctcacatctctcacaataattatggatgttatacctggtaataatttgcttagctcctggtttggagttaaatctgtacagccgggtatggttgttcaggatggttgggcctgtgcagcatgggtgtgctgttcagtgttgattaaaatttctgattaattacttcactgttttacttctcttaaatgttttgctaaatgctgcttttgcaaatgagcctatattatgccctcctttggtatccttgtgcacttgcatatttgctgtgtggcttgttgagtatgtcatatgctcattcttgcaataatcaatcaacctcagttgaagacaagttgcgaaggagaagatgtttggcttataccccagttgagctgcctgtgggagtggagccggagcttcggtagattttattttccactgcagtttttttcatggtgaggactaagtgcctcttaagtaagtatttatcgttttagttaat

SEQ ID NO: 8118 - DNA, 4463 bp, Oryza sativa
cgccgccgtcttcctccgctccggtcgccgttcccgtcgtcgccgtcgacccggggtgagccgtagaccgccgtttcgcttcccccttccctcccctctctcgggcgccgctccgccgcgccggtggtcaccggcggcgaccatcggggtgcgggtgcgccgcctcccgtcggctgtgccggcgtggccgccttcgggcgcgtcccgcggctgccatgtggggcccggccgtcagccgcccacgccctcgggtgcggctgacgcgtggggcccacggcgccggccggtgtgagccgcgtgcacccggtccaccgtggaccgtgaggctgccgcgtgggccccactcccgtggacccggtccgcgcgccctctcccctcggctgacgcaataaatccgattttaaattaaaatttaaatgaagaaattcgcaaatatccatttaaagagcatataaacttcaaatgaccataacttggccatttgaactcggaattggaccgttcaagtctctaatttttccttaagaagccaagaacccatttttgtgctttatttcggtttgttatatggagtttagtagagtaaaagccttttcttttccgttggtcgtgtagacgctgcagcttcggaagatccgctcttcgtggaagttgaagccggcgtttgggaaagcgagcaaggcaagtcacatcatctttgaacatattgaatcccagtttgtaaaattatgttgatttaacttattgcattatcgctttatttaaattccgcgttatcactgttttatttagccatgcctatttacctttgttatgaccttattattattgttattgttattattaccttgttcaccctagaaccaacaaaaccccaactagtggacactctactaatggtaccactagtatgatttaaggtagatgcttcgctttaattaggtaacattaggtggttttataactctagactttgggaatattcatatcacctggacactttggaatggtttggttattgtggaattggcttcacaccgctccttcttttcaaaatccccaaaatggttttaggctgggctcggggtgcatggttttgatagtagcacctcggccatataaggaccggtcttcgggcctctgttgcaaagcactaccgtacttccacatgtctagtgggtaaggcttagtttgtggctcagtctggttataaacaaaagtacacggattagagatggacgaagtcgggggtcgatggacatctctaggacaaatgaaggctacacgggctgcggttcggtagtcgagatgtcatggcacagggccggtgtcctgctgctaggggctcagtcctgcctacctgtcccgggagttccggccgtaggtgggattgggtcggtactcttgtctatggctaggatgggttggaaactatgtcacgtcttccgtctgtataccgtggtggtatgtggcacgtggttacacgtgaggaagatgtgtcttgtgggtaaagatgtacacctctgatcagagtataatctattcgaatagccgcgccctcggttatgggcaagccgagcaatgtacccaagttagtgttttaattcttaaaacctgcttaacaagtaaaatgtggaatggttggcctgggttggcttgggacgagctgggacccagggtcgggttgccagttcggtctgaatcatcgtaggccttgggttaaggcaggttcgtgtgggttcacggccttgataaataatattgtatagttctagaatcgtgtttacaaaatagctttgggcaactaaatatctttaaatgctgtttactgcaaccctaaccctttatattataactcctttgtactcccttgcatttattctgcacttgtgggtgtgtcttgttgagtacggtggttgtactcagtcttgctcaatttttcccaaacctagaagaggagttcctagaggatgaaggctttggtgtctagctcgtgcctgccgtcaagtgcctgtggtcgtcgccctagtcttccgctgtttctcgtttgtctttgcgtgtgctgggccttcgctgcccatgtaataaattaactatttacgcttccgcttgttaaactctgaattgtatcaacttttggtgtaccttgcctcctgggacaaggattaatgcacgcacgtaaggaatgcccgttgggttatttccggtcgtgacaagttggtatcagagcccccttgaccctaggacgagccgtagatcccaagccttagcaatattttcaaaaataaaaatcctttgttatttgtgaaaactgtctagtctctctctgtcttgctgcttcatttatcgccaaaatctgacctttaaaatgtggtttttcttttgttttgtttgtagatggccggcagcgtcagccgtcgtggtctggacatgactggtttcgtcttggagctgcggggcatgtgcgttgtcctggggtatccacatggagtggactaccagggcaggccgcttccggagcaggagggtgacgatgcagagccccacgctgcttgggaggttactgcagtgatcctcactggctctcccgagcggacttcgttggcagtcaccgcgggtggagattctttccccgccgcttgccagaacgccgctctcctcgccatcggcactcttcaccagcgctacccggacgagttgcagcactcgccctaccgctaccaccctcgccgcggaggagcccgcgactacgccatcttccgggatgctagctcggaggatgacgctaccatcatgcacctggcgcgcatggtggaggcgtacgacgcggctcgtatcgacttccatcagatggtgcgccgtgggatggtcgggaacaacatgaagatcctggagctgcgtcaagagaatctgcagctcaagaaggacctagacgcagtggaggcgcagctgcatcagctcaagatcgcccagggagaggtctgccaccccaagcgtcgccgtgtctgccgcagccagaagatcaccgcccgcaagagcacctccaggcccgagcttgttcgtcagtccctggcgtggacttgcttcgtcgagacccctcgtgccgagcccgcgcccgtggttccccaggagggggaagcctccggcgttggtagcacggaggatgcgctgttgctcaccttccgtgctggcccgtcgcagcggtagacgaggagttagtaggcttgcgcgtgtgttctttctcgtttgtcttcttgttgggttgtgtggggcatggttatgccggtgtgtggtataactgtgtcggagcctatctttattttatttgcctaagcaacttgaactttaatgaaccaatttaatagcagtaataaattcaagaattatggtagtcgtgggtggttagctttaattgttagctctctctgtttgctggttctgtgtggggttttcagatggtgacgaccaggagaaatgctaacaccggtgatggcaaccaacctgaaggcagcaaccaccaccaccagggcagcccacctccacctcctcctccgcctccaccaccaccaccagataccaacgccattctcacccaaatcctcgcccagcaggccaacatgatgactgctttcctccaccacatccaaaatccgccacaacataatgctccaccaccacccccacaacactctaaactcgccgagttcctccgcatccgcccacctaccttctctagctccaacaaccccatggatgcgttggattggttgcatgccgtggggaaaaagctagacactgtgcagtgcagcggagctcaattcctaaatgatacaaagaacagttcagtaattatttgatcaataatgatctaattataattgttaagtgcttttatcgtttaaaatccttaaattataaattgttgtttaaaaggaattattagaaatgattttaaaagcttaaaagagaagatctaagtttaatttgctaaatctcaatataaaattgggctagataaaattttattaaatactttgcttgttcctctattttctagaattttctgggaattgtttgagcaagggaagtatttttaataattgaaacaacatttcaccatttattttaattaaaaagttccaaaacccctccctaaagttgttgggccgtttccggcccaactcttctcttcccgcgcgcggccaagccggcccaagtcggcccagccgagccgccccgccccctccttctctagccaccgacatgtggggcccacatgtcggggtcatccctaacctccagccggccggccgcctagccgagcccgagctgccgcctctttccgccaatttcgcctcttccggtcgccctcgagtccgattagttgaggggtttttatccccacatcctcctctatctttcccctcagaatcggagctattcgttgagtattttggccgaat

SEQ ID NO: 8119 - DNA, 11518 bp, Oryza sativa
ctcgctcccaagtggcttcttcttctgaatgattactccactgaaccttgcaaaaccgtataacgcgattcctggttttcctctcgcttacttccaagattctgactggcttctcaacataagttaaatcttcttgaagctctatacgatcaggatctgcttcctccgtaggtacacgtaaacatttcttcaactgagacactgaaacacgtcatgtattcccgccattgacggaggcaactctaactgataagctacttcacctcttcgactcacaatcttaaaaggtcccacaaaacgcggtgccaatttccctttggtttggaaacgatgaactcctcgtaacggcgtaacccgaaggtatacataatctccttcttcgaaagccaaatctctgcgacgattgtcggcatagctcttctgacgtgactgggcaacacgcaacctctcttggataatctttactttttcttctgcctctcacaatatgtctgtcccaaaaacttgacgttcatcggtttgatcccaaaggagcggcgtacgacactttcgaccatataatgcttcattcggagacatttgcaaactagcttgataactattgttatatgagaattccgcgtacggcaaattcttatcccaacttccaccaaaatctagaacacaagctctcaacatatcttctaaaatttggtttactctttccgtctgaccatctgtttgagggtgataggcagtactgaaattcaaacgggtacccaattctgattgtaatttctgccaaaacttcgaagtaaactggctacctctatctgacactatcttcctaggaacaccatgcaaacatactactctggccatgtataactctgcaagcttattccccgtataggttgttatcgcgtcccaaaacgactctaaaatacatcctcaaaattgtgccgagaataattaaaacccatgtgaaagcctccaacaattaaaatgtgcaaatttaaaagtcaagtaaggcttggaggatttttgtatatttcctaaaagcctaaaatgtgtaaataaattttagtggaattttcagagcacaaataataattgagaagaaataaacaaagttaaaaaggttttataaaaagaaaaaccctaaaaagtcttcttttccccccttcccttcttgggccggctcggcccagttctctccctctctctcctctcccccgcgggccatcgggcttctcccccgcgcgcgcgccgcagacagcggccccgccgtgccctagcgccggcgccgccgcggattccgccgcatccggccgtccccgcgcgcaataaagagggggaaatcactccccgtgattcccttcctctttttcccctctttccctatctctctccctcggattcgctcggatttaatcccgcaaagttcgccggcgcatcaatggagcccgagatcgccgcgccggtttccttcctccccggccgccctctctcgctcccgtccctatataatcgatcaccgtgctccgctcctccgtttccgccgctcaccgctcactctcccagtcggaatcgtgcccgcgccgtcgtcctctctctccgccgtcgccgccgagctccggttcgccgccgtcgtcgccccggacctcctcccgcttcggcatcgcccccttcggcttcgccgcgtcctcgccgacctcgtccgctcctcggtttcgcccgccgaccatcggagcgccatcgtcctcgtcgtcccgagccgcgccggcgccttcctccgcttcggccgccgttcccgtcgtcgccgtcgacccgtggtgagccgaagaccgccgcttcgctccgtgttctctcctctctctcgggcgccgctccgttgcgccggtggtcgccggcggtgaccatcgaggcgcgggcgcgccgcctcccgtcggccgtgccggtgaggtcgccttcgggcgcgccccgcggctgccatgtggggcccggccgtcagccgcccacgccctcgggtgcggctgacgcgtgggacccacggcgccggccggcgtgagccgcgtgcacccggtccaccgtggaccgtggggctgccgcgtgggccccactcccgtggacccggtccgcgcgccctctcccctcggctgacgcaataaatccgattttaaattaaaatttaaatgaagaaattcgcaaatatccatttaaagagcatataaacttcaaatggccataacttggccatttgaactcggaattggaccgttcaagtctctaatttttccttaagaagtcaagaacctatttttgtgctttgtttctgctgttatatggagttatttagagtaaaagcctttttcttttccgttggtcgtgtagacgctgcagcttcggaagatccgctcttcgtggaagttgaagccgacgtttgggaaagcgagcaaggcaagtcacatcatctttgaacatattgaatcccagtttgtaaaattatgttgatttaaattattgcattatcgctttatttaaattcccgcattatcactattttatttagccatgcctatttacctttgttacgaccttattattattgttattgttattattaccttgttcaccctagaataaacaaaacctcaactagtggacaccctactcatggcaccactagtttaattttaggtagatgcttcgcaatttaattaggtaacattaggtggtttttcaactttagactttgggaaatattcatatcacctggatacctcggaatggtctggatattgtggaattggattcacaccgctccttctattcaaaatccccaaaatggttttgggctgggctcggggtgcatggttttgatagtagcacctcggccatataaggaccggtcttcgggcctctgttgcaaagcactaccgtactttcacatgtctagtgggtaaggcttagtttgtggctcagtctagttataaacaaaagtacacggatggagatggatgaagtcgggggtcgatggacattctccagggcaaatgaaggctacacgagctgcggcccggtagtcgagatgtcatggcacagggccggtgtcctgctgctgggggctcagtcctgcctgcctgtcccgggggttccggccgtaggtgggattgggtcggtactcttgtctatggctaggatgggttggaaactatgtcacgtctttcgtctgtataccgtggtggtatgtggcacgtggttgcacgtgaggaagatgtgtcttgtgggtaaagatgtacacctctgatcagagtataatctatttgaatagccgcgccctcggttatgggcaagccgagcaatgtacccaagttagtgttttaattcttaaaacctgcttaacaactaaaaggtggaatggttggcctgggttggcttgggacgagctgggaccctgggtcgggttgccagttcggtctgaatcatcataggccttgggttaaggcaggttcgtgtgggttcacggccttgtttaataatatggtatagctctagaatcgtgtttaccaaatagctttgagcaactaaatgtctttaaatgctgtttactgcaacatgctcaaagggttgtttgggatctgtgtgacttgccttgggcttccgcaaacgcttcggaaccttcctcaacggaaacgctctcctctggaacgtcggaaactaaagcaaataaacaaaatcaataaaacagtacaaaacaagcataaacagtacatgtggatatttttaacatgtagatcttgattttaaaaaaatttataaacttgaaccacctaaaacggatctacggttatttagttatgattttctgaagttttaatctattagaaaattgggaaaaaggaaaaagagagagagatgacgtcagccctaaggatgatgacgtcagccctggcgatgacgtcagcatgacgtcagcacgacggccggctcgggtcgacgagctcgccggcgtttggttgatcggccgcgggattggagaccatctacgcgtagaggacaacgaggcgaacccgttggttctcaccacgacgtccaacggtgcacgacggcggccggcgacgagaagaggtggcgcgacggttcggcttgacggcgacgagggtgctccggtggtcggcggcgaaaaaggatgggcggccgagcttcctctcaccacggcgcacctaacggcggtgacggcaagcggcggcgacggcggagacggcgcggcgacgttgccgaagacggccggcggcggcggcggacttgaaacacgtcgcggcggcgctaggaggcacgggagagctcgggagagggggcaaacggaagaggacgacgaggagaagctatatatgagctcggattgaagagatcgaactccaaacgagaggaatcgattcgggaagatttaaaactcggttttagggttaaaaacaaaacgaattcgattcggttaaaatactcaacggatttctttgtttcttgaggggaaagaaagaggagaccgagaggaacaaaacccctcaatcaatcggaagaatccgggtcggatttgggcggaaacggcggcgcaaaacggcggctcggcggcttgcgcggcggcggccggaggtaggggatggacctgacaggtgggccccacctgtcggcctccacgagagggggagcgggcagcggcggcttgggccggcgtgggccgcgcgcggggagagagaggaaagagagagttgggccgaaaacggcccaaggaccaaagaaggggttttttgaactttttcaaataaaacaatttgtgaaatgttgtttcaattattaaaaaaatacctcccttgctcaaataattcccagaaaattctagaaaatagaggagcaagcatagtatttaataaaattttatctagctcatttttatgttgaaaattttcctagaaaattagggtttagcttgtaggcttttaaaaataatttctaaaaaattccaattaaacaacaatttatatatttaagatttttagggcgtgacataaccacatgattgtatattagtggatgtaaactaggatttgagtgtatattagaagcataggaattgagtgctttatatttcttcttccacttagttagacttacctattatgaggattgaatagctttgcttcgtgtcactctaccgctatattacatttaaccattgtttaggctttgacaattataagtagtatatgtataaagtgcattagcgaggttcactcttattatcttctcttggtattaaaaatgcgataccttggaatacttccgggtaaaatgctacaatggtatatccgtgcgcttgcggattagttttgtaaccatacatataccatgactatttctggcgccattgctgggaatgaagatttctagtaatgtcgttaagaaatatcaacaccaactatgtccactacttatgctacattagagcaacgcatagtggaaacaattgttgaaatacctttgtcataaaacaatttgcttgatgtttcttgtgataaagaatagttgtgtgatgtttcacttctatccatgccacaactagtgaatgaacatgttagttctatagtagagccaccatgtgttgagttcaaacatgttattcacattgctagcgagaataaagagcttaaattgctatcttctttaaatacttggggctatattcaatttgatgatgtttgtccactcaactgcttacagaagaaattatttgctagatttgaattgccatgcccttctgatgtgatttttcatgttattggcaattatgatagtaaaggagaatataatgtgcatgaagtatatgtttgttcgaatttgactatacctccttttcatgatgaaatgtattgtctagaggaccgcatgcgtataagtaattctctatctagttcctctagttgtttaaatgagctacaggttggtttgcaagaagaggagtgttgtggtttttcgactacaaagattttaggatccaaccaaatggccatcaagaaatgttcctcaccagatgttgtgatagataaagataagttcaatacgctccatgacaaggcgaaatcgaggacgatgaggatgatgaggacacaactagcttagatataaccatgaataccttatgtattaatcaaccaaaggtacatatgttctatgttggaggtatgtcataagggccttcggccgacctgccgaaaccatccaaaatagcaaacatcggctaaatcccagacgtgtgccattggcgaagccaaggggcaaagtccttgggcgaagcagaatgacgaagaccaagggggtttcaccatcatgactgggtgaagccatggaatgaagaccgaagggttcggctctaggctcattgatcaaccaaagatccaccacgggcgaaggctgtaagtcgaagcacaaagccatcgcccaaagtagcaaatgccttcggctaaaggcttaggaggcccagcagcccatagaggcccttcgctagctaatgggccggcctaagggggccgcctcaaggtccatgaatacaaaagacactgtatacctattataatgtccctatcataagggtaaccatgtaaattcccctatactaaccaaaccctagagagtatgagcctatacaaggattataaatagccccctagggccatgtaatggggaatcccaaaaatttttatcaattaatacattgctttactattccaaccacacatcaagtttaccgcgtccttcgacgtgaagcagttgtcattcgacaacacctggcgccgtccgtggggaacccagagcaaaaccacagatgccaccaaaaaagaccgtgaaagagagagttgtgcctaggcgaaaggggggcgaaggcgaagaggagatggcgggtgaagagggagtagagcttttgaccgcctaagacggtggcgtaccgccaccgagggcgatgcaggctgtccagccttcagccccgccgcggccccaaccgtaccagtaccgtccaaggcagtggcttcgacctcacatgccgcggtttgaacagccacaacggcgaaggcccctttgacaaccaccgtcatctagtctcaagcatggtcttcgccccttgtagtgcttcggacacaaaatacactagcttatggcccacttcggatgcttgtaccagagccacactgaccacatgtcacgcccagaaattcactagtaatttccgaacttatttgtgcataaaatcctcgtccaggaatcagccgaggtacacaaactgacaatttaatatacaaatccatcataataataacgttacatacttacaaaagaaaagaaaacagcagcggaattacggtctagcgaagctccggctccactcccacaggcagctcaactggggtataagccaaacgtcttctccttcgcaacttgtcttcaactgaggtttgattgattattgcaaggtgagcatatgacatactcagcaagccacacagcaaatatgcaagtgcacatggataccaaaggatggcataatatagggctcatttgtaaaagcagcatttagcaaacatttgagaattataaaacaatagagtaattaatcatcaatattaatcaacactgaacaacacacccatgctgcacaggtccaaccatcctgaacagccatacccggctgtacagatctatctccaaaccaggagctaatcaaattattacgagttataacatcatttattatggtgagaagtgtgagactaatcacgaaagacattgttagacctgcccataaccgcgggcacaactattcgaatagttttactctggccagaggtgtaccactgtacccataagacacagccccacaacatgtcaccatgtgcctcaataccaccacggtacctcggaaaggagctgtgacagtacccctcgcacaacacaatcctccacagtgcaccgttcctggatcataatcacccccttataaaacaaggcatggactccccagcgacccccgtgggcttatctccgccacttctcagtctggtgctccgcaatgaaccatgctatacaaaaggtaaagccgttgcccacgctggcttgtagttggcacggttaatgtttcacaaccgaaaatcgtaaaccggtccttaattgtcatgagcacgagtctcaaaaccatgtgctcacaacccaccattatcaagttttagttggcaatttaattaattaaccaatcacgattgaccatcgtgaactatcattaagccatcattaaataatagtgaatcataagttatcccaatagtgtgctaatatttctaagcatggctaagcaatcatatctactatctagctgaaccaatatataaagctcaactagtcaagttataataacccaaggtatcaaggaataaagtaatcaagaacgaaagggctataacaaacaataggttaattccacccaatgacattcgaaaataaatgcaataattgaatagaaacaatagctttaaacgggatcaacatgctcaaagggttgtttgggatctgtgtgacttgccttgcaatattcggtcttcaattaatcttcttaatacttccggcgcactcacgaaccttcgcaacgacggaaacgacaagctatcacgcaaaacgaggaaaaagactaataaaaaccaaatagacaatacataaaaagtaaacaaacatgtagatcataattttagatgaattatgagacttgaacggccttattcggacttcatatgaatttattacgaattttacaagattaaatctaattaaagcctatttaaaaaggattaaataaatttaattcaatttatggataattttaatatgtagatctttattttatacaacttttgcaaattgaaccacattaaactgagttacaaagaattagttatgaatttttaaagattaaaccggattaaagcatttttatggattttaattgaattatgacgcaataatgaattatttttgaaaaggaaaagggaattattgcatcatcggctagggttcacggaggaccgggttaatggcgatagttcacgaaaacgaacggccgagattcatctatccaaaacggacggccaagatccatcggtccacgaccgggccacggggaacgacgacgatgacgtcagcggtgacgtcaccaccggcggccgctcgggcgtgcatgctcgccggcgaacgacggcacgacagcgcgaacggagggaaccaacacgtagagggcaacgcggcgaactcaccggtgaccaaaacaacggcggaagatcaacggacggcgacggcgacgaggaagagcggcggcgacgatcgggtcaacggcggcaacgatgctctggcagctgacagcgacggcgaaagggcggacgaggacggcgacgcgacagtgaccacggcagtgacctccccgagcgacgacgacgtctggagcgacggcggcgcacggctggagcggtggcgacgacggcggcgcgaggcggcacggcgctagagctctaccggctacgagagactaagacgagggtggaggcgggtagaggggagcttgggggtcaatttataggagctagggagcggcggcgaaggcccacggcgaccggcgacgggaatgaaggtttagggttcggaggagagaaatcgatccgaatcgaactcaaatccggcgatttccaaagcgatttagacgatgtttccaaaagggaaaaggtagagtggatcacagggatcctttcccctcaatcaatttcaccggaaacggaaagggacgaccggatttgaaaagcggcggtggctagggtttcggccggcagtggcgcgaggtagacgatgaccccggcatgagggccccacctatcagtggcagacgcgcgtgcgcgggcggcttggctgcaggccggcttgggccgagggagagagagagagggattgggccgactttcggcccaaagccaaaggaggatttttaaaaacctttttgaatttaaattattcattaaatgcaattccatttattaaaaatacttccttagctcaaataaatcccagaaaaatctaggaattatagaattaagcaaagtatttaatgaaattttatatggccccattttatattggaatttaacaaattaaaattagatcttcttttctaggcttttaaaatcatttctaataattccttttagacaacaatttataatttaaggatttttaaacaagaaaagaacttaacaattattattagatcattaatgattaattactgaactgttctttgtatcatttaggaattgagctccgaaaaatccgggaaaatttcagagagtataattaatcatggagaatttaataaaaattaaatccatccatgctttaaatttaggaaattttatttcccacatttaacttcacttgtaaatttatgaacatttaatataaattcttttaatattaaattgtttataaaccctaaaacgaaaatctagctgtgacaacaacccaaaagcttgataatgttattatgcatcatttgcgattggatgatcacttcatttgtgaaatcatcctttcgagcttcatttacttcgattgacgtcttcactgcaaccgtagtattgtcttcaagagtctctttgtacaccttaccaaagcttcattgaccaagaacttctgaattattctttgtgattttctttagctcatctttggtgaaaatcttgatattgtccactttctgtagcactgaaccaccattctttttgaaatattcattcatttttcgcttttggtgcatcactagcgtgaaaagaacaacaacaattaggaaggaaaatcccaaagtgatgcctacgaaagttaaaaaaacttattagcatccccgcaaaaaaaatacttattagcaaacataacaaatccatatatgagttccagtattattttttaatagaaatactccctctatcccaaaatataagactcaccactcgtaacacaaagaccaagaaataatttaatcaccttcttgattggatcacatacatacatgcaagcaatgtgattggaggatttaatggtagatgattcaaaataaaacaaatttgaagaaccaagaggtgatggttaatgtatgcatgccttatatcatgagacgtgggaaaaaagtggttgtgccttatatttttggtagagggagtatgaatgaagactcattttatttgataaattttattgtgaacaactaatgttatattaatattggcatgcacaatatatcgctgtaactaatctttagtgcagtttccttacacaacatataattttctgtttatgtttcaaaatttcctgcatgttttttttttttgaaaagtctttctatgtggcattagagagaaatctcctacaaaaaaaaagaacaaaaatattttgtgtagcacat

SEQ ID NO: 8120 - DNA, 12618 bp, Oryza sativa
attcctgcagcccaatctatctttcatgaataaccagaaaaatactttgtgtttttttaacatatgaataaaatgttgctactaattcactaccttccctgcacgctgcctcccatcattccttgctagcatggctcgttccccgtgttagagtataagtgaattactaccatctttctttgcaattgccccttcttaattagtttaagctcttattttgaattagttgttaatacttatatttaactccatatgttatcggagtgaagtcccaaaatcacaaagaccaaaaccattcgcttttgagtaaattttagaaagagtaaattgctcccacggtacaacaacttggcatgtggatgcgatataatgcaagaacttgaaaattgaacgtccaagtgcaacaacttgacaagtgggtgcgttctagtataagaacttaacaatttagtatttttgtacatcaacttggctaagcatatacaaggtgagtttttttcacgatgtcaatatgccattacatagtaatcatatggatattgccttataagcacatagtagtacaatttacatccaattacctttaagattttttttgttttcttcatcttatcaaatatcaaccgaaatataataatttctacatatagtttaattggctttcagttattagttattatgataaaaatataaatacacttatcaaatctgtgaaatatgcgctagtatattgtcaaaattagtacttaaaaattgaatttataaaaaaaatgctccaaataatcaagttgtagcataactttttaatttactgtatcaaaatcgtacctaccttgcaagttgttgcatttatacgatcacttataaagttcttatactaaattgcacctacctaccaaattattgcactagaacgttcatttctcaactcaagttattgcactaaattgcacccacctgccaagttgatgcaccatggatgcaatttactcttttagaaaacttcgtgttgtatggtcaaagttgtagaaaccatatgtattatgacacgcggcatctaacctcaagtattgttgttttcaaagtttcacaaaactccacccttatgcattttgagcatgaatttacttaaaattaaaaaacgtagagtgcaaatgaaaatttaattattaagttattgactagattgatagaagctttactgtactttcaaaattttatttagatatgctgaaatttattaagatttaaataaagatggggttttatgaaacatggagaccataaatcttgtggtgtgccacacatcataattaatacatatggtttccacaactttaatcatacaatatggagttttctgaaatttactctttagttttggacaagggaataaattaaacggtttcaaaagttgaggagtctgtaatacccgatattaaagttaaggggtatattttagactaatacaatcttggcggggttaaatggacttaaacctttttaatgtactctatgcattttaatcctttttgttgttttatcattttaggtttgttcaaagtctatgtaacttaaaatggaatggagggagtaatagttttatagatatatactactcagtactcgtaaaggaagtcgttttggacagcgatacggtctccaaaacataactttaactttttatttttataaaatatttattgaaaagtgatatatgtatacttttatgaaagtatttttcaagataaatctattcatataatttttacatcttcaaactcaacaacttaagggttattcatgatttatattcctaatgtttgacttaaatattgtccaaaacgacttcctttacgagtacggagggagtatatctcgttccaattccgtattataaacgattgatcacacgtggaatatatacccaaagataaaaaaagccagtagtaagttattttaagtttttatttgcaataggctaatatatgtagacaagtgcatatccaattatccatgcatatatatcagcgtatgcacgtacagtggatttgggttcaggttgatgtgatggattgcaagcatgcatgcgtgtagcgcacaagatgctggtgcatcttgcccacaggcccaggagacctacatgcatggcccatccatgtttcagcacgcgggcaggacaagacgtagcagtagcacttatagttggccgaaaggcccggggtccaatggctcggcccatagtatggggttttggcccagcctaaacatggcacggtccgactggcagtgtcgggcccttgcgtgggcctcttcctcggcacgatgggccagtttggcatggtccggtccaacaatcaaggagttaaatagatgagcgagccaaaataaacttattccggctatataaggtatatatggcacaaatagctgcggcgcaaaatagacttaatctagccaatggcccaaatagatgaggaacgcaaaatataatttttttccaaggttgagcacggtgggccttcatgcattcaggctggtccggcacagcacgagtcatattggatcgtgcctaggccgatggtacagcaagtgggaggggtacgacgtggcctgacgcacttctctactattataaaaattgaagatgtttttgccggtactttgatacgtcattcgtgttttagtcggtttttaagtttattcgcttttgagaatacaaaaggagttgtataagaaatctctttaaaaaaacttgcatgaaacttgagaaaatcagactcctaactgcgggtcatgattttataaaaaagaaaatcgagcaaaatcgcacaatgaattttaccttagttaaacctataacaataataagattaacataacttcacccattgcaacacacgggtatttttttatagtagataaaagaagctattttccctttcgtaaaatacttaaattatattatgtttaataatgttgcacagtgaaggaggaatagcttatatgcatacaatgcataatctaccctataattcaccaactcactcttacacctacattactcattcatcaaatccaatggctcatattcatctaactgtgatcgaacgtgccagatgagaccccctcccctccgcgctcctcccccacgcggtcacgcccacgcgcggacgcgccttctctctctctcgctaactcctgttctcacgcgcccccttctctctcgcgcaccgctattctcgcccgttcccctcacccatcgccgccgcgattcttgcccctcgccaatcgccgccgtacccaatcaccaaacactaccccaccgccggcatgcccctgcccctcgcctatcgccgccgcgccgccgctccaaatccccaaaccctaccccgcccccagcactacgggttacggatgccaccgcacctcctccattgagacgagccaccatggaggccaccgtctttgctccccaccaggtcgccatcctggcactgccagcggtggaggcggaggcggccggcgccgctgcaccgggaggatggctatgaatggcatgagatcgatatccaaggtcggggctgtaatgaggaggtacacccatggaccctgccggaccggtgtgtgcggtggatgcgggcaaggagggaatcgcgcagctggtcaaggaaagatcccatctctctctgttaatcccgatctcctcatgagattgctcttgaggagagggagtacgtccctgaacttgattccttgcatcagttcatcccttctgttgaggctttgagtggctggggcttttgatgctatgtgctcttggtttgactcgatttttgctttgttttggtgcatgcagcaagatcatagagttgagcaggaatggaccagaagctatggctcgctaactggcatattgaacaggtaaattcccatatgctagcagtaagttttcccctaaattatatcccggaaacttcaatgtttagttgccaactgaaatctgtgtaatgagttattattcgtttcacgcattttgttggtgaaacttgcttattgcctcttttttgttctgcaggagcacaaccttaggagggatagagtcagatcatggctctctgatgattttgtaaatcctgttaagtaacttttttattgatggcatatttagcatgctgctgatctgtccccaattttttttccatgaagctaaaatcattgcaacatcagtttgcttgctcgagacctataatcatagccaaaatatcagaattggaggtttggagatgctcctatagtggctggaaattcatctggtcacggctggtaagttgaattattttctattgtgatttgccatctccagattaccctgctccttgcaataaatcaatctcccatggtattagatttttttctactcttccatcaataaaaatgatggcacatgattgctggagctgtataggtgaacgtcggcacacatgttcatacttcataccggcacaggggacattgcagaaaaaaaaagagaagtagatttcaggttcgatcgccactgcaccccagggtctcacgcatcgatctgcacgcttatttgtagtcaaactaatgcagctccaaagttttgatttgatttgctagatttagaaatagcttaacaaattgttctgttcaggtgtctcagcttctgcctttgtttcaaatgtgtttagctgttaaggaaaataggttaggcttcacttccgagattatgcactagtttagaaattttttacgatatgatagtcccagtttctgcctttgttacaaattggctgcccttccatatgaaggaatcacaaagtcaaaacactgttagattgaatggaaaaatcatttaatttttcgaaattcttctatttgttattacatggccttaattctagcagctaaaatcaagatcatcttgcttatcttatttgtcttttcatttctaacaaagctaatctcaaccaaatactccttttttggtaggacagatcgtctttctcgtgcccaaatgccgtcctcggtcttgctacgcagcccctccaaccgtgcaagtttggatcctctcgatggcggaggacgtcaggcggtgggagatggatctgctccccccgccgagtgcgtaggtccggtcctttccattattttccctgctctctttcttgatccaatttgtggagaatttgttgcgtgctcgacattattacatgcaacctgttctgtatatctggaattcttaggtgctgtttgttcctttcgtgtgtgattatgcgttggattgtcttctacaaccgcaggagaagctaggctgagaatcgctggtgagtggcagggaagaggaacgtttaattgcttagagtttcttggatgggagattctagagagatcgcagcaggtttataaaatgctatgatctagatgaataggtttcctgactattgttgttcatttaaaattgaaccaaatatgctgaaactattcactgaaaaaaggtcaaacagaagaattctactgtcacactgcactttcaaaagtgtttgttgatactggattttattctctttatgttccttcagtattttttcttatatatcagaattaaatagtttacaagaatatgagtgagaattattctccttctccttctcctgaaccacatcatatcattcttaattttcctgaaatgttgcatgcatcctatggtttttttggactgctttccgtggtgcctagctcttggtgctgtgcaatattgatgatttatgcgtcctgtgtattcgcagggtataatgaaatttgatctgaacatatgaaatttgacaaatgcatttccatgatccgaaaagtttatctgcagatttaacatagtattcatgtccattttacctttttcaactcatttacacgaacaaaattgcagccatgtaaaagcctagcgctttcagttaaaataaataatttattatcatttgctattaaatgcttaatgcctatatatttgctttgctacatatttttgccttagtagaaaccgggatgtttttccaaatattttgggagttaaattactaatgctaagtgatgaatatatctttataagcgtgtgcctcgtggtaggcgaatacactgtcttcaatatggtgcttctcctgatatgcgttcgatagagaagtttatgtggcttcttgaggtgctctataaggaggaaggtgaccagtgaggagcagaagttgctgaatgtttccaggcgatgcatgttttgaaaaaatagcacctgtagaacgtgcaggtaatatttgtatatgtggtatagaaagttagataccatgagctattgtttgtgttttgaaaagtttcactcacagtgatgaaaatattgcagaactctattcatggccaattttgggaagttattaacagtgtaataacattcatgagaacaatacaaatctctctatcgttattttattcgtgaatcttaaatattaccttttgccttttacattatcaattatcaccgttgcgtttcaatcaaaattatcaccgttgcgttagcacggacatattattactagtgtattagatatgccaataaatggaggtactacacaagcacttctgcacgaacttaattttattctcacacacatcgatcgatcgatctcacacagtcacactctcctctcacatctcacaacttttattattctgcaccaacaagctgacctggaaattaatcatgcaagaaccaaaaggattaaccaagccatgaaatcaaacaaaaaagcaagtgtggatattgatggaatggatgaattaaaaattcagctgtgatatgccggccggagggctgggagccggcgccgcagctccgccaccgtttgccgcgccaccaccgttcgccggcgtcggcttggggccttggggtctgttgtagaaatagtcgaagaaggggcacaggaacgccgaggtgcactccgccgacgacgagtagtgcatcctcttgccggcgacggcgacgaaggtgttagccttattgccgccgttgtccgtcgttgatggcagcggcacgatcttggacggctcctgcccggggcacggcgcgctgctcgccgcgctgtgcagctgcgcgaagcagccggcggcgccgtggaggtcgtcggcggcgaggggcacgctgaaggcgccgtcgccgtcgaggtcgccgacggccttgctctcgtactcgccgtcgctgttcttgcacttgatcgccacctggagacctgaacatcaccaaacaattaatcaacgacggtgatatatcgatcgcaattaattatcgatgaacatattatcatcatcatgcatgatatatatacccttgaaagcatcctgcgccttgatgttcttcctggagcagccgccgcacttggccaagccgacgacgagcgccaccgccgcctcgccgtccgcagcggcggtgacagccatcacgagggcggcgcagacgacgacggcgccgaggactagtgctcgtgctacagctgccattgctgaatgaatcctagcaaactcctccttgatatttggagtatcttactgctgtgtcgatgagggaagaagcagcagaggccatgcatggtttatataggcgtcagttaatcatattacgttccctcgaaagaaaaagctaattatattacaacatgatcagcaatttgcgcccaatttgcaggtttaaaatcattaacgccgtacatttgatcgatttaagagtagtgcactgtgaacgtgcacattgcatatgcagtgtttcacccttgatgctctgttgtttcccatcggtggtgtgtgtttagcaagcaaagttatgctttaatcgagtagtactcctgcagagcatagtactactaatctgttttatagaaaaggataatagtataggacagcttcaaccaaattgcatgattaagattctattgttctttcttatatatattgtgtgggttaatttggctcttgaatcatttgatgtttaaatttgtcggcatatacatgcctactagtatttggcagaagggatcacatatatatttatcgataaattttcttccaacgatttaataaatataattttaatacaatcgtggtgtaatttccatcataactttcatgtaactacaatataacttgtatgtaacttttaaaaatcccttcgaaacatgctatttccataaaatggacatcataggagtgaatcctctcacatgtgcatgcactgtaattttttcgcttgcacgaatcttgaaacgaatctaacaatttaaaatgatgtaaaagttacattgtaattacatacaagttacaatgtaactacactacataacaattacatatgtcaaatttttttaaaaaatttatcgataaatatataacaaattatttgcagaaatagtagcctgcagaagtttaagtaaattgttgttgtttgtctccgtctcttttaccgtatgttaaaaaagaacatagtcatgagtgtgtgagtatgatgtgtgtgcatgtggtgacggtgcgcatcttatctatataatgggaaaaaaaatcccttccttcgatcgaatccacctaagcaacctagtacattccagctagcatatctgcctgcatgcacgactctgacataggatggacctgaagcttatggctcgtttgcttccttggctaatttcatttttctaatgagcaaagctggccaatggcatatgcaagatttctatataggtgatatatatatatatatatatatatatatatatatatatatatatgtatatatatatatatatgtatatatatgtatatatgtatatatgtatatatatatatatatgtatgtatatatatatgtatatatgtatgtatgtgtgtgtgtatatatatatatatatatctcatagatataacaagagttacaagtataaattgatcaaaggtgcatcataatatagtaataagcactggtggagaagtgttttttagtcccgtttgtaaccccccttagtcccggttttccaaccaggactacgaatccgggactaaagatattttttcttttttttctctctttttcattgtttttagtattgaatattgatttcacaccatcccctatcaagaaatcccaaatccaaatcatcacatatcacaaaacatccccaaattctcaaatatatcatctccaaatacatcacaaactcttaaaaaaattacatcacaagttctaaaaaaatacatcacagattcggatcacacacaaatcgaatacatcacaggataaatcataaattgtaaaaaaaaaaaaaagctggccggccacggccgcctcccatccgcgccggccggctgccgccgcgccgctgcgccggccgctggcccgcccgcgcgccctcttcttcgctagctgtgaatggaaggaaaaaaggaaagagaagaaggctaggagttagagataaggaaagagataagaagttagaaggaaaaaagagatagagtaaggagtttgttgtatggacgggaaaagaggatcggtactagggattatatagtatgctttgatttttattcccggttagtaacatcaatcagaactaaaaatagatttttagtcccggttggtgttactaaccgagactaaagattttagggccctgacacgtcctgacatggaatcaactaggactaaagatgaactttagtcccggttagagttatgaaccgggactcaagatgatttttagtcccggttggtaacaacaactgggactaaagatctttctctcataaaccgggactaaaaatgaaaaatcatttttagtcccggtttttaatggaaccgggactattgtggatttgggtcgaccgaccaaagatggtttctctaccagtgactgggagttgttttttatgttacccggatacgaggatatatacggatacgcgatacggggatacggcatttttcaagaaacatatatacggggatacgtctatatatgtaataaaaaattaaaaactaataaactctcttaacatattgtgaaaaccaatgcattcacagaaaaattaataaacttgcggactgctacctgctgattattcacagaaaaatcaatgtgctttctcctatacccgctcttgtctgccagactgccacaatccaccgaggcttcttttcattattatctagcagctgcactagttcttcgagggtaggatgttaggaaacgataggcaaataaacgataaaaaacaacagatcaatcacagaagacactagatttaacgtggaaaaccctcccaaagcaggagaaaaaaaactgcgggcgccagccagcaaaatatcttcattatatcggggtgaagttacgacgctaaatggtggcttacaggaggtatatatatgaaggtgaaaccttaaaaggataacgaatagtgaagatatttttcactccggcccaagcctccggcttcaaacggcctccgcttcgctccagcagaagctggcctttattatgtgcaaacaaatttggatcacaactcaacataggagcattggatgcatggatgcactagctctgaaacttagatttcagatccatcggatgactgctaaatgaatcactgcagtggagctacattcatcggcgttggtggtagcagcgcgctgttcatcggcattggtggcggcggcgctacaagcctgtaatcgtgtggggatgctgtgcctcgagcgagagcacaaggaagacggtcttggccccggcggccaggcagggcatgatgcacgatgggtgcgggtgttgtgtctggcggcggcagccctgcgcttggaaagggattcggaggtgggcgtaaaacgtatcagcgacgtatcagggtttgttttatttatttggaaattacgaaattgttggatacgtatcccgtacgtatcggcacatatggaaacgtatccatatctgttcacgtatctgatatggatatgccacttgactgccatatccaggtattctaggttgttttttctcttttcacatgtgtatatatgtattgggctaggatttttttgggtggtcctgggaccacccctagatctgcaaatggagctggtattttagctcgttacgggtaacgtgccagctcgaactggaatgtgtgttttacgagctagagtagcccacagctcagcaagtcacaacccatattcttataaggccctagaacatcaaaagcctagctcttgatccccttttgaccccttctcactctcatggtttcctattgtgtccaaggcaagaaggttcttgactattccagctagtattgtatcatcagagtccacttttagcattggatgaagaattcttgattattacaggagttttttgaagcgagacatggttcatgctttggtttatgcatcaagttggataagaacctcaaaaaatgacaatactgcaccttcttgtgtatgtaatatattgtaatgcttattttttgcttatctttgtcaagtctttgtataaattgcttattttggactggttttacatggagaagatggagattatgacattgaaatagtggagttcccccattgtgtggtggcaagaaactagtaagtataagtatagtttatattcaatgtaggcacttagcaacttagattaacaatgtacagctagtaagtttcttattttgacccaatatattatactctgcaatctgtattccactttcgatatgaaacatttcaaaaaagcaaaagagaaagaaatccaacatatcactttactaatttctctacatgcaggttaaaagcagtggcggattcaaaaattttcatgagcctgggcaagtctaacaacaaatgaggtatatacaagcctatataatttgatcatagataacttcaatatgaacatttgttttaaaagtttgtgttgagcgagtttgcgattgtactagttgcattgtactgccttgccggtgactaagaaaagtgattactaaggtaattaggcactggtgaattgatgcgtgcagctggtggagcccaggccattgtctgtgcaagctgggcttgcacaaggctccgcacacttacaagggaaggggtgcatggggggtgggagaaagtgaagctgcttctaaacttcactctattttagcttcagtcaagctacttgtatttatgtgtaattgtgctggatgaaaaatgatggacatgtgccctttctgccttgcaattttactagttattctaaatcactagtatagatccttctatttgtgacgggctctaatatgcttagaaatagcaggccgtcacaaggaagtcatctcaatcgggccgaaaagtgcccgattgagatatggtcgcacagacatattagatgggcataaaatttaagcccgtcacggatgacacctatcagtgacgggccgtagtttaggcccgattgagataacattccatatcttcatctgtgacgggcaccaactttaggcccgattgaaataacattccatatctcaaacgggcct

SEQ ID NO: 8121 - DNA, 1416 bp, Oryza sativa
cctctgttgcaaaggactaccgtacttccacatgtctagtgggtaaggcttagtttgtggctcagtctggttataaacaaaagtacacggattggagatggatgaagtcgggggtcgatggacattctccagggcaaatgaaggctacacgagctgcggcccggtagtcgagatgtcatggcacagggccggtgtcctgctgctaggggctcagtcctgcctgcctgtcccgggggttccggccgtaggcgggattgggtctgtactcttgtctatggctaggatgggttggaaactatgtcacgtcttccgtctgtataccgtggtggtatgtggcacgtggttgcacgtgaggaagatgtgtcttgtgggtaaagatgtacacctctgatcagagtataacctattcgaatagccgcgccctcggttatgggcaagccgagcaatgtactcaagttagtgttttaattcttaaaacctgcttaacaactaaaatgtggaatggttggcctgggttggcataggacgagctgggacccagggtcgggttgccagttcggtctgtatcatcatcggccttgggttaaggcaggttcgtgtgggtacacggccttgattaatacaattgtatagctctagaatcgtgtttacaaaatagctttgagcaactaaatgtctttaaatgctgattactgcaaaccctaatcccttatattataactcccttgtactcctttgcatttattctgcactcgtgggtgtgtcttgttgagtacggtggttgtactcagtcttgctcaatttttcccaaacccagaagaggtgttcctggatgatgaaggctttggtgtctagctcgtgcctgccatcaagcgcatgtggtcgtcgccctagtcttccgctgtttttcgtttgtcttcatgtgtgctgggccttcgccgcccatgtaataaattaactatttacgcttccgcttgttaaactctgaaatgtatcaacttttggtgtaccttgcctcctgggacaaggaataatacacgcacgtaaggaacgcccgttgggttaattccggtcgtgacacccggtcagaccggctgcacaccctcggtcagaccggcctcggaggaatttttctgaaaattctaaaattgattttgcacgtggatatatgcctattggatcttctggtcgtgtgtttcagtactggattactaaatttttattattatctaacccagtactgaagcttcgacttcttctggtcgtgtgtctcagtactggattactaaatttttattattatctaaccccagtactgaagcttcgacttctgtttgtgtgtaggctttggtggcaaggaaggagaacgtgtggatcgtggattcctgttgttcgcggcacatgaccggtgataaa

SEQ ID NO: 8122 - DNA, 1602 bp, Oryza sativa
tttaagaattaaaacactaacttgggtacattgctcggcttgcccataaccgagggcgcggctattcgaatagattatactctgatcagaggtgtacatctttacccacaagacacatcttcctcacgtgcaaccacgtgccacataccaccacggtatacagacggaagacgtgacatagtttccaacccatcctagccatagacaagagtaccgacccaatcccacctacggccggaacccccgggacaggcaggcaggactgagcccctagcaacaagacaccggccctgtgccatgacatctcgactaccgggccgcagctcgtgtagccttcatttgtcctagagatgtccatcgacccccgacttcttccatctccatccgtgtacttttgtttataaccagactgagccacaaactaagccttacccactagacatgtggaagtacggtagtgctttgcaacagaggcccgaagaccggtccttatatggccgaggtgctactatcaaaaccacgcaccccgagcccagcctaaaaccattttggggattttgaatagaaggagcggtgtgaagccaattccacaataaccaaaccattccaaagtgtccaggtgatatgaatattcccaaagtctagagttgaaaaaccacctagtgttacctaattaaaatagcgaagcatctacctaaaatcatgctagtggtaccatgagaagagtgtccactagttggggttttgtttaatctagggtgaacaaggtaataataacaataacaataataataaggtcataacaaaggtaaataggcatggctagataaaacagtgataacgcgggaatttaaataaagcgataatgcaataatttaaagcaacataattttataaactgggtgtcgcgtcccaaaacgactctaaaatacatcctcaaaattgtgcatagaataagtaaaatccatgtgaaagcctccaacaataaaaatgtgcaaagttaaaagtcgaataaggcttggaggatttttgtatatttcctaaaagcctaaaatgcgtaaataaattttagtggaattttcagagcacaaataataattaagaagaaataaacaaagttaaaaaggttttataaaaagaaaaaaaccctaaaaagtctttttcccccttccccctcttgggccggctcggcccagctccctccctctctctcctctcccccgcggcccattcggcctttccccgcgcgcgcgccgctgacgggcgggcccgcccgccaccctcgctgacgggtggggcccacccgtcatcccctacctcgcgccgcaaccgccgcctcgcccgtgccctagcgccgccgccgccgggatcaccgcatcccgccgcccccgcgcgcaataaagagggggaaatcactccccgtgattccctctccctttccccccacttttccctctctctctcccgttcaaacaggcggatttgcccccgcaaatctcgccggcgccattgatggagcccgagagcgccgcgccggtttccttctcctccggccgccctttctcactcccaaccctatataaacactccccgtgcctccct

SEQ ID NO: 8123 - DNA, 3605 bp, Oryza sativa
ccttcggaaaatcataactaaataaccgtagatccgttttaggtggttcaagtttataaatttttctaaaatcaagatctacatgttaaaaatatccacatgtactgtttatgcttgtttttgtactgttttgttgattttgtttatttgctttagtttccgacgttccggaggagagcgtttccgttgaggaaggttccgaagcgtttgtggaagcccaaggcaagtcacacagatcccaaacacccctttgagcatgttgatcccgtttaaagctattattttatttcaactatgcattgttttcgaatgtcatcgggtggtgaacctttcccagttattaatggccgaagatgactttattttcctatgggttataatttgattagcatgaaccttatatattggattggttcagctaaatgctatatataggtttgcttagccatgcttagaaacattagctaactaaaaggggttaaatataaattatattacataattattattgttaataatggttatatttaatggtagctcacgatgaggcacatggtaacatgatgtggggttgtgtcttgtgggtacagtggtacatctctgatcagagtttaatctattcgaatagccgtacccgcggttatgggtgagttgagcaatgtttttcgtgattagtctcacactactcattgatggtaataatgtgataattaatttaattcctggtttggaatggcaaattcctgttttggagggttaatttgttcaaccggggttggttgttcaaatgtggttcggcctatgcaacacgggtgtgttgtatggtgtttatttaatattgattaattattcaactgttttattattctcttaaatatttattaaatgctgttttctgcaaatgagttatattatgccatcctctgttatcctgtgcacttgcatatttgctgtgtggcttgttgagtatgtcatatgctcattcttgcaatattcattcatcagaagaggagtttctcagtgaaggtgatgatctggaggactaggcttgttctcggttgagtagcctgtggagtggagtcgccatagctgttccgtagtttgttatagttttattttccgctgcgtagaatgttttattctttgagaggaactatctacctctgtaataatttttatttgcgaatatttgatagttatttgtactctattatcaatattgtcattgtgtgcctcgcttgattcctggacgagggtttaacacacatgtaagcgtttggaattttggatagaaattccgggcgtgacaggttaatacccccaaacagtgtcctcctggtacttctagagtttcttacgacaacctgtcatggccgtccaaccggggctaaatacggaggagtaccctccccagaaattgtcttaggaatatatactatcgtggaggaatactcgtactgagctgtcaccatcagcggcccacctctactgtcccgcggcatatatgcccaattaatgatatttaataatctaagcaccatgcttacattactacatactattctatacccatgcacccgacatagagcaattgataaatcaaacattaaatccgcaccattacacctctctggtaggctacccacacaatgaatataatgcataaataaagtaagaccggtacttagactaagcaaagtaccaaatatatataaagaagagtatttcattaatttggaaagtattacagaagagattataagagctgctagagccataccgaaaactcttccgaagattccgaggatttccgaacactattctatactacttgtcacgaccggaaataacccaacgggcgttcctgacgtgcgtgcatccatccttgtcccaggaggcaaggtacaccgaaagttgatacaattcagagtttaacaagcggaagcgtaaatagaattattacacgggcagcgaaggcccagcacacaaagacaaacgagaaacagcggaagactagggcgacgaccacaagcgcttgacggcaggcacgagctagacaccaaagccttcatcttcaaggagctcctcttctgggcttgggaaaaattgagcaagactgagtacaaccaccgtactcaacaagacacacccacaagtgcataataaatgcaagggagtacaagggacttataatataaagggttagggttgcagtaatcagcatttaaagaaatttagttgctcaaacctcttttgtaaacgcgatcctataactatacaaattgtattaatcaaggccgtgtacccacacgaacctgccttaacccaaggccgatgatgatacagaccgaactggcaacccgaccctgggtcccggctcgtcctatgccaacccaggccaaccattccacattttagttgttaagcaggttttaagaattaaaacactaacttgagtacattgctcggcttgcccataaccgagggcgcggctattcgaataggttatactctgatcagaggtgtacatctttacccacaagacacatcttcctcacgtgcaaccacgtgccacataccaccacggtatacagacggaagacgtgacatagtttccaacccatcctagccatagacaagagtacagactatagttgaaaaaccacctaatgttacctaattaaattgcgaagcatctacctaaaattaaaccactagttgaggttttgtttgttctagggtgaacaaggtaataataataacaataacaataataatatggtcataacaaaggtaaataggcatggctaaataaaacagtgataacgcgggaatttaaataaagcgataatgcaataatttaaatcaacataattttataaactgggattcaatatgctcaaagatgatgtgacttgccttgctcactttcccaaacgtcggcttcaacttccacgaagagcgtatcctccgaagctgcagcgtctacacgaccaacggaaaagaaaaggcttttactctaaataactccatataacagcagaaacaaagcacaaaaatgggttcttgacttcttaaggaaaaattagagacttgaacggtccaattccgagttcaaatggccaagttatggccatttgaagtttatatgctctttaaatggatatttgcgaatttcttcatttaaattttaattaaaaatcggatttattgcgtcagccgagggagggagcgcacggaccgggtccacgggagtggggcccacgcggcagcctcacggtccacggtggaccgggcgcacgcggctcgcgccggccggcgccgtgggtcccacgcgtcatccgctcccgcgggcgcgggcggctgacggccgagcccacctggcagccgcggggcgcgcccgaaggcggcctcgccggcacggccgacggaaggcggcgcacccgagagagaggagggaagggggaagcgaacggagcggtccacggctcaccccgggacgacgagggcggcggaaacgacgaccggagcggaggaagacggcggcgcggctcgggtcgacgaggacggcggcgttccggcggtcggcgggcgaaacggaggag

SEQ ID NO: 8124 - DNA, 6613 bp, Oryza sativa
ctggttaacaactaaaatgtggaatggttggcctgggttggcatagaccgagttggacccaagggtcgggttgcaagttcggtctgtatcatcatcggcccttgggttaagccaggttcgtgtgggtacacggccttgattaatacaatttgtatagttataggatcgcgtttacaaaagagctttgagcaactaaatttctttaaatgctgattactgcaaccctaaccctttatattataactctcttgtactcccttgcatttattatgcacttgtgggtgtgtcttgttgagtacggtggttatactcagtcttgctcaatttttcccaagcccagaagaggagctccttgaagatgaaggctttggtgtctagctcgtgcctgccgtcaagcgcctgtggtcgtcgccctagtcttccgctgtttctcgtttgtctttgtgtgctgggccttcgctgcccgtgtaataattctatttacgcttccgcttgttaaactctgaattgtatcaactttcggtgtaccttgcctcctaggacaaggattaatgcacgcacgtcaggaacgcccgttgggttatttccggtcgtgacaagttggtatcagagccacccttgaccctaggacgagccgtagatcccaagccttagctatattttcaaaaataaaaatctttggttatttgtgaaaattgtctagtctctctctgtcttgctgcttcatttatcgccaaaatctaacctttaaaatgttgtttttctttttgtttttgtttgtagatggccggcagcgtcacccgtcgtggtttggacatgactggcttcgtcttggagctgcggggcatgtgcgtggtcttggggtatccacatggagtggattaccaggccaggccgctcccggagcaggagggtgaggacgcggagccccacgctggttgggaggtcactgcagtgatcctttctggctctcccgagcggacctcgctggcagtcaccgcgggtggagattccttccccgccgcttgccagaacgccgctctcctcgccatcggcactcttcaccagcgctacccggacgagttgcagcactcgccctaccgctaccaccctcatcgcggaggagcccgcgactacgccaccttccgggatgctagctcggaggatgacgctaccatcgtgcacctggcacgcatggtggaggcgtacgacgcggctcgtatcgacttccatcagatggtgcgccgcgggatggtcgagaacaacttgaagatcctggagctgcgtcaggagaacctgcagcttaagaaggacctagacgcggtggaggcgcagctgcatcagctcaagatcgcccagggagaggactgccgccccaagcgtcgccgcgtctgccgcagccagaagatcaccgcccgcaagagcacctccaggcccgagcttgttcgtcagtccctggcatggacctgcttcgtcgagacccctcatgccgagcctgcgcccgtggttccccaggagggggaagcctccggcgtaggtagcacggaggatgcgctgttgctcaccttccgtcctggcccgtcgcagcggtagacgagcagttagtaggcttgcgcgtgtgttctttctcgtttgtctttttgagtcgtgtggggcatggttatgccggtgtgtggtataactatgtcggagcctgtcttattttatttgcttaagcaacttgaactataatgaaccaatttaatagcagtaataaattcaagaattatggtagtcgtggtcagcgttaattgttagctctctctgtttgctggttctgtgtggggttttcagatggtgacgaccaagagaaatgttaacaccggtgatggcaatcaacctgaaggcagcaaccacaaccaccagtgcaacccaccttcaccttccccttctgctacaccaccaccaccacacaccaacgccattctcacccaaatcctcgcccagcaggccaacatgatgactgctttcctccccacatccaaaatccgccacaacataatgctccaccaccacccccacaacactctaaactcgccgagttcctccgcatccgcccacctaccttctctagctccaacaaccccatggatgcgttggattggttgcatgccgtggggaaaaagctagacactgtgcagtgcagcgatgaggagaaagtcatcttcgccgcccaccagctgcaggggcccgcatctctatggtgggaccatttccaggctacgcagccagaggggcaacctattacttgggcccgcttcaccgccgctttccggagaacccatgtgcccgccggagtcgtggcccttaagaaaagagaattccgagagttgaagcaaggcaaccgctccgtgatggagtatttgcatgagttcaacaacctggcccgttacgccccggaggatgtgcgggaagatgaggagaagcaagagaagttcttggcaggaatggaccctgagctgtccgttcgtctagtctccggggactatccggatttccaacgtctggtggacaagagcatccgcttggaagccaagcacaaggaactggagtcgcacaagcgccgcttggcgaatttccgcaatcaacagggtgctaaccaaagggtccgctacaccaatctctatccagggggatcctcctcacagcagcaacaacagcagcagcaacctcgctccgcgcctcgacctcaattcgtggtgcgcgtcccacagccgcagcagcagcagaatcaacaagggactcgtgcgccccgtcctcctacgccaactgtgcagcctggtcaaggccgcagggacgctcaaggccagcagcgtctgtgcttcaactgcttcgagcctgggcactttgtggataaatgcccaaagccgaggcgtcagcaaggccaagcgcctccccgctccaacaacggtgggaaggacgtcatacgaggtcgtgtgaaccacgtgacggccgaggacgtgctgacaactccagacgtcatcgttggtacgttcctcatccattccatccctgctaccattttgttcgactctggagcttcccactcgtttatatctgtgccattcgtggggagaaatcagttgggggtagaaaggcttagaaaccctctgctaatcaccacccctggaggggttatgacagcaaagtactatagtcctgccgtccctatagaaatccaggggattccttttccctcggacctgattctgctagacaccaagaacttggatgtgatccttggaatgaattggttggctcaattccaaggagtagtggattgcgcgggacgcacggtcactctgtaccgagggccggaacaaccggttgttttctttgcacccccaacctctgtcagaagttcagaagtgcatcagatagggctgtcagaaatccccatagtcagagagttcggagacgtgtttccggaagaactacctggtatgccgcccaagcgagagattgagttccggatagatcttgctccaggaaccactcctctgtacaagcgaccctaccgaatggcagcaaatgaactggccgaagtaaagaaacagttggaagagttgaaggaaaaggggtatatacgtctgagtactttcccatggggtgctcctgtgatttttgtggagaagaaagacaagacgaagaggatgtgcgttgactacagagctctcaatgaagtcaccatcaagaacaagtaccctcttccccggatcgatgatctgttcgatcagcttaaaggtgccactgtattctccaagatcgatcttcgttccggatatcaccaattacgtatttgtgaagaagatattccgaagaccgcattcaccacgcgatacgggctgtatgaattcacggtgatgtcgttcggtctaaccaatgcacctgccttcttcatgaacttaatgaacaaagtgttcatggaatacttggacaagtttgttgtggttttcatcgatgacattctgatatactcacaatcagaggaagaccatcagcaccatctccgtctggtgttgggaaagttgcgggaacatcaattgtatgccaagcttagcaagtgtgagttctggttgcccgaagtcaaattcttggggcatgtgatatctgctaagggagttgctgtggaccccgaaacagtgaccgccgtcaccgattggaagcaacccaagacagttactcaagtccgcagtttcttaggtttggcaggatactaccggagattcatcgagaacttctccaaaatcgctcgacccatgacacagttgttgaagaaagaagagaaatttgtgtggagcccgcaatgcgagaaggcgttccaaactctcaaagaaaagctggtttcctcgccggtgttaatcttgccggatactcgcaaggacttcatggtgtactgtgatgcttcgcgccaaggattggggtgcgtgctcatgcaggacggtcatgtggtggcctatgcctcacgccagctacggcctcatgaaggcaactaccctacccatgatctggagttagccgcggtggtgcatgctctaaaaatctggcggcactatctcattgggaatcgctgtgaaatatatactgatcataagagtttgaaatacatcttcactcagtcggatctgaatcttcggcaaaggagatggttagaactcatcaaggattatgatgtgggaattcactatcatcctggtaaggccaacgtggttgccgacgctctaagtcggaaaagccattgcaacactcttgacgtccgtggcattccacccgaacttaatcaacagatggaagccctgaacctaagcatagttggtcgtggattcttggctgcgctggaagccaagcccaccttgctcgatcaaatccgcgaggctcagaagaatgacccggacatgcatggactcctcaagaatatgaaacagggtaaagccgctggtttcacagaggatgaacacggaaccctatggaacggaaagcgggtatgcgttcccgataacagagaacttaaacagctgatacttcaggaagctcacgagagcccttattccattcacccgggcagtacaaagatgtacctagacttgaaggagaaatactggtgggttagcatgaagcgggaaattgcagagtttgtggccctatgtgatgtgtgccagcgtgtcaaggcagagcactagcgaccggccggacttctccaacctctccaagtaccagaatggaaatgggatgaaattgggatggatttcatcaccggacttccaaaaacccaaggtggatatgattctatatgggtattatggatcgattaaccaaggtagctcaatttattcctgtgaagaccacctatggagggaacaaactagccgagctctacttcgctaggatcgtgagtctacatggcgttcccaagaaaatcgtatctgataggggaagccaattcacctctcacttttggaagaagctccaagaagagctgggtacccgattaaatttcagcaccgcgtatcacccgcaaacagatggacagaccgagcgtctaaatcagatcctagaagatatgcttcgcgcatgtgtactagatttcgggaagacctgggataagagtctcccctatgccgagttctcctacaataacagctatcaagccagcatacaaatggcaccttatgaagcgttgtacgggcgcaaatgccggacaccgctcttgtgggaccaagttggagaaagccaagtgttcgggactgatatcctgagagaagctgaagctaaagtcagaatctttcgggataatctaaaggtggcacagtcccggcagaaaagttatgcagataaccgtcgccgtgacctggaattcgcagtgggtgattttgtataccttcgggtcacgccattgcggggtgtgcacaggtttcagacaaaggggaagctcgcacctcggtatgtgggtcctttccgtatcattgctcggcgcggagaagtcgcttaccagttggagctgcccgcctccttgggcaacgtgcacgatgtgttccatgtgtcgcaactcaagaaatgtcttcgagtgccatccgagcaggccgactcagagcaaattgaagttcgcgaagacttgacctacgtggagaggccagtgaaaatcctggacacaatggaacgcaggaccaggaaccgggtaatccatttttgcaaggtccagtggagcaaccacgccgaggaagaagctacttgggagcgtgaagacgagctgaaggcagcccatcccgatctcttcgctagttcttccgaatctcggggtcgagattccgtttaaggggggtaggtttgtcgcgtcccaaaacgactctaaaatacatcctcgaaattatgcctagaataattaaaatccgtgtgaaagcctccaacaattaaaatgtgcaaagttaaaagtcgaataaggcttggaggatttttgtatatttcctaaaagcctaaaatgcgtaaataaattttagtggaattttcagagcacaaataataattattaagaaataaacaaagttaaaaaggttttacaaaaagaaaaaccctaaaa

SEQ ID NO: 8125 - DNA, 7118 bp, Oryza sativa
ccccattttatattggaatttaacaaattaaaattagatcttcttttctaggcttttaaaatcatttctaataattccttttagacaacaatttataatttaaggatttttaaacaagaaaagaacttaacaattattattagatcattaatgattaattactgaactgttctttgtatcatttaggaattgagctccgaaaaatccgggaaaatttcagagagtataattaatcatggagaatttaataaaaattaaatccatccatgctttaaatttaggaaattttatttcccacatttaacttcacttgtaaatttatgaacatttaatataaattcttttaatattaaattgtttataaaccctaaaacgaaaatctagctgtgacaacaacccaaaagcttgataatgttattatgcatcatttgcgattggatgatcacttcatttgtgaaatcatcctttcgagcttcatttacttcgattgacgtcttcactgcaaccgtagtattgtcttcaagagtctctttgtacaccttaccaaagcttccttgaccaagaacttctgaattattctttgtgattttctttagctcatctttggtgaaaatcttgatattgtccactttctgtagcactgaaccaccattctttttgaaatattcattcatttttcgcttttggtgcatcactagcgtgaaaagaacaacaacaattaggaaggaaaatcccaaagtgatgcctacgaaagttaaaaaaacttattagcatccccgcaaaaaaaatacttattagcaaacataacaaatccatatatgagttccagtattattttttaatagaaatactccctctatcccaaaatataagactcaccactcgtaacacaaagaccaagaaataatttaatcaccttcttgattggatcacatccatacatgcaagcaatttgattggaggatttaatggtagatgatttaaaataaacaaatttaaagaaccaagaggtgatggctaatgtatgcaagccttatattgtgagacatggaaaaaaagtggttgtgccttatattttgggtagagggagtatgaatgaaggctcattttatttgataaatattattgtgaacaactaatgttatattaatattggcgtgcacaatatattgctgtaactaatctttagtgcagtttccttacacaatatacaattttctgtttatgtttcaaaatttcttgcatgtattttttttgaaaagtcattctatgtggcattagagagaaatcacttacaaacaaaataacaaaaatattttgtgtagcacatgaaagatgatttgtataaaaatatacaaacgatgcagaaaagtagtctatgtaaataacagacatattatattttacaaaaaataataaaatgcaaaaagcatgaaacttatacacacttatattcttatatcatgtgctaggaggctaattttttaaaattgttgatttttttttttagttttttcaattaactgtcaacccttatatttttaggcattataagaaattctttgtttggttgaatggtatattgtagaaacaattaaaaacatagtcaatgggaaatcattgaattggtgtaaactcaatgtgacatatatatagtatattattttatatttttttaaaaaaatgctgaggtgcatatgtaccaagggcaagccttgctgcaagagggaattttgcgctgcactcttgtttcttggggccttcaccactccactggtatcctacacggcagtggcactcataatcccctgggatgttgttgcagacgccgtagcagggatatttcttcttgttggacacatcacactcgttgatgtctgtgcatataaaaaggatcatatatattagtcgttagatcaactgtcactagtaaaaaaaaatcgtaggcttaggcttctttttcttttctcttgacaggcaactcaaaatgaaaatcacctgtgtgaagatggcttaggctgtccaggattataaaccacgtatgaaatcctattttttaactggcaaattcttaggaaaccgcctataaaatttgtcgctcttcacgaaatctacattgaaagttttttttcatcattttagataatacgtttagatcgatgtctaaatatatatatgcgttacaaactctcagatctatttttgaaaatgaacttttgagtatttcaaacgatcttggataaagacattctatattaaaattgtagaacttaactagatctacaactttgtagtaaatatctttataagctctagtatctatttttctataagcagttctttaaaaaatcaaaatttaagaaatttatagataattcattttaagtcctattgaggtaaactaaagttctccgagatcgttctagtacttcttatagtaaaacttagttaatatttttcttagaacatttattttagaatggttattcactaatgtcacgttagataacataccaactcatttagaggtaaatgataagtaaacaattatactaactgaaatataaatacaaaaatattgtaagggtcatatataactttggttcacctcatttgaacttaaaatgaactttctataaatctttaaagtttagacattttcaaagaataacaagttttttcagatgggcttcctacagaaatgtcatttttggcgattctcatatggaaaggcacgcaaaaattaatttttgaggcggttctcttgaaaataccacccttaaaaataatagcactactacaataggaaaggagtagtatcttgatatatatgaagtcgtatgatgaaaatctttttataaaattggaagagctctacaactatatagtgaaatgttttttcattcgaaacttttacgggtcatgatattcgttacaaaatctcaaatctattgttgaataaacaaacttttatgtttttaaatgaactcagatggagctgtgctctatatcgaaattgtagagctcgatgtgatctacaagtttgtggttgataaattttccttttgatatcatttatagtgcaatttatatattacaagttttagaggggcgaagtcaaaagaataagcttctctcccacatgcacaaagttctttataggcgagatggtaaggacgctacttgaagaacatgttcccgttcaaatcctatatatcacacacacacacaaaattatgcaacttgtgaaacttgcaacacacggccgtgtatatatagacgcttactaaaatacacaatacgtttttccctttttttgcgcctaaatcaaatagcgaaaagatcaaatcaaacctggtaaaaaaaatttagttaatgaatttaaacaccaacagggttggtgcacacacagcgaaaggtcagagtaaattgcacccatggtataaaaacttggtaggtgagtgcgatttagtgtaaggacttgaataatgagtagactggtacataaacttgacaatcatgtgcattttaggccaaaacactaatacgtacctttttttaagcagttttaatacatacctttgattaatcctggtattataagctttgctagaccgctggctcatggatttattttcgtgtttcaccatgttcataacccgcgataatgaatatgttgattagtcatgcatttacttttgataatcatatatctttcggttttaaattgacagattattttattattataacttaccaattgaaagcaacatataatacttgtagatccttttcgagatggtttgagtggcggctttttttatatggcgtaaaaagtatggtgtagaatatagaccttttaaccaaaagtccaaaatgcacgcactagccaagttattgcacttatatgctcatttctcaagtttttgcgctagatcgcacccacctacctttatgtaccgtagacgtaatttactcgaaaggaaaaaataaaatggtggcactatttagcagaactgttaactaggagtaataaaataaaacattaatcttacccttgcaaccttggtccttgtcgtaggggttaccctcgtaaccttgcttgcacttgcagtagtatccgggaccgttggtggagttgacgcactcgctgctgtcgctcacacatgcgtacccagccggtttcttctcctgcacatccagtggagggcaggtaatggagtcgcggatggccctctttcggagaccaaaaatcccagcaacttacccgcacgaacgccaaaaacacacttatctggattcgtcttcatgcctaccgagcacaggttgtcgaatgtatcttgaaggccagacgcatggtcgaatgccttgcggctttttacgatgatgtcgtcgacatatgcttcaacattccgccccaactgtgaacaaaggactttgcagatgagcctagagaaagtagccccagcatttctcagtccaaaaggcatcctaatgtggcagaaggtgctgaatagtgtgatgaaagttgtcttcagtatgtctctgggttcgtaaagatttgatgatacccggagtaggcatccaaaaaactcataagtacacagcccacggtcgaatcaaccaattgatcaatccttgggagtgggaagtcatctttcgaacaagccttgttcagatccgtgaaatcaacacacatccgccacttgccattggacttcttgactaacactgggttcgccaaccactccgggtggttgatctcccgaatcacaccagccttgagcagcttttagacttctgtcttcactgcctgttggcggtctatcgacattttgcgtagcttctacttctttggcttgcatatagctttactactagatggtgtatgatgaggtcgggccaaacgcccacaacctcgtttgatccccagacgaagatgttgatgtttttcttgagcacggccaagatgttattcgtttcttcttcacttatatcgccgcctagggaaaccacctttgttggttcagcctcgtcaacttggaccttgatcaccttgccatgtggggacggcttcggcacgattcttgctcgctcaccatcttcagcttgtacattgtctacttctctacttatcactgttgtttcgctccctagcacggccaaagactgcagccccttgactacgattaccccggccggaccaggcatcttcagcttgaggtagttgtggtgcgcgatagcttcaaacttgttcaacgtggcggtgccgaagatggcgttgtagttgtacgaaatatcaatgacaccgaagagaatcatctgctcgtgtctgttgggacccgcgccgaacgccggagctaagtgaacttggcctaggacttgcaccgcttcgcccccaaagccgtgaagcaaagtgagcgcctgagagagagccaaggtcaggaaccccatcctagtgtatgcttcggcgaagatgacatatgccgaactgccgccatccacaaggattcgacgtactttaaatctagctatctctgccgaaatgatcagcgggtcttggtgtaggaacaagaccccctcggcgtttctctgttgtgcaccgcccgaagctgcgtttttctttgcagcttcacagctgtgagggtggatctgctcttgttatcacttggataacactttgcgggatgtcttgctgttgttcggcctgagggattatgtcctgaacaggttcacagggcacctcttcggccttcacttgctgtggtcttggctcctgttggttgccttgctgccgaatgtttcggcattgctcggtggagtgcaaagagcgcccgtggaacatgcagtagagatccttcttggccttcttgcgaaagggttgctggtgattggtgtcctggtgtgtgtcaagcaccttgtggagggtctacacctcttcgactgccactcacaacctttccacgttcggctctggtctttttacacgtcatgggagcttggctgggtcttgggggcagcaccttcttcgtcggctgcacttggcgattcgccagcggcatggcttcagctgcttgcatcaccgcttgcgcagctgcagcggaagcggcggccttgtcatagtcggcttgtatctccagccttcgctttgtgtcctcttcgccacgtgcatggccgtcgatgatgcgaaacaagcgctcgatggtctggggctctttccttgctattcttcttgtgaggtcgcttggaaggagccctgccgaagcagcattgatgacggacgcctctgtgatgtcttgcacttggcagcgtgcttgcgagaagtgtcgaatgtactccttgttgtttctccgtcttctagcaaatgccgaagaggtcttgctgcgttttcggctcctcataggtgcctcagaagttaagaacaaagacttcacagagttgctcccatgagtatataatattagatagcaaattgaaataccaagagcgggcgatcccgtcaagcgcaacatgtattaccttcgccttggtattgtcattgccgtgagccacttcgattgcggactcgtagattgacaagaactcacttgggtctgattcacgcgagtatattgcaacgggtgggtacttgaattggggtgggatgggatgattcttgagcacccaactaacggtggcctcttttcgcccccgcctctcatcgttgcaccttggaaagatgagttcaagctcggttatgggatggcgaatggcgaagtcatcgcctgcacccgtggttgggccatcgctttcggctagggtccggttctgaacagtgctccttgcatgttggctgaaactacctgtgtcaccatgcctaggtcgaactgtggtgcttggatccaggccacgccctgattcgactggttcgcttgctgtgtggagccgaaaccggtgattatcccataaacatcagttgttgatgcttgggtcatggtgttctgttcgaagctcagtgcttgctaccaggctattgtcccttgacttggttgattgattgccgcgccgaattgacttatcggttgccaggtcggagccccctggcttgactgattcgcttggtgcattgcaccgaattg

SEQ ID NO: 8126 - DNA, 13231 bp, Oryza sativa
  unsure (1)..(13231): unsure at all n locations
cgcatagattccggctctcccgacgctctggtgtacttcgaaatagtcgtcgaggttcctccagccgcagagcaaggcaagtcatgcttgtcacttgaacatattgatcccatattgcaaatgctctattattttcctttaaatattgcatcgttttataatgttacaatgggatgattacctactgtctcagccatatcatttgttatcctgttgctttgctagtttgggttgtaacatgactagatgttggattagggaatgcttagccattcttagttcaactagtacacaatgggggaattacgttaatgcatagactccagatgttggattagtgccactgctgtggtgttggttaattaaaatatattaaatggtgggctgtgggtgcatggttttgatggtagcgcccatagcaattaaggaccggttcgcgggaaaccctggaagaattcctcgtacttaccacaagccagcataggcaacggctgggcttgtagtgtagcttccctctagctgacgcatccaggcaagggtgggcgtgatggagttcggatgggccctgcgacggcctatgccgctttcggattcacttaggcacgagaagggactgcccgctgccttgcgaggactgggggtgaaacctgaggtgtggtgtgcttgattagatggggttatgcgaagggtcctatcacggcctccttccggtatgtcgtggtggcatgtcgacgcacgggaacgtgtcgtggggctgtgtcttgtgggtacagttgcacacctctgatcagagtaaaactattcgaatagccgtgcccgcggttatgggcggtcaaccagattcaccgtgattagtctcaccctagattagtttaatggaactgattagttcaggtggtggtttgggcttgtctcaacgtggtgtagcgttgagcagtgattggtttaatattggctaattattacaaatgttttactgctttcaactactgtttataaatgctagctttatacaaatgaactcttttagccctcctttggttataccttgcatcataccctctgttccggtatgacttgctgagtacagtgggtagttcttgctctatctcccaacccttagagttcgattatgcgtccgatggtggtttctccgaggagtaggcttcgtccgtgccgtcgaggatgcctgtggagtggtgttcccgctgctatccaagtcaaggcttaggtcagccgatggtattatgtggctagcaggaagttgtatatgtttctcccgaattagcaagtcaaaaattttatcagcttttgtatatgtttctctgaacctctggatgtaatcttgcgcggtttcatcatgcctctgcctaactgctgccagatcggagagcttcatctcatgggtcccactgtagaagtagctatgtaattgcttctccaaatcgacccaaccttgaacaaaattgtaaggcaatgaagaaaaccatgtgaatgctgatccggacaaagacaaaggaaacaactgaacccttaaagcgtcaaccgccgatgcctctccacactgagccaagaatcgactgacatgttcatatgtcgaaacattgttctgtcttgagaactttgagaaatcgggaactttgtatcggtttggcagtggaaccctctcaaaccgctcagggtatgggtgccgatacaaatttccggtattctttggcttaagtctaaactgttccctcatgacatctgcaatcaagtcggcccatggcctctgttgaggtactccttgcacctgttgttgtatcggctcgaactgattgagttgaggaacatattggggctgaggtaatcctccttgttggtactggatgcgaggcgaaggaggttggtattggtaattcaagttaccctcttgataattctagaaattcggctgtatattatgcatcaaatgcttaggaacaacttgggctgcaaccgattgatctggttgtacattatgtaccaagtgctcaggaataacttgagccacattctgctgtctttgccgattatcaggtgttctcaacccagttggtatcagctgcaccatctgctgctgaatcggctgaaccgtttgttgttgaatcggcgaaaccgtctactgttgaatcggctgaactgtctgctgttgagtcggcgtcgacaacactggtccggcagttggctgagttggtaggaacattgaggcaatctagtcttgggacagccgactaatattctgaccagcatgttgcggttgctctctagaaaagagacgaggattaattgtctgcctttgcaccgatgatggcgcagctggtgccggagtcgaagctgctgccgtcgactgaactggtggtgcattggaagtactctgttggttacctatcaccaagttcctgtaatttgggaagacaccacttggcaagtagactggccctgtgttctgatgttcagctatcgtgccaaccatcacagatttgaacatatttgttagtgtattgacgatctctccagattggttgatcaaggcatgttgcaccgcataatcaacttggtcatggaaattggtgcacctaggaggttcttcttgcacttcagcaccatcttcgccaagatcttcaaccacaccatcctgaagcccgtcacctttgtcacccaaggcatctacaacacatttaccaccttgagatgagcttgagccaacttcatcagcagcaaccactttcagcttgtatttctgaacaattatcccttggcgggtttccttgaatgagttcatgaacttgtcctttacgctactcatcatctgttcaagctcatgcctctgttcggacgtcagtttgtctagtgtgattggaataatgtttgtctcattgacctcagactcaaccccagttgatggtagattagttcctggaggtttcggaagcttggttttcggaggaattggcggcttgcttgccgacgacggagattgcttttctgttgacatcgttgtcacttatcggtcccactcggcgtgccaaaagcatgttgagtcgaaaaaacacacactggctgggaagatctgcttaacttcagtgcagatccaaaatcttgcttttaggttcgtgagcgtgccagttgatttgatcctgtaatcaacaagaaagaaagacaaaagaaaccgtggttaaatccataaacgatagccgatcggccagtcgccgatgacatatcatttatcttcgagccgatgtcatatgtgaatcaatcggcagttataaataagcaagataagactaaatctactcaatcggctgtagatattaacactatataaaatccttctgtcgatgtatatttaaaccaagtgattgggatagatcggttgccatgccaagacagtataaatcacttagatcgaagtatacattaacataaatattataaatgcttatagcatagccgatcagatagatctagcatgtaccggctaatactctgataccactctatattaagatattaaaacagatagaatatatcagacagaagcctaatatactttattgcgataagatcttaatataaagggcagatttagcatatcaattaagcatataggataaaaagctaaatcaggtaagatcggctgataacccgatactatctctttcgatgatcataaaacaagccaaatatcataattatagatattacttaatagatcgaacctaaccgatgcagcattaagcataaagacaagtatgaaatctaggcaagatgatgaaaacctacaagagatggtagatacacgatacaatctaaattaataacaaaacataactctaccgattgcttcctaacaataaaaaccagccgataacaagttatatagcgcaactaacatagattgcaacatgcatatgataactcgatgaattacataaacatgattaaagtgtcataaagatggaagcattaaccccgagaacgcaagccgccatgacaagttttacctctagttgaagatcgaaaccgatgcagctcaacctgaaagcaagaactcgtcgaaataaacgaaagtaaaaagggtggcgatgcgcggagattgtattgaacgattgttgtttgattacatgggttcaggttctatttatacccgagattacaaaatatgtccttgctggacatgacacttatctctaacaaactctaagataccataagtctttgcggcagacttttgcccaaatatatctctaaggaaattacatgaaatatcctaattaatagatacaattgccttatccgagagctttatctccatcgtggcaatcctcatgaagcactttgaacgattctagaaacaaccttgaaaccatcttcatcggaatcggctgcatcacctctatcggttgtatcggctatcctctgtccgatccatctcagctgatgcagactccagccgatgccttcgcagccgatgcatactatgttcttcgaatcgatctctttttcgaatccgcctcgatcccaatgtcaaacctggttcacaatttaccaaatttggtcgtcaacaaatggtgtgggtttaatgttcatgcaaatgattgctctatatcgatcgcaagggtgtagagtagtatttaataatgtaagtgcggtgcttagattatcagatttcactatttgggcttatatgccacgggtcagtagaggtgggccactgatggtgacaactcaatacgggtattcctccacattcgtatataatcctaagaaattttcgtggtatgggtactcctccgtattcatttccgatcagatatccatgacttattgtcgtaaggaactcgataatcagaggtggtctctcgaaacaccaggagggcatagttagggggtattggctacatgattatatactagtaagtgtctggtggcatagttagggggtattggctacatgattgtatactagtaagtgtaaattactgatatctatatactagaagtatatgaatgattattttcttattctttctccacttagcttatattatattttagcagagtaatccttagttctttcttctgtgtcaaccttatcgtacccagaattgattaacccacgcttagactttggtttatacaagtaatatatgaattattagaatagtactctcttatcaaatcttcccttggaattaaataaatacgataccttagattactccaaggtgaaatgctacaatagaatatccgtgtgcttgcggatcatatctgtaaccataaatataccaagaatattttagtgtcagcactgggaattatatttctagtaatatcgttaagaaatatcaacaattatactagttcagaccactcgcaaggtagtatacctaatctagtttatatgggattatagaagaaaccacggagtacaacagagaacaacaaaacttcgagattactgacgagatccttgtcgtgagaacttcgacgagatctattgacgaattggcttaaagtcctctggatttattttgtggtggtgggtgtcttgcactaagattcagtgccctgtacctctctggggtgtctatttataccacatatcatcttggtctccaagtagaacttgaagacaacagaccccacacgatatgacaacatccttatcccctccgagtatgactctgatatctcctattcgtagagattatcccctccgagtatgactctgatatctccgattatttccgtaagaacttatcaatttccttaactcaataggatcatttccatatatttgaggatatactatatccgtatatctcttgactcctaggatagaaggtatgccttattataccatatccgtatatctcttgactcctaggatagaagatatgccttatccgaaccctgacaattatatttctactattgtcatataaaacatctgcagcaatgcatgggatcccatgtagttaattattccatctgttctttaatagatgatgccgttgatttttagacacatgattaaccattcattttattgaaaagttttgtgcaaatgtgtaagatatcaatcatgcttacactactaaaaggacacatatacgtcggcattataggtgctggaatagctaaaaccagcgaaaactggcacctatagtgtttttcccacctttgcaggctgaaatacaaaaaaaaaaggtacgactataagtgccggttctagagaaaaacggacacctatactttaggttcctgttttataagaaaattgacacatttaatatgttataggcgtcggttaataaaaaaacgacacctataatatattatattataggtgaaaactgacacacggaaaaaccgagtcaagcgaggatacttttttagctcacaaaagacgccgagagggggccttatcgacttgcccccctcctctcgcccgcctctcctcgacggtgccctccttaccaccccatggcggcggcgccctcccctcaccttcccacgacgacggcgtcgagcacagctagatctggccgagatgtggctcaagtgcggcaaccggatctttcttggatttttttttgttgatgtggataatgattttttttggaagttgattgtgcgattgtgttcgagttgattgattcaggggtgattgggagctacatcgaacggctttttttatttgtcttggggcctcaaagatgccggttttagaaccattacctttgatttctctcattagtaccacctactatgtgccggtttcccaatcggcacctgtgcgggggttttcaaccggcacctatttgtgtttatgcagtagtgttaaagtatttttagtgataaaacaattcgcattaaaataaataataattaccaactttttgagtaagacgaatttaacgtccaaaagtcaatgaccaaggtactctctctgtcccatttgaagtgcaacatttgatcatccatcttatttgaaaaatttatgaaaaaatttaaaatgataagtcatacactcatacataaaatacttttcatgttttaccatctaataacaataaaataatattaataaaataatttcaaataaaacagatagacaaacattgaccatgaaaacatatagggaaaatttcgtttctacccctactctgatctctaatattgattttacccctactttttagagttttcgtttttaccctcacttttttgaactgaacgcttgttttgcccctactttggatggtgaagttaacggtgttaagtaattgataaaatgacatttataccctctcatgtatgctcattaatattgtttttgtccccattttatgcatgtagctttagaactttatttttttgagtatatttcaaattacatgaagcacattgactaatatttaaagggaacagataattacattttacaaaatgttgtcaaatttttgtttaagttctatcaaaatgctgaaattttgtcaaaattccatcaaattcagaatttttccaaattgttatattagtcaatgtgcgtcatctaatttaaaatatactctcaaaaataaagttccaaagctacatgtataaaatgggggaaaaaacacaattaatgaacatgcatgagagggtataaacattattttatcaattacttaacaccgttaacttcaccatccaaaataggggcaaaacaaacattcagttaaaaaaagcgagggtaaaaacgaaaaccctaaaaagtaggggtaaaattaatattagacatcaaagtaggggtagaaacgaaattgccccaaacatataagtgctgttaaattggaacggagggatgcgactgatggagtagtatactgtgacgacctgggttgtgctatttttttttagtatagtttttccctttgacattgagatggcataaccgtaacagtcgcagttttcctattgtacaatattaataatgcagccatgcatgcgggcaccaccaacgacgatttccgtcggcgaaatttgcccttacgacctccgacgacgactttgccgaggccttccacattgcagccgtacgtgccgacggcccgacgccatgtatgtagctttccgtttcctaactctgatcgcaacatatggccccgttcggcagtcctactaagcttaggcacgcgaaacgaggaaaccattgatgtttgattaattattttaaactcatgaaatggatatatttaatattttaactcaaattctatataaaatatttttcacagaacgtaccgattattagtttgaaaagtgtgttaataaaaactaggacacaatttgtatcttaatgaaaactggaacatactaattattttcacttcgtgcatgtgtggtagctagctgcagtaaataattgactatactcgctcctctgttgcatattataagttattttttattttttttcatatcaaacattcttaaaattgattaagcctgtgaagaaaatatggcaatatttttaacataaaaacaaaatatcagaatatattcaatgctattttatttaatgaaactaatttgttgttgtagatttcgctaagtttttctataagcttagtcaaatctaaagaattttaacttaaaaaatatcaaaacggcttatgatataaaactgagggagtaatatattttgcaaacccctcattgagtatgatctgataatggattattacatgtggcgattaacaagtcacttgataagaagtgtaaattgtctttaaatgaggaaagcacagggcatgttctttttacttgtcctttggctcattttgcttggaatgtaattgccatggtgttgaatttacatactgtctctctatctttctgggatggtatgagagctatcaaaacaaaaatgaaatctcaagtgggtatggtactgtttgctgggatgttgtggggtttatggattacaaggaatgagtgggtgtttgaaaacaaactaatcaaaactcctttgcaagttgtctgtacatgtctctgtccctgatgcaaagatggaggctgctactaaaataaaaaactgcgctgacttgaatgatttccatgagaaagtaatgctcattctggacggtttgcgggtggttgacaatctaccgaagacttggggtagcttgggaagagtgtgtcgttttctgttccagttgcgtatatacatgattacgggtggaaaaaagcttgggctcgtgagctcggctcaggcttggctcaggctcacatagctcggctcggctcgaaagccaaacgagccaagcccaagcctcctttttagctcgtttccgaaacgagccaagcccgagccggctcacgagccgctcgtgagctcgcttggctcagtacaatagtgtcatatgcaaaagttttacaccttttctaactatttatttgttgaaaatgataattttgattgtcatattatctatttatgtgttgtgatgacatattaaagaaaaatatcactttattacacattctatgtggtaaaatgttgcttcatttctcttagacctgccaagctagctcgagcccataaacgagccgagccgagctgcacttttagctcgttgtttgtagcgagccaagccaagacgagctttccttgtaccaagctttcacgagccgagccgagccggctctgctcggctcgtttccacccctatacaggatgtggttagtgagggaggttacgttttaggacttttttatggtctgcacctttcatggaaagctggggaccccagtgtcgcgaagccttttgttaccctgtttattgctgtctacttttgtaagattctgtaagaacctattaattttcttctgggctttttacaaagccgggtagtaatatattagcttaattagatctgtgccattaaaattttgctggtttcaaaatataccattacaatttacgcatttgtaacgatgccactgctacttgtttgtaatctcagttgtgcctctaagatacgtattttgcatgtattggacgaaaataccctcatcttctacctctctcttctcttatcttctacctctctcttcacgttgcttcactactgaagaaaccatctttggtcggttgcccaaaatccaaaataatcccggtttaaataggaaccgggactaaaaaatatctttagtcccggttaaaagacctgacgtcactttttgatctttagtcccggttgggtaggaaaatagatacaggcagcaaaaaaacaataaataaataaaacagttgggacgtgaccctatatatctgtagtcccggttggtaatactaatagggactaaagatggatttttagttccggttatttcacccaggactaaagattcctatctttagtcctggattcctattctcggttacaaaaccaggagtatagggggttaggaactgggggtaaagaccatttctccactagtgcttcttgctctgccaccacgctgctcacgctccgccgctgctgctgcttgccgccgtgctgctaagcaggaagagaggaggaagaagaaaggggaagaaagaagaagagggaaaaggggtagtttggtccaattttttctggaaatgcatccgaggggtaagtagtggtatcttttaaatatgtgtaaaattataatgatatatttccaaatacatgaatacaagtggcatatttcgaaactgataaatttttattggcatgtatccaattaaccctaatgtatttgcctgatataaaaaaacaagtgacttgatatattttgcaaatctctcatttatatatatccatatacatatgcttcttcccttcaaagttaagttcctaatatttctcaatgtatatatgtactcattcctacctccagtctggtgaacgggtgcggactgcagtttgtatagtaagtacacgaagatcgagtcaagcgagcggcgtagaggtcatgtgtaccgtgtacttacttattgatgggaaaaggaattaattttgaaattataattttaaaaaaaataagaacgaactgcaattttaagattttggacacatttatttaccaatgcttcccattggagtatgggacctctgtattttggcctatactttcagtttgaccacttactaccttaggtacttttttgtactcctcaacctcgaacttatgttgcgttcttaagttcactttcccaacttcacctccctcgtttttcgagtgcacatatttgttttacttgttttgaaaaagcatgttacttgttttaaaaaaaattatattagatcaacgggtaggtgaagaattagttatattataaaacaaaatttgaataccaaatatatatagctataatatagtattttaagagggaaagagtagatcgtagcaggtggacaaacacagctctgctatctataaatacacgcgccacagacaattggagcttattgaagggaaactaattaaaggaagagctgcagctactcctactcatatatctaggaaataagttcccagttaatgttgtacaacttacatgcgttcatggcattctggctacttgcagacctgctgattcttctggcttctgccgcggagagcatctccggccggcctgccgccggttgccagacacggtgcggtgacgtcagcatcccctacccgttcggcatcggccccaactgctcccatgggaagggcttcgagatcgcctgcgatacccgaacccgaaacggcagcggcgagttggtgccgaccctcgccgccgccaatggcaccatccatgtgcagagcctgtttgtagcgccgatcccggaggtcaaggtgatgctgccggtggcgtaccagtgctacaactccagcgacagcgtcaccgagagtttcttcggcgcggtagacctcaacaacaacggcgtgtaccgcatctccgacaagcgcaacatgttcgtcgtcctcggctgcaacaccatggcctacacgaacaacggggacagtcatggcaaaggcccttacgccggcctctactacaccggctgcgtctcctattgcaacgactcgtcgagcgcgcaggacggcatgtcgccggcatcggctgctgccatgtcgacatctcgccgggcctcagtgacaacgtcgtcaccttcggcgagtggtcacgctatttccaggtggacttcaacccctgcaantaagcctttcttgttggcaaggacgaattccactttcagaggtcagattttccaaaggacctcaaccggacccagccggtgtgggtggactgggcgatccgcgacggcggcaactcctccgcattattgtcctgccctgcgccggaggttagggaaaaaatcccgcctgagtacgcctgtgtgagcgacaacagggaatgcgtcaactcccccaatggcccagaatactactgcaagtgcagcaaaggctacgaggccaccccctacctagtcggaggttgcaacggtaagaacacgtacacgagacaaacaatctactctttcctactcgctatctttcatattgttagacattttaattttttaggcctactaccgaatgctacacagttctaatgaaatagctcatatgtgctgacgatatcttaggtaccacaggtaccaaacacgatactcatagataccatactttgatatctgggtattataataacgtcagtatggtacctacaatactagatttgatatcgggtatcaaacatgatatctcataagtatcaaatcatgatacctacctaacatactgatttcaactatatcgtttgaacggtattgccattttatagtatttttgttaattttttcaaagtcaaacttttcttacgtttgacaaaattagtttaaaaaaaatagcaacatttataataccaaatcaaaatgtgttatattatgaaatagagggagtattgagtttgcactattgtgcatcccacgctagtcatgccatctatgtctgtttaccaatacaattttttttaaaaaaattcaaattaagttatttgtacacccgccattgaatcgaacagtatatatgcagatattgatgagtgcgctcgctcggatgaatatccctgccacggggactgcagaaacaccgtaggagattatcactgcaaatgtcgcacaggttaccagcc

SEQ ID NO: 8127 - DNA, 15837 bp, Oryza sativa
cggagatcgaagacgatgcagccccgcgtcgggtgccaagttccgccggaacgtaaaacaaaagttgaagtaaaaaaggtgccgatgcgcggcattgtattgatcgtgaggacagattacatagaccccaagtgtacatatttatatccatgggtggatataagtccttgtcggacaagaaagaacctttcctaaagataaaaggaaaagataaagtccttataggacactaaacacactttcctaaagataaaaggaaactaacaaactattcctaattaatagataacttaccatgccgtattctctttaaactcggtctcttctggataagcttcctttagtagatcaatttccttaaccgaatatagcaagaatccgacaactgacgacttgacaactctcatcggctaatctcaagacttcgaagccgatgctgactctacgccgatgactactccgggcttaccaaatttcactgttaacaactacgtggcggagctggagcgcgcgttggaggtggtcgagacggagtccgcgagggcgcgtgtggagctggagatcgaccgtgcagggaggaaggtcgccggggaggagatggacgacgacgacactgacagcgcctccgccgccgtctcgcgccccgccgtgcccgtggtggcggaggcgacgaccgtgctgttgctcccggtggtgcacgaaggcgacggcgacgaggcgctcgcccacgcaccgaggcggaccaagacggacgtggacgtcggcatagtggaggtggacacggtgggcggtggtgccagggtgggggcccgtggcggagctcgccggcgaggctagcatccgcagccgccgtcgtcgccgccgacgctcgcccaattgtgcccgcagcagccggcgccgctcacccagccgcgcccgcagccacctccgctcgctcagccgcgcccgccgccaccgctcgccccgccgatgcgtgctttagcgaggggaggggatgaatccaggaggagagagaaggtgagcaatacaggagagagattgacaggtgggccccaccgaatttttttaaaggattgctgacttggctgacacgtgtatgccacgtaggatcaaaaccactccagagattgagtaggggggttatttgttcggttttagtagttgagggtgtaaaatgtctggttttcgagttcaaggggataattcggacgatcgcgatagttcggggaaggggtaattcgtactttttccgattatagaatggctagacagcatgcattgagatctatacagtttcttttttaattatatatatttaatatatacacagtaggagcctctaaatagcgacagtgctttatccattgaatatgatatgttagttaaaaaatactaatacgttagttaaaaaaaaaagtacttacatcgggctcgaaggagaacaagttcgcggtgaccagcgggcttgagttgttgttgtgataaggaggtgacagaggaagataagggagagaagatggagcatgatccttttgtgttctcatcacaagtatcacaggtgttctatgtgcaggaaccaaaagcacaaggatggcatgttgcacaaccatataggccgagggatctatatgatatgggtacagaaccatcagatagtgatgaggatgacccaacaagctagttttgttgtgatagacttcattatttaatgggatttgtctgttatttcgatcgtgtgatatgttcatacacttttgaagtattttttatcactaattttgttatctgccttgatatatttctctaactattttctcaatgaattttttcgtcgtgtgttcaaatggacttatttgttcagttgtttgtactatatacaaaatattgctgtgctatgaagaagctaagtatttcttttaggtgagttgttttggggacaaataaatgattttgtgctgatgaggtttacgctaacacccaaatatttgtttagcatcctgcactaaaaataacaatatgctgttctagtgcagtggtttccactagcgaggacactctataggtccagacttcgattcctttttagcccttattttttttgtccagttagctgtaacatgtaaatatattattagattaaattaaattaagtaaaagaaaaaaagagctagctgtaaatgtcaaatatatcctatcttactataaaaaaaattaaattaagtaaaagaaaaaaagagctagctgtaaatgtcaaatatatcctatcttactataaagttatcccccactaacttcttaagcttaacatgcaaagatgccacatcatcatccactaacaagatgccacatcatcatccactaattaacaagataccacatcatcattcactaacaatcatcacatttaaacatcatgcaaacatgctatatctttatagtttttataatttaagagcttttcaaatacaaacatgttaaattataatctaacataattatgtgaattcacatcatgtttcaatgtatatctttattatgttttatgatatcctatatacttatatagttcatcctcacttagttagtgcttaaatgattaatctatggttcaaattatctttctctttttttcctctaattaagtcatatcacatcaattgtttttagcctttagatgattaatctacggtacaaactatctccctacttttcttcttccataaagtcataccaccttactttttacgtttgaatcaccattctacatactatttaaatttaaattatcgtaaaccacattaatttacttaatctgatgttatctagttatcttacacgttattttttttattgttatcatactaaatttccgcagtaatgcgcagagtttcatctagttattgaaatattcatgaagtaacagaaaaaggaacacctgtaactgtcgatctattattaactcaataaaacaatataaaagccaccatattcactctcatgacctagaatttcccatattaataaaaaagaaaaaaatagagtccaagtgtatagattaaaaatatctgtaattcggaataataataaaaggataaaagaagtacatgtagaaatgcaattttgaaaagaaaacttaaattcgtatttaaaaattaaattaagacaagagtcaacgtagaaataccttttaggctgaaaaatatgaaattcggattaaaaatttaaaataaatattgaaataaaattatatgtataaatataattcaatctaaaagtcggaataaaaattaaaactacaagaaatagtccatatagaaatacaatttgaaactacctaaaattcagataaaaagatagcattgtgtacaaaagagttcatggaggagttcatggggtggcttggacatgggctacccattttttgggctagatctagcgtctggctggagcattctcgtctttatctcagcccgtggcgttgtgtgttgcagagacgcaaggtgggtgaagaggtaaagaaaaaggcctagttgacatatgctcatgtcgggtcatgcatacaggttggcatctagaatatgcgctggactgccatggtggattcagcctaagaaagcaaagagattttctttttccattacatagacaagatgcacgtgtagtcggtgacaccacactcatatactcacgtacactacgttattaaaatagacgaagacacaataacattttacttaaacttatgctggcttcgatttctgcaaatactagtaggcagtatatgctgataaatttaaacaggtaattatccaagagccaaattaaccaagacagtaataagaaagcacaatagtatcaataatgcaatttggttgaagctgtcctatagtatagaactatcctcctttttaataaaacggactagtagcactgtgtactgtaggagtactactcgattaaagcataacttttgcttgtttaacaccaccaattggaagcaagagcatcaagggtgaacactgcatgcagtgtgcacgttcacagtgcactactcttaatcgatcggtactgcctgataaaatcaaacttacggcattaattttgaacctgcaaattcggcgcaaatttctaatcatgatgtaatataattagctgatctcagctcactcccaggtagcctttatcgatctacatgatgctatgcatgctggcgcctatataaaccatgcatggcctctgcttcttcttcactcatccacacatagtaaggaggaggggcaatagagtttgctaattgctaggattgattcaagcaatggcatcagtagtgttggcgaagatttccctgatcgaacaccttgcgcgcagactgcacgcgtccggcacggcacaacacagcaacagtgacaaggaactgagaggagaaattcagagcagagtgaagaacagagaagtttcagaactctgaactagatcgcacaatctttggggaattttctggttgtttttcattcaactgaataataaacttacaactgtaaaactgagctaaataaactatttatactccatacataacagaacgaatccgaggcaaaaatcgtgccatcccacgatccgcaattctctgactcgctacacacacactcccctgcgctaaactcacgcacacgacacggtcttcaactcccagatcgccgcatcacccgcgcctgctaacaacctgctggcgacttattctccacaccgttgcaactgcaaaatggatcacgatggggccacagctgaagatacaatttcaacatgtagcacgaacactactactcttcgccgccgtcgtctgcgccgccgtgatggcagttgccgctgctgcggacggcgaggtggcggcggtcgtcgtcggtcaggccaagtgcggcgagtgcaccaggaagaacatgatggcgcaggatgctttcaagggtatatatatatcatgatgatgatgatgatgatgatatgttcatcattgattaattgcgatcgatatatcaccgtccttgattaattgtttggtgatgttcaggtctccaggtggcgatcaagtgcaagaacagcgatggcgagtacgagagcaaggccgtcggcgacctcgacggcgacggcgccttcagcgtgcccctcgccgccgacgacctccacggcgccgccgactgcttcgcgcagctgcacagcgcgacgagcagcacgccgtgccccgggcaggagccgtccaagatcgtaccgctgtcgtcaacaacggacaacggcggcgacaaggctaacaccttcgtcgtcgtcgctggcaagaggatgcactcctccacatcgccggcggagtgcacgtcggcgttcctgtacgactacttccacaagcaccccttcttcgactatttccacaagaaaccccaaggccccgaacccaagccggatcccaagccaacgccattgccggcgaacggtggtggtggcggtgcgggaaacggtggtggcggcgcccaggggaacagtggcggagctgcgccgtctcccagctctccgccggtctaccactgaatcgatcgatcatccattccatcaatccacacttggttgcgtgattaattaatttgcaggtcagcttgttcgtgaagaataaatataagttgtgagatgtgagaggagtgtgactgtgtgagatcgatcgatcgtgtaggatcgaatcacaagaactaagccaaccagagggggtgaatggttggtatacccaaaaaccgaaaacttttagcggaaataaaagttaccctcgaaatcgatggagatcggtctgaccgaagtagattagccggtctgaccgaagcgtagcccccggtctgaccggtgttgatctaccggtctaaccgccgtgatcgcctgccgcctactgtcgccgccgtcggtctgaccgccgtgctcccgccggtctgaccgccgcaatgccgctggtctgaccaccggtgagttgtcggttagaccgccgaaacccggtgaaacacaaatcgaagaactcttaaagtgaatgacgactttattaattctctctatgtttacaaagtgcaccaacaacactccttacaaaaatttcgactaaactcgaaaccctaactcaaaactcaattctattgctctctaaagcgataccgggaagcctcacgctccccctctatttatacatgaggtaggcagcctaaagccacgaaccaaactcatactaggagtcctaaacaccttaggaaaccctctagtacaagaaagaaactttacataaccaatcgtaccaaatttggactccttccaatttcgactccgcatcccatacgcacacaataactccatcgtatgccatatggaatctccatcaaccacgtgcatcaactctagccttagtatcccgcatgatctctgaccacaacggacgtcgtcttatccccaagccaactcccggtccatcaccgtaaatactctcccgagacatcgagtcacctacacatggaatagacaaagaaaccatattccgagaccaagctatctccaacttgactcattagcagtaaacaatagtattacatacgtataatatccatctagaagtcataatcatgaaataaactcggatatccaaataaacaacccgaaaccgaaaccgacacagtgtcggccggtcagaccgcgggctggccggtccgaccgcttgatcaccgctggtctgaccggcaacacctgcccggtctgaccggtccacataaaatgataacctgtagattcacctgtgaaatccaatcatctccaaaccacttcgtgaataaatttccaattacaaaaccaataatctctaatgctcaattgttcatcacagaataattatcaaaaacacctttgattttacagatcgatgtatgtgttggagacttggagtcagtgcataagcattggctttcaggtgataaataatttcagagtgcttatgtgtgtcgtgtctgtatttattcgcacatgtaatgcgacatgtgttctacataatgtaatttaaatatttataagattgttcatgttgacgtagaatcgcaatgccacaccttgagcacgttatgtgtaactcgcggcagcactcggagacgcgccatcatagggagtgggtagatgccgcccaacgaccacccgcgaaggaccccatcaggatgaacgtgcgtcggtttgttctaggctcagcaggccaactaggacgtcctctaataccgtagagacgagagatgacaagtaatcgaggatttgaggatttagaatttggataggtagcaagaaggagagagatgtagaatatagagggtttggataaataaattgattttgatgcatgattgattgcttgttgtttcaatcatccttggcccccttatatttataaaaggggtggacttgcttcctggggtttttccatatgcatttaggcatataaatcaactaagacttgaaaatttcggtctaaaacaagaaaacacgagaaatatctaaattggacttggactatgtgattaagatctaaccgcctggataccaatggtctaatctcagtgcattgtctgctttgaccggccacataatgacggttagaccagccttcgcgggaaagctctggcattttttaaatttggctcaaacttgctataactcgaccctactaccaaatttgattatcaacacatgccccccctgtctttttggcaaacttatgagccaaaaaaatactatgcatgagatcatctaagggcgatatccaccaataccgaccatgaattcctctaaggcttaaatgtttaatggtgatgtaagaaagctacgagaggcctctcttgttcagattgtattttgtttttctttggcctccactcttgcctcaccactttcttgtgtggattcttttgtgactgattcttttctctcaaccggctatgagatgagtgtggttgattatttaaaatgggtcaatgtggaaactggcaatgcccataatggataataatatggtatataaaaaggcatcatccacataccattaaaaatctataatacatttataccaagcgtaataccatggaaaaggagaagtaagttgccggtggtgcatactcgcttggtagatgaacttgatctccttggtcgcttgccatattttgatatctccagattgtcgtcttgcctcctaagtatttgtcgaggaatgatcctctctagcaggtggtcgtgagacccccccctttgtgagttcggccgggggaaatggcacgatgatcaagggcctacttccgcttgcggtctaatcgctagatcgctctcgtggctgtgtgggagatcaaggattatacaggttcgggccgttattgagtgtaataccctactcttgtgtatgggattatggtgaatttttacatgaggttttgagctctaagggaaacctagctgttcttcctccgagctcaagttctctgagagtcgtcccctttctcggtgggcgaggtcctccttttatagtccaaggggataccacatgcactgtttgcacctacccctccatcggagggggggcacatggccctaatcataccgctatcctttgcttcaactggaagcaacatggtcgcctggctccaggtggggcccagcgccgcccccgcctgacacgggggacatccctgtcattccctattattgtatgaagacttcggcggctcaccacgcgcgtggggcgcccctggaagcgtgccgatgggacagggcatacctgcccccactccgcctgacacagggcggaacgtgggggcactgcccccgtcccgtcgcctgtgaccggtcacaggccggtcaagctcgattgatatggtgttgacggtccttaaatcataatatcggaccgtcaatacctgcatataatgaaataaaacatggtatccaacttagtggtaggtattattactaatcatttccactagtattggtgaaatatgtgtatgcaagtaatttgaggagaaaacacatccgtcatgtgacaaaatgcacctccgcgcattcaggacgcgtttacacggattagaggcccaataagtcaataaaaaccatttagaattgggccaaaacatagcccaggttgttgggggcccaataagcaacctcccggctgaaggagaggccgggaggagagtttttgggtttggccgaacccaccagttcggacaaaccaatcctggcgcttcccatcatctgctttcacctggacggctcggatttctcccctaaggcagttgcagggtgttttggtcatttcccatacccctaaccgtcatttggagcctatataaggaggtcacattctcatttccaagacacacaattttgagctgaattataagaggctctattgtatcttttgtacattataataaggtagagagtgaggggaagctctggaggagtgcccggaagtttggcgctcatccgacttctatctcgacgagtgtagcttcctaggaggaattcggggggagtaccggagctgtcggtacactctgctctgggttcggagaacctcttctataaagtaagcattcgtgttcctttcttatattatttaattactttgtctaagtaagatagattttcatctttgcgggttctttatctagtattcatactaagtgctctagtactaggactctggataaagaaggaagttcatgtacaagtattagagtagtaattaataacttagacgtggtgtctaggttagagattacctttgtttgttgtgtatcccacggatttgtcagaggtaggcgacaagtggtaacagccctgaatcccgtcctaataattctccacgttcggatacatcatagagctatagccggaaccacgctggcagaccagcaggggtcggtgcccgaagcaacaaataggaaattaccttcaacttagcttagataattaaaacacatagaaagtcctctctagcttgcctagcctatctatagttgttgtcattggatcgtcttagccttaggtaaattacacacgttccctgagttcgatatctttttggggtcacccgaaggtgaagtgctacaacagtattccgtgcgcttgcggatttatctgtggacgtaagaaataccaacacatgggtcaatcgagcggcgccgcacatccctccacgccgcattaaatgctgcttggggcggttggtgcaccgcgcattgaaggcgcggagcagtgtctttcgccccgcccgctctccccgccacgaggtggtcaggcgagggcctcggggtagcacgccccgaaagcccgaggagtgcgacgtggcaccccgaggtccctctggccacctcagcgctacccgagggccgggggaaggcgagcccacgtagccacgcgactagatgggaaggatacttccctctactgtgcgtacccccgggcccatttcaccgacagtattgaagtcttcaatgtggtcttctccttgccatcgggaatctccttctcttgcaattcaacggtctgtataggaaaaggtagctcatccacctgcatctttgtaaaagtcaatcgtcattcgtcaattgccgattgaacttgtctatggaatacattgcaatcatttgtggcatgagaattggagttgtgacacttataatatgctcgccgctctattcttcaagtgaaggtatggcgtggccatgtgacaatttaattttcttcttttactagtaattattcaaaaatcctattgcatttggccacatcaaacgtgaactttatttcctcttgctgattcttacgactaaccagcttaagagcggagcaaacggatggtttagagttggagttcaaaacccatttgtgtatgtatacatcaactgtctctttgttcaaagattcttgttgatcaactatattaacatgggcacaatcagacttaactttttgcgagattttggcctctttaactcggctctcttgagttaaagccttttgaagtaattggcttacatctaagaaagtatgaccatctagcttttcttttaaatattcaagtaaaccagaataagccaaatctaccaagaccttatcagaaagtgttaaactataacatcagtttcttatatatataaatcttctaatgtattcaaaagtaggctcgttatacttttgtttaaccgaggttaagtacgacaagtttaattcggtctcaccactaattaaagaagtaatcatgatatttttgttctaactcagaccaatcatgaatacagttggtgcaagtgaaataaacccaaaaaattgcgcgcatcaccaaataaagacaatgggaaaaagcctaagtttcaaaatactactagcactagcttcttcgcattgaataataaactggtcgatatcctctaaagtagaccggccatgttctccagtgaacttacacaatgaggcaatcaaaacccttgaggatattgaacattatcgtagtggccagtatagagtttttgatatatacgccttttaaccctagtatctatgccgaaagcatttttgaaagcttcggcaatctcatcgctaagactcttgggttatgctcatgtgccattgactacaggatctgacaagactcttacttgttcatatcccatatgaactcctcaaattctacttaacaaaaaattgattgtccatataaatatatagcccctaggagagaagagcatcgaatcataagccatagccacaagtcacatcgaatatcaatcaggaggaagtgattaaattggcactataaacatgtagttttgtaataattttgttacttaatctatagctttgtgaccatatatttcaaatctttagttttgtgataaacttaacactatatgtacttagttttatgatataataccttaaatcaatagttttgcaatagtttgatcaaagtatttgtagttttttgtgaaatttactcatttacttacaaatagtatcaatcatgcaatttggttggaactgtcctatactacagaactattctcccttttcataaaacaggctagtagtactgtgcgctctaggagtaccagtcgattaaagcttaactttgcttgttaaacaccaccaatcggcggcaagagcatcaacagtcaccactgcatgcagtgtgaatgttcacagtgcctccatgaactgctagctgctactcttaatcgatcggtgtctgatcaaatcaaataaaatgcacggcgtgaatgattttaaacctgcaaaatcggcgcaaattgctaatcatgttgtactgtaatataattagctgacctcagatcactcccaactagtagcctttatcgatctatataaaccacatgcatatgcctgatttttcttcactcatcgacacacacagctctagcctcttgccacatagtccaaagagcaatagagttttctaggattgattcagcaatggcagctgtagcacgagcactactcttcgccgccatcgtctgcgccgccctcgtgatggctgtcaccgccgctgcggacggcgaggcggcggcgatcgtcgtcggccaggccaagtgcggcgagtgcaccaggaagaacatgaaggcgcaggatgctttcaagggtatatatatcatgatatatatgatgataatatgttcatcgataattaattgcgatcgatatatcaccgtcgttgattaattgtttggtgatgttcaggtctccaggtggcgatcaagtgcaagaacagcgacggcgagtacgagagcaaggccgtcggcgacctcgacggcgacggcgccttcagcgtgcccctcgccgccgacgacctccacggcgccgccggctgcttcgcgcagctgcacagcgcggcgagcagcgcgccgtgccccgggcaggagccgtccaagatcgtgccgctgccatcaacgacggacaacggcggcaataaggctaacaccttcgtcgccgtcgccggcaagaggatgcactactcgtcgtcggcggagtgcacctcggcgttcctgtgccccttcttcgactatttctacaacagaccccaaggccccaagccgacgccggcgaacggtggtggcgcggcaaacggtggcggagctgcggcgccggctcccagccctccggccggcatatcacagctgaatttttaattcatccattccatcaatatccacacttgcttttttgtttgatttcatggcttggttaatccttttggttcttgcatgattaatttccaggtcagcttgttggtgcagaataataaaagttgtgagatgtgagaggagagtgtgactgtgtgagatcgatcgatcgatgtgtgtgagaataaaattaagttcgtgcagaagtgcttgtgtagtacctccatttattggcatatctaatacactagtaataatatgtccgtgctaacgcaacggtgataattttgattgaaacgcaacggtgataattgataatgtaaaaggcaaaaggtaatatttaagattcacgaataaaataacgatagagagatttgtattgttctcatgaatgttattacactgttaataacttcccaaaattggccatgaatagagttctgcaatattttcatcactgtgagtgaaacttttcaaaacacaaacaatagctcatggtatctaactttctataccacatatacaaatattacctgcacgttctacaggtgctattttttcaaaacatgcatcgcctggaaacattcagcaacttctgctcctcactggtcaccttcctccttatagagcacctcaagaagccacataaacttctctatcgaacgcatatcaggagaagcaccatattgaagacagtgtattcgcctaccacgaggcacacgcttataaagatatattcatcacttagcattagtaatttaactcccaaaatatttggaaaaacatcccggtttctactaaggcaaaaatatgtagcaaagcaaatatataggcattaagcatttaatagcaaatgataataaattatttattttaactgaaagcgctaggcttttacatggctgcaattttgttcgtgtaaatgagttgaaaaaggtaaaatggacatgaatactatgttaaatctgcagataaacttttcggatcatggaaatgcatttgtcaaatttcatatgttcagatcaaatttcattataccctgcgaatacacaggacgcataaatcatcaatattgcacagcaccaagagctaggcaccacggaaagcagtccaaaaaaaccataggatgcatgcaacatttcaggaaaattaagaatgatatgatgtggttcaggagaaggagaaggagaataattctcactcatattcttgtaaactatttaattctgatatataagaaaaaatactgaaggaacataaagagaataaaatccagtatcaacaaacacttttgaaagtgcagtgtgacagtagaattcttctgtttgaccttttttcagtgaatagtttcagcatatttggttcaattttaaatgaacaacaatagtcaggaaacctattcatctagatcatagcattttataaacctgctgcgatctctctagaatctcccatccaagaaactctaagcaattaaacgttcctcttccctgccactcaccagcgattctcagcctagcttctcctgcggttgtagaagacaatccaacgcataatcacacacgaaaggaacaaacagcacctaagaattccagatatacagaacaggttgcatgtaataatgtcgagcacgcaacaaattctccacaaattggatcaagaaagagagcagggaaaataatggaaaggaccggacctacgcactcggcggggggagcagatccatctcccaccgcctgacgtcctccgccatcgagaggatccaaacttgcacggttggaggggctgcgtagcaagaccgaggacggcatttgggcacgagaaagacgatctgtcctaccaaaaaaggagtatttggttgagattagctttgttagaaatgaaaagacaaataagataagcaagatgatcttgattttagctgctagaattaaggccatgtaataacaaatagaagaatttcgaaaaattaaatgatttttccattcaatctaacagtgttttgactttgtgattccttcatatggaagggcagccaatttgtaacaaaggcagaaactgggactatcatatcgtaaaaaatttctaaactagtgcataatctcggaagtgaagcctaacctattttccttaacagctaaacacatttgaaacaaaggcagaagctgagacacctgaacagaacaatttgttaagctatttctaaatctagcaaatcaaatcaaaactttggagctgcattagtttgactacaaataagcgtgcagatcgatgcgtgagaccctggggtgcagtggcgatcgaacctgaaatctacttctctttttttttctgcaatgtcccctgtgccggtatgaagtatgaacatgtgtgccgacgttcacctatacagctccagcaatcatgtgccatcatttttattgatggaagagtagaaaaaaatctaataccatgggagattgatttattgcaaggagcagggtaatctggagatggcaaatcacaatagaaaataattcaacttaccagccgtgaccagatgaatttccagccactataggagcatctccaaacctccaattctgatattttg

SEQ ID NO: 8128 - DNA, 8718 bp, Oryza sativa
  unsure (1)..(8718): unsure at all n locations
ttggctattggttttgcaaaccatgactattagagggcagcaaacatctgattatacactaattgcttttgtatttccttttctttaatcttatcttaacatgcactgttcaagaactaatgcatgtacctcacttgttttcagattcctcatactggatagtgtccttaaccttggtggatatggggctgtagcatatgattaggtctgaactgctaagggtggtgctactgcctctggtttttccttagttcaattttatcacctcttaatcaagtgatttatgtgaagccaaaaaggacttgccacccttaggatcgtcaatgtacaaattctttcttagcttttttttttttaattcacaatcctctgttaaaatgctgaggagaatggtcaattggtcatgtacatgatgaatgaatgaatgaaatgaatcagacatttgagggtggttgtcattgtgaatgtcattagctattgaaattggtatgctcatgtaaacaggtgtaatggacaataatgtgaaatagttttctttttaatggtagcagagcttgctgtcagacagtgtgtcggcaaatctacttttttcatcaactcgtctgtcggtaaagatgtttctgtcgctagacatgtctgtcgttgaaggtaatataggggtcagttcatctgtcggtaaagatttatctgtcggaaaagccctttgccgacaggctttcgcctgatacacgtaatctgtcggaaaactctctaccgacagacaggatgatgctaaaggtggtatttaccgatagatgagctgttgcagctttcaggtcatggtgtagtgacttttgtgaagtatgtaaaactatatgtatacataaaagtatacttaacaatgaattaaatgataggaaaagaattaataattacttaaattttttgaaaaagacgaacggtcaaacatgtcttaaaaaaatcaacggcgtcaaatatttagggacggagggagtatatggtaagacttgtttgcgactctagggcagcagagattatcttacagaacatatcccagacgaccgtcagggagcaccattggtaccatcattcgagctggtgctggtcctctaccatatatcatgggctgtaacgaaaatgtccatagagacaaatacaatgtaacagcagtggcggatgcagacaaagcatttgaaaacgaagaaatatttgtgaataaaatttttacatgtgtgttcttagaaatctaaaagcaaaggttgaaaaataaacttcaatgagaaaatttcaaaatcaactctaaatttaagattgaaaatttaaattttggctgataagcataagcgaaaagatgaggcttcaggattcctagcattggtattcggagttacttaaatcatgtttcatagaatttatataaagatgtgttaacaaccaaatttggaatcatcggtgtcaggaaagaagattagatcgaagcgaagcggaggcggagatcgagttcggaaacagagcaagaatcggctggagtccagatcggctacgattaggatcggctgggtctgagtcagactaggtaagccggtacagccgattccgacaatgcaacttgatgtatgatattgggttgaattgaggcgcttcaaggtgattgccgcacatggatagagtcctgagaaggcaattgtatctattaattaggatgttttatgtaatctccttagagatacgcttgggcaaaagtctgccgcaaagacatatggtatcttagagtttgttagagatagtagtcatgtccgttatggacatatcttgtaattctcgggtataaatagacccgagccctatgtaacttttaacacacatgttcaatacaatttcggcgcatcgccacccttttgctttagttttgtttcgacgagttcttactttcaggttgagctgcatcggtttcgatcttcaacaagaggtaaaacttgttatgacggcttgtattctcgggattagtgctttcatctttatgacactctaatcttgtttatgtaattcgtcgagttatcatatatcttacataatctctggcaatatcgctatctaacctacaatcggctaagatctatcgaagagggcagccgattaggttagattttgacgttgattcagattatataagatatctaccactctatgaaacttccagcggcttgattttctagatattgttcttcttttcatatttaatgctgcatcagttgagtttgatctattaagtcgtgcttagaatatcaatctctagcctgccttctggttgccgattagggtagcatcagagtttcagccgatcttatctgatttaactatatttgctctatatgcttcattgacatgttaaatatgccctttatgtcaagatattgttgtatctaagtacattaggcctttgtttgatatattatacctgttttaatatcctgatatagagtagtatcggagtattagccgatacatgctagatctatctaatcggctatgctataaacatacatagtcctattattaatatatatttcgatctaagtgatttatactgtctcggcatagtgaccgatctatcccaatcacttgatttaagtatatatcgatataagaactatatattggaaatatctacagccgatcgaatagatttagttctttattgtctatttacaactgccgatcgattcacatatgacatcggctcaaagataaatggtatgtcatcggcacctagtcgatcaactatcatttatagatttaaccgcggtttgtttgcttctatttcttgttgattacaggatcaaatcaactggcacgctcatacattcgaaggcgagctttggacctgcactggagttaagcagatctcccacgcttcgtgttttctgtcaacacgcttttggcacgcctggtgggacatttaagaagtcagccaacaattcttcttcatggccgagaaacaaccaccaccaccatctagcccaggctttgttaaggacaagatgctaaagctaggattgactgacgtcaatgaaggaaacgtcgtgccgatcgatccagaaaaattcacacctgagcagaagaaagagtttgaagcaatgttgcagcaagtacgggattagttcttgaactcattcatgtagacccgcaaggggacacttgtttagaagtacaaaataaaagtggttgctgatgatcctgggaccagttcttttaaggatggagatgggaaacaagctccagacggctcggctcagccgagtatcaaaggtgctactgacggctttctaggaaatcaaggcgacaattctcaaggagtccatggagtacaaggtgacggggtgcatggagttcaaggtgatggtgctcaggggctgcagggaggaaatcttaatcagaatagtgatgtggcacaggattttttcaataacttccaagatcgggttgattacgctgtgcatcatgctttgatcaatcagtctggggtgttagtcaatagcttatcaaacatgatgaagtcaatagccgatggttcaatagctgagcatcaggctgcaggcccggtttatttgcaaggaggtgtcttcccaaattatcggtctttgattaccgatgttcagccatctactcaggcggttacctccgttgcaccaacaacttagccaacggcgccggcaacaactcccctacctgcttcatcagcgatggcgccaggccagccggtgaaccctcggttgttaatgagagagcagccacagcatggcgggcaggttgtgaatcggctgacccaagatcaggttgctgccatgtttctgccacctcaatctgttgttgatccaatacatcagcagccgattcaacagacacccccaattcagcaggttgtacaaccaatccggcaacaggtcatgcaaccattcagcaaacaccaccaaggcagcagcccctacagccgattcagcagacgctgttaagacagcaaatcgttcagccgatccagcaccaaggttcaataagcgcatcggccgggtttgcaacgcctggtggtcagcctgtacaacaatttttaaaccaagttgtcccagaacatttggttcaccacgtacagccgggtggcacagtaatgcctcaagttattcctgagcacttggtacgcaatatccagccgaaccttcataattaccaagggggtaacttgaattatcaatatcagcctccttccccgcaagcccaatatcagctaggggcattggctcaacctcagtttgcgtctcaatacggtcagttcgagcccatgcaacagcagtcacaaggggcagctcagcaacaaccgtgggccaatgtgattgctgacgtaatgagggaacagtttgggcttaaaccaaaagagactggaagtttgtatcggcagccttaccctgagtggtttgagagagttcctcttcccaattggttcaaagttctagacttctccaaattttcgggacaagatggtgtgtcaacttatgagcacattagccgattcttggctcagtgtggtgaagcatcggctgtagacgctctgaaggttaggttattccggttatctttatatggatcggcttttacttggttttcctctttgttgtatgggtcgatcaatagttgggccgatttggagaagcaattccacagctatttctacggtggggttcatgagatgaaattatctgacttgatagcgattaagcagcggcatgatgaacctgtgcaggagtatattcagagattcagggagatgaggaacaaatgcttcagcttgagtttaactgatgcccagttagccgatctggcctttcagggtatgattgctccgattagggagaaattctcgtctgaagactttgatagcttgtcacaactgatacagaagctaaccttgcatgagcataggtctgcggaagttaggaaaagctctaagaaggttaatcatgtttgtctgtacatgtatgggtcggatgatgatgaggatgattctgaaatagctgcagccgaatgggtgaggagtaaaaaggtcataccatgccaatgggtaaaaagttctggaaaagaggagaagtatgactttgatattactaaagctaacaagatctttgatctgctactccgagagaagcaaattcaacttcctgctggtcatacaatcccatcggctgaagaattaggcaaaaagaggtattgcaaatggcataattctaggtctcattctactaacgattgcaaggtttttagacagcagattcaagtggccattgaggggggcaagattaggtttgattattccaaaaagccgatgaaggtcgatgataacccttttcctgttaatatggtgcatacagctggccaaatagccgatagggtccgtgcaaggggttttcaggcgaattcggctaagattatcgacaaatatcatgaagaatacgatgatggttttgatccccattggggttgtgagttctttagattctgctggaatgaaggtatgagattgccatctattgaaaactgccctgggtgcagtgatatcgttgagagctcaagccgatcatataataggggtaatcgactaaggcagacaagagtttctgttcatcaaagattgggtccagtgaatcaagatcatggccaagaggacaatgtaatcaggaagaatcaatggtgtccttctggtattttcacgaagaatcagaagaacatttaataaatctagatttggaaataaatgtggatggagaaacataagaatttctatatgaacagaattggttgtagaatggtaagctctaaaggagaagtgttgactctagggagatggtatttcatgtactctagagatgtttgggaaaggatccaaaggaaatatatcccagagcaacggttagaggctagagaaataaatggaggggttttgtaaaagtcaaaagaaataaaaaggagggttttataaagtttgaaataaataaggattttataaaatttaaaagagaacatttaactttacaaataaaatttaggtccaaagtaaaagagattaaaagaaagtaaggttgcttcaaaggaaaagtcgagaagagcacaactaaaacttttcgcgaaaatttttcccagaaaatttgagtgcattgcatcaacccttcgctcattcatcttctcatacattgcaacaagaaaaactaatattataaaaaatcacatgattaggttacgatttcgatgtcaatatagttttgaaaatgataaggtgatttttttggataatggattaaattcctgcctttacttcaaataagctacaatcacttattacaaaattctctcaaagagagcaaacattcagaccacttcatagcgacgggcacgtccagcaagaacagatccaatatacatcatcaccatggagaccaataccatgtagacttctcacagcatgactgccagcaagcaccacatgtaggcgtgagcgttaacgaaggaacgttaacatagagatcgaactaagaaggcaggtagatcgccattactcaccttgcagcacgggatgacttaatgttgacttccccaaccatgagtggcgttcgacggttggagtccgatgatcattattggtggcactagcattatactacctctaatgttttgacttttttctaagttaaacttctatatatttgatcaaatctatagaaaaatatagtaacattttcaacacaaaataaaccaatttaataaaaccaattatattcaattctagatttaataaaagcaatttggtattgtaggtgttgctatatttcattataaatttgattaaaattaaagaagtttaacataggaaaaaaatcaaagtgtatatatggtaccaacagcagcagcagccgcaatagccatcagagggttcagggtatcgccgtgtcacaccctgaagttcttctcccaagcctaaatcattttaataaatgaccccaagaaattgtttgagtaatggcaagagagaaaccctaatttaataaatgcaattaataattggaaatagtatgtggattttttcttgggttctacatgtcaaaatatgctaacaggatttttagtgaaattttcagagctctagaaataattttaaccaattaaaattgagcacaagcaattattaaacccctggaaaatccttttccttttttctttttcgttttcccgcctttttccctaaatgggccgtcggcccatttcccctcccctttctgcccagcaagtggcccagccgccgccccgcgcccccttctctctccgggacaccgacaggtggggcccacctgtcgggcccgcccccaacctttggacggcgcccgccgcgcacgttacccacttcccgcactcgccctgcacttccctgcaaccggcgncccacttttccgcccgcgcccacgttcgagatggctaggattcaaanacaaatcccaccactctccctctctctccacctcccccacttcgccggccactccctgcctctctcggccacgtccgacctccccagacctatataaagcaccaccgcttcctcctccacttttttccctctttcgtcatccactcccgagctctccttcgccctagcaccgtgcaccacccgccgccgccgctttagccaccttcggccgccgatcgtcgccgctagagccgtcgccgagcctcaccgtcgccgtcgtcgggttcgcaagcccgcgggccacgccgtccaccccttccccatccaattccgccgtaggagtccgctttccaccgcgcgccggtgagctcgccatggccgcggccttcggccggcgattttgcccgcctcgctctccctcactaatctctctcggttgtttccctaggttgccccggagcccgtccaactgtcgctgtcgttttccatcactcgccgtcgtcgatcgtcatcagtgagacccctccccttttcccctctctcctgcgccgcctagccacgtcgccaccgtcggccgctcgccgccggtcgcggcctcgcgccgccgccgctagcgccgcgccgccgctcgccaggaccgctgggctggcttaagccgctcgcgcatgctctcggccatgcgccgccttcgccgtcagatctactcgtgttctttttatagtaaaaacatagtgaatcttctaaatatcatagaaaattcatccgtgctccgtttaagcccattcaagtctcagtaaatcaagaaaatgcaaagaatccattaaaaatggttttgttctctgtttcagtagtgttatagcctatttgcattgtttgctttgtatgtcgcatagattccggctctcccgacgctctggtgtacttcgaaatagtcgtcgaggttcctccagccgcagagcaaggcaagtcatgcttgtcacttgaacatattgatcccatattgcaaatgctctattattttcctttaaatattgcatcgttttataatgttacaatgggatgattacctactgtctcagccatatcatttgttatcctgttgctttgctagtttgggttgtaacatgactagatgttggattagggaatgcttacccattcttagttcaactagtacacaatgggggaattacgttaatgcatagactccagat

SEQ ID NO: 8129 - DNA, 10497 bp, Oryza sativa
gtgttggcgaagatttccctgatcgaacaccttgcgcgcagactgcacgcgtccggcacggcacaacacagcaacagtgacaaggaactgagaggagaaattcagagcagagtgaagaacagagaagtttcagaactctgaactagatcgcacaatctttggggaattttctggttgtttttcattcaactgaataataaacttacaactgtaaaactgagctaaataaactatttatactccatacataacagaacgaatccgaggcaaaaatcgtgccatcccacgatccgcaattctctgactcgctacacacacactcccctgcgctaaactcacgcacacgacacggtcttcaactcccagatcgccgcatcacccgcgcctgctaacaacctgctggcgacttattctccacaccgttgcaactgcaaaatggatcacgatggggccacagctgaagatacaatttcaacatgtagcacgaacactactactcttcgccgccgtcgtctgcgccgccgtgatggcagttgccgctgctgcggacggcgaggtggcggcggtcgtcgtcggtcaggccaagtgcggcgagtgcaccaggaagaacatgatggcgcaggatgctttcaagggtatatatatatcatgatgatgatgatgatgatgatatgttcatcattgattaattgcgatcgatatatcaccgtccttgattaattgtttggtgatgttcaggtctccaggtggcgatcaagtgcaagaacagcgatggcgagtacgagagcaaggccgtcggcgacctcgacggcgacggcgccttcagcgtgcccctcgccgccgacgacctccacggcgccgccgactgcttcgcgcagctgcacagcgcgacgagcagcacgccgtgccccgggcaggagccgtccaagatcgtgccgctgtcgtcaacaacggacaacggcgtcgataaggctaacaccttcgtggccgtcgccggcaagaggatgtactcctccacgtcgccagcggagtgcacgtcggcgttcctgtacgactacttccacaagcaccccttcttcgactatttccacaagaaaccccaaggccccgaacccaagccggatcccaagccaacgccattgccggcgaacggtggtggtggcggtgcgggaaacggtggtggcggcgcccaggggaacagtggcggagctgcgccgtctcccagctctccgccggtctaccactgaatcgatcgatcatccattccatcaatccacacttggttgcgtgattaattaatttgcaggtcagcttgttcgtgaagaataaataaaagttgtgagatgtgagaggagtgtgactgtgtgtgagatcgatcggtcgatatatgtgttggagacttggagtcagtgcataagcattgcctttcaggtgaaaaataatgcgcgtttcagagtgctcctgtgtgtcgttgtctctatttattcgcatatgtaatgcggtatgtgttctacgtaatgtaatctctttatgtatttttaagattgttcatgttgacgtagaatcacaacaccacatcttagcacgttatgtgcaacttgcgcccaacgaacacccacctgccagggtgaacgaacgttggtttatcctaagctcggcaggcaagctagggcatcttctaataccgtggaaacgacagatgccaagcaattgaggatttgaggataataaaatttgagataggtagcaagaaggagggagatatatgtagaatatagagggtttggataaataaattgattttgacgattggttgcttgttgtttcaatcgtccttggccaggaatgctactgggcgagcgatcgcccttaatcgctcagggcgatcagtttttgcgccccccccccctccttccctccatctctccaccttgtttcctttgttggcaccgcattactttcctattttagtaaatttatacacctaaagtttacacatctaaagtttagagaccaaaaatttataagtcaaaagtttatacatcctattcaaatttgaatttgaattcaaatatttatatatatatagtatttctatacatctaaagtttatacacctaaagtttatagacctaaagtttataagtcaaaagtttatatacccgtttcaaatttgaatttgaattcaaatatccgattcaaatttgaatttgaattcaaatatttttcatatatagtatttctatacatctaaagtttatacacctaaagtttaaactttagacctaaagtaagtttatagacctaaagtttatatacccgattcaaatttgaatttgaattatatcttattcaaatttgaatttgaattcaaatattttctatatatagtatttctatacatctaaagtttatacacctaaagtttatagacccaaagtttataagtcaaaagtttacatactcgattcaaatttgaatttgaattcaaattttttatatatagtatttctatacataaatttttctaacttttatttttcaaaaaaatttgtgtagtctactgtagtataaagaggagaaggggaggaggaataggggagaggagggagtatagggggaggggggctggatccgatcgcccaggcgatcgcctggcgatcgatcgcccattagggccccccgtccttggcccccttatatttataggaggggtggacttgcttcctggggttttttcatatgcaattaggcatataaatcaactaggactcaaaaattttggtgtaaaacaagaaaacacgagaagtatctaaattaaattggactcggactatgtgattaaggtctaaccgcctggatacctatggtctaatcacagtgcattgtccggtttgaccggccacataataacggtcacaccagtcttcgcgggaaagctctggcattttataaatttggctcaaacttgctataactcgactctactgccaaatttgattatcaacacatgcccccctgtcttttcggcaaacttgtgagccaaaaaatactatgcatgagatcatctaagggcgatatccaccaataccggccatgaatgcctctaaggcttaaatgtttaatggtgatgtaagaaagctacgagaggcccctcttgttcagattgtattttgtttttctttagcctccactcttgcctcgccactttcttgtgtggattcttttgtgactgattattttctctcaaccggctatgagatgagtgtggttgattatttaaaatcggtcaatgtggcaaccggcaatgcccataatggatgataatatggtatataaataggcatcatccacataccattaaaactccataatgcaaaccaagcgtaataccatgaagaaggagaagtaagttgccggtggtgcatactcacttggtagatgaacttgatctccttggttgcttgtcatattttgatatctccagattgtcatcttgcctcctaagtattgaagtcttcaatgtggtctccaagtgtaataccatgaagaaggagaagttagttgccggtggtgcatactcgcttggtagatgaacttgatctccttggttgcttgtcatattttgatatctccagattgtcaccttgccccctaagtattgaagtcttcaatgtggtcttctccttgccatcgggaatctccttctcttgcaattcagcagtctgtataggaaaaggtaatgcaggtggatgagctacctttgtttctaattgcatttggccacatcaaaagtgaacgttatttcctcttgtcgattcttacgactaaccagcttaagaacggagcaaacgaatggtttagagttggagttccaaacccattcgtctatgtatacatcaactgtctcattgttcaaagattcttgttcataaactatattaacatgggaacaatcagacataaatttctatgagattttggcctctttaacttggctctcttgagtcaaagccatttgaagtaattggcttacatctaagaaagtatgaccatctagcttttcttttaaatattcaagtaaaccagaataaggcaaatctaccaagaccttatcagaaagtgttaaactataacatcggtttcttgtatatataaaatcttctaatgtagatcaaaagtaggctcattatactttttttaaccgatattaagtacgacaaatttaattcggactcaccactaattaaagaagtaatcatgatatttttgttctaactcagaccaatcatgaatagagttggtgcaagtgaaataaacccaagtaaatgcatcaccaaataaagacaatgggaaaagcctaagtttcaaaatactactagctaggcttcttcgcattgtataataatgtaacatcctcaaattttaaactaaaatttgactgcatcatgctggtttttgactagattagtacaatttaaaattttatttgaatccttttattggttcaagtattattcctttagaactcttttaacttaccctaattattccctttatcctaaaacttagtgaattttagcaaattctcacaaatttcgaactttagtatatttctttagtttaccccctttcattagtgagaattttctatactctaaaccctagtgaaaccctttcaaacttatagattaaattcattcttttctaggaaaaatattcaaaatttctgaaaacactattcattgccctcaaggtgttcgatgaaatgcccagcccaactatctcagcccaacatctacccaaacctttgcaaagtctaagtttgatccttggggaccacaacccatccaaaactgtggttcactttgccttttccaccccctttacttgcgccaccctggcatcctccatcgccgcacgccgagccgccgcgcgtcggcttcagggccgttcgcgtgtgcccgaccgccttggcgcgccgctagtcgttcgacgccctaagaccaccgccaccgcaccaatcgtgatgaagacgaagccaggatgacctccgccgcaagttaccgccgctcgacgctgtgcacgcccgtccaaagccgccgccaagtccgaattcgcttctacccggggtgaatcgcgccaattcttgccgcactgttggattgaagataagcggtggtttcccctatcacaattcaaaccgaccaccgccatgctgaccgttttaaccctcgccgctgccgcgcgtcgagcccggattggcgccaacacgtcgccagacgttttcacccatggtcaagtcaagccttcgtcagtaagaattcgaacgtggcctcccgccactcaaattgatcttgccctccctctcacagctccctgccacccctgccgtgctcaatttccaagctcatcaatggcgttgatggcgcccgagctcatccacttcttctggccctataaataggaccccaatcccttccttgtccatcatcgatcatcatcaaccataaccccacaaccctgaagctctgctttgccaaaccataccatcaaccacttccgcccgtcggtcgaacaccttgtgtgcgattgacttcacgcccctccatccactctccatcctaactaatccttagaacacctaatatcaaccatgctctagcatattggagcctaaccgaagctttgcgtcgagtttcacctcgtcgcaccgagctaagcactgtcgcccctgctctgctctggttctcaccgccgagaagtttttccggccgcaatccgtcgtctcagcctatctcggtgagttctttcattttaaccatctacgtactccctagattccatattcgcaatcggccagcattaccatgccaccttctgggctgccgacatgagctcgtccgtcgccaatggaggtgctcgtcggcaagttcttccacaccttgccgaaagtcggcaagctacctaaatccttctaagtaccccgtagatgctctaggaaccctccccgtgctatgcctaactctcaccaccccgatcaccttcacggcctatccatgtcaccgccgccctagccgttagcccacccacacatcaaattaacccctccgccgccactcgccgtcgccggagaaccctagctacctcccctcctcggccgcaaccccctttccccctctatcaccgccgaaatcgctaaccctagcaccgccggccgtaaatggggaacggctagaggttgaagaagagaagagagaaagagactgacaggtgggacccgcacacagtatcatttcacatttaatttgattttcaaactttagaagctcatatcttttaaaatatagatccaattccagtgaaacttggaccaaaattcttctaaaatcattctctatcttttgagtctacttttgctatttttctattttattttatttttcctatttttggattttatttgaattccttttgaatttgaattttatatgtttaaccctaggtcttgaagagtcctctgacatattagataatatcagtcaatctcaggacatcgagcaaggcaagttactattctaccttttgatcatttaagcctatattttacaaattatttatttatagccttctattcaatactctattttatatgcataattcaaccatagaaacccaaacaatttagtattgcttattttgcttacaatctggtctaaatatttcatacttagattgggacagtacgtaggaattggatgattttcgggtggctagtactgtctcgatcgatatagttattaccaggtacttatgtcgaacgaacaggtacgaccatagtttctagaatagggacatacctagtcattatattaattagcaatgtggtacctctgtatcgtggttcttatttttaagtcctcgagcaagaggcaactatagccacgaagggcaatttttaccattaccatgtacaagtaaatggtcgatgatactcgagtataaattattatgttataattctaaaccctgatcgagatgacgtggtgtcatacgagatcccccttaaataccccgggaacaccagaactcctctcgctgctgataacgttacgttcagagcgcatgaggactagagttcatggaacaggtaccacaattgttaataacctaatactgggtcatgactaagctaatgaatattggcaagtcgtggactgcgagtaaagcgtacatctactgtagtagaatattcatgaaactattcgaatggccgtactcatggaattgagtaccgagacccatatagtactctggttagaaacctaaagtctatgtatttacaaactcttgctttaatacttccagattgtttattattgtcttttgcaaagaactctactctataccaacacataacatgtttccatggtaacttgccgggtattgtgaatactcacccttgctcttataacccctttttcagatttgggtcaagaagaagactcctatgattattactacgatgactccaataacatagaaaatccctagaggttatacctccctagtcagaatgtataaaacctctatgtaatagtcttacttatgtgagtacctattcttgtaaaaccttagtattgtaaaatttaacgtatgcaatgaagaaccagttgcatattatgtatcaatatttactgatccaggggttgatacattaatctcagccggatccaagtttttaattttgggacccgacaaataaattggtcgatatcctctaaagtagatcagccatgttctccagtgaacttacacaatgaggcagtctaaacccttgaggatatggagcattataatagtggtcagggtagagtttttgatctatacgctttttaaccctagtatctatgccaaaagtgtttttgaaagcttcggcaatctcatcgctaagactcttgggttatgctcgtgtaccgctgactacaggatctggcaaaactcttacctgctcgtatcccatatgaactcctcgaattctacttaacaagaaattgattgtccgtataaatatatagcccctaggagagatcaaagagcatcgaatcataagccatagccacaagtcacatcgaatatcaatcaggaggaagtcaatagctagccgatgattctaagtcgttggattaattcttggtgaatgcttgttggtaggctagattagctagcttgctcccccattgtaatcagtttgatacattctagagatattcatataaactggattatggctattacccacatcggggcctgaatcaatataaaaatctctgtctctcgtttactttacggcaatctcgcgtatactttgataccaacatcttctatactttaaaaaaactattatataccgtcaacaagtatattctctaccattatacagacaagatgcacgtagtcaccactaaatacatacaccgcacttatacactcacgactgtgttccaatcatatgtttataaggcggatatgttgatcgaactatcacaaaaccacagatttagcatcaaatttatcagaaacctacatatttaaggtcaagtatcacgtaattaattatatatttaacattgaagttatcacaaaactacaaaattttgaggtcaaatctatagcaccaccattatgtttgagctataaatgttgtagttttgtgattaaattggcactaaacttgtagttttatgataattttgttacttaatctatagctttgtgaccatatatttcaaattaaatctgtagttttgtgataaacttaacactaaatctgtagtttttatgatataacaccttaaatcagtagttttgcaatagtttgatcaaagtatctgtagtttttgtgaaatttactcatttactgaaaaatagtatcaatcatgcaatttggttggagctgtcctatactatagaactattctccctttttataaaacaggctagtagtactgtgcgctgtaggagtaccagtcgattaaagcttaactttccttgttaaacaccaccaatcggcggcaagtgcatcaacagtcagcactgcatgcagtgtgaatgttcacagtgcctccatgaactactagctgctactcttaatcgatcggtgtctgatcaaatcaaataaaatgcacggcgttaatgattttaaacctgcaaattcggcgcaaattgctaatcatgttgtaatataattagctgacctcagatcactcccagctagtagcctttatcgatctatataaaccacatgcatagcctgctttttcttcactcatccacacacagctctagcctcttgctacatagagtttgcgaggatttatcagcaatggcagctgtagcacgagcactactcttcgccgccatcgtctgcactgccctcgtgatggctgtcaccgccgctgcggacggcgaggcggcggcgatcgtcgtcgggttggccaagtgcggcgactgctccagcaagaacatgaaggggcaggatgctttcaagggtatatatatcatgatgatgatgataatatgttcatcgctaattaattgcgtactcagctcgatcgatcgatatatcaccgtcgttgattaattgtttggtgatgttcaggtctccaggtggcgatcaagtgcaggaacggcgacggcgagtacgagagctaggccgtcggcgacctcgacggcgacggcgccttcagcgtgcccctcgccgccgacgacctccacggcgccgccgactgcttcgcgcagctgcacagcgcgacgagcagcacgccgtgccccgggcaggagccgtccaagatcgtgccgctgtcgtcaacaacggacaacggcgtcgataaggctaacaccttcgtggccgtcgccggcaagaggatgtactcctccacgtcgccagcggagtgcacgtcggcgttcctgtacgactacttccacaagcaccccttcttcgactatttccacaagaaaccccaaggccccgaacccaagccggatcccaagccaacgccattgccggcgaacggtggtggtggcggtgcgggaaacggtggtggcggcgcccaggggaacagtggcggagctgcgccgtctcccagctctccgccggtctaccactgaatcgatcgatcatccattccatcaatccacacttggttgcgtgattaattaatttgcaggtcagcttgttcgtgaagaataaataaaagttgtgagatgtgagaggagtgtgactgtgtgtgagatcgatcggtcgatatatgtgttggagacttggagtcagtgcataagcattgcctttcaggtgaaaaataatgcgcgtttcagagtgctcatgtgtgtcgttgtctgtatttattcgcatatgtaatgcggtatgtgctctacgtaatgtaatttatatatttataagatttttcatgttgacgacttgacagaatcgcaacg

SEQ ID NO: 8130 - DNA, 11585 bp, Oryza sativa
ttaaataaggatgtttgaattgcccaaaatgagtaagttggtaaagaaaataaataagggatggttatgatttttttaaaccacttagtttatattgctccaatggtttaccaacaatattgtcgctttctacaatatgccactggatttatcaattgtttctacaatatatgaacatttaaaaaaaaatcaaaatacccttgtagacaagcatccaaaggttgacaattgatttatctcattatacgtttaaaaaattatgaaatttttggtgtagtttccttacacaacatagaattttctgtttatgtttcaaaatttcttgcatgtattttttgaaaagtctttttatgtggcattagagagaaataacttacacaaaaaaatgaaaatattttgtgtagcacatgaaagatgatttgtacagaaatacaacaccacagaaaagtatactatgtgagacataacagaaatattatattttatagaaaaataataaaatgtaaaaagcgtgaaacttatacaaacttatattcttatattatgtgctaggaggctaatttttttaaattgttgattttttttttagttttgtcaattaactgccaacccttatatttttaggcattataagaaattctttgtttggctgaatggtaaattgtagaaataattgaaaaacatagtcgatgggaaatcattgaattggtgtaaactcaagacatatatatagtatattatttcatatattttttaaaaattttgaggtgcatatgtacctagggcaagccttgctgcaagagggaattttgagctgcactcttgtttcttggggccttcaccactccactggtaacccacacggcagtggcattcataatcccctgggatgttgttgcagacaccgtagcagggatatttcttcttgttggacacatcacactcgttgatgtctgtgcatataaaagggagcatatatattagttgttagatcaactgttactagtaaaaaaagaattaattttcgtaggctttggcttctttttcctttttctttttgacaggaacctagctcaaaatgaaaatcacctgtcaagatggcttaggctgtcccaggattataaaccatctatgaaaacctattttttaattggcaaattcttaaaaaaccgcctataaaatttgtagctcttcatgaaatctacattgaaagttttctttccattttagatagtacatttagatgtctaaatattcgttacaaactcttcagacctatttttgaaaatgaacttttgagtatttcaaatgatcttggatgaagacattctatattaaaattgtagagcataactagatctacaactttgtactagtaaatatttttataagctctagtatctatttttgtataagtggttctttaagaaatcaaatttttaggaactcatagaaaattcattttaagtcctattgaggttaactaaagttctccaagatcgttctagtaagacttaggctctgtttgagtctcctgaagatgaagatgaagataaaaatgaagattaagtgttttacgtaaaacaatgtggtaataacttgtgattaattgagttttaattattataaacatgaaaaaatggattaatctgatattttgaacaacttttatatagaaaattttcacacgaaacgcactgtttagcagtttgaaaagcatgccacaaaaatccaaaactttatctcccatgtgttgggttcttaaacatgaccttagtaactccctccgtcccaaaatataacaacttcgagcctccagatctttatcccaaaatataacaacttctacaccaatattctcttctcaagcaatcataatctcctatcattcaaatttcccatggagctccacttttcatccaaacacaaccgtcccctatttaattctacatactttcttaataaccatatccaaccctaaatatgcttatattctagaaggagggagtaatatttttcttagaacattttttttagtatggtcattcactaatgtcacgttagataacatatcaactcatatagaggtaaatgataagtaaacaattatactaacataaatataaatgaaaaatattgtaagggtcatatatagctttggtcacctcatttgaacttaaaatgaactttccataaatctttaaagtttagacattttcaaagaataacaagttttttcagatggacttcctaaagaaatgtcattttagacgattctcgtatggaaaggctcgcaaaaatcaacttttgaggcggttctcttgaaaataccacccttaaaaataatagcactactacaataggaaaggagtagtatcttgatatatatgaagtcgtatgatgaaaaaatctttttatgaaaattggagagctctacaactatatagttgaatgttttttcattcgagactttttacgggtcctgatattcgttacgaaatctcaaatctattgttgaataaacaaacttttatgtttttaaatgaactcagatggagctgttccctatatcaaaattgtagagctcgatgtgatctacaaatttgtggttgataaattttccttttgatatcatttatagtgcaatttatatattacaagttttagagaggcgaagtcaaaagaataagcatctctcccacatgcacaaagttctttataggcgagatggtaaggacgctacttgaagaagaggtccccgttcaaatcctatataccacacgtgtgcaaaattacgcaactcgtgaaacttgcgacatgcggccgtgtatatatagttgcttactaaaatacaaaatatgtttttccttttttttgcgcctaaatcaaatagcgaaaagatcaaatgaaacctggtagattttttttagataatgaatttaaacaccaacagggttgatgtacacaacgaaaggtaaaaataaaggtaaaatggtggcactatttagcaaaactgttagctaataaaataaaaacattaatcttacccttgcaaccttggtccttgtcgtaggggttaccctcgtagccttgcttgcacttgcagtagtatccgggaccgttggtggagttgacgcactcgctgttgtcgctcacacacgcgtacccagccggtttcttctcctgcacctccagtggagggcaggtaacggagtcacggatggcccagtccagccacaccggcatggttcggttgaggtccatcttgagatcggcgctacggaactcgtactcgttcttgtcgacgaggaaggagtagtcgcaggggctgaagtctacctggaagccacgcgtccagggcccgaaggagacgacgttgtcggtgaggcccggcgagatgtcgacatggcagcagccgacgccggcgcaccggccatcctgcgcgctccgggagtcgttgcagtaggtgacgcagccggtgtagaagagtccgctgtagtgggtgttgctgccaccgctgttcccattctgtgtgtaggacagggtgttgcacccgatcacaacgaacatgttgcggctgtcggagatgcggtacacgccgttgttgttgaggtctacatcgccgtagaacctcctggtgacgttgtcgccggcgtcgtagcacttgtacgccacgggaagcatcaccttcacctccgggagctgttccaccgacaggctctgcacatggatgctgccgttggcggcggcgagggtcggcaccaggtcgccgttgccgtttcgggtgttgcaggcgatctcgaagccctccccacgggagcagttggggccgatgccgaacgggtagggaatgtcgacgtcgccgcacctagcctggcagccggcaggccggccggtgacgacgctctcgtcgccggcggcggaagccaaaagcagcaggctggcaagtagccagcatgtggccatcgacgtgtatacgtttatatacgacgtagtagtattaactcgtttctttctttttcctagcttggtttgaatcagctggagtagctagcacactcgcctatgtcccccgggcatgtacttatatagcagccgatcccatccatcatccagcctgttctgcaagttgtcatgctcttcctcatattataattcctccgtcccagattcccttgagtactagtaatgcttgagtactagtattgtaatgcttgagtactagtattgtaagtggcactacttaattagatccttaaagtatggtaaaatatattcagtacgcgctctctatttggttttatcaagaggccctttcgtaagtcgtccgattagttgaaaaacaagaccacttgcaagaaaaaaaggaccatatgctatttgctacatgtcatgtcgattcgcatgcatgctatgaggttaataccattacactaatacattttatttttggtacaaaatctttgataacttatatgttttagactgcatattatttgtaagatccgtagcaacataccgttagaagtgttacttccatatttttaaaaagttactttcctccagcagtgtagttacttttaatattatcataaagagttactttctatatgacgccatattttaattttttaaaaaatataacacagtgattactttaaataacgaatatatgtatttacttgaaaatcttttctacactttgcttgtaaatttattccacatattttttttatttcaactcagtcataatgtaattacttttagtgctaaagagaattacttctattatatagctaagttacttctgcaatgtaaatataaattactttcaaattaataaaatgtttgaatatattaaccgttggtctcgttttgtcatatattttgagtggagtacaatggtgcaaatatatttttaaaataatatacagtttaaaagataaaagttatcaaagaggtttagaaaaatgtgcactattgttttttttagctaaagaggattcatatgtgagatagagtggtcgttgctttaaccaaactagcgaccggtaactgtgtagtcgtgtcctggcttgcgtggtgtaacgtcccgattttcgttcgggattaaaaatcattaataatgcattttctagaaattaaattaaagttaaagcaatttaattaagtgaaataatgggagaattaaaatttttccttaaaaatcattggctgaggatattttgtaatattctttgtgccctaaaataccctccggatttttccatgaatttttggagctcaaaaaataatttccatgaatttttggagctcaaaaaataattttaaagtcacaaagttcattaaactcatttatataaaaagaaaacgaattaaatcttctcccctccctcccttgggctcggcccaagtctccttccccctccactggccgctctcttcttctcctccttcctttgggtcgtcagcccagccggcctctctctcgtgcgaagttcgtttcgcctccctcctctacccgagccgccaataggtgggccccacctgtcggggttatccccttcctccaaccacccagccgccatggccggtcattgccacccacgtcccgccgaatccggcgccctcccgctcgcgtcctcaagcccaaaccgagtggaatcggttcccctccatctcccccactctcccccacttcccccctcaaaaatcgtcggccgttgttgcttcgattccgccatgtccggccatgttctccacctccgagcttataaaaatgcaccccggcctcccttcatccgtttcctcaactcgccgctccttcccgcgcctcctacctcccccagtctgccgagcccacgcctcgccacttgtgctggcagctccgctgcatcaagccctatcccagccgctgctccgctccaccaaactgccgcctaaacgctttcttccctgtgcacctgagccaccaccaacttacaccacctccagccgccagccactgccgccctagtggccgccgcgctgcgccaccgccgtcatcggcatcgctgtgccgagctccaccccggcagccgctcctctgcctccaaccaccaccaaaacacaaccccaccgcaaaacccacgccgccactgcccttgccgcctccgaccagcaatcatcgccgtcttagccgctgtcgtcgctcgccatcacctccgtcggcttcgccgtcgagtaccgcacctcggccacctcctggccctagtcatccaccgctggagtcctcttctccccgtcgaggtgagttttttccccgtcgccggcctccggccgctatttcccaccgccttgtgcctcccctttcccgtctaacccctcccttctcctcctcagctcgcggccgtgcctgtccgccccttcccaagcgccacccaccgtcgtgcacttggcgaggactcccacctccttttccttttcaccggccgcgctgcgctgccgctgcccacgtcatcgccgccggtggccgcgccgccgcgtgccgtcgctcggctgggctgtcctgagctgtgcccatgccatgccgtgcttgcccgtggccgcccgatcggccgccctcactaatctaggccatccacgtgttgccatggtgccaccccatgtcggtgccctcgtggcaccacgtcggccttcccgtctgccgtggtcaccacgtggccgccacatggtgtgcccgcggaccggtccaccgtgcacccgcttcccttgagccaccgacaggtggggcccgcttgccggtgccaccaattcccctcggtgacgtcataattcacattaattgtgcaaattatagaaattcatttaaaatgtctcaaaacttctaaaattcataactaattcatacgaactccatattgggccattcaacttgcaaaattcatctaaaaatgagctatacatgtttgtttactttttatgtactgtttacttggtttttattagagttttttctcattttgtgtgccagcgcgtagattccgccggttcagaagtttgctttcgcctcagataagagttcagaagattgttttgaagaagcaaggcaagtcacacattccccttaagcatttttagcctaatttataaatgttttatcgtttacaaataaatatgcatgtttttctaattacatgggaatatggtttacctattgttggctgttgttaaacaccgattctataccaccaacatctgcataaagttcaaataataaaacattcagcatagtgataggtgcttaatctcacatattccacaagtgttggtgtatatttgtatgcagatgataaaccctgaagttgaaaggaaaatcagactaaagtgagaagaaacatgtatccatacaaggatgggttgtgaaattcctcaaaatatcaaagactcagcccaaaactccgagaaatggataaaggaggaccaggggaggagatgggccgaaggccaggccaggtgggcccagcccaggttcgagcgaaccccttggttcggctgaaccaaaatctcagccgtttaggctggggtttggcgtggacggtcctggtcatctcctgatggcggttgctgggcatttctgacaattcgcattgtgtaagcgtcatacctacctctatataaggagcttcactctttcactctcacacacacttccaagcttgtgctgaattataagaggctctattgtactatattgtatactagaataggaagagattagagtagaagaagtcggatgaattctggagttgtcggtaatcttctctcatttctcttattctgtttattactctgaattcaatataatattcttcttgagtaatttagatttatctcgtgagaattatctcttggttagttcctaaatagcatacgagacaattgttcactatagttcatttatttatagtgattgctttagtgtttgattggcactagagtagttattaattgcgtagacgcggtgtctgggtaattaatcttcagtggttgctgcgtatcccatagtacatttgaggtaggtgtagaggtggtgacagccctagacactatttctctagacactgttaaacttaagtattgcgttaggattaaatttaagctttccctagacactgtttctcactagtaaatctactctatcctggcctatcatttgcttgctgtccttggatgaaccggaggaagatctgaccacatatgctcccttggattcgataccctttggaatactccgtaggggaagtgctacatcggtatatctgtgcccttgcggattttatctgtgatccaatttggaggtagttttgcaataatgcacccgaccacaaatttgtcgggtaagatacacttcaagagttcgagttctttagccagtactcacccagaagcatttcatagctgtcagccaaagagtgacccttatctgcaatctctaaaaatgcacaccggtgaatttatccggcctcagtgcattggcaaaaccagcttacgagcgacggcgcagcacagagtaggaggcaaacccaaaacaaacaaaactgaatttcccgtagcaaaacaaaactacaaaaggaggctgaatctgcgcaagggtgaggaaccaattttgcggaccattcgacgcgtacgttgtgcatgcgcgccacttgccctgcctggccaggcgaggcgagcgagcgcgcgcatgtgttccccctcttccctccacctcacatgcttcatgtagctaggagggtatcttcccttttaaggaggtccccctcttctagaataaacaaggtggtactaaactctctatgcatgccatcccatgagctggttttttgtgattttctaaagaattaatcttcgaatgggctaaggctcatctattaattccaataagtgcgagaccgcacggtctcgtggaatggaagagcgagaccgttcggtctcgctgaagcaatgagcgacactgtctaacggctccttttcattagtgattaattactcaattaacaattaactaataaaaaattagtgattaattatctgattagcgattaagtaataattaattaattactaatcagataattaatcactaattaaatcggcatgacacggtatcgctgttgcttccgcaagaccgaacagtctcgctcttccatttcggtctcgcgctttataccgcccgtgacgttgttcctgcgtcattttcacgtaattgttatgtgagaccgacattatatttctgtaaaaatttttgtatcccgaatatttctgagaaaaaatagaataaacagtatattttgaaatttgattcccagtgtttcagggattgtttagctagcttgctaccactttcatccttatgaatttttacatcaccagattttgctaggggaacaaaacatactcttgtcattatcaccataccaaaatttattatttctggtaattcttcttataaaacattgccggaatttggtaaagctacaaaccaagcatgaccaacgttaaaaaaatttggtaattacgctataatttaccaaaatttaccaatgcagatttcgaattttagcaagaggttcgttttggtgacaaactgaacaactactaccgcttgttgggcgagaatcctcttgctcggttgcccaatttgaagagaaaaaatgggcatacttgctacggcatgcatgcaagacgagtactaactagtttctttttctttttttctcatcactttaaatgttttttctcctaaactacctacccgatttatgatccgatcataccattgaatttgttgcaattaaatctttataataagatatcacatgattatattttcataaaataaaaatatatgttttagactgttaaaacttaatgtttcctgtgtagtaacgacatgtttcaaagtgtgcattcgctatatttcacagaatttattgaagtacttgccccaactctttctcctctctatctatgcatgcatgcatggatttagcaaccttcaaaatgagttttctcctaaactacttataatctatgatccgataataccgttgtattcgttataactaaatctttacaagaagatctcgtatgattatgttctaataaaaaaacatatatttcaatttgttaatactcactgtttcatacgtgatagcaacatatttcatcatatgtcttcactgtgtttcaaaaaaaagtttaaatattcgttataactaaatcttcacaacaaaatctcgcctgattatgttctgataaaaaaaagcatatgtttcagtttgttaatactcattgtttcatatgtgatagcaacatgtttcaacatatgtcttcactgtgtttcaaaaaaaagtttaaatgttgctgtgactgattttttttactatatataacttaatgtttcactggtagttaactgtaacataacatttgactgatggagtttttttttcccctactctccctcctctctatccatgcatggatgcatgaattcaaaatgaattttctcctaaactacttatctaatatactatccgataacactcttatattcgttgtaattaaatcttcacgacaagatatggcgtgattatgttctgatgtaaaaaaacatatgttttagtccgttaatacttaatgtttcatagcaacatgttaatttcaatgtgtgttttagctgtgtttaaaaaaaataaatgttctagtgactgttttttcatttcaccgtatataacttaatgtttcactggtggtcaaccgccgtatttgacaatatttgactaatgtttcactggtggtcaaccgccgtatttgacaatatttgacttaccgatttttttgagagggtcggacgcccgatttggaagtacctccctcgttgggtagtgctagccggtttttgaaccggtgctaatagcacgattctgcatttgtgtgacacctcattttctctagtgccactttaggtgtttatcctatctggtaagctatatttattgtcacggaacattgggaataccctaaaatcacacacacacacacacagcatatcttttatttgtgccatggtcacttttgttgacggaatttcccacatatctgtggattgtttctctgcatgtcgatcgaaatatgagtctagatcaactctcaagtgatgggggtaattactatccgcagtagttagcttttaatgatggggtaattgctatcagcagtatgccatatgataggaacggggttgcgggtataataattaatttcgcatcatgaattatatatatggccttgtcaagttgtcatcttcaagacttcaattacatataataagagtcacttcaataagtacctgtccgtcaaagtatattaaggactagatgagcttgaagaaaaagtaaagaatttagattggtataagattaatttttacgagtaccattcggtttgtagaaagaaagtatacgaaggatcctataaattagtttgtatagagaaaatataggattttttccatctaatcaaaccttttgaaaaaaaat

SEQ ID NO: 8131 - DNA, 5888 bp, Oryza sativa
cgcctccttcgacggcgatgctgcagcaccagccaaagagacggtgccgcctgcctggcaactgtgcccgaggccagcgcccagtgaggtggccagcgtgaagagagctctgtcaagaaagcatggctcgttccggcgtcacccagccaccgctcgcgcccggcccctgtgtcgccccatgtctccgtgagagagagtgagtgaagagagagatagaggggaagggtaggtatgacatgtgggtcccaccatttttaaaaaagaaaatgttgactggattgccacgcgtacattacgtaggacaaaaccgctctaaattggctcgaggggggtaattcgtccggtattgaaagttcagagtgagtaatgtctggttttaaggttcaggggtaattccgtcgaccacgatagttggggggagggggttaatttgtactttttccttatcgggtaagctatctttattgtcatgaaacattaggaataccctaaaatctcagacacacatagcatatctttaatttgtgcgttggtcacttttgttgacggaatttcccatgtatctgtggattgttttctctgcatgtcgattgaaatatgagtctagctcaaatctcatgtgatgggggtaattactatccgcggtagttagtttttaatgataggggtgttagagcgaggctaataatatagccgatctgctggctataaggttttttttagcattctcttaatctacctatataatagttagctctttataattaatgcatgatccacttgtctctctcacagaatttcttggttctggtgttcaagctagctgtaagtttacagcccgcttctcctctctcttttctcttttctcttccagctcagcatttagccagcatttagcatttagtcagtatgccatatgataggaacagggttgtgggtataataattaatttcgtatcatgaattagctagttatatatatagtctttccaagttgtcatcttcaagacttcaattacatataataagagtattgaagtacctgtccgtcaaagtatattaaggattagatgggcttgaagaaaaaataaataatttcgattggtataagattaatttttacgagtatcattcggtttgtagaaacaaagtatatgaaaaggatcctataaattagtttgtactagaaaaatacctgtgcgttgtaatggatgaatgctattgtaatattattattattatctttatcgggtatgggtgaatgctactgtaatcttattatttttatacgttttagtttaggtaaaatttactgtggaaattcgcttggattttttttaagaaaatcatgagttgcaattaggagtccgactttcatctcaagttagcatgcagagttttttaaacaagattttttatatgactctttttgtatttttaaaagcaaattagcttaaaatccaacttaaacacttatctgtatttcgaaaagcgaatgaacttataaactgactcaaacacgaatgacgtaccaaaataccgacgaaaacatttaaaactggctcaaacacaaatgacgtaccaaaataccggtaaaattatttttaatttttataataatagagatagagaaaatatatgatttttccatctaatcaaaccttctgaaaaaaaccatatatatgtatatatatatatatatttatatatatttggcgaacgctttacatatatatatttattcgtcactttttctatttttatgcgcttaaattacttcaaaccgaatatacccaagaaggaagtcattaggtgatgcctagctagcttgcttcttgcccagcgaagattgcgcgcgagtgcatagtcacgtgttcgatcagcgtggctggcggatcggagtacagtacagataactaacctcgagaccttgaagacatgtacccaaaacatattttgctagtcattcaataaggaaatggactcactgcttttagtcaaattggtagctgtgccatctccctcaattcacaataaaaacaaaaaaacgcgacccgaggttatgatgcaattagtaaatctcggctcttcagcgtgtttaattaattgaagcccccataattaagcatccacgttgtccgctggttcagtcaaataaattttagaatgacctactgatataaggttggtcagtcaaaaataaaacgacaagcttagctgaaatttgtatgttttggcagttgacgaaagcgatgtgagaattaattactcacaaaaaatgtaaatttaacactacgcatcgatctgtctaccagctgttgtcagccctgttccgtggttcaatgatctggcagctgatcagcgcatgcgacaagactaatcgaaggcatgcatgccgtggagtgttcgaccctccttcttcctcctcttcttgttgttgttgaaacgggatcaattaatcatatataattaattaaccgttattcaattaaacgcattaaaattaaaaaatcgtaaaaataagtgcaatacattaaaagtggctaaaaatataatagaattttaaaaatcatatataattaaccgtggcctgattaagagcataaaaataaaaatcagaaaaatatgtaaaatacattctgtcgatgtttgagatcccgactacggtattttgtatagtaagaggatcgttggtaccagggtatatgcaagattgaagtaaaagatataaagataaggatttttatacaggttcgggccccttatctaacaggtaatagccctacaccagtataatatttaggattacctatctattcacttggcggcctgaaatatcatgacgtagtcgacaacggatagtcttcctcctcgaatccacactcggcgagatcagagatagcgctagatccctcttgttagcctccgtagacaccatattaggtttgtctaggcttatctctgatgttgatatccggcagcttgtcttgtcgtgcgttagcttgatctattgtatgtcgtgtcttgattttgttctttcctcccctcctcctaggggacctatttatacccataggtgtccccttgtccaagtataactaaagagaccaatatggatacaatccgagcagttgttatagtttccatatagaactctattcgtccttccctatctgcagctccttctatatatgaggtacgattccgtataagacttggtacatggtgggccctgccgagcttagtcaactactattaggtatgtggtatccataaccaaaagaggttaaaaattataataaattcttaaaaatcgtatataattaaccatgctcctattaagtccattaaagataaaagcaatcataaaaataaggagaatagattaaaaagaagttaaaaattataacaaaatttttaaatcatatataatcaaccgtaaggctagctaggataaataagaaaatcataaaaataaggagaatacattacgaataatttacatcgtccacacaccaacctaggataaataatttacataagacttgttgtattagtcacattatacaaccaatctcatagcgtgatggttgacacaaagtactttctccttatgaatgctccttcactgtgatcattgttgcgaataatttacataagtaagggatattctcatttgataagaggatgcttgggtcaaccgtcaccacgaacggaggttacccgtcaaacttatcgtaatcttcatctgtcttatcctcctttttccttgggagaaccatgtggcactttggcttgtcgagccctttccccttctttggtttgctacacatgtcctttacatagaaaacttgtgttacatcattggctaagatgaatggttcatctgagtacctaatgttgttaaggtcaattgttgtcatcccacactcatcaaccattacgcctccactagtcagcctaacccattggcaccgaaacggatgagaccttaaaatgtgttgcttttgccttccttgtccatggcatcgatacaaacaacgttgttttggttcatgctctttttgtcttgagctcttgtataaaatgtatacccattgatctcatatccttggaatgtcaagactaagcaaaatggtcccctcaccaaccaggctagttgttggtcaatcgtctcgtgtcagggttgtggatatataatgcatacctcttatccttggggtcgtgagatatatggatacagtataccctcaagtatatgggaaggtacctctgaattgaggaaatcggctgatcagtaaggaatcgtttctttgaatagaaggtgttagagtcctattcggaggagataaggatttttgtgatatcgtgtaaggacaggtatctccgagttctacttggacgacaagataatctgcggtacaaatagaggaccactagaggggggtaaggcatcgaatcttagcgtaagacacccaccatagcaaaaccaatccagaggacttgaagcaaactcaccgataggtcttgtcgagccattctcgacacgcatctcatcggtaatctcgggattctgttgttctctattgtactctgtggttttctttataagcccatataaactagattaaggctattacctcacgagagacctaaaccaatataatctttgttccatgtgtgcttgttgtcgtatcgtgtagattctcatatcaacgtaccccaataccctcagaatacggtccgcgggtatcatccgtcaatagtaagatcattttccatcaatcataaagaacgtactcggaatagtttcactgccaacagttaactccacatttaacacccatttagcatctaatgaattccctccaatagctgatgaagatacaactagctcggatataaccatgactaccttatgtattaatcaaccaaatgcgcatatgttctatattagatttacttgttatatatttgaacaaatgttgctacacaatgagttccatgtgttttcgcctgcagaggtacttgcttgggcgaaagaaaagtgaccgagcgtaaggaatgcatagatgattaaagaagttgattggggaccaaaccaagactttctccaagtccacttccatctcaccacttcactttttgtccatagaagacaagagataaagttctacacattttggatttggattcaggcctcctgatagcatcaacttcaaacggatcgagccgctgaaatagtaggaattttggaagcgatgagtacttgttgtaaagcttatggagtctactttcagatggttttgatcccacatcaaaattcctacctagctgctgggaatctacaaaacaagccatgtacctcatccagtccgaatctgatttgggtttttgtcttctaattatgtgtcacatcttgattttcgtttcaggatttataaattatttaataaattaataatagaatttatattaaatgatctttaatttacaagtgaagtaaaatgtgggaaataaaatttcctaaatataaagcatggatggatttaattttttattaaattctccatgattaagtaaactctctgaaattttctcggattttttggagctcaattcctaaatgatacaaagaacagttcagtaattatttgattattaatgatctaattatatttggtaagagcttttcttggttaagatccttaaattataaattgttgtttaaaaggaattattagaaatgattttaaaagcctaaaagagaagatctaattttaatttgttaaatttcaatataaaattgggctagataaaattttattaaatactttgcttaattctataattcctagatttttctgggatttatttgagctaaggaa

SEQ ID NO: 8132 - DNA, 9560 bp, Oryza sativa
  unsure (1)..(9560): unsure at all n locations
gtcaggttcgtcttcctcgcgccgccgccgccggccgaaaccctagcgcaagccgccgccgttcctttccaaattcggccgttgtcacgcccagaaattcacgaaccagaatttctaagctgaatgtgcattaaacccctgtccaggaccagccagggtacacaaacgacaattgttgacatacagatccacgtcttacaaaaatataaaagattacaaatgcagcggaaaaagataaaagcgagctaagcctgaaggcttgactcctgcagcgggcgactccattccacaagcatccttgactgcagcgacgaaaccaacctcttcgagacatcttcaactgagaaggacttcaactctggtgtgggggaaaagagagcaagactgagtactacccactgtactcagcaagtcataccagaagagaaggtatgatgcaagatatatccaagggaggctaaaggtttttttgcataaagccggcatttcaagcagtagttgaaagccgtaaaacagttgtagtaattaatccatattaaccaatcactgtccaacgttacaccacgttgcaacaggcccaaaccaccacctgaactaaccagttccaaaagctaactagggtgaaactaatcacggtgaatctggtcgacctcccataaccgcgggcacggctattcgaatagttttactctgatcagaggtgtacaactgtacccacaagacacagccccacgacacgttcccgtgcgccgacatgccaccacgacataccggaaagaggccgtgacaggacccttcgcataaccccctctaaccgatcgcaccacaccttagggttcgcccccgtccccagcaggcaacgggcagcccccctttcgtgccgcggtgaatccggaagccgatcaaccggacaccccggccgacccaactccatcacgcccaccctcgcctgggtacgtcggctagagaaaagctacactacaagcccagccgttgcccacgctggcttgtggtaagtacgataaattcttccagggcatcccgcgaaccggtccttaaatgccatgggtgcgactagcaagaccatgcacccacagcccaccatgacgtgtattttaattaaccaacaccattacggtggcactaaatcaaagctataccaataatcaagtctatgctttaatgtgatccccctttgtgcactagttgaactaagcatggctaagcatctcctaaaccaacatctagtcattttaatacccaagttatcaatggcgtaagggaaacaacatatagctgagtaataggacccatcccacatgatattgtaaaacaatgcaatatttaatagaaatgcgggacatttgtaaattgggtacaatatgatcaattgcaatgtatgacttgccttgctctcgcactgatggaaccacagcaacgtcttcgagaaaccacgaatcgacgaaacgggtgaaatctacgcgacaaacaaagaacacaagcaaaacatgctataagactactgaaacagataacaaagccatttttaatggattctacacatttttatgaatttactgagacttgaatggatttaatcggagctcggatgaattagttatgatttttagaagattctttgtgtttttactattaaagaaaagccttaatcaatttattgcgcaatattgccccagggctgacgtcagcaaggggtggggcggcgccgacatgcgggccccactagtcagcggcactaagagagggagagggggcggctggcaggtgggcccactgggcagcgtcacaagggggaggggaagcggcgaggcgcccggtcggtccggctcggcttcaagccggccggccggttatggcgagggcggcggtggcaagcggccaccgacggcggcggccggcgatgcaggcgacggcgattcacggcgaagcgcatgcggggagcggcggcgcgcgcgagaggaagagaaggggagggagttctcaccggggttcggccggcgcgggaggatacgacggcaaacggcgacggtgagcgaccggagggcgacggcgacgggcggacgggctccgggacaccctaagagaggaagtgagagaggttagatggagagaaggtgtccacggcgagggagagccatggccgacggcggcggctatggtggtactcaccggcgcgcggggagaagcgggccccgacggcgggattggatggggatgcggcggccggggtagctttggcggcggcgaagctagcaacggtggcggattggcttggcagcggctccagcggcggcgagcggcggccggaggagtggaaaaggcggcggcggcaggtatagcggcgcggaagcgatagagggcacgggagggagcggtggaaagaggaaaaggtggaggggagtggagggatggtttatatgggctcgggaggggcggacgaggcccggaaaggtggccgatttggccggcgacgtgtgggaagtggaggaggagagagagagtgggggaaatttcaaatcccccgccgtttgcgggcgcgcgagctggcgggaggtgcgggaaaggtgggcggcgacgtgggcgtgcggtacgggcggagtgggcgcgggaaacggggaaaccggcggcggcggtgccgtcggctagaggaggaagaaggggccgacaggtgggccccacctgtcgatgacccggagagaggagggagggagtgggccggcccaactgaaaggagggcgagcgcgcgggaggcgaacggactgggccgacggcccaagaagagagaaaaaaggaggaaaaagaaaaagaagaaaggattttccagggatttatatattgcacatgcttatttttaatgggttaaaattgtttccaatgctctgaaaattccactaaaaatcctgttagcatattttgacatgtagaatccaagaaaaattccacatgtcgattccaattattatttgcatttattaatttgagaaattagctctaggttaaaataaacaatttcttcggacgatttattttatgaatttagagcaagggaggggtacttcagggcgtgacagccgcgtctttccttctccggtgaaatctttagaggggaaatgatccttgagatctcctcttccttttctcttttggaagcatcgcctaattcggtttggaaactcgtggattcgagttcgattcggatcggtctctttcctccgaaccccgacctttccttctcatcgccggcagccgtgggccttcgccgccgccttccaacccctatataaggatccccgagctgtcctctttctgccgccaccctcgccttcgtctctcgccgtcggaagcgctctagcgccgtgtaacctcgagccaccgtcgtcgccgccgctccagccgtgcgccgccgttgctccagtcgtcgccgtcgctcgaggaggtcgccatcgtggtcgccaagtcgccgccgtcctcgtccgtcccttcgccgccgccgaagaccgccggagcaccgtcgccgtcgtcgacccgatctccgccgccgcttcttcctcgtcgccggcgctgtccgttgttcctccgccgcttctttggtcatcggtgagttcgccgcgtcgccctctacccgttggtgccctccgttcgcgtcgccgcgccgtcgttcgccggcgagcatgcgcgcccgagccacctgagccgccgccggtgctgacgtcatcgctaccgtcatcgctgacgtcatcgggatcgtccgccgtgagccggccgtggaccggatgttctcgcccgtccgttttggatagggttgatctcggccgtccgttcccgtgaaccgccgctgtgcacccggtccaccgcaaaccctagccactgacgcaataatcctccttttcctttttgaaaataattcattattgcgtcataattcaattaaaatccatataaaggttttaatccgatttaatctttaaaaattcataactaattcatcttagctcggtttaatgtggttcaagttgcaaaaattatataaaataaagatctacatattaaaattgtccataaattgaattaaatttatttaattctttttaaatgggctttaattagatttaatcttgtaaaattcataataaattcatttgaagtcagaatgaggccgttcaagtctcataattcatctaaaattatgatctacatgtttgtttactttttatgtattgtttatttggtttttattagtctttttcttcgttttgcgtgttagcttgtcgtttccgtcgttgcaaaggttcgtgagtgcgccggaagtattcaagaagattaattgaagaccgattattgcaaggcaagtcacactgatcctaaacacaatcctttgaacatgttgatcctatatttaaattctctatttatttcaactgtgcatttattttcgaatgtcattgggtggaattaacctattctttgttatggcccttttgttcttgattactttattccttgataccttgggttattataattggactagttgagctttatatatattggttcaactagatattagatataattgcttagccatgcttagaaacattagcacactattgggataatttatgactcattatttaatgatgatttaatgatagttcacaatggtcaatcgtgattggttaattaattacttgccaactaaaacttgataatggtgggttgtgagcacatggttttgagagtcgtgctcatgacaattaaggaccggttcgcgagctactattgtgaaacattaatcgtgccaaccacaagccagcgtgggcaacggctttaccttttgtatagcatgattcattgcggagcaccagactgagaagtggcggagataagcccacgggggtcgctggggagtccatgccttgttttataagggggtgattatgatctaggaatggtgcactgtggtgagttgtgttgtgcaaagggtattatcacagcctctattcgggtactttctagtatcgcgacgcatggtagacatgatgttgaggctgtgtcttgtgggtacagtggtacacctctggccagagtaaaactattcgaatagccgtgcccgcggttatgggcgagttgagcaatgtttttcgtgattagtctcacatctctcacaataattatggatgttatacctggtaataatttgcttagctcctggtttggagttaaatctgtacagccgggtatggttgttcaggatggttgggcctgtgcagcatgggtgtgctgttcagtgttgattanaatttctgattaattacttcactgttttacttctcttaaatgttttgctaaatgctgcttttgcaaatgagcctatattatgccctcctttggtatccttgtgcacttgcatatttgctgtgtggcttgttgagtatgtcatatgctcattcttgcaataatcaatcaacctcagttgaagacaagttgcgaaggagaagatgtttggcttataccccagttgagctgcctgtgggagtggagccggagcttcggtagattttattttccactgcagtttttttcatggtgaggactaagtgcctcttaagtaagtatttatcgttttagttaatttgatgaatctgtatattaaattgtcagtttgtgtacctcggctgattcctggacgaggattttatgcacaaataagttcggaaattactagtgaatttccgggcgtgacattatgtcgtgggcttagcctaaggggatgtgtgccctaggcaaccctaggatgtccctaatcatatttattcagtagctgtcatagtttagagtcgagttttgtttagattgatctgtcaagaacagttttgccgctaaatcagtttgtgaaaccccaaattcgagtgcttaatcattcatatgctattgtgttgcaatctatcttgtttttacttgtgttcttcaatttgtatacaggaattagccttctcggcgaggtcaaccgggttttggcacggctgataaccagaggagacgttgtgctgcgattgcggggctcaagagcgtgttcgttcagaagccggatcgagttgtgtcacaacaccactaaatcgactgtttatcaatacctatcagaagatcgggacctaacatcctcatcagttggtatcaaagcgccagattgatcattaggtaatttatctacccataaccagacaattgccacacaaaaatattgcatccattacctagccaatttgagttgttgcgttgttctattagtttttgtgttgttgaattttagattgcatcgtcgtgttgagtgctggtttagttttagatttaatttttcgttttgagtattgcatctgttcctcacttaggtttagggttcatcactcaaatctgtgtgagttttacgttttgggtccagcttttttatctcgtcggttgttgccgagaccttaaaaaatgggatctaatcatcatcgggtttccgttttttagtttggagaagtattcatcgagtggttttgaagtttctcgatttctagggttgcggtgtgcccgtgcttctgtgtgctgtgagaatgaaaagaagaaaagtatgagattggttgtttactgtggattggttttgttggagataatatagatcgattttagttggtttccaaatttttagggagatctgtttatcttcaacgcccacccatctctctctcccacttgaccaagcccgtccccaccgtccacctcatcgagaaccgggtaccgacctctccacctacgtgtaccaggtattgagtacgtagttttccttatatcatatatttatggtatcggatttgagaggtattccatttttgaggtgatccaattttagttttgcactttgcatttgagtccatgtaatatttatatttatatttgagtccttggttgaggttaatgatcggttcctgttgaaaaaaatgaaaaggcagaaatgtgcagagaaaaagaaataaaaagccgaacctacaataaaaagaaaaaacggcataaaggtagttaaaaaaagccgcacaaaaaaaggaacataaagaaatttgtttaaaaaataaatcatcctttcagtatgttttgagagtgtagagttgtgcattgattcatatctagtccttagtgttgttgggtgtttgcttgagctagaattgagtgtaagctaggccaacacattgactagtacattgaactattattcatatttgcattttctgattagcataattgcgttcctttgctactatatattgggcctcccaagctccacatatatacttttggtcagcaccgctttgatccttgcaatcgccacatcacgtcattagaggtgtcaagaaccagccaccggttgtctgtccttagcattgctggtaagacacttgtaagagcttggtaagacgctgccatttactagcctccactacaatccgtgttctgtagttaatagggataatactattctgttgttctctgttttctactaacgatggcaggttacatctcttgtggacatgagataaagttggatgggagacaaaccatagttgctacatcaccttccacagatgcacatgatgtaagtactttggtacaacaagtgctaagttctcagatgaagaaagcggggcaaaggtagtgccacaatttatttgaaacaaggtttgtggttaagaaaaagaagatatcgtgttataatcgatagtgggagttacaataaccttgtgagttcagatttagttgagaatcttgagttgcatgcacaaccgcatccttatccatattacatcaaatgggtcaactcttgtgataagttcaagttaaatagaactgtgagaataaaattcttgattggaagttaccatgatactacaaattttgatcttgtgcctttgcaagcttgttctttgatgtttggtcaaccatggatatatgatagtattgttttgcataatgatattgctaatacatacacatttaggcataatggttaaaaaaataaaattgttaacaatgagtaattttgaaattttcatagataatcttgaaaggttgaagaatagaatcaataatattgcgatgccttcaactaactctgagttattaaaaaatgaatgtattgttgtgcctcttgctttggatactaatattttgcaggtgtctgagaaccacaaatgtaactaggaagagaagaaacacagagagaaaaagacctatccatagctccatgcatgcttgaggaatgtttaattgaccaatcgcctataatttctgaagataggaaaaaaggtaatgataatggtgctacaactactcaaggtatgcataattatgatgtgccaactgttgacggtcgttacagacaaatttcgaccgccaatagcactaaaataatggagaactaacaattcttagaatgaatgtttgttttcaaatgatatagttccacttgtactcggagaataacatgttgtagggatttatcaaataaaataaagagaaagtgaagaaaccttactcctaagcaagcaaatggataagatgggcccacaagtcaggtgtaacagtcggaaactaactttaactgccacaaccgcctaaaggacccacttgccagccactgtactgaaggagaggtcggtcggagccgaccctgaaccaggggcaagccggctcggtctccccttccacgtggacgtccagaattgcttctcaatgacggttatgagggtaaaatggacatttcgcatgggagaaaccgtcatactagccctattaaaggaggagctcacttcacttctcaacacagtcaagcaagctcaattcctctacattagtattagtagtatagtgctaagtggagtagtgtcgcgtcccaaaacgactctaaaattcatcctcgaaattgtgcaaagaataattaaaattcatgtgaaagcctccaacaattaaaatgtgcaaagataaaagtcaaatgaggcttggaggatttttgtatatttcctaaaagcctaaaatgtgtaaataaattttagtggaattttcagagcacaaataataattgaaaagaaatacacaaagttgaaatggttttataaaaagaaaaatcccaaaaagtcttctttccccccccttcccttcttgggccggctcggcccagctccctccccctctctcctctccccagcggcccatcggctctctccccgcgcgcgcgccgctgacgggcgggcccgcccgccaccctcgctgacgggtgggtcccacctgtcatctcccacctcgcgccgagcccgccgcccgcccgtgccctagcgccgccgccgccgccgaatacgtcgcattccgtcgtccccgagcgcaataaagaaggggaaatcactccccgtgattacctcgctgtttcccccctcttttccatatctttcttcctaggatgcggacggattcaatcccgtaatcatcgccggcgcatcaatggcggccga

SEQ ID NO: 8133 - DNA, 25829 bp, Oryza sativa
actgaagctaaaatagagtgaagtttagaagcagcttcactttctcccaccccccatgcaccccttcccttgtaagtgtgcggagccttgtgcaagcccagcttgcacagacaatggcctgggctccaccagctgcacgcatcaattcaccagtgcctaattaccttagtaatcacttttcttagtcaccggcaaggcagtacaatgcaactagtacaatcgcaaactcgctcaacacaaacttttaaaacaaatgttcatattgaagttatctatgatcaaattatataggcttgtatatacctcatttgttgttagacttgcccaggctcatgaaaatttttgaatccgccactgcttttaacctgcatgtagagaaattagtaaagtgatatgttggatttctttctcttttgcttttttgaaatgtttcatatcgaaagtggaatacagattgcagagtataatatattgggtcaaaataagaaacttactagctgtacattgttaatctaagttgctaagtgcctacattgaatataaactatacttatacttactagtttcttgccaccacacaatgggggaactccactatttcaatgtcataatctccatcttctccatgtaaaaccagtccaaaataagccatttatacaaagacttgacaaagataagcaaaaaataagcattacaatatattacatacacaagaaggtgcagtattgtcattttttgaggttcttatccaacttgatgcataaaccaaagcatgaaccatgtctcgcttcaaaaaactcctgtaataatcaagaattcttcatccaatgctaaaagtggactctgatgatacaatactagctggaatagtcaagaaccttcttgccttggacacaataggaaaccatgagagtgagaaggggtcaaaaggggatcaagagctaggcttttgatgttctagggccttataagaatatgggttgtgacttgctgagctgtgggctactctagctcgtaaaacacacattccagttcgagctggcacgttacccgtaacgagctaaaataccagctccatttgcagatctaggggtggtcccaggaccacccaaaaaaatcctagcccaatacatatatacacatgtgaaaagagaaaaaacaacctagaatacctggatatggcagtcaagtggcatatccatatcagatacgtgaacagatatggatacgtttccatatgtgccgatacgtacgggatacgtatccaacaatttcgtaatttccaaataaataaaacaaaccctgatacgtcgctgatacgttttacgcccacctccgaatccctttccaagcgcagggctgccgccgccagacacaacacccgcacccatcgtgcatcatgccctgcctggccgccggggccaagaccgtcttccttgtgctctcgctcgaggcacagcatccccacacgattacaggcttgtagcgccgccgccaccaatgccgatgaacagcgcgctgctaccaccaacgccgatgaatgtagctccactgcagtgattcatttagcagtcatccgatggatctgaaatctaagtttcagagctagtgcatccatgcatccaatgctcctatgttgagttgtgatccaaatttgtttgcacataataaaggccagcttctgctggagcgaagcggaggccgtttgaagccggaggcttgggccggagtgaaaaatatcttcactattcgttatccttttaaggtttcaccttcatatatatacctcctgtaagccaccatttagcgtcgtaacttcaccccgatataatgaagatattttgctggctggcgcccgcagttttttttctcctgctttgggagggttttccacgttaaatctagtgtcttctgtgattgatctgttgttttttatcgtttatttgcctatcgtttcctaacatcctaccctcgaaaaactagtgcagctgctagataataatgaaaagaagcctcggtggattgtggcagtctggcagacaagagcgggtataggagaaagcacattgatttttctgtgaataatcagcaggtagcagtccgcaagtttattaatttttctgtgaatgcattggttttcacaatatgttaagagagtttattagttttaattttttattacatatatagacgtatccccgtatatatgtttcttgaaaaatgccgtatccccgtatcgcgtatccgtatatatcctcgtatccggtaacataaaaaacaactcccagtcactggtagagaaaccatctttggtcggtcgacccaaatccacaatagtcccggttccattaaaaaccgggactaaaaatgatttttcatttttagtcccggtttatgagagaaagatctttagtcccagttgttgttaccaaccgggactaaaaatcatcttgagtcccggttcataactctaaccgggactaaagttcatctttagtcctagttgattccatgtcaggacgtgtcagggccctaaaatctttagtctcggttagtaacaccaaccgggactaaaaatctatttttagttctgattgatgttactaaccgggaataaaaatcaaagcatactatataatccctagtaccgatcctcttttcccgtccatacaacaaactccttactctatctcttttttccttctaacttcttatctctttccttatctctaactcctagccttcttctctttccttttttccttccattcacagctagcgaagaagagggcgcgcgggcgggccagcggccggcgcagcggcgcggcggcagccggccggcgcggatgggaggcggccgtggccggccagcttttttttttttttacaatttatgatttatcctgtgatgtattcgatttgtgtgtgatccgaatctgtgatgtatttttttagaacttgtgatgtaatttttttaagagtttgtgatgtatttggagatgatatatttgagaatttggggatgttttgtgatatgtgatgatttggatttgggatttcttgataggggatggtgtgaaatcaatattcaatactaaaaacaatgaaaaagagagaaaaaaaagaaaaaatatctttagtcccggattcgtagtcctggttggaaaaccgggactaaggggggttacaaacgggactaaaaaacacttctccaccagtgcttattactatattatgatgcacctttgatcaatttatacttgtaactcttgttatatctatgagatatatatatatatatatacacacacacatacatacatatatacatatatatatacatacatatatatatatatatacatatatacatatatacatatatatacatatatatatatatatacatatatatatatatatatatatatatacatatatatatatatatatatatatatatatatatatatatatatatatatatatcacctatatagaaatcttgcatatgccattggccagctttgctcattagaaaaatgaaattagccaaggaagcaaacgagccataagcttcaggtccatcctatgtcagagtcgtgcatgcaggcagatatgctagctggaatgtactaggttgcttaggtggattcgatcgaaggaagggattttttttcccattatatagataagatgcgcaccgtcaccacatgcacacacatcatactcacacactcatgactatgttcttttttaacatacggtaaaagagacggagacaaacaacaacaatttacttaaacttctgcaggctactatttctgcaaataatttgttatatatttatcgataaattttttaaaaaaatttgacatatgtaattgttatgtagtgtagttacattgtaacttgtatgtaattacaatgtaacttttacatcattttaaattgttagattcgtttcaagattcgtgcaagcgaaaaaattacagtgcatgcacatgtgagaggattcactcctatgatgtccattttatggaaatagcatgtttcgaagggatttttaaaagttacatacaagttatattgtagttacatgaaagttatgatggaaattacaccacgattgtattaaaattatatttattaaatcgttggaagaaaatttatcgataaatatatatgtgatcccttctgccaaatactagtaggcatgtatatgccgacaaatttaaacatcaaatgattcaagagccaaattaacccacacaatatatataagaaagaacaatagaatcttaatcatgcaatttggttgaagctgtcctatactattatccttttctataaaacagattagtagtactatgctctgcaggagtactactcgattaaagcataactttgcttgctaaacacacaccaccgatgggaaacaacagagcatcaagggtgaaacactgcatatgcaatgtgcacgttcacagtgcactactcttaaatcgatcaaatgtacggcgttaatgattttaaacctgcaaattgggcgcaaattgctgatcatgttgtaatataattagctttttctttcgagggaacgtaatatgattaactgacgcctatataaaccaagcatggcctttgctgcttcttccctcatcgacacagcagtaagaaactcccaatattaaggaggagtttgcttagattcattcaacaatggcaggtggaacaccaaccctaatccttggcgcccgtcgtcgtctgcgccgcccttgtgaggctgcacccccccttccgaccgggaagccgcggtggccctcgtcgtccgcttggccaaatgccgcggctgcttcaagaagaacatcaaggcgcaagatgctttcaagggtatatatatcatgcatgatgatgataatatgttcatcgataattaattgcgatccatatatcaccgtcgttgattaattgtttggtgatgttcaagtctccaggtggcgatcaagtgcaagaacagcgacggcgagtacgaaagcaaggccgtcggcgacctcgacggcgacggcgccttcagcgtgcccctcgccgccgacgacctccacggcgccgccggctgcttcgcgcagctgcacagcgcggcgagcagcgcgccgtgccccgggcaggagccgtccaagatcgtgccgctgccatcaacgacggacaacggcggcaataaggctaacaccttcgtcgccgtcgccggcaagaggatgcactactcgtcgtcggcggagtgcacctcggcgttcctgtgccccttcttcgactatttctacaacagaccccaaggccccaagccgacgccggcgaacggtggtggcgcggcaaacggtggcggagctgcggcgccggctcccagccctccggccggcatatcacagctgaatttttaattcatccattccatcaatatccacacttgcttttttgtttgatttcatggcttggttaatccttttggttcttgcatgattaatttccaggtcagcttgttggtgcagaataataaaagttgtgagatgtgagaggagagtgtgactgtgtgagatcgatcgatcgatgtgtgtgagaataaaattaagttcgtgcagaagtgcttgtgtagtacctccatttattggcatatctaatacactagtaataatatgtccgtgctaacgcaacggtgataattttgattgaaacgcaacggtgataattgataatgtaaaaggcaaaaggtaatatttaagattcacgaataaaataacgatagagagatttgtattgttctcatgaatgttattacactgttaataacttcccaaaattggccatgaatagagttctgcaatattttcatcactgtgagtgaaacttttcaaaacacaaacaatagctcatggtatctaactttctataccacatatacaaatattacctgcacgttctacaggtgctattttttcaaaacatgcatcgcctggaaacattcagcaacttctgctcctcactggtcaccttcctccttatagagcacctcaagaagccacataaacttctctatcgaacgcatatcaggagaagcaccatattgaagacagtgtattcgcctaccacgaggcacacgcttataaagatatattcatcacttagcattagtaatttaactcccaaaatatttggaaaaacatcccggtttctactaaggcaaaaatatgtagcaaagcaaatatataggcattaagcatttaatagcaaatgataataaattatttattttaactgaaagcgctaggcttttacatggctgcaattttgttcgtgtaaatgagttgaaaaaggtaaaatggacatgaatactatgttaaatctgcagataaacttttcggatcatggaaatgcatttgtcaaatttcatatgttcagatcaaatttcattataccctgcgaatacacaggacgcataaatcatcaatattgcacagcaccaagagctaggcaccacggaaagcagtccaaaaaaaccataggatgcatgcaacatttcaggaaaattaagaatgatatgatgtggttcaggagaaggagaaggagaataattctcactcatattcttgtaaactatttaattctgatatataagaaaaaatactgaaggaacataaagagaataaaatccagtatcaacaaacacttttgaaagtgcagtgtgacagtagaattcttctgtttgaccttttttcagtgaatagtttcagcatatttggttcaattttaaatgaacaacaatagtcaggaaacctattcatctagatcatagcattttataaacctgctgcgatctctctagaatctcccatccaagaaactctaagcaattaaacgttcctcttccctgccactcaccagcgattctcagcctagcttctcctgcggttgtagaagacaatccaacgcataatcacacacgaaaggaacaaacagcacctaagaattccagatatacagaacaggttgcatgtaataatgtcgagcacgcaacaaattctccacaaattggatcaagaaagagagcagggaaaataatggaaaggaccggacctacgcactcggcggggggagcagatccatctcccaccgcctgacgtcctccgccatcgagaggatccaaacttgcacggttggaggggctgcgtagcaagaccgaggacggcatttgggcacgagaaagacgatctgtcctaccaaaaaaggagtatttggttgagattagctttgttagaaatgaaaagacaaataagataagcaagatgatcttgattttagctgctagaattaaggccatgtaataacaaatagaagaatttcgaaaaattaaatgatttttccattcaatctaacagtgttttgactttgtgattccttcatatggaagggcagccaatttgtaacaaaggcagaaactgggactatcatatcgtaaaaaatttctaaactagtgcataatctcggaagtgaagcctaacctattttccttaacagctaaacacatttgaaacaaaggcagaagctgagacacctgaacagaacaatttgttaagctatttctaaatctagcaaatcaaatcaaaactttggagctgcattagtttgactacaaataagcgtgcagatcgatgcgtgagaccctggggtgcagtggcgatcgaacctgaaatctacttctctttttttttctgcaatgtcccctgtgccggtatgaagtatgaacatgtgtgccgacgttcacctatacagctccagcaatcatgtgccatcatttttattgatggaagagtagaaaaaaatctaataccatgggagattgatttattgcaaggagcagggtaatctggagatggcaaatcacaatagaaaataattcaacttaccagccgtgaccagatgaatttccagccactataggagcatctccaaacctccaattctgatattttggctatgattataggtctcgagcaagcaaactgatgttgcaatgattttagcttcatggaaaaaaaattggggacagatcagcagcatgctaaatatgccatcaataaaaaagttacttaacaggatttacaaaatcatcagagagccatgatctgactctatccctcctaaggttgtgctcctgcagaacaaaaaagaggcaataagcaagtttcaccaacaaaatgcgtgaaacgaataataactcattacacagatttcagttggcaactaaacattgaagtttccgggatataatttaggggaaaacttactgctagcatatgggaatttacctgttcaatatgccagttagcgagccatagcttctggtccattcctgctcaactctatgatcttgctgcatgcaccaaaacaaagcaaaaatcgagtcaaaccaagagcacatagcatcaaaagccccagccactcaaagcctcaacagaagggatgaactgatgcaaggaatcaagttcagggacgtactccctctcctcaagagcaatctcatgaggagatcgggattaacagagagagatgggatctttccttgaccagctgcgcgattccctccttgcccgcatccaccgcacacaccggtccggcagggtccatgggtgtacctcctcattacagccccgaccttggatatcgatctcatgccattcatagccatcctcccggtgcagcggcgccggccgcctccgcctccaccgctggcagtgccaggatggcgacctggtggggagcaaagacggtggcctccatggtggctcgtctcaatggaggaggtgcggtggcatccgtaacccgtagtgctgggggcggggtagggtttggggatttggagcggcggcgcggcggcgataggcgaggggcaggggcatgccggcggtggggtagtgtttggtgattgggtacggcggcgattggcgaggggcaagaatcgcggcggcgatgggtgaggggaacgggcgagaatagcggtgcgcgagagagaagggggcgcgtgagaacaggagttagcgagagagagagaaggcgcgtccgcgcgtgggcgtgaccgcgtgggggaggagcgcggaggggagggggtctcatctggcacgttcgatcacagttagatgaatatgagccattggatttgatgaatgagtaatgtaggtgtaagagtgagttggtgaattatagggtagattatgcattgtatgcatataagctattcctccttcactgtgcaacattattaaacataatataatttaagtattttacgaaagggaaaatagcttcttttatctactataaaaaaatacccgtgtgttgcaatgggtgaagttatgttaatcttattattgttataggtttaactaaggtaaaattcattgtgcgattttgctcgattttcttttttataaaatcatgacccgcagttaggagtctgattttctcaagtttcatgcaagtttttttaaagagatttcttatacaactccttttgtattctcaaaagcgaataaacttaaaaaccgactaaaacacgaatgacgtatcaaagtaccggcaaaaacatcttcaatttttataatagtagagaagtgcgtcaggccacgtcgtacccctcccacttgctgtaccatcggcctaggcacgatccaatatgactcgtgctgtgccggaccagcctgaatgcatgaaggcccaccgtgctcaaccttggaaaaaaattatattttgcgttcctcatctatttgggccattggctagattaagtctattttgcgccgcagctatttgtgccatatataccttatatagccggaataagtttattttggctcgctcatctatttaactccttgattgttggaccggaccatgccaaactggcccatcgtgccgaggaagaggcccacgcaagggcccgacactgccagtcggaccgtgccatgtttaggctgggccaaaaccccatactatgggccgagccattggaccccgggcctttcggccaactataagtgctactgctacgtcttgtcctgcccgcgtgctgaaacatggatgggccatgcatgtaggtctcctgggcctgtgggcaagatgcaccagcatcttgtgcgctacacgcatgcatgcttgcaatccatcacatcaacctgaacccaaatccactgtacgtgcatacgctgatatatatgcatggataattggatatgcacttgtctacatatattagcctattgcaaataaaaacttaaaataacttactactggctttttttatctttgggtatatattccacgtgtgatcaatcgtttataatacggaattggaacgagatatactccctccgtactcgtaaaggaagtcgttttggacaatatttaagtcaaacattaggaatataaatcatgaataacccttaagttgttgagtttgaagatgtaaaaattatatgaatagatttatcttgaaaaatactttcataaaagtatacatatatcacttttcaataaatattttataaaaataaaaagttaaagttatgttttggagaccgtatcgctgtccaaaacgacttcctttacgagtactgagtagtatatatctataaaactattactccctccattccattttaagttacatagactttgaacaaacctaaaatgataaaacaacaaaaaggattaaaatgcatagagtacattaaaaaggtttaagtccatttaaccccgccaagattgtattagtctaaaatataccccttaactttaatatcgggtattacagactcctcaacttttgaaaccgtttaatttattcccttgtccaaaactaaagagtaaatttcagaaaactccatattgtatgattaaagttgtggaaaccatatgtattaattatgatgtgtggcacaccacaagatttatggtctccatgtttcataaaaccccatctttatttaaatcttaataaatttcagcatatctaaataaaattttgaaagtacagtaaagcttctatcaatctagtcaataacttaataattaaattttcatttgcactctacgttttttaattttaagtaaattcatgctcaaaatgcataagggtggagttttgtgaaactttgaaaacaacaatacttgaggttagatgccgcgtgtcataatacatatggtttctacaactttgaccatacaacacgaagttttctaaaagagtaaattgcatccatggtgcatcaacttggcaggtgggtgcaatttagtgcaataacttgagttgagaaatgaacgttctagtgcaataatttggtaggtaggtgcaatttagtataagaactttataagtgatcgtataaatgcaacaacttgcaaggtaggtacgattttgatacagtaaattaaaaagttatgctacaacttgattatttggagcattttttttataaattcaatttttaagtactaattttgacaatatactagcgcatatttcacagatttgataagtgtatttatatttttatcataataactaataactgaaagccaattaaactatatgtagaaattattatatttcggttgatatttgataagatgaagaaaacaaaaaaaatcttaaaggtaattggatgtaaattgtactactatgtgcttataaggcaatatccatatgattactatgtaatggcatattgacatcgtgaaaaaaactcaccttgtatatgcttagccaagttgatgtacaaaaatactaaattgttaagttcttatactagaacgcacccacttgtcaagttgttgcacttggacgttcaattttcaagttcttgcattatatcgcatccacatgccaagttgttgtaccgtgggagcaatttactctttctaaaatttactcaaaagcgaatggttttggtctttgtgattttgggacttcactccgataacatatggagttaaatataagtattaacaactaattcaaaataagagcttaaactaattaagaaggggcaattgcaaagaaagatggtagtaattcacttatactctaacacggggaacgagccatgctagcaaggaatgatgggaggcagcgtgcagggaaggtagtgaattagtagcaacattttattcatatgttaaaaaaacacaaagtatttttctggttattcatgaaagatagattgaaaaataggaatatgttaggaaggatgaattttgaagatactctccaacatctatttttgaccaaccttctgctcaagaatactaatttatactgatccctccatttcatactataagtcattttaacttttttctaatcatttttttatgtttgactaagtttatagaaaaaaattagcaacatctacaatatcgaattagttttactataaatgtaacattaaatatattttgataatacgtttgttttgtgtttaaaatattatacttttctataaatttgatcaaaccaaaaaagtttgactagaagaaaaaaacaaaataacttataatatgaaacggagaatgtaattaataacttccctagctaccatatcggttttctagatttttgaagtttttgcaccttgggatggatgccacatggtatcttttgcaacagtgctccttgattgagtgggtgaaactagcagcacatggttcaacggtcatttgttctgtatacttgacgtgcatgctgacatcgtgtccggtgtggttaattgccgctggccggttgtagcgtgcatgcaagttgaagccatatttttactgatctctctgaagatacatatgtttccccttttacatggagattatcatcacaatggcttggagtatttgaatcacaagcaatcatacgattttcagaaatataagtcctattcaagtttgtaaatccagacaaaaatcaaattttgtcttggttatctagagaacaaaatagagttaccacggatctactactacttttatatatatatatatatatatatatatatatatatatatagagtttaagatgtttccttcgtccgttaataaaaaaatgataaaaaagtccgattgtaattaaaaaatcccagggcaaaaaaatgcggcaaaaaaaaaaagctgaccgattcctattcctactaaaaaggcggaaaaaaaaagtgcggcaaaaaacgattgtaaaaaggaaaactatgtttcgctattttttttttgcggttttttcgtcgggccaaaccctagcgccgccgccatgtcgatttgcatctttatgtgtttcctcatccaattgattgcaaaaatcgattctccactactctcgtcattttccccttgaatttccctttcagttcattatttttttccccaagttttgtggattgcttcgattttggtaaaaaaacgaaaaaggggatcaagtggatcaaaatctctaataattttggagatcgagaaagattcgaccgcatttgacagagaggatcaactccgccatcatacggacacggtactatgcgagctcgaccagattaccggatttgatgggaggtttggctccgtcatggtacgggcacgagattgttcgagctaggcctacagctccacttgtgggctgaggcgaagagagataggccgagcagatagaggtagcggactgctctaggactagagctgaaaagaaggaaggaatgaacgtccggtccaaaaacaaagaagcatccggtccaaaacaaagggagtataatgtataggataaaaaaagtttttacccgtagcaacgcacgggcattttttctagtaaaggaaaaagtacgaattaaccccccccccccgaactatcacggtcgtccgaattacccccctgaactcgaaaaccatacattttacaccctcaactactaaaaccggacaaataaccccccgagcactgttttggacggttttaactggaatcagcatatgtggccgccaacgtggcatctggtcagcaaaataaaacattaaaaaaatctagtcccacatgtcatctctttcctcacaccaatccctccccaatcccattccccctgcttcccttctctctctcttgctttgcgtctacggctggagaaggaggagatggtggccggtggcggaggcggatcgatgcacggagcatgaggctcccgccgctcggcgacgtcggtgcgccggcgagcctccgcagaagcatgaggcggagatgagggacgagcacgacagccgcctttggttatgggggacgagcacgacatgccgcgcacgacacccgccgtgccctccccgaggaggactcgtcgcccaccgccgttgacacggagctcgagaggggtacctcaccgtcgtctccagggaaggggggagcagcagcgcagcgcggggacgggcggtgggcggcggcgtgtaggggcggctggcgcggggacaggcggtgggggcggtcagcgcgggaacaggggtgtgtgaccttctcgtttttgaagcgcgtgcggctgttgcggtcggcgcgcgagggccagcgacagttggcagcgcgggccatcagcgggcgagggctggtggggtgcagcgtcgcgggcggtcggcacgcgaggactggcgacaagtggcgtcgaggtggtgaggactactgttgacgccgacgtaaacgatacaattgcctggaccggtgaaacattggacttatcccttcgccggagatcgaagacgatgcagccccgcgtcgggtgccaagttccgccggaacgtaaaaacaaaagtagaagtaaaaaaggtggcgatgcgccgaattgtattgatcgtgaggacagattacatagaccccaggtgtacatatttatatccatgggttgatataagtccttgtcggacaagaaagaaactttcctaaagataaaaggaaaagataaagtccttataggacactaaacacactttcctaaagataaaaggaaactaacaaactattcctaattaatagataacttaccatgccgtattctctttaaactcggtctcttctggataagcttcctttagtagatcaatttccttaaccgaatatagcaagaatccgacaactgacgacttgacaactctcatcggctaatctcaggacttcgaagccgatgctgactctacgccgatgactactccgggcttaccaaatttcactgttaacaactacgtggcggagctggagcgcgcgttggaggtggtcgagacggagtccgcgagggcgcgtgtggagctggagatcgaccgtgcagggaggaaggtcgccggggaggagatggacgacgacgacactgacagcgcctccgccgccgtctcgcgccccgccgtgcccgtggtggcggaggcgacgaccgtgctgttgctcccggtggtgcacgaaggcgacggcgacgaggcgctcgcccacgcaccgaggcggaccaagacggacgtggacgtcggcatagtggaggtggacacggtgggcggtggtgccagggtgggggcccgtggcggagctcgccggcgaggctagcatccgcagccgccgtcgtcgccgccgacgctcgcccaattgtgcccgcagcagccgccgccgctcacccagccgcgcccgcagccacctccgctcgctcagccgcgcccgccgccaccgctcgccccgccgctgcgtgctttagcgaggggaggggatgaatccaggaggagagagaaggtgagcaatacaggagagagattgacaggtgggccccaccgaatttttttaaaggattgctgacttggctgacacgtgtatgccacgtaggatcaaaaccactccagagattgagtaggggggttatttgttcggttttagtagttgagggtgtaaaatgtctggttttcgagttcaaggggataattcggacgatcgcgatagttcggggaaggggtaattcgtactttttccgattatagaatggctagacagcatgcattgagatctatacagtttcttttttaattatatatatttaatatatacacagtaggagcctctaaatagcgacagtgctttatccattgaatatgatatgttagttaaaaaatactaatacgttagttaaaaaaaaaagtacttacatcgggctcgaaggagaacaagttcgcggtgaccagcgggcttgagttgttgttgtgataaggaggtgacagaggaagataagggagagaagatggagcatgatccttttgtgttctcatcacaagtatcacaggtgttctatgtgcaggaaccaaaagcacaaggatggcatgttgcacaaccatataggccgagggatctatatgatatgggtacagaaccatcagatagtgatgaggatgacccaacaagctagttttgttgtgatagacttcattatttaatgggatttgtctgttatttcgatcgtgtgatatgttcatacacttttgaagtattttttatcactaattttgttatctgccttgatatatttctctaactattttctcaatgaattttttcgtcgtgtgttcaaatggacttatttgttcagttgtttgtactatatacaaaatattgctgtgctatgaagaagctaagtatttcttttaggtgagttgttttggggacaaataaatgattttgtgctgatgaggtttacgctaacacccaaatatttgtttagcatcctgcactaaaaataacaatatgctgttctagtgcagtggtttccactagcgaggacactctataggtccagacttcgattcctttttagcccttattttttttgtccagttagctgtaacatgtaaatatattattagattaaattaaattaagtaaaagaaaaaaagagctagctgtaaatgtcaaatatatcctatcttactataaaaaaaattaaattaagtaaaagaaaaaaagagctagctgtaaatgtcaaatatatcctatcttactataaagttatcccccactaacttcttaagcttaacatgcaaagatgccacatcatcatccactaacaagatgccacatcatcatccactaattaacaagataccacatcatcattcactaacaatcatcacatttaaacatcatgcaaacatgctatatctttatagtttttataatttaagagcttttcaaatacaaacatgttaaattataatctaacataattatgtgaattcacatcatgtttcaatgtatatctttattatgttttatgatatcctatatacttatatagttcatcctcacttagttagtgcttaaatgattaatctatggttcaaattatctttctctttttttcctctaattaagtcatatcacatcaattgtttttagcctttagatgattaatctacggtacaaactatctccctacttttcttcttccataaagtcataccaccttactttttacgtttgaatcaccattctacatactatttaaatttaaattatcgtaaaccacattaatttacttaatctgatgttatctagttatcttacacgttattttttttattgttatcatactaaatttccgcagtaatgcgcagagtttcatctagttattgaaatattcatgaagtaacagaaaaaggaacacctgtaactgtcgatctattattaactcaataaaacaatataaaagccaccatattcactctcatgacctagaatttcccatattaataaaaaagaaaaaaatagagtccaagtgtatagattaaaaatatctgtaattcggaataataataaaaggataaaagaagtacatgtagaaatgcaattttgaaaagaaaacttaaattcgtatttaaaaattaaattaagacaagagtcaacgtagaaataccttttaggctgaaaaatatgaaattcggattaaaaatttaaaataaatattgaaataaaattatatgtataaatataattcaatctaaaagtcggaataaaaattaaaactacaagaaatagtccatatagaaatacaatttgaaactacctaaaattcagataaaaagatagcattgtgtacaaaagagttcatggaggagttcatggggtggcttggacatgggctacccattttttgggctagatctagcgtctggctggagcattctcgtctttatctcagcccgtggcgttgtgtgttgcagagacgcaaggtgggtgaagaggtaaagaaaaaggcctagttgacatatgctcatgtcgggtcatgcatacaggttggcatctagaatatgcgctggactgccatggtggattcagcctaaggaagcaaagagattttctttttccattacatagacaagatgcacgtgtagtcggtgacaccacactcatatactcacgtacactacgttattaaaatagacgaagacacaataacattttacttaaacttatgctggcttcgatttctgcaaatactagtaggcagtatatgctgataaatttaaacaggtaattatccaagagccaaattaaccaagacagtaataagaaagcacaatagtatcaataatgcaatttggttgaagctgtcctatagtatagaactatcctcctttttaataaaacggactagtagcactgtgtactgtaggagtactactcgattaaagcataacttttgcttgtttaacaccaccaattggaagcaagagcatcaagggtgaacactgcatgcagtgtgcacgttcacagtgcactactcttaatcgatcggtactgcctgataaaatcaaacttacggcattaattttaaacctgcaaattcggcgcaaattgctaatcatgatgtaatataattagctgatctcagctcactcccagctagtagcctttatcgatctatataaaccacatgcatagcctgctttttcttcactcatccacacacagctctagcctcttgctacatagagtttgcgaggatttatcagcaatggcagctgtagcacgagcactactcttcgccgccatcgtctgcactgccctcgtgatggctgtcaccgccgctgcggacggcgaggcggcggcgatcgtcgtcgggttggccaagtgcggcgactgctccagcaagaacatgaaggggcaggatgctttcaagggtatatatatcatgatgatgatgataatatgttcatcgctaattaattgcgtactcagctcgatcgatcgatatatcaccgtcgttgattaattgtttggtgatgttcaggtctccaggtggcgatcaagtgcaggaacggcgacggcgagtacgagagctaggccgtcggcgacctcgacggcgacggcgccttcagcgtgcccctcgccgccgacgacctccacggcgccgccgactgcttcgcgcagctgcacagcgcgacgagcagcacgccgtgccccgggcaggagccgtccaagatcgtgccgctgtcgtcaacaacggacaacggcgtcgataaggctaacaccttcgtggccgtcgccggcaagaggatgtactcctccacgtcgccagcggagtgcacgtcggcgttcctgtacgactacttccacaagcaccccttcttcgactatttccacaagaaaccccaaggccccgaacccaagccggatcccaagccaacgccattgccggcgaacggtggtggtggcggtgcgggaaacggtggtggcggcgcccaggggaacagtggcggagctgcgccgtctcccagctctccgccggtctaccactgaatcgatcgatcatccattccatcaatccacacttggttgcgtgattaattaatttgcaggtcagcttgttcgtgaagaataaatataagttgtgagatgtgagaggagtgtgactgtgtgagatcgatcgatcgtgtaggatcgaatcacaagaactaagccaaccagagggggtgaatggttggtatacccaaaaaccgaaaacttttagcggaaataaaagttaccctcgaaatcgatggagatcggtctgaccgaagtagattagccggtctgaccgaagcgtagcccccggtctgaccggtgttgatctaccggtctaaccgccgtgatcgcctgccgcctactgtcgccgccgtcggtctgaccgccgtgctcccgccggtctgaccgccgcaatgccgctggtctgaccaccggtgagttgtcggttagaccgccgaaacccggtgaaacacaaatcgaagaactcttaaagtgaatgacgactttattaattctctctatgtttacaaagtgcaccaacaacactccttacaaaaatttcgactaaactcgaaaccctaactcaaaactcaattctattgctctctaaagcgataccgggaagcctcacgctccccctctatttatacatgaggtaggcagcctaaagccacgaaccaaactcatactaggagtcctaaacaccttaggaaaccctctagtacaagaaagaaactttacataaccaatcgtaccaaatttggactccttccaatttcgactccgcatcccatacgcacacaataactccatcgtatgccatatggaatctccatcaaccacgtgcatcaactctagccttagtatcccgcatgatctctgaccacaacggacgtcgtcttatccccaagccaactcccggtccatcaccgtaaatactctcccgagacatcgagtcacctacacatggaatagacaaagaaaccatattccgagaccaagctatctccaacttgactcattagcagtaaacaatagtattacatacgtataatatccatctagaagtcataatcatgaaataaactcggatatccaaataaacaacccgaaaccgaaaccgacacagtgtcggccggtcagaccgcgggctggccggtccgaccgcttgatcaccgctggtctgaccggcaacacctgcccggtctgaccggtccacataaaatgataacctgtagattcacctgtgaaatccaatcatctccaaaccacttcgtgaataaattccaaataacaaaaccaataatctctaatgctcaattgttcatcacagaataattatcaaaaacacctttgattttacagatcgatgtatgtgttggagacttggagtcagtgcataagcattggctttcaggtgataaataatttcagagtgcttatgtgtgtcgtgtctgtatttattcgcacatgtaatgcgacatgtgttctacataatgtaatttaaatatttataagattgttcatgttgacgtagaatcgcaatgccacaccttgagcacgttatgtgtaactcgcggcagcactcggagacgcgccatcatagggagtgggtagatgccgcccaacgaccacccgcgaaggaccccatcaggatgaacgtgcgtcggtttgttctaggctcagcaggccaactaggacgtcctctaataccgtagagacgagagatgacaagtaatcgaggatttgaggatttagaatttggataggtagcaagaaggagagagatgtagaatatagagggtttggataaataaattgattttgatgcatgattgattgcttgttgtttcaatcatccttggcccccttatatttataaaaggggtggacttgcttcctggggtttttccatatgcatttaggcatataaatcaactaagacttgaaaatttcggtctaaaacaagaaaacacgagaaatatctaaattggacttggactatgtgattaagatctaaccgcctggataccaatggtctaatctcagtgcattgtctgctttgaccggccacataatgacggttagaccagccttcgcgggaaagctctggcattttttaaatttggctcaaacttgctataactcgaccctactaccaaatttgattatcaacacatgccccccctgtctttttggcaaacttatgagccaaaaaaatactatgcatgagatcatctaagggcgatatccaccaataccgaccatgaattcctctaaggcttaaatgtttaatggtgatgtaagaaagctacgagaggcctctcttgttcagattgtattttgtttttctttggcctccactcttgcctcaccactttcttgtgtggattcttttgtgactgattcttttctctcaaccggctatgagatgagtgtggttgattatttaaaatgggtcaatgtggaaactggcaatgcccataatggataataatatggtatataaaaaggcatcatccacataccattaaaaatctataatacatttataccaagcgtaataccatggaaaaggagaagtaagttgccggtggtgcatactcgcttggtagatgaacttgatctccttggtcgcttgccatattttgatatctccagattgtcgtcttgcctcctaagtatttgtcgaggaatgatcctctctagcaggtggtcgtgagacccccccctttgtgagttcggccgggggaaatggcacgatgatcaagggcctacttccgcttgcggtctaatcgctagatcgctctcgtggctgtgtgggagatcaaggattatacaggttcgggccgttattgagtgtaataccctactcttgtgtatgggattatggtgaatttttacatgaggttttgagctctaagggaaacctagctgttcttcctccgagctcaagttctctgagagtcgtcccctttctcggtgggcgaggtcctccttttatagtccaaggggataccacatgcactgtttgcacctacccctccatcggagggggggcacatggccctaatcataccgctatcctttgcttcaactggaagcaacatggtcgcctggctccaggtggggcccagcgccgcccccgcctgacacgggggacatccctgtcattccctattattgtatgaagacttcggcggctcaccacgcgcgtggggcgcccctggaagcgtgccgatgggacagggcatacctgcccccactccgcctgacacagggcggaacgtgggggcactgcccccgtcccgtcgcctgtgaccggtcacaggccggtcaagctcgattgatatggtgttgacggtccttaaatcataatatcggaccgtcaatacctgcatataatgaaataaaacatggtatccaacttagtggtaggtattattactaatcatttccactagtattggtgaaatatgtgtatgcaagtaatttgaggagaaaacacatccgtcatgtgacaaaatgcacctccgcgcattcaggacgcgtttacacggattagaggcccaataagtcaataaaaaccatttagaattgggccaaaacatagcccaggttgttgggggcccaataagcaacctcccggctgaaggagaggccgggaggagagtttttgggtttggccgaacccaccagttcggacaaaccaatcctggcgcttcccatcatctgctttcacctggacggctcggatttctcccctaaggcagttgcagggtgttttggtcatttcccatacccctaaccgtcatttggagcctatataagaggtcacattctcatttccaagacacacaattttgagctgaattataagaggctctattgtatcttttgtacattataataaggtagagagtgaggggaagctctggaggagtgcccggaagtttggcgctcatccgacttctatctcgacgagtgtagcttcctaggaggaattcggggggagtaccggagctgtcggtacactctgctctgggttcggagaacctcttctataaagtaagcattcgtgttcctttcttatattatttaattactttgtctaagtaagatagattttcatctttgcgggttctttatctagtattcatactaagtgctctagtactaggactctggataaagaaggaagttcatgtacaagtattagagtagtaattaataacttagacgtggtgtctaggttagagattacctttgtttgttgtgtatcccacggatttgtcagaggtaggcgacaagtggtaacagccctgaatcccgtcctaataattctccacgttcggatacatcatagagctatagccggaaccacgctggcagaccagcaggggtcggtgcccgaagcaacaaataggaaattaccttcaacttagcttagataattaaaacacatagaaagtcctctctagcttgcctagcctatctatagttgttgtcattggatcgtcttagccttaggtaaattacacacgttccctgagttcgatatctttttggggtcacccgaaggtgaagtgctacaacagtattccgtgcgcttgcggatttatctgtggacgtaagaaataccaacacatgggtcaatcgagcggcgccgcacatccctccacgccgcattaaatgctgcttggggcggttggtgcaccgcgcattgaaggcgcggagcagtgtctttcgccccgcccgctctccccgccacgaggtggtcaggcgagggcctcggggtagcacgccccgaaagcccgaggagtgcgacgtggcaccccgaggtccctctggccacctcagcgctacccgaggggcggggggaggcgaggccacgtagccacgcgactagatgggaaggatacttccctctactgtgcgtacccccgggcccatttcaccgacagtattgaagtcttcaatgtggtcttctccttgccatcgggaatctccttctcttgcaattcaacggtctgtataggaaaaggtagctcatccacctgcatctttgtaaaagtcaatcgtcattcgtcaattgccgattgaacttgtctatggaatacattgcaatcatttgtggcatgagaattggagttgtgacacttataatatgctcgccgctctattcttcaagtgaaggtatggcgtggccatgtgacaatttaattttcttcttttactagtaattattcaaaaatcctattgcatttggccacatcaaacgtgaactttatttcctcttgctgattcttacgactaaccagcttaagagcggagcaaacggatggtttagagttggagttcaaaacccatttgtgtatgtatacatcaactgtctctttgttcaaagattcttgttgatcaactatattaacatgggcacaatcagacttaactttttgcgagattttggcctctttaactcggctctcttgagttaaagccttttgaagtaattggcttacatctaagaaagtatgaccatctagcttttcttttaaatattcaagtaaaccagaataagccaaatctaccaagaccttatcagaaagtgttaaactataacatcagtttcttatatatataaatcttctaatgtattcaaaagtaggctcgttatacttttgtttaaccgaggttaagtacgacaagtttaattcggtctcaccactaattaaagaagtaatcatgatatttttgttctaactcagaccaatcatgaatacagttggtgcaagtgaaataaacccaaaaaattgcgcgcatcaccaaataaagacaatgggaaaaagcctaagtttcaaaatactactagcactagcttcttcgcattgaataataaactggtcgatatcctctaaagtagaccggccatgttctccagtgaacttacacaatgaggcaatcaaaacccttg

SEQ ID NO: 8134 - DNA, 7147 bp, Oryza sativa
agcttcacccaactccactcccagttttggtggagctgaaactgtttggctgactccagctccaggaggggtggagctggagctgtgccaaacaggccctaaacgggctcttagtgatggagaatcgaaattgtgccacggggtacttacaggcgcacaacggtagcccccattccgcacactgttttttactatatatatatacattaaagttatgttaatttatagagaattgacatatatattatatactacctccgttttttaatagatgacgccgttgactttttctcacatgtttgaccattcgtcttattcaaaaattttacgtaattataatttattttggtatgatttgttttatcattcatagtattttaagggggaattaatttcctatcctttggcttaaaattttggattaaaacaaatggtcaaacattggaaaaaaagcaccggcgtcatctattaaaaaacggagggagtatattatagttataatgtaattacattgtatacaatcgtattgtagttacgttcaaaagtttaaagagagttttttttaactgtatagctagtctccaattagggaaccacgttagacgatttgccaggatcagacagtattgtaccttacaattgagatcaaacaagttgcacatatattatgcacatccctgattatattaattacttgctgataccaaacaaatagacacacacacacaaattaaacttgtgagtaaaagctaatgcatcaaagaaaaccattattctgcagacaaactgacatgacaggaaatcatatgcaacaacaccaaacgtactaaccaaacgaaccatgcatgcatgcaaacttccattgcttaattcgccggagggctagggttgtggtactctggcgcaggctgcggcttgggctcgggcttaggctcaggcttgggtggcacgggcttcttgtggaagtggtcgaagaagtgcttctccttcttgtggatgtggtcgaggaatgggtgctccggctcaggcttgggcttgggtggctccggctttggctccggcttgggtggcaccggcttcttgtggaagtggtctatgatcttcttcttgattgggccgcagatggtcacggacgcgcacaacgccgatcggtagtgggtcttgccggcgacggcagcaaaggtgccctccgacattggcacgatcttggatggctcctggccggggcatggctcgttggtggcgctgtggagctgagcgatgcagtcggagctgtggaggtcggcgtcaagggggacgctgaaggcaccggtgccgtcgagctttccagtggccttgctctcgtactcgccgttgccgttcttgcacttaatcgccacctggaggtctgcacaaaagaattccaaataatattgtcaatcacttgtaatcaactgtatcttcctctcgatcgacgatgtaaatcagctcaatgatcaattccaaataaattgttacgtactcttgaaagcatcctcagctttcatgttcttccgggtgcagtcggcgcacttggccgtgccgacgaccaccgacgccgcctctccgccgacggcgaccgccatcaagacggcacaaacgccgaggagaactagtcctcgaggagcacctgccattgctgatcagctaatcctagatagctctgtgtagctaaatattgctgatgtgtagagatggatgaagtgaaaggtgaggcaacgcgtggtttatataggcatcgatgaatacaaacacagcttgcttgcattattgatacatcaatcgatggatcgaccagctagctatgagcaatgcaaaaagggccaatttggcgccgaatttgcagatgggcgaattaaggccgtccaaactgaatgatttgatcacgtacgtccaatatagtcgcctctgcagctttacctacgacatcataataatctatcgatcggttggtacgtatacgtaggatctacgcaccgctttatgcatgaatgaatcataacaataattaagtacaataatcgaactgggtcttaactccttgtaaactgcggttgacctctgtttcagcagtgagttacagtgatcggctacttattgcaacactttccaaatgtactgcattcatatcgtgctacattcgtccaaaagacaatatatatataagcaaattgtccctatatataatcatagcattcaaattttgttctgaaaagaatgtaattctaaattactactaccactactacaaagatagattctcctggacaccgcccccttttgttttcatgcggtctgtaagtggaaccgcacggaaaaatagggggaccggcgccgggttctcgcccgcatggaaaaatgcattttcccgtgcgggcgtcttaatccgaacgcacgggataattgtcattatcccgtgtggtcgacttaagatgaccgtatagaaaaatcgattttcgcatgcgggctttttaagtggaccacacaggaaaatacctcccacctttccctcccacccacttcaaatttttcacatcctctcccttcctttttcccttttattctccatcaaccacccccctctctctctaccttatctcctttctcagccttcccggcttcccacctcctccccaccttcccggcttcccctcctcctccccctcccctcctccgtcaacagcgggcgtcggtggcggccccttccactcgtcctccccctcccctactccccttcccctctgtcaggccgacgatggcggtggccgggtgaggcggcgaccgagcgaggtcctgagcagcgaggcggaggcgtcgtcgtccgttcgtctattcctccgtccaaagataaccatggtgggaccctcctcctggtcgtcatcctcgtcgtgcacgttgtcgctcgggtccctcgacgacgatgccgtcgtcacgtgcgtcatcaaggcagcggcggagagcaggtggcggcgagcgggtggcccctttccacggtcgtcgtcctcgtcgtgcctccctttccacggtacaccagcgaagcagcggtgagcgggcggcccctgcccggatttggcgcgactgtggcggcggcgggtgggctcgacggcgatgacggtggcgggctcggcgacggccgggtgcgtgcggtccggcgggcggcggcgattttcgctttttttaaaaaaaattttggttttttcggttctgtgcaggcggtataatttgaccacacgggataatcgattatctcgtgcggtccacttaacacgaccgcacgggaaattgattatcccgtgcggtagagctgcccgcacgcgaaaatattgatttttcaagacacttgggtgcagacgggcaaatcctctgcacgggaaaatcatttcgaccgcatggaaaaatgttttttgtagtagtgtacatccgtcccaaaatataaaggtggaattaaagtgagaagatttgaatggtgaaaaatcatgattgaagcagggtaaagtggaattaaagatgaaggatgcaatacatttagaaagtacaacatgccaatattgcaatacatttagaaagcacaaccacactattattacaaccacatgcaaaaaattacaaaatgataaaagggacctaacaaagctagaataactcaaacactaaacatcctattattggacggccaacaattatttaagataaaaaaagtgcacctttatgatggttgtattaccactatcagtattatcactagtagatcgaagtgagatctcaaaccttgatttatcattactacaattaataaaaaaattctagtaccaatagtggcagtagtataaatagatacgagaaccattaaattaaaaaagatgaaaggcctatattgatctgtactaagagtaagactattgtaaaacatctcgctgtctagcttcaaggctcacaccaattatcatatgctgcaactttctcaagctgaagaataacgttttcctcacaccaattatcatatgctgcaactttctcaagccgaagaacaacgttttcctttgggagggcataaaatcgttttctttttgttgggaggacgaacatgcggataattcaatttagggccaagagcctacatatatgtactgagatgggccaaggaagaaaaagagcctactattcgttaattgaaattttctttgctcggtacgtccacttgtatttcgctgatggtttttggctgtcaaggctagttgagttcatggtagtgcaagtcacgcgcactttacaaggacgaaaaaaagatgctatcacattactcctaattaatcacaatgcattcatgtggacaccgcatagaaaggtgtatgcatcctgcgtataggtaccaaccggctgaagaaccgcgtcgtacctaggcaacgtcgtgatcgaatgtgacaaggatccagattggacgtacgtgatcaaaatcattcagtttggacggccttaattcgtagcatctgcaaattcggcgccaacttacagccgctttgctgatcatcgaccgatcgatcggtcgagctgtattcaactattgatcgatcatcgatgatgatcgatgagcacgagaggctaagcctatataaatcgcgcgttacctgtctttctcttcatccattcagagttagcaagctcttctaattcatatatagaactcagaatggcaggtgctcctcgaggactagttctcctcggcgtttgcgccgtcctgatggtgctcgccgtcagtggcgaagcggcgtcggtcgtcatcggcacggccaagtgcgccgactgcacccggaagaacatgaaagccgaggatgctttcaagagtatgtagcagtttaccttacatgcagcttagctacgttatacttcctccgttcccaaataattttatttttcacacgttccacacataccaatgcaaaacaaaagaaaactagaattctaaaatcatttgtggatttctttgtgcagatctccaggtggcgatcaagtgcaagaacggcaatggcgagtacgagagcaaggccgctggaaagcttgacggctccggcgctttcagcgtccctctcgacaccgaccttcacagctctgactgcattgcccagctccacagcgcaaccaacgagccatgccccgggcaagagccatccaagatcgtgccattgtcggagggcacctttgtcaccgtcgctggcaagaccagctatccgtcggctttgtgtgcgtcggcgaccatctgcggccccatcaagaagaagatcatcgaccacttccataagaagccggtgccaccgaagccggatcccaagccagagccgcccaagccgaagccagagccagagcaccccatcctcgaccacttccacaagaaggagaaggacttctttgaccacttccacaagaagcccgtaccacccaagcctgagccaaagtcggaacccaagccacagcccaagccacagccagcgcctgagtaccacaaccctagcccaccagcgaagcactaaacattatctacgtttggtcttgtatgatttcgtgccatatcagtgtgtccgcagaataacgctttctacccccgtgtgagattatacattgaaatataatgtacttgctagctttcatccgcaggagttttttttttaaagtgtgaccgggttcatttattggatatcgcatgcatattagcagggcacgatgtgtactgtaatatctgcctgttgtttttatttctctacctaaatgaagttaaccacaaaggacaaacataaattcacatgaaatattgactctggattcgctgtgcacgtttatgaatttattggccatctagcgagaataagcagtgcgagtgtgctgtccttgatctccagccttaaatggggaaagcattgattcaaacgtactagcctacctgtaaattaaagtggcgtgcatggaatttaaatatattttaaattaattatatgctcatgcattaattatagctagaaaaatgggccaaaatcaattgttaataagtgaaaattattgcagttcgatcgggaaaaaatttaaaaactgggtgatttgatgatttttcactcttttgattgggaatttgaagatcgatttaccataacacatcattgactcaaagggtcatatgtgccatcaaatttgccgaaacagttctctcatatgatgggggatcactatcatacatactagacgacattctatgttttactacacgatatatagatgaataccaaatgaatatatgttaaatattataaaaatgataaatagatttggtttgagttgaaataatgggagaaatgataatttagcgagcttgtatatatgctgaggtttagaatgtaatgaattttagcatacttgcaagttgagttttatgtgtttaatgggacactatggtatgcttagtatgcttccttgttaagctttagttgctttcttgcttagtgggttgtaactatatacagaaggtatatatgtctgtgaagttgaaggcacacttcgatttcaattggaagatgacacattgacaaacaggcaacattacagtgcagaaaaaaaaatcaaattaacttcaatatgtgaattttgcaatttatgaatgtcttatcttccaaacgaaaaataaagtacatatgtattgaatttacttctttagttgtatgataggatctcgtctacacctgggaatttttgtgaatcgtttcaaaaggctgcccagagtctatgaagtagctaattaatttccacgatttcacacaaccagtggtttaattcacctgatattgcccaaattaataacatcaattaggatccttcaaattaaaataaatatatatacctgctgtcaaggaaagcctattcattaattcttttggtttaaatatttagtatatgttggaaattttctatcttttaagaactaagactagataacaagaattaaaaaaaggcaaaattggttatatagtatcgaaagttcacgtttttggttttatagcactgaaagataccggttcactttaatagcacctaaagttcaccctgttcctatttttaacactttcgtcaatcctcgatcgttttccgt

SEQ ID NO: 8135 - DNA, 24438 bp, Oryza sativa
tgaccatcatccgtgacgtgcaccaacttgaggcccgtttgagataacaactaggcccgtcacaaggcccgtcacagatgactcattagtgacgggctatatacttaatctctatcgggcattaactaaagcccgtcaccgatgactatttttctatttttcatatgaaatgtttatatttgtaagttgactatagcaaaataattaagtgtagtataataattcattttatgagtcaaaataattttacgggtagtaaatgatttcaaatggaaaaaatttcaacaacaaagttatataacttatcaagatttacaacttttagtttggtcatttttcaatataatattttttttgaacagtttgaatttgaatttaaaaatatgacaacttcaaacaacattttcaaatactaaatgatttcaattgaaaaagtcatcaacaacaaagttgaataactcatcaatacctaaaacttttatttttgttatttcttcatccgacaaaatgttagtaatattattcacaaattttacatatatgtgttatagtttataaaagaatcagataagagatatgtcaattttgtgaacaatgttactatcactttgttgtatgaagaaatgaccaaaataaaagttttagatcctgatgagttattcaactttgttgttgatgactttttaagttgatatcatatagtatttgaaaatgctgtttgaagttgtcatattttcaaattcaaattcaaatggttcaaaaaatgttatatagaaaaatgaccaaaataaaagttatagattttgatgagttatacacctttgttgttgatggctttttcagttgaagtcgttcactgatctaaaattctatttgaacttttcaaactttgaatttcaaatttcaaattgtttaaatagagtcagatggagaaatgaccaaaataaaaattttgcacctcgatgagttttacaactttggttttggtgacttttccatttgaaatcatttaataaccccaatttgatatcctggcatagggcttaataggattaatagaatactcataccaataagttacaactacttttccggaagccaatctccaaagaactttgatgttaagcttgcttgaactttgatgttaagcttgcttggtctggaacaatttggggatgggtgaccgacctttgatgttaagcgtgcttagtctagagcaatttcgggatgggtgaccgaccgagaagtttgcacttcccacgagtgagggctagccaaaaataaaatgtatttatttttggattatactcatctgtaacgggcattaactatcatctgtgatgggctataattagtgcccgtcatagataagggtcatctgtgatgggcgctagttgtggcccgattgagataggtcatctgtgacgggctatagtttgactggtcgtctgggtcaaagctatcggtgacgggctttacttaggtcccgattgagatagattcatccgtaacggccgtttgcccgattgagataactcttcacatcagtgacttctagcctgtgacggacgtcatgcccgattgagaaggggcttaccgcccgattgagatgagggtatccgttctagtgaatgttgatgtattgaagtatgaattattatatgtaattgtgctcgatgaaaaatgatggacatgtgccctttctgctttgcagttttactagttatgctaaatgttgatgtattgaagtatggattattataatgaacctatgtactttaattacaacctattgttgatcagttcgaagttggaatataggttgatcagttcgaagttggaaacctggaacctgtgtggttgtgttcaatcatggacttttggtaaattatttatccaaatgatgtgtaacaactgtctctacagaaccacgcagtctaggccatccgatggatggacgacccacttacacataccacctcacttacggttccgttattgtttcgtgtaaaggggtaaacccgagagtgatatggctagagcgacaaacccttataagttggttttacccttactaaactagtaatgtggtagtaatgtggtagtaaacatacacatagctctcatggataacatagggtatatcctaattggccctgtatgtcacatacttctcccctcagaggacccgatgtccccatcaatccaacctacctatgtgaatttaggtgcagttttttaaataattatatacaagttatatgaaagttataatgtagttatagtattgttacggtgtaattgtatgtaaccacaatgtaactatatcctaactattgtataattgtaatgtagttacactatacctggtaaaaaaaatgtagttacactataactatgaatctctatataattaacttgtatgtgaatttacatgtttttttaatacttatagacaagttatatgaaagttataatatagttatagtattgttatggtgtaactgtgtttcaattatatgttatagatacatttgaaactttttcacttaaaaaacttgtgtcccttctttcaacaaccacttagatacggctggtttttgccataattcttttatttattagtataattttgatctcataatttacaagatcattattatactaataaatagaaacatatggttaaaggcgtatctcttaaagagatattaaatatctataacataattttttttgtttgtagaaaacaaactagcctaacatcacatctatatgtacagacaaaacctggtaatatatataataatggtccaaaagccaaatgaaaacaaacagattaagaacaattcaatcatgcagtactttggctgtgcaggcagcaagctattactatttccctttttcataaaaacaaactagtactacagtactagctttgcattcacctaactagagacaggcgagtacttaattaaagctttacctttgcttgctaaacaccaccaatgggaagcattacgtacacagtgcccgtgtgcatgcatgctactcttcttaatcgatcgatgcagctaagctggttcctgatcaaaatcatcaaataatgtacggcgttaattaattcattttaaaccagcaaattcggcgccaaatgctaattgtgtactagtatccagcttctgctcgatcgatcttcgtctgcatgatcatatataaacgcatggttgatctgcttcttgctcatccactgatcagcaacgagtagaagcggtagagtttgctaggatcgattcagcaatggcagcggtagcacgagcactagtcctcggcgccgtcgtcgtctgcgccgccgtcgtgatggctgtcaccgccgcggcggacggcgaggcggcggcggcggtcgtcgtcggcttggccaagtgcggtggctgctccaggaagaacatgaaggcgcaggatgctttcaagggtatatatatcataatgatgatgataaattgataatatgttcatcgataattaattgcgatcgatatatcaccgtcgtcgattaattgtttggtgatgttcaggtctccaggtggcgatcaagtgcaggaacggcgacggcgagtacgagagcaaggccgtcggcgacctcgacggcgacggcgccttcagcgtgcccctcgccgccgacgacctccacggcgccgccgactgctttgcgcagctgcacagcgcggagagcagcacgccgtgccccgggcaggagccgtccaagatcgtgccgctgtcgtcaacaacggacaacggcggtgataaggctaacaccttcgtcgccgtcgccggcaagaggatgcgctactcgtcgtcggcggagtgcaactcggcgttcctgtgccccttcttcgactacttccacaagagaccccaaggccccaagccgacgccgttgccgaagccgacgccggcgaacggtggtggcgcggcgaacggtggcggagctgcggcgccgtctcccagccctccggccggcatatcacagctgaattaattaattcgtccattccatcaatatcgacacttgcttttttgtttgatttcatggcatggttaattcttttggttcttgcatggttgatttcccaggtcagcttgttggtgcagaataaatgaaagttgtgagatgtgagaggagtactgtgactgtgtgagagatcgatcgatggatttatgtgagaacgatgtatgtgttgtatctctattgtttggcatatctaatgtgttattcgttgtatgcatgtaagctattgactgtgctttcgtccacttcgcacatacaaaaagttgaaattaaactcggtattgctagtcaatgggcatctatccttataaactactactccagctagtttggtgaggtggcgtattattgcttgctacagtgctgctaattgctttgctcgatgtactgctgctgctcactaattggcccaagctagcccaaagcctggctactctatttgttagggagtaaagtacactttgactccctcaagtataggtaatccgatttgtattcctaaaacacaatagcagacgtcttgactctttacctattaaaactagtgtaatttaactccctcgataattttgagagccgttattgctgacgtggcatgttgacctagtccaacaaattaagttagcatgtggggcccacatgtcagtgacccttctatttcttctcttcctttaccactcctctccctctccaatatttcctctcggtggcagaatgccaacagtgcagtggtgggatgtagtagggcgacggaaggtggtagatgagcggtagtactccaagcaccactccccgacgagccactactaccaactctaccaccagagctcgccgccagcaaggttgcgccgtcatggagctcgacgctgaggcacctacggcggtcgaggacatggagcgggaggcgaaaggaaggaggggtgatacaggtgcttctcatccacctactagtgagtcccgactctcttccttgacccatcctcaatcctcatcaccggcgttgttcatctccgcttagctagcatgagcaccgtcagccctgccgcatcttcactgtgctctcccctttcttttccgccaccgttcctataagcactactagaaaaatgatttttcatgcggttggcatattattttagccggcggccatacgcgaaaaccgacagcaaaaatatatcgaggagtggggagccatggaccgccagcgaaaaccgactttcgttggcggccacgctaagaggtccgccataaaaaaaactctatttttcgaggcggacctcttaggtgtccgccagcgaaaacgtgattttcggcaggtagcgaagaccgcttcaaaaaaaattgaggccaataaaaatccaccgcccgcgctgagtactccgtccttatccttctcctcccccttctcctccctcccttctcccttctcctccctccctaccgccggctcccgtcgccacagctccgccgcctcactgctcaacggggagggcctcgggagcggcggcggggcacggcctccacctctccgccgcgggccacgcgacgacgagggaggccggatccggccgccgcgacgacgggggaggccggatcagcctcctcgacgacggggcaggccggcgggcgacgacgacgaaggggcctgacggcggcggttgggggaggccggatccgcctcctcgacgacgggggaggccggcgggcgacgacgacgaaggggcctggaggtggcggctgggggaggcctgatccgtagctgccacgacaggggaggccggatccggccgccgcgacgacgggggtggccggatctgctgccgacaccgacacggcggcgggggagggggcggcggggagcggatccggcgcctcctccctccccacggcggcagtgaggtggcgacgacaagagaccggcgacggcacgaattttttttttttgcatgtttcctgatgaatgttgtgatgtttgatttgtgtacatttgttctgtgcatgttgtgatgtttgatctgtgtacatttgtgctaatgataattttgtattgtgtttgaatttggaaatgagtagccaaatggatttttgctggcctttgctttgtgacgactgcaaattccgccagcgaaaatccaaaatggccgccactaaaaagttttcgtagtagtgtagtaaagtcatagcaatgacgaggagcgtggccactccatgacgctctctatcttttccttcccgagccacgtgggcgcccggtggcaaattaaagcttggcccaagcggtgaggcggtgcgtgcagaggaggcacttggcgatgtctgccatccatctccttcattgatgtcgccttgcttttgctagctgccatctgttgaaaagacggtggggaatcctatcggcttctcctaactgccgcataagggaggagtggagaaataaacagagaagagcgaaggaggaaaaggaagggacaactggcgggcctcacatgcggacttagtcggttagactaggttaatgtgccacatgagaaaaactactctcaaaaccaagtgaaattacaccaattttaatagttggggtgttaagatatctaatattacattttaaggatacaaattagattggacctatatttagggagtcaaagtggacttgtttcattcgctgccctacaactgctactgcatgcacgttagctagcttctcaacacaaagcaacccaagacccgattatcttaacgtggcccaactcctgctcttcttccttttcttttctcaattatttcagggtcacatagtacctctccatttaaaaaaaccacccctcccaacatcagtgttttttttagcgaaaatcggtccactaggaaaagccgaataatttctatactgatactagtataataggagtcatatcctcctctttccctcaccatagtatatacctcctcctagtgtacgaactcggcgattaggagcgatggccgctttgatttgtggagaaggagatttaaggagaggagaatgagtgattttttttggaagagtttggggcttctgtttgggaccaaaagctcaacatgcattgagacacatcaccctttaaaacttaaccattggatcatttttgaaacgcacatgtagttcatgacatccgttggattgtttagaacagaaatgactatctcttcctgtaactgagaaattaaagtctttacttatttctattcatgactttaatatgttagcttttcatgcatgtgtcaatttatttgataaccatagtccacaaaggttaagacattcattacaaatgtatcatactattgttataggttcaatttgaattggtaaaatatattattgtgattagaatggcaccaacaatatttaacaatgttctcataatattaaagcgttagcgtaactatttatataggattggaagtagtacgggacaactgttgggctataatttcccttttttttaaaatatatcagggagtaattatatttatggcgcccataaatatatatataggctaatgttacaaacaaattcccattttttcccctcagctttgggctgaattccaccgaggcagcccagcccactccagaacgccagccagcctgcctgccacatggggcccatttctcagatcacctcgtccacctcgcgcctctccaacgccgccgccgccgccaccgccaaccgccgcacaccatggccctcgcgtgtgcgtctcatttgcgccgcctcggagccggagctccggcgagatccttccacgcgcatccgtaccaaggtgggtataccccctccccgattttcttccgtgctttcttttcttggtgattgaattggatttggagcgtgattcctgcgcggcagccaaggtcggcgtggtggagttcctgaacggggtcgggaagggggtggagacgcacgccgccaaggtggaggaggcggtcggcggcgacctccagagcctcctccacgcccgcactctgcggctcaagaagctcggcatcccctgcaagcaggtaatctccttcagtcgagcctcttggttcatctctgtatgtgcagattgagcaacggattgtgattatgctagtttcctctgctattcagcatttcggaatgtgattatatgttttggttagatttcgttgtatgatgctgccgttattagatgtcgtcgttatttttgtttcatagaagcgaactgatccatatgtgtgcttataacaatggctcgttgtattatgcctacatttttgtttgagaaattgttggatgcatgattaaattttgagcaaatttcacagaatcatatgctttgtgttccaagttgcacaaaaaccacaggggtttcggcactcggcacttaacaactataagtgtcgctttctcaggaatgtttttgttatttcatctgagtggatttcaacttatttttagttaacagattagctaatgctatgtaattcggcatgctttgaggttaacgttttctgatggtaattttgtctgtgtgttatctaactcttggctttgaacgaatcagtattgtactaggttgcttatttctctctagactgctctggataagcatttgaccatggaaacccttatgttttaaaactaaacttttttcttttgattaataagctatgtcagtgttaatgttttttctaaaggaatatagataagtgttatgtggataattttcttttgtttggtcaagtttcagcatccaagtagtgaaagttaagtaattctggcatagtctcatactttgaacttgaagggaacttacctctctgatctgagatgttgatatattacccttttgttattgggaatgacttcaagtgaattactcaacagcgagatgtggtattccgaaccatgtttttcgtagagcgatacatttttacttaattaagctatgaaattaatcaattttttaatgcttttttagatgccttagtgaatttgacaatgctaaggtgtctagaatttgatgtgcaaaataacacaaattttccttcaagacaattgtaatatttggatgccaagaaagttccatggttttgcattgtacttaggctggattcttggttgtgaaatatacaatttgagttttacatgatattctgaagtgaacacacatgtggcttatgacctgcatgctgaaggaaatattcagttccttttgttaagtaatgggaacctgatcccattttgcagacaatgtgaagacattggctaactagtaactgtatacaaatttggagatgagttagacatctccttgccatgtttgtctccctcccgatctctgtttttaccgtttcttattcttcctttcttccttgagtttcttctctctccaatttgtatttgtccagttaaggatgatcttggctgtctgctgttaatgcattgtttggaaacttactatgtttcctttagaaagcagtcaaatcaaatatagtacgtccctttttttaataccttaagccaatccctttgaattatttgctgccagcatattgagactggaatcttcattagcatgtcatgatgttttctaggaaatagaacacctttgtaggtttgtcggtaatattgcttctcctaacctacagcacaagcatatttttttattatttaaatctcaagtaaaactctgaacattgctactaatattgaggttgatcacccgcccaggaacttaaaaggtagggtgctcacctaagctagtcgatacttgtaacatggttgtggattaggctggtggaatcatcttgataacagtatctttatttatcaactattttttatctgttctgagttccttgttgaggtatgtgaaaataatttttaggggatctattaagttctcttatttctcttttatacttgtgatgcagaggaaattaattttgagtttcgctcacaagtatcgtcttggtctttggaagccccaagcagaatccaagaaaacacagtgaagttgatttgtattgaagtggaccactttgaaaactgtttgctatcattatacttacctgggaaaatgcaacgaaagttagtttctaatttcccctagaattattggtagtgctggacttgagaatttgtcagatattgagttgtagtgtaatagtagtttctattcagccgtctgaaaatgtgcctatgctttatagcaacccttgcatggaatctgaaagttccaatcttatgcctttttagtactttgttttaatgtttttcacttgtgcgaaaataataaagtttaagctagcaatatgtcctaccaatagtagatgctttttactgttaggttaaactattattatttgtgttaaggtatttcgtttcttgtttgtacatctcagtttgtcgggttgtaaaataccatgtggagtatggagagaaacattcaggctatatgatttttcccctcttcaacatgttttatgccgaagtgatagactttttctttttcctgttataagcggtgcacatttgcacatatgagcacagcccaataggattggcccaagggtttgaactgggctacggttgggttgggttgagtggtgggctggttagctacgctattacaccctctacctctgtaaggctcaggggagaatagctaatatggtccctaaagtttcgctcctaggtcattttagtccttaatctttcatattgtctaaacaagtcctttaaatttgtcatgtgagctaatatagtccttggtcccaccaaaatcgccacatggacatgccatgtcaccttcctatgcaaaatctttatgatttgtccaatttacccttatgcataggaaaataaaaaacaaaaggaaaaagttaaaaaaaatatatggtatatgtaagagtaaaaatatacctcaaaagggtgaaaaaagaagtattttttttcctatggttatgtctaattcacccttatatttatttttctatgatatatgtaaggctaaattagacaattcatcatagattttgtatgaataatgacatggcatatccataggatgattttggtggatccaaggactattctaggccttatgacaaaggttaaggatttctttgaaccatttaaaaagttagagactaaactgatcctacagagaaagtttagtgataaagtagctattctccctaaggctcagcaagaaacaagaaacagcttagaacaatcctcatgtacagtataatcaggaaatatctaaacttttgggtttactagtaagtccttgtaggaagtgcatctagcaaaaatatcttgaatatgtattaatttagtggaaatttgttcaagttgaccttaaatcagctggattagaaaatttcatggaaattacgatttccccttttcgtcccaggaattgtacctcttatgcaattctggaagttaatagggccaagttgagtctttgtatagcaacgtacgaccatagtaattaaacacatcctagtgcataatattagaatgtctttaattcggttctagattgggtgaatactaatttatgggatcttattacgaagtggaaagaacacaaatacacaaataaatatcatattaattaaattaattccaacaaacaagcaaacgaatcctgagacaaatctacctgatactaacacacctgtattgactcaaacctcacaaatcaacctgaaaccttattcgatcgacccaagaaactcaaaatcaactaacacaaagctgtctgcgctactccaaccttgacaacaatatatcataatggcattaagctaacgcagagcagaaatttaaaaagaatcataataatgtgtgagctcgatcgacggctcaattagttcctcgccggcgggtggtacgggctcggtgttccgtacgtcggcgtcggcttagggtgcggcggctggtcggggtgcggcttgggcgctggcttggtcgacggtgcggcgggcgccggcttgttgtggtggaagtggtcgaagaagtgcttcttgatgggctcgcagatggtcgccgacgcgcacaccggcgacacatagtgggtcttgccggcgacggcgacgaaggtgcgctccgacagctgcatgaccctcgacggctcctgccccgggcacgccgcgttgttatgcgccgcgctgtggagttgcgccacgcagtcggccccgcggaggtcggcggcgagcggcacacggaaagcgccggcgccgtcgagcttcccggctgccttcgtctcgtactcgccgtcggcgccgttcttgcacttgatcgccacacggagacctgcgcgcaaatatatatataaatctcacttaatgtacagtttactcctctattcaatgaaattggcagcttgccttttctaaaaaaaaaaacaatggcaaatcaaataagataggtaggctgtattgatttaataatcctaagctgaatttaataaactaacaatagaacaaacaaataatcctaagctgaatcaaacagggccttaataagctaacaattgaacaatgatagaagatgcattgcttagcgggacaaattgatattatatattattatttgaaaatgtttagaatactaagaaaatagtgataatcaaacagggccttaataagctaacaatagaacaatgatagaagatgcattgattagagggacaaattgatattatatattattatttgaaaatgtttggaatactaagaaaatagtgagaaaacctgcgttcaaatggattcgaaccagcacgcttctcctggcagctccctgccagctgagatatgtgctgtcctcgatattatatattatatattattataaatgtactttcttcttccttaacgtagtgtagttttgatataagaatttgtccataaaagagtataatattacattggtccactagatctttttaatactattatatatatttttctcttttttaaccattgacccaataaaactccctcctaattattttctcaccccttctcgttttttccctgtattaataaaaggacataataatcttataacttttccttaagatgtgtgtgtttgactagttaaaattatacttatctagacatggagtgagtaataaataatttagaataagttacctaggtaatgctaagtaatgctgatgtataattttttcaaaagaaattacaattttaaaaacatggcacgaataattcgtacataaaaaataatccgaaaaagaacggggacacgatctaatcatcacgcacccttgaaggcggccttggccttcatgttcttcctggtgcagtcgccgcacttggcgaggccgacgacgaccgacgccgcctcgccatgggcggcgaccgccatgaggactgcgaggagagctagcactctacctgctgcagccattgctggactgtgtggagagatggaaagagtagctatctgatcgagctaggtgagtgaggtgatggatgaagaagatggtttggagatgcatgggtttatataggcttcatcgatcgatcgatcgatcgcctgctagctgcaactgtgtgcatggatgttgataaattgaattgatgatacagctcacttgatctgcgggcggtgaaaggtacagagtacgtagatctgtagatcgatggagctgccaactttcgcgccgaattcactgcttgtcatcaatgctggatccgtggatcgtagtgaattatagtgagtaaaattaaaattatgaagcgaaaaattctccagtttcttcttgtactagaacgaaagcatatggaatgtggttcttctctgacatgataggcagctagcttgactttagggagatgtacagtcgatcagtgtactggtcagggttcgcaaatcacactttggtgggtcccggtagaattgtggctaattaagctaatctttgatttttcctttttagaaacatactataaacacaagatgcgcacacacactctctcatttgagaaaacgaaccgacataacttaaaattgacgaagtttcaatagacacctcacaatcaacgagtacgatgtcacgtacaaataaaattcgggtggattgattacactataaagaacataaccaattgagttatactcaccccataatctttgaatttagccaaaagttattacgagtaaatttagctaaaatatgttcaaatctcaatttcaaaaatattatttatttgcttcgaactttcaaaaattttgggatttggtccccccgaaattgccaactgtaccattggtgagactaattgatagcacaataatgacggatacgtacgtacgtatacatcagaagatcagtacaggtagattactttaattcgtctacacaaagaaatatttcttttatggcgaatgaaacctaatatctttagtaataaaaagggcgtaaattatgctcacgatataagatttaatagctacgtgcgatccatcaaaaacttttttaaaaaaagcgtactgatataataacttgactagtgcgatgataaaatgtggtacaaaattattttgcatacgtaagaattcaacctcggcaaggaagcacgtgcaatggttccctttggcagagctatacaggaatgcacaacttacctatcgaaataaatgtactcactagactggtccatatcatctctgacaggctcaaatggtcatttgtgatgggtactatcctcgttagagataagtggttagtggtaagtccacctcacctctgacaggtgaaggcccatcaccggtaactatctcctaaacagctcctaagttctggcccgtcattggatgctatctctcaaacgactcttttaagttctagcccgtatttggtaactatatctcaaacggctcctaagttctagccgatggccaccctgagcttgggggccgccggatctggctgcccaaagcacgggagccaccgcgaagatggagattatggcggatgttatgaaaataaatgcacaacggagacacgaattttacatggaaaaacccttgcgggagaaaaccacgggcgccgaccggcaatgatcactatagaggaattggatacaaacgcaggggatacattgcgctgtcacaccctctccgtgcagcttacaagggatatatataggagaaatctaggagtcctagtggggaaagacttagagtcatactaggaaactaatcctataaaggagagtcctattagataactaatccgaatatattgtgggtccaaaattcggatcacatatttaacaatctccaccttgatacgaatttcccttgttgcataaaaatcttcaatctccaaacaacctcatgatgataaaatcaatgtgcgccaaatagtcacttggactataatcataacacccttgatccagaagaggcattgggaatagatcctgaatctactagtataaaccggtgtgaacctagcagagacgcgaaactaatgcacaaacttcaaactcgccatgggaataacatcctgaatctgctggcattaatttatggaatcctagtagaaacgcgaaactgatgtgctcaaaacgaagtacttagatctccacatctccctataaccttctgatatactgggcaaacggacatagcaattccgccggaaatttgaccatctccacgtgatttggacagcaaccttgcagctccctctcgacgactttgcttgtgtgtcctgaaatatgtatgcgcagctgataaactggtcacgacagtattagctcctcctccatgaaagatgtgccaacttgcaacctcacttgccataacaagaatattacatctcaatccagaagcagtagatcaaacttcaaactcgccttaaaaataaaatcctgaatctgctggtacaatttgtcaaaccctagcagaaacgcgaaacactctgggtgcgtaaaacgaagttgatctccgtgcagaagctcctggtagactggcttgtgaatatagcaatctggaacgtgaatttgtgtccccctgaacagaaccaaaacaatgcaaggcttaaatccctggtgcgaagggcgtgtgcacgtaacaattccaacgtgaaatttaattcacatgaacagaaccgagaaggctgctgaaggcttggacttttctccttcctcgggatgcgtgcggaatagatcaatggcttcaaccctgctgctgcttctgattttctcctgcgttgcttgatggacgtgattcagatcgatgtgttggagcacctgcttaaatcgatctggtcgacaccgcttcgggtttgcttcaccggtgattcaatctcaccgaattgatttctgcgacgatgacgacgcgttgctgctgtggccgattctccgcgacgtgcgctgctgctccttccccggcggcatcgacgacgaggccaatcagatcgatactccgatccgaaaaatcacaccggtggctgtgtgattagtagatcgatccctaatgctataaaaatagatgcacaacggagacacgaattttatatggaaaaacccttgtgggaaaaaaccacgggcgccgaccagcaatgatcactatagaggaattggatacaaacgcaggggatacattgggttgtcgcaccctccccgtgcggcttacaagggatatatatatgagaaatctagaagtcctagtgggggaaagacttagagtcatactaggaaactaatcctataaaatagagtcctattagataactaatccaaatatattgtggatctaaaattcggatcacacatttaacagcggaggtggagaagacgaggtcggcgagctctcggccctccacccagcctcatccttcacccagtgcgcctccctcctcatctccccttctggtgatgatgagctaggcagatttggacttctcgccctccgcttcaatctttgtcttcccctccaccaccaagcagtgcagccttcaccccgagttcccgtaggtgccggcgcggcctccgaccctacgcacctgcaggctctggttttgtcccaaatctactgccgcctccaccttcgaccacgacctcccaccgatgccgacgccaatgccatcaccgccttcggctccgtgcacctgccggcaccgccttcgtaaacatcgtcatccgctaactccacaggatgatgacaggaagagagtgggctgagagttcgagagttcgagagagagatgagaggtcaagaaagagatcgaaagagaaagggtggagagagattaaaaatgaatttatcattggtggcttctattagtgacagggtgaaaaaaaacctttggagattgacttttcatctttaacgggttagatagacaacatgtatagagctgaaagttaaacttgccactaacggccatagtactaacctgtcacaggttacaggtcacttgtgacgagcctatatgcgggctcgtcagaggtgttgtctgtcgggcgcacatatagacccgtcacaaaaaccacttacctatgctgggctgcatgcatcctcactgtttttctttttgatgagggggggggggaggggattttagtcccggttcgcaacccaaaatattgggcccactgaatcttattgttttttaggttgactggattgtcacataagcgacatgtagattaaagtcgctctggattgagttagggggttatttgttcggtatgaaaagtttggggtgtagaatatttggttttgtagcttatggggtaattcatactagcttaatagttcaggaggtaattcatactttttccttgtataaaagcccaaataactaaataattaaataatgtctttataatgcaacataatttctgtgataaatatgaaaaatcgaattatgctcttatggttatgtaattaattaaggatttaaggaggtacggtttgtggtatctgtgggtcagtttatatatagatcgatcaggtcatattcttggatctattttctaccaaagtcatttatttgtacctttgtatttatatactctagttgtaacagccttttacatacctggtcaccttttcttgtggtggtcacatctccctagcctaaatcaataagctggcagacgcacaacgccacaagatcctcagtactatcacccacatgtatggatctactcctagcaaatggttttgaagttttttttacgcaatccatgcgtgtctgccgaaggaagatgagttctagccattaatcgatccctcaagggaatgatatgtgtattttctttctcaaatgtaatgcaaactgttacgatatttttttacaaaactagaaaggtagcccgcgcatatgcgcgggcattttatttaatatgcatgaaactttattacggatgtccatgtgtgggtggcttctatcaaaaatattcttttactttatcctaaactaaaattgaccttacttaatgtacttggaatgatggttatgatttttcttctaattaccctggcaacatataaattctgaactaaaattactttaaaccgtgtagtttttaattaataataaaattttgtgtcgaaacaatagatgtgtttactatgaatgtccatttttttttgttagattctgtttgaaattttagatatattcattttattagtcctatcaaaatgtttgaatatttctatttaagatgggttttgagcccagcaaaaaaatttagtattagataaattttgttcaattttcatttcatttcttttcatcttcatcttttattttttgtgggaaattccactctatgaggcatccttaaaatgctttgatatctacaatttgggatgaaaatataactgggtttatcctgcaacctggcacggggtaaagacatctgttctaaattatatctctctaattaagtaagaaaatttaaaatagaggtcgtagtattttttttggcaaattaccactaaattggagtgtcatgtaacaaaaacatgtttattgttctatgctagatgtcaggaattcacgatgtaccggagcaagttttacaaaaaaaaaagaaagaaatatacatgatcttttaattactatctaaaattgccctttatattcctatggaaacatcatggttgtttcgctgttaagattccaccaatgttcttagtacgatcggtatgttcaactgaccacgtgacttcatagagcacatatataatttagatgctatgattattttaagattatttatttatctctaaaaagatcatttattgataaaagcatcaacatcaaattgtatggatgaatagctcctatatacatgttgagcaaaaaatatttaagtcgatagaaagtcgttagatgtctaacgggatataggtaatgggtctaccagttttgtgaaaaattaaggtgcgatattttttatttttagtgagaaattttagtattttcttatacttagtggaggcctcaatatggatgcgggttgtagattgtaacttttttgttagcatttaaatatagtcaatatggttattaaattattgatttcacttaacaaataatgtgatagttcaaacatatcataagagacatatggtggctatacctaataggtggaggttcgtttgtggtcttctctttgcccactaagataattttaattttaattgtcaagaaataaaaaaaatatagaaaagtaacacaccgcacacgggggatgggaatggagagggagggttgggatgttttttttcttaaaaaaagattgatctaacaacctaaattaatgtgttccgatggtcgaatgttttatttttttctcggatttattaggattttctataatttaagcgggacaaatagtagcttagcatagcgtttatgtgctttaatgtctatagggatggagtggaagggaagaaagtttgggatgttgttttttcgaaaagaaaaaaaataataacgacgtaaaataatgtgtccattgatttaagtggataccagtgattgaatgtttctataatttagagtgccacacaacggtttagaaatatttataggatgtttaatggattttaatgcatatgatgtctatttgtgggtttttttcccatgaagataattttaattttaattgtgatatgctttcacatggaaaactgtatgtattataaataagatgaaaggatcagattaaattcatttagaaatggtagttttaatcttggcctgggtagttaatagccttaaattcattatttaagatgaggagatgaggagcaggaaccgcaggatggatggatgatatatatatatatatatatatatatatatatatatatatatatatatatatattgttgaaattgagtatatacccaattcaaatgagtatgaaactttttcaattacttaggtattaacattaactactttactaactagttcaaagcaattttgaactgaattttaacttgtttttgttagattttgattataggtatatagcatccatacatataattagatatgtatgtaatcatggactgtgaaataaagttaaatttgagttgttttgttgataggtataagtatgaatcgaattattataactaggtatatactcacaatttgaaaattttaaaaaaattgagtgattttgtgcattagatagcatggtgcccgggcactatggtgccccatatgagtgcgtatatatatatcaggttgaatgctccatcaagcgaccattgatgatcctattcattgttaatttttcttccagttatattctgatttgcattcttggtctgggctatgatcaagtaacggtagtagcgtattggccgctggtgccgaaggaaccgatatcacatgcgagattatttaattatctccgaggacgaacataccctttctaattgattttcaaactgttaagcaccttctaatcttagacttatctttaaaattcgtgcagtttttttagtgggagagcgaagcgcatctcgataagaaaacagagaaatggcataaaaatcattacgtgcggggacggtgggaggatctaacggtgttaaataatgggtccaccgatttaaatgaaaatcaatggttagatttctctattttattagagtgccacgtggcgacttgagagtatttatagagtgccatgtggcggcttgagagtgtttgtagaaagtttaatggacttttagtatataataaatagatttggtactccctccttccatttatatatgaaattggttatatgacgttgcttagttcaaaccaatatcatatataagggcatgtacaatggttatcaatagtgctctcttagcgttgctaattagtaatacttgttaacatagaagaaagagaaagagggagagacaaacatcgttgttatgcataacaacgtcttaacaacgactcttaattactataatatggaaatatggttgcatgagggtaaaaaaatggaaagaatattaacaaaaggaatattttctgagttaatgattaaagccttgtcgtcttaactactgtaaagacacggtctctaaataatcttatattgtttaagagaccatactcgtctttactattgaatatgccctaaatggaaggagggagtatataatatagagggtagttatcgatctatcgcttcaccaaaattcaagttaactttgtcagttatatatttagtattttgccggtttgtttatattttacatgacaaagaaaggttagtttcttatgaaagtaaatactttacaaaagtgtctaagtatgcattcggataaagtggttgggatctcctcctctgtgcacgtaaaaccgggtagcttattaacgtatgactaattaattattaactagaaaaacttgtaaaatagataatttcaatggattaatatactatttagcaattcgaaaagcgtgctattgaaaaaagacggaataaaggatgagaacaggcctagtttctactacttcctaaggcggcctaaagcagttttatcttgtgtacatcgcgatagatataaccatgcatgaaagaaaacataaattcgcatgaattaacacacaatatcttgtctgtcagattcgctgtccatgttcatgaatttattatccatcaagatgtagcagtgcgtttttgttgtccttgatttccagctttgggatcatcggttcaaattgcctctaccctgttagctaggctgtgagtatatatagttagatcttacttgtttcgaatgtcataggtggttcttacctgtttctaatgaaatatatatataacgaagagggatctatttagacctgtctctaataaatacagagtatatattgtagttaccattccaatgcaaattagtttgaatctcccactcatctctcgcaaaaatcatattttaattaaactgctagccaaaaaattatcattcctcttctttttcttcctatttttcgtctccttgtctcctcgtctctcaacacttacatcgctttagtgaacacgcacatacattctagtgatcacccaagtagacatatctcgtgtggtttttcaaatgcaggctagctctcctacaatcttgcctagtgagatttggtgctcacttcatcagcctatgtgttagactctccaatataataatgggaccgataagttagcctcactttggatgcatcccccctttctcttccggtggcgagtacccaccccatctatatcagccattgcatgcatgagagccggtaaggccaactctagagccatcgcatagaaatataggaagctaggaggagggcggggtggctgcctctgtcaccgccgtagcacggaagctaggagagccgtctccggtgccaccacacgggagcagaggcgaggagaggaggggtggggtggctatatttgtctcatcatgctcctgctcttgcacacctgatgcagccaagatgggcatgcaatgcttataaaacgattttcacatgccccatgctcttctcacagggcgccccaaaagtaagttcaattgtgaggatggcttaggccgcctcaggattatcaaccgctatctattttgaaagacggggcattttatttccaccagcggtttttctatggattaaaaaaatcatttttagaggtgataaaaatggggtaatatttacaggttgttctcttatgaaaagaagacaggtagatatcgcaataacaaaatcaattaatgtgctacaccaaggacatgccacaaaaattttagagcaaaattaattttcgctatgaacttccaggtcaaaaaaattgatggtggactttgtccatgatcagcttggatgcgcaatcaggagcagaagaaaccaagcttgttttacctcaatgaggagtaggagtgaaaatttttaagcacattggaacacatttgcatggattaaaatatgaaaaatttgtgggccttaatttctaggagccttttcggtcacctacttcacactgcctcaacgacgtgcttgtatatatagtatggtggaggacccctatcatgtcccgtctttagaaatggattatcagcggaggctaattcaaatcatccgttcttaaactaaactcatggggttggtggtttgaattttcatccgtcggacgtacttttaaattcgtgataggagtggtaaaatttttttgtgctctagcttagggtctgtttggcatagctccagctccagatccacctcttctagagctagagtctagcctagctagagctaggtggagctaggtggagctctctcacaaaatgaactagagatgtggaagctgggtttagctaggcagctccacaactccactccagacccaactcctagagttaaatttagggcctgtttggcacagctccaactccagctctaccccttctggagctggagctcagccaaacagtttcagctccaccaaaactgggagtggagttgggtggagctctctcacaaaataaactagaattgttaggcagctccacaactccactccagacccaactcctagagctaaatttaggagttggaactgtaccaaacagggccttaggagttgagctctacagctccaactcctaaatttaattccatgagttgagtctggagtggagttgtggagctgactaagggcctgtttggcacagctccagctccactcctcctggagctggagctcagccaaacagtttcagctccaccaaaactggtagtggagtcgggtggtgctctctcacaaaata

SEQ ID NO: 8136 - DNA, 11978 bp, Oryza sativa
gcccaagcctttgaatacttcagcttgatctcatatcgctcttcaagtttctcttttgctgccttagctcccttgttagggtttttctttaaccaatccttcagtctatctgcaatccagtcttgagtggccatcttcccttccatgagcttggttgtgggacactcatgtgcaaatggtagcttctttatctgcacacacattttaaatagtgctataagtcacaactttcaagcaaaatggatacaaatgtgcaaattgacatagaaacctgaatagttttgccattagacaaccttgatgcatgaatgcgccatttacacccctcatgcttgcagtgggcaatgaatcttgttggatctgtttgcaaattagagagttcaaatcctgtaacaaccgcaaagtgcctaatagcttttctgaatgttatcatgtcaggaaaaacagcttcctccttaatcactggcatctcaaggttatgaagaacattaaactctgctgggtcatcatcagtgacctcaacctcaccatgaggttgagcagtcccagaaggtccaccaggttcagcattttcaacacatggtttagcattttcagcactaggttgaccagaggtttcagcatgatctgtaggtggaatggtgtgaataggttgaatataaattccctcatcatcaacacccacatacttctccatgtcaaacacattaggcaatgtttcatccgcttcttgagttgcaggttcacctgaaactgccactttagatgcagatgctccctgccctgtctgagtaagtcgaagaacacacaatggcattgatgttggctccatgttattagcactagcatcgcagagtacactctcaacaactaagaccattaattcagcatgcatttctgacttggtacatttcaaacatgtcaaccagttgagattcatggacaattctaacgtcctcattactgcccttgtcaaaaaccacactgttgcagtctgctgctcaccccatctaacctctgagcttaagcttagcatcaacaaatccaaagagaagctaccatactcaacatcccatttcagcacacaacccttagtatacctccgtctaccatccgaatctatggtggtaaaaccatgaacctttaactctatcgagaacaatagtgtactgacattggaatgaaatcaagtcaaccacacatggaatgcacagaaaaaaaacctacacattcagctcacggcacatcgaatcgaaggaatcgactaccttaccttgatttgggctccatcccttgcagtacgtttccaacccctccatggaaagaaagagtcgtcgccgctgacgccgtagacgccgtcgccgccgccgccgaatacgccgccgctgccgccgtagacgccgtcgccaccgccgtcgaagacgccaccgcagccgtcgtagcccgcgccgtcgccaccaccgccgccgccgtagacgttgtcgtcgccgcggccgccgtagatgacgtcgccgccgtcgtcgctgctcctgctagggttaggtctaagagaacgagaaaggggataaaatgtgtgctgctcctgctaacccgactccagtcagtatagccggtcaaacgggggcattttggtcattaagaacaaattttagtcacacgtggtcaacaatcgcggatcaggcgtagaacgtggcatgtttccagtatcgtgcgatttgtaatggcatctttacaatttgtcaaatagtaatggcatttttccaaaccttcaaattagtaatggcatgtgtctaattaaccctacaacttttggggattttggactatttgccatcctcttgagtggcatattcttcccaaataactttaatggtttgccatccagatccactgatttgtttttatgttaccacttttcaccatcaacttagcaaattgagtagaaaataaccttattgtccctcccatctctcattttccttcttccttcttgctctcaggcatcaatgatgtggcagagtagtcttgcgcgtcttctacggtggtggcattgctcattctgctgctcccctacaagaggctcaacagcacacacattacacaatttgagcctgacgccacacgccttgtggcgatgatcactctcgccggtggagtggcaccagcgcgcatggacagacagccagagaaaattttgaaacacagcggccattttttgctgaccggatgctcatccccgtccaccacaagtcgagccaaagaagcagagccgactatgaagcgacttgacaagctagatggttggtggtgcattaattgaacatgacgttaattgaagccggtgagcatgatcaccccaaggtagcacatgaacaggacgtcgacgaggctgctttcctacgctgacgtcggcgtcattgtccttttgatggctgtggcggctccattcctcagaggtaatgagcgacgaggtcgaatgccttggaatgagggaattggcaatgcatagaatgccacgagaaagctagtcagctgaacatgcgtgcgttgtgtatggaaggaagaagaaacaagaaggaaaatgatagatatgaggggcagtcaagtcattttctactcaatttgctgagttggtagtaaaaagtggtaaaatagagacaaatcagtggactcggatggtaaaacatcaaagttatttgggaagatggcatttgggaatacgtcattcaagaggatggcaaatagtccaaaatccccaacttttgctgctaaaagtgaaaataaataaatataaatttctgtttttacttatagctgtccaaatggaggattgagatactctgacgtaaaatcaaaggaaccgtgtggtggctgacgtgtggcccaccgctctcggacccacccgtcagtgacgacccaacacggcacgggcctgcaaatggcatgatgcatgcctgtgcctgtgctgtgtcgatgcgtgtgctaaactgctgaggaacaagttcacttttggtcccttaccttgtcgtcgagtcagaaattcgtctctaaaccacaaaacagattcagtgtatcccccaatatacataaaaccaatgcaaacgagattcctcgacagtattattcctagttttcacgttagctaacatgacacctacgtagcttctttaactaggtttttgtcttacatggcattgatgttgacgtttacgagttacgtgtcagtgtgattcaaaataaaaataaaaagagcaaaactgaaaactaaaatattaaaacaaaatatgtgggacccacatgttagtcaaacaagaaaataaaaaatagtgggacctacatgtgggtcccactttctccacctcaccctcgctacctattatagatggctaaatgggccgcccgccacggccgggcctgggccgaagtcagtcaggccgacacggcccgacttatacgccggggcatgccatgccagcccatgggctgcacacacaacccaggcccagtaagactcgggtcgtgttgagctagcccgaaggcacgacagcctatcgtgtttcttcatagaataagtctatttgttcttcctaaacctctgtgggctgtgtccatatggctggaaaataagtctattttgtattcctcttgtcttcggccttgccttatatggttaattaagtctattttacgttcttctactattttttttcgatcgtgccgtgagggctggatcggcccaccatgccgagggagcgacccaagcacagggtggctgtcacccaatcggactgtgccgtgtttgggccaggccaaattggtatgccttggaccgggtcgcgggccctaggccatatgaccatctatactacctatatctctcctctctccgcaaacgagcgcgtagagagggacgagttggggagttcagcgaactgggcggggagggaggctggcgagtggcgaaggaggcctcccacggtctcggctaccaaccacaaatccgcaccaaccatgcctctcctcgcccgcctccgactcctgcttctccatcaccgcggccgcctgctgctccacctcctccagggcccgccgccaccgcccgtgtgatccacgtccgcgtccacgcagcagcagcagcagcaagaggtcaacatctccgtccaactattttttaattaactacatgtataagtaaattttgagagaaaattctgtggcaataggaacaattttccatttcttataaatatataaattacattaccgaattacatatatatgcaaataaatagagacacgacacacatatatagagcgctctggaacacgtattatttctcctgaaaaccaacacgcttgtgcactgaagtctccaacacataaatcgatcgttctcacacactcacactcctcacatcacaacttttattaattctgcacgaacaagctgacctggaaattaattaatcacgcaagaaccgaacgataaaattaaccatgcatgcaatcaaacagaccatgtgtgggttgatggaatggatgaatttttcagtggtagacaggcggagagctgggagacggcgcagctccgccactgttcccctcggcgccgccatcaccgtttcctgcaccgccaccaccaccgttcgccggcaatggcgtcggcttggggtccggcttgggttcaggtccttggggtttcttgtggaaatagtcgaagaaggggtgcttgtggaagtagtcgtacaggaacgccgacgtgcactccgctggcgacgtggaggagtacatcctcttgccggcgacggccacgaaggtgttagccttatcgacgccgttgtccgttgttgacgacagcggcacgatcttggacggctcctgcccggggcacggcgtgctgctcgccgcgctgtgcagctgcgcgaagcagtcggcggcgccgtggaggtcgtcagcggcgaggggcacgctgaaggcgccgtcgccgtcgaggtcgccgatggccttgctctcgtacacaccgtcgctgttcttgcacttgatcgccacctggagacctgaacatcaccaaaaaattaatcaacgacggtgatatatcgttcgatcgaactgaccacgcaattaattagcgacgaacatatatatcatgatatatatacccttgaaagcatcctgcgccttcatgttcttcctggtgcactcgccgcacttggcctggccgacgacgatcgccgccgcctcgccgtccgcagcggcggtgacagccatcacgagggcggcgaagagtagcgctcgtgctacatctgccattgctgaatcaatcctcaaactctgttgttatttggactatgtggcaagaggctagagagctgtgtgtggatgagtgaagaaaaagcaggccaggaatgtggtttatatagatcgataaaggctactagctgggagtgatctgaggtcagctaattactccatccatctacttttgatagttatattttcatcttggcacacagatcaaggataagtaattctacttatcatccattcaaacatgctactccctccattccaaattgatctacatatagtatttttgaggttatttctaaatgatctacatatttgtgttcattcattaggtttattcgttgcttgtacattggagtaaatggacattgatgcatgcatctatgcacacaagtatttataacccacatgcaatatcttgatttgctattggctaggaaatagtggggatggtgcctgcattgagtttgttgctagagtaaagatagtataagagagttattagtttttcttggtcttggtgtacctatgaaatatgtagatcaatttggaatggagggagtactagtcattcctcgtaaacaaacgatttattaatatttacatttctcgatgcctatgcagccaatcttatatggaagaatggtgagtcacacattaaatccgagaaagttattaagaggataagttattggattgaaatatgcctatcgaaaataaattttttagatttagaaatataactatcaaaagtagatggagggagtatattacattatgattagcaatttgcgccgattttgcaggtttaaaatcattaacgccgtacgtgcattttatttgattagatcagacaccgatagattaagagtagcaaatcatggaggcactgtgaacgtgcacactgcatgcagtgttaactgttgatgctcttgccaccgattggtggtgtttaacaagcaaagttaagctttaatcgactggtactcctacagctagcgcacagtactactagtctgttttataaaaatggagaatagttctataatttaggacagctccaaccaaattgcatgattgatactatttttaagtaaatgcgtaaatttcacaaaactacatatactttattcaaactattgcaaaactattgatttaaggtgttatatcataaaactacaaatttaatgttaagtttatcataaaactacaggtttagtgccaatttaatcacaaaaatgcaacttttatagctcaaacataatggtagtgctaaaaatttgacctccaaattttgtagtttcgtgataactccaatattaaatatatagttatgtcatacttgaccttaattctttaggtttctgataaatttgatgctaaattaatctgtagttttgtgatagttcgatcaacatatctgcgctattaacatatgtttggaacgcagtcatgagtgtataagtgtggtgtctgtatttagtggtgactacatgcatgttgtccgtaaaatggtagagaatatacttgttgatagtatatatccgataacagtgtttgttttaaagtatagaagacgttggtatcaaagtatacgcgagattttggtaaagtagacgagagacaaggatttttatattgattcaggccccggtgtgggtactagccataatccaatttatatgaacatctctaggatgtatcaaactgattacaataggagagcgagctagctaatatagcttaccaactagcattcaccgagaataaatccgacgacttagaatcattggctagctattgacttcctcttgattgatattcgatgtgacttgtggctatggcttatgattcgatgctcttctctcctaggggctatatatttatgcggacaatcaatttcttgttaagttgaattcgaggagttaatatgggatacgagcaggtaagagtcttgtcggatcctgtagtcaatggcacacgagcataacccaagagtcttagcgatgagattgccaaatctttcaaaaacgctttcggcatagatacttagggttaaaaagcatatatatcaaaaactctattctgaccactatgataatgttccatatcatcaagggtttagattgcctcaatgtgtaagttcattggagaagatggccagtctactatagaggatattgaccaatttattattcaatgcgaagaagctagtgctagtattttgaaacttagccttttcgcattgtctttatttggtgatgcatttacttggtttatttcacttgcaccactctattcatgattggtctaagttagaataaaaatttcgtgattacttctttagtggtgagaccgaattaaatttgtcatacttaacattggttaaacaaaagtataatgagcctgcttttgaatacattagaagatttagatatacaagaaacagatgttatagtttaacactttctgataaggacttagtagatttggcttattctggtttacttgaatatctatactaaaagtccatgaaacttcctacaaatactcctaagacgccacgtgtcactcatacaaacactcctagacaactacatggcattatctaatctcacagtcgattttcagttaaattggtggacctggtattttggaccattagattagatctactatttaataaaaataccttcctatgctgtgggccaaaaaaaaaaagaacgtacatagatacatataactttgtataactgtggtatacacttaataaacaatgaagtatcacatggaaaaaagaaactcgtgtacgaacttaattacgataaaagcggtaaaatagaaaaaaatacgtacatggtgccattgaaagaaaacgatggtattaaaaataggattttatattatactatttaaaatatcactctatatttttgcgcaaacatacacaattaaaatatattttctacaaaataaatacaaaatattctttcaacactctttaaacgttctatctttaaaatttaaaaattatataccaaaagttcatcgagctacaattgctaacaaggtatttgtgcatcatatcgaatatctaagatatgatgaacatgtgtaccattagacgcataatacagataaaggacattttataagggacatttgctcatttaacccctttgtaaagcttaactatcaatttgatccttttttaaaaaaagtttgctcatttgtccatgtttttcaaaatcgaagttgtcgtctgaccctactttcactacatcgtgagtttttcatttagaaaaaaaagaaaaacatgtatttacaagcccaaatgactaaaatgacactgaatacatcaaccttatcctcaaccactcatttgctcattctttatcccgctctctctcctctctctgtccaaagcgcgatgggcaggaggagcggtggcggccacatggcaacagctgtggagggccctcggctgcttcgcggagggtaggagcgatggcaaagaggcaacattgagtcgccgacaaggaggaccgctggcggtggtggaagaggcggtgacaactcggcagaggggaagcagcagctccatgaagggtaggagggtggcgtcggctcagcgacgaggaggattgccggcggtggcgaatggaggcggcggctgcggaggggtggcggcaaccacggatatggtaggaggagaggaggaagagggatggtgtcggctcgatgacgaggaggataggcggtgatggtggaggggcggcggcacggtgacaaggaggaccactggcgcccacgcacatcttcgccattagcttgctacttgcattttcttccgcacaaaattgggcctaactttggaaaaataaggtcaaataagtatgggtggaagtggtatttggggcttttgttaacaccgattaatgctcttaagagaagagggtcagagtgtagcttcggttttgaaaagaagggtcaaatgagcaaagtgaccaaaacagggtcaaatcggtagttagacattcaaatagggtcaaatgtgcaattgctccattttataatatagattatatcattttgtttcattttataaacatacatagccaaagacacgtgtgatttactttaatctatctaaaaaaatgtctacggtaataagaatcatagaaatttaaaagacagaaaaactcaagagcatatatcctaataataccctaaaagtaaataaaaattatcaatggctaatccctatgatatataaaattataaagtattatttcatcggtttattaaacgccctaaagaaccctcctagagcatctattaaagcctttaacaaataagaggaaactttaaatttcttctgtaacagataaagcatctaaaacttaatcctcgttaatttaatgctcccattaattttagccattgggttatttcaatgggtatgtgtatacatacattatttaataaaaaaacattcatccaaacatgttgtctaacataaaattatttgagatgtcaggtgaggttgtattgcatggtttagagggttgttgtcaggatgactagcgttgagttttactaggttgccagccatccaatgcatcacaaaaagagcccataggaggtattgtgttttgttgatcgagcgaccatcaagagaaggcaacaagggaaccccagtacaaatattttttatgagtaaatcttctcttaactcaagtatctatgtaatattatttaagtcgcattagcttgaagcatgcataatttgataacatgatatatctagaaggctacatgttagaacattcaattaacccatcttagaaataataatacttagcaagaactcaagcaggtaacaaatttctatctttaattttgttattaaattttaatcgttggaaagggggagatagagtgaatggttcaaacagttaagtgaatattgtccaatttgcaagctaaatgtttttttttttaaaaaaagagatatagcgggttactgattttgaagtattatcatactattcaagagcagagcaagtagtattcgtatccaaaatacatacaaagagccaccatacataattttaatattcggaaagatagaaatgcccgcgcaacgtgcgggctaccttcctagtttaaaagaaaagctagatggtcatactttcttagatgtaagccaattacttcaaaaggctttggctcaagaaagccgagttagagaggccaaaatctcacagaaagttaaagtttgattatccccatgttaatatagttgatcaacaagaatctttgaatgatgagacagttgatatatacacagacgaatgggcttggaactccaactctaaaccattcgtttgctcagctcttaagctggttagtcataagaatcgacaagaggaaataaagctcacgtttgatgtggccaaatgcaataggatttttgactacttattactacctttgtcccagagtataagaacataggactagatggatatttcttagtacaatgtatcttgatacgaagtttgtccaaatacgttgtactaggaaacatcccatctagtcttaggtttttatattttgggatagagggagttgaaaagaagaaaattaaattgtaacaagaccacgtcataccttcacttcaagagtaaagtggtgagcatattataagtggcacaactcctattcttatgccacaaatgattgcaatatattccatcgacaaattcaatcggcaaatgacgaatgccgattgacttttacaaagatgcaggtggatgagctaccttttcctatacacaccgttgaattgcaagagaaggagattcccgatggcaaggagaagaccacattgaagacttcaatacttagggggcaagatgacaatatggagataccaaaatatggcaagcgaccaaggataacaagttcatctaccaagcgagtacggaccaccaacaacttacttctccttcttcatggtattacgcttggtatgcatcatggagtttgaatggtacgtggatgatgcctatttatataccatattattatccattgtgggcattgctggttgccacaaagacccattttaaataatcaaccacactcatctcatagccagttgagggaaaagaatcagtcacaaaagaatccacacaagaaagtggtgaggcaagagtggaggccaaagaaaaacaaaatacaatctgaacaagagggggcctctcgtatctttcttacatcaccattaaacatttaagccttagaggcattcatggccggtattggtggatatcacccttagatgatctcatgcgtagtatttttcggagcacaagtttgccaaaaagattggggggggggggcggggatatgttgataaccaaatttggtagtagggtcgagttatagcaagtttgagccaaattaaaaaaaataacagagctttcccgcgaagactggtctgaccgtcattatgtgaccggtcagaccagataatgcactatgatcagaccataggcatccaggcggttagaccttaaccacagagtccgagtccaattttggtatttctcgtgttttcttgttttagaccaaaaatttcaagtcctagttgatttctatgc

SEQ ID NO: 8137 - DNA, 14281 bp, Oryza sativa
cactgacaggtggggcccacctgtcaggcccattcccaacctccggccggcgccgcccgcgcccgcaaccgccgccgcccgcctctcccacgcgtgcccacgcacgtcgcccactccccgcactcgccccgcactcccctgcaaccgccgccccactttccagcccgcacccacgtccaagatggctgggattcgaaaacgaatcccacctctctctccctctctccacacctcccccacttcgccggccactccccgcctctctcggccacgtccgacctccccagccctatataaagcaccaccgcttcctcctccacctttttccctctttcgccatccgctcccgagctctccttcgccttagcaccatgcaccacccgccatcatgcgcccatggcaattaatgaccggttcgcgggaaaccctggaaaaattcctcgtacttaccacaagccagcatgggcaacggctgggcttgtagtgtagcttccctctagctgacgcatccaggcaagggtgggcgtgatggagttcggatgggccctacgacggcctatgcggctttcggattcacctaggcacgagaggggactgcccgctgccttgcgaggagtgggggtgaaacctgaggtgtggtgtgcttggttagagggggttatgcgaagagtcctgtcacggcctccttctagtacgtcgtggtggcatgtcaacgcatgggaacgtgtcgtggggctgtgtcttatgggtacaattgtacatctctgattatagtaaaactattcgaatagccgtgtccacggttaagtttaatggaactgattagttcaggtggtggtttgggcatatctcaacgtggtgtagcgttgagcagtggttggtttaatattggctaattattacaactgttttactgctttcaattactgtttataaatgctagctttatacaaatgaactcttttagctgtcctttggttataccttgcatcataccctccattccggtaggacttgctgagtacagtgggtagttcttgctctatctcccaaccctcagagttcaagtatgcgtccgatggtggtttctccgaggagtagacttcgtccgtgccgtcgaggatgcctgtggagtggtgttcccgctgcaaaccaagtcaaggcttagctccagttatcttttattttccgctgcatttatgtaagacttttataatgtttgtaaaacgtggatctgtatatcaactttgtcgtttgtgtaccctggccggtcctgaacagggttttaatgtacattctgcttgaaattctattcgggaatttctgggcgtgacacgccgcctccatgcatcttcatgtgtgatttcctttgccttccacggagggagggcggcccgaggggtgcagactcggcggcggtgtgttaaccttcggctgcttgcctttgatgagatggcgacaggaagaggctgacggcaaaggccgccgtggagcaccggtggttggttcacggggaggcgcctcgccgacttcagattcacaattttttcacattcttttgaaaaaaatcaaaaccaactttaaatgtcaaacgagacgatgtaaatgtttgttggtcgacttaagtttatttattcagattgattgccttaaaaaaattataccaaatttgtttgtaccaaaaattatacctattgccttacatatcggcaagcacgctacaatactcttcatggacagaggagcaatgatgaaaaaaaatttactaatatacttattttttcaataatttacgtttatatatctgcattgtaaggatttgtaaaaatatacccatcctgcgacggtcccacagctctaaaacacgaaaacgacggtcccacagatccaaaacgcgggaccacgacggtcacgcgtgaccaaaacgcggcagcgccataacagccatttttatcaatgtgttgacactgttcacaaactagttggcactgtttgcatgccggttccgcacaataatgggtctgcgggactgcctaatgaacagtgctaaacagtgtttaaaacagtactaaacagtccgatcggataataaattcgctctagccgcggtgccgcgttttggtcgcgtgggaccgtcagcggtcccgcgttttggatctgcgggaccgtcccgcgggaccgcgcgttttggagctacggaaccgtggcaggagggtatatttttttcaattcctttctatgcatgtatataatggtaaattattgaaaaaataagtatatttgtaatttttttccgagcaatgatggggtaaaaaggagcctcatcattcgtcctatggcttatcaaaacttgattttaaagttggttttgaagttttgtttttcaatgtagttttattttttagctttggtttttaagtcacactaaggacacatgtagtaatttttacttgcaaatcattttttatccctaaaaataagccgttactggcttactgcttatataatcagcaaccaatgagcccaaaatcacaagaagaaaaactggcaggtaggtccaattgtatgcagataattcttccatcccatcggtttaccactacagacgctgccgcgaccgcgagatacaaaacttgaacacgactgttttcaattcacaagcaccacatgcgtaacacataagtataactgaaagaagacgacggtacatgtcttaggctattgcaggtgttatgctggaacagcgtctaagcttttatcttgtttcataattagttaaacaaatccatcacattgcgtgatggctggattggcggcaccaagggaacggaaatgaagatattgtatatggtaagacttgtttgcgactctagggcagcagagattatcttacagaacatatcccagacgaccgtcagggagcaccattggtaccatcctcattccagctggtgctggtcctctaccatatatcataggctgtaacaaaaatgtccatagaaacaactacaatgtcaacatgcagtagcagatgcagacgaagcaattgcaaacgaagaattatttgtgaatataatttttacatgtgtgttcttagcaaatctaaaaacaaaggctgaaaaataaacttcaatgagaaaatttcaaaatcaactccaaatttaaggttgaaaattcaaattttagctgataagcatcagcgaaaagatgaggcttcaggattcctagcatgggtattcggagttaattaaatcatgtttcatagaatttatataaagatgctagaaattaattaaataaaacaataatttagccccgcggatgaaaacagctcaaatgcatatatatctcacaaatttactagatatctgataactaaatgcaaagttcatgcaaaaaatcatgatccatgtttgaaaaaacattaacagagtatcaatttgactaatcttcaagagactcactcaaggcatttttctcttcagaatatgatgctttattatcattagacaaacactaagaacttcctcatctacatacaaatcaagggagtatgtgaagagaacggtgtatgggattgcttttgatacaccatcaaaggtcaatgttggtgttcttacaacacgccaatttcatatattttttttcgcttccttaaactgccttcaatgcacttgaccacaatctctcttattccctgccttagcaggcggtaaaacgacttttgtgacctctccatgaatttcaaagatctccttaatcttctctttagaagcattgtctggtaagttcttcacatatatagttttcacctgtaaaagaaaaggccattcagacaaatgttcctagggaacaacaaaacaaattaaaatgatatgaaatttcaaagctaattatctctatgaatataaaaaaaaatcaacaagcgaagggtgccttgtacgaataggacaatccatccataacagaaacaaccttgcacaggttgagccagtggacagtggtattgaatcagtagactaacttccacacaacaaagtgtagtctgttatacattccctaacgtgccatgtagaaactaaaatcatgatgcagctgcatcctggaaatacatcaataaaatgatggttattttggttcaacaatggtaatcagtagttctggataataaaaactttaatgtgaatgagacatgattaataaaaaatacaaaatatttcatgtttctttgatcatttgccagttccattagcaaattatggcacgaaagaaatactctctctgtcccataatataagagattttaggtggatgtgacacatcctaatataatgaatctgaactactaggatgtgtcacatcaatccaaaatctcttatattatgggatagagggagtaaattcaatgcctcttttacaagtgaatcatccccaacaataaattagtagtatcccccaataaataaattagcagtataaaggccactttaagagtttagattgataaatttgtcgcaatcttttgtttaccatcttgttgattaacgattgccttaaaatttctctactacgcagtcgttctctaaatggcccacaactaaacccttataatccctttaaatgggacataacgatagtgcttatcttatatcctcggctatgtttaaataatagaaaatgaggagcgtgattgagattaaatgaaggacaatgatgaaataagttggagaaaatggatgggtagtattcaaagtaaccccttcataggtaaaaaatcatttccctttcccattatccaaacggtccatcgaatctctgttacagacgaggagattggaagaaggattgcgacggaggaagtatttataggctgtaacaggacatggtcctggacctcgtcggcgcggaggagcggtgttcggcaccgcaccggcgaggcaggaactgatactagattaatctgaactttgattgattacttccaacgaaagcagcttacaatttataagggagctaagggatagaatcctaacaactcgagagataaagatgactaacaaactcctaaactgaacagagactaaaccgattactgttcctcattacggctgtgtcggcggaactctgcgacggcgccgtgcataatgcaatccccacatgacatctctcccccctggagaagcagctcgtccgcgagctgaaaatctggatactgagcatgaaaatcatccaatccgacccaggacgcctcagccgccggcctgtctttccactgaacaagaacctctcgaaccccacgtgccaaacgactttgcgacacagaagcaggttgaagacaaacatcaccatgatgcgtcggaggcaggggcggcgcatggtccggcggatcgccacggaaaggcatcaataatccaacatgaaaaacatcatgtaagcgagcacctggaggcagccgcaggcgataggccactgatccgatgcgctgcgtaatctgatatggcccataaaactttggtcccaacatgccgcgattcttgacagctagagatgcaattggtcagtgaagcaaacgaagcgcctactgccaactccagcgctcggtgcttgccatcatatgctgtcttgtaggtttgttgagcttgttccaaacgatcacggatggcgcgcagaaaatcatcccgttcttggagcgcctgttgtaccgccggcaaccttgtggagcccggctcgtaagctcgaagcgtcggcggctcgcgctcgtcgacaacacgaaacagagacgtccggagtgacgattggtacgacgtgttgtagcagtactctgcccatggcagccatcgaagccactgtcgaggacgatcgccagtgagacaatgtaggtacatggcaatgatcttatttgtcacctcggactggccgtcggattggggatgaaaagctgaggagagattcagctgaaccccagcgagccggaagatctctcgccaaaatgtgctggtgaagacagagtcgcgatcgctgacgatggtcagcggcacaccgtgcaggcgaacaatctccgcaaagaaggcggccgcaaccgaccgtcgccgtgtacgggtgggccaacggaatgaagtgagcaaacttggagaagcgatccaccaccgtcagaatgaccgtcttgccgcgaactcgtggaagcccctcaacgaagtccattgcaatgtcagcccagaccgctgacggtaccggcaatgattgcaggaggccggctggctgaagatgctctatcttgttccgttggcacgtgaggcacgcgcgcacatgctcttgcaccgtcgccctatcccgcgcgatatgaaagtccgcgcgaaggcgagagagagtcttctacgtgccctcatgtcccctgccgtgcgcgagcttgaggatggccggcagtgacggcgacgacagcggcacgaagacacgccccttgaacgtgatgaggccatcggtgaacgcccaggtcatcggtttgacccccttggcgatgtcgtcgcggatggcaactagggcaggtgtggcggccacctcacgacgcagctcgtcgaacagagaaaattggggtgccgataatgcaaacgccgccgccaagtgtttgtggacccccatttttataacagaaatcaatcgtgtaaaccgtacaatttccctggatcaagtagtctggtacacacgaatttatagctgaaataccaaatgctcatacacgagagtctagtacgaattattacaacataagcccgcaggcattatcttaaatcatcggaccgagcggtccggaatacaaccaaaagcagagtttagataaggcagcggaatttaggcagcggcatgccattgcacaggcaacgaccgtactaagacctattgggcaccatcgtcttcttctccctcctggtagtaggcataggggttctccgaagcttcatctcccgcttctgattaattttatatttgcaagggtgagtaccaaccgtactcaacaagccgccacatcaacaatacatatgataggggtatttcaaaggatggctttggttcttttgtgcaaagcaagttttataattcttttcacaaacttaagacctagcattgactgatcaaattttagtaccagtgtttgtatttaaacaacgacggttctgtccaccatccattgtgatcccaaggatagcttcccgccattgagtcgttatggttttctgaggacgtccactttcccctatctcaagaagtgactccaacagcatagaaatttcatcatgcaataacatatcccacacaagttaagaattcagagactagccaagtgtaatacatgtcccggtgctcaataaccgcgagcacggctattcgaatagttttggtttactcacactgcagtggatgtacactttacccacactccatgactgcccaacacatgagccttgtctcaacacatgagacgcgtcacggcaaagcctttcgataacctcgcattggcagtacccgctccatgaacttttcatcctcatgcactctaggcgtacacggtttctagcaatgagaggagttctggcgcacccgggaagggaagttttacacccatgtaattaagttataactaggctcaactcaacacacgacagtcctagcaatggcgacaccattgtagagcccctgccatacacatgagaaaccactatgcatggatactgcctccgctcggctatttactccgctaggtctaaccccattcgagaaatgtggttgtacgaggtcgtttcatgcttaacttcatggctcggtccttaattgaccggggacggtactagcctttcccggataccacccaaatccaccatccgccccggtctaaaacataggtttttaattcctttcttgtcaccattatcatggcaatgtggtgctcatgcctccacatgccgcatctcaattaccttcccaaaggtaattgcccaagcatatagcatttgataaatatgaatatgcaagattctagaatagcattctctaagcaagtgtcataattgactagggactcatacgtaattatggttacaaggaattgaagataaacaataacaaggcatggcataatcacaagtgggatgttcatcattgcatgcaatcttatttgtaaacaaaattaatttcacaattgggatcaacgtgatcaaggaatagtgatgacttgccttgctcgagatcttgtaggtcttgaccttcgcctggatccgcggctccctcgggctctatagttacgtgcgaaaattgatttgaattcggttagaattcaaataaaaacccaaataaatccaaatgaaagtcgaaagcgaaagtcaattcctttatattaattttactattcgcgaactaaagcaaacccaatttcgaattaaactattttgcgggtataaatatttgttgtcataagtttttaatttaatctacccgagcattacatccatataataggttagaaatttctatcgcgagctaaaaaacggacgaaatcctagaaatattataagacctaatttagtctatgactaaatgactaaatatgatacacggctaaaatccctagtttctaccgttaatcgattacttatagggattacccaaaaataatctataataatttatgataattcctatatttatttaattacatctaaattattaccgcgaattgatctcctatagatattactaaaaatgatctatagcaatctataaggattcatctaattgtttaattcgtaaataattagttctataatcaaattctagtactttaggtatttaaatagtaggagttcacctaacgatattttcattaatcctataatcaaattctagttattttaaattttctacacttccctaatctccctctaatttcctatttatttcctttttatttttcttttcttccctttctttttttcttttctttttctctctctcctctttttccctctttctcttttctctctctctttctttcctctcggtttctctccttctttctttcttctctccctcggcttctccctacatctctctctctcggctctctctctctacccggcggcacggcaacaaacagggggggcagcggctcaccgacggcggcggtgacgacggcgcacggcgcggcgcacttgggcggcggcgcggaggcactaaagcggcggcacgacagcacgaggacggcggcgcggcggcacgacggcggcggtgcgtggagaaggggagagggaggggaaagatggggaatgggtgtggggaggcttggggatggagggaaggggtttttatagggcgtggagaggaagaaagagaggggaagggggaagagaatgaaacgacggcggcgcggggcgcgacgcggcgggcgcgcggcgcgaggcgacgagacggcgcgcggctaggggtagaggaggggctgggctagggccacgtcgaacacctggcggccgatgaatagtgctctttttctattaaactgattttagtgtatttcccatataaatttgattccaaaattcctaatttttgcatatatgcatttactcaacatgtgtgttattccaaccaatggattcaccctagattaatattactcatatattatttatataatttatttgaagtcttaattagggttaattatcgtatttaaattcaattgatccaaatatggtcgcgacaatattttatttacttctatccccacctaatccttttttttaatttatattcattttaccaatttatttttagggttgatttctaattaactatcctttactcacgattaataaacttcgaaatcaaaatcaaataaaatgatcgaacaaaatcagcatgatgcaatttattaaaaagtttttgaaggcccatatttctagagtttagatttttgtcggtcgaattttcagggtgttacagtgttcgtcccgtcgtgaaagcacgtccgccaccacatttgtggagcccggcttgtattccacgacaaagtcaaaaccgaggagcttactagcccactggtgctgagggacggtggagaggcgctggtctaagaggaagcggcgcccccaataagtatggccgccaatgacgcaccgcctggacgaggccgatcaattcgcgttcgtaggcggcgagcttggcgtggcgcggcgcgatcgtcttgctgaagaatgcgaccggcccggcgccttgatgaagcacagcgcccggacctgagctcgatgcgtcgcactccacaatgaactccttgttgaaatccgggagctggaggactggagctgccgtgagtgcgtgttgtagttgtcgaaacgccgatgccactgtctcggaccagtggaagccttccttccgcagtagcgtcgtgaggggcgcggcgatggtgccgagtcgcggatgaaacggcggtagtagcccgccaagccgaggaagccccgaactgcgcacgcatttttgggcagcggccagtccaggacggcctggatcttgctccggtccatggcaacgccggcgcttgagataacgtgtcccaagtacgagatggaggagaggccaaactcacacttggatcgcttgaggcggagttggtgatcctgcagtgtctgcaacacggtgcgcacgtggcgaaggtgttccgaccatgacgaactgtaaattaatatatcgtcaaagaaaaccaacacgaaccggcggaggaacggaaagaggacgtcgttcatgaaagcctggaatgtggccgacgcattcgtcaagccgaacggcatgaccaagaactcaaataggccttggtgcgttcggaacgccgtcttgtgcacgtcctccgggtgcatccgcacttggtggtagccggaacgcatgtcaagcttggtgaagaacttggcgcctcgcagctcgtcgaacagctcctcagccaccggaatcgagaacttgtctttgacggtcttgtcgttgagggcgcggtagtcgatgcagaacctccacgtgccattccttttcttgatcagtagggccggggaggagaacgccgacgaactcgggcggatcacgccttgctgtagcatcgtgtcgcactggcgctccaactcatctttctggatgtgggcgtagcggtacgggcgcaccgcgacggctgagacgccgtgttccaggcggatgcgatggcagagatggcgctcagaaggtaggccttgtggttcggtgaagaggtcctgaaagctgtcgagcagctcggacatgagttcgcccgtcgcgccgtcgatggtggccgcctagagaggtggtgcaggtgcgtctatgctggtccagatgacgcgattgttgggtgagccgaaggcaagggactgcttggcgaagtcccagagcgtcggtccgagagagccaagccattgggcacccaagacgacgtcgtagccgccgagaggaagcgcgtagaaatcgatgacgaaagtgtggtcgccgatggtgacacgctgggacggaaaacagcctggcgaggtgatgcgatcgccgtttgcaactgcgacgctgaggccgtggcgcggttccaggggaacacgggcgcggcgggcggcaacgtcgctgataaaattatgtgtggagccggagtcgaggagggcgacgaggtccgttgcgccgatgcgggcctgcaccttgatcgtgttgaatgtgggcgtgcggacgccggccagagcatgcagcgagatgctaggctcatctagcgtgagcgcatgcgccgtcggtgttctcctcagcttcctctgggaagctgatgacctcgacgacgaaggatttcttgcaacgatgtcccgccacgtacttctcgtcgcagttgtagcagaggccctcggaacggcgttgggccatctccgccggcgacaagcgcttgcgagggagagccgacaccaggggctgtttgctggtcgatgccgatgacgcggcgtccggcgccgtagacgcggcagatgcggcggacacgggcgccggcagggcagggagcgaaggccgtggtgtgcggccagagcgagccggcacggggtccgttgtgccgagttgaacccgctgctcatacgcccgggcgagcatgatcgtgtcgtccagtgaactcggccggcagagagctacatctgtcttgaggggattgacgaggcctgccgtgaacaattgcacctgctggttctcggatagtttggcgtcgcggcaagccaaggcgaggaagctattgatgtagtcgtccactgtgccggtgcgccaaagtgtcgtgagttcgccgagcgggctgtccgtcatgggtggcccaaagcgagtgtgcaccaacttgacgaagcgctgccacgatggttcgccggaattgggttacaatctgtagtaccataactgagcatcaccgagaagatgcaaagatgcataccagacgcgacgtgactccggtgtcttctggccacggaagaacgtctcacagcgattcagccagggaagcggatcgcctttgccgtcgtaagttggaaactccaacttggcacgaggaagaaaactgttgtcgacggtggagtcgtcgcccgactgcttgtcattgtcgccggtgggtggcggagcgccgcgcggcgcgtgcgtagcggaccccgacgtctctggcacgggcgacgagcgatggctggcctcgacgcgctggacggccagattgagggcgcggacttgctcggagtactcgaacgcggacgcctggacttgtgtgacgcggtcaggcaaactgctgagcttgggcgccaggggaaccaaaggttcgaggacgctcatcttcctggccaagtctgagatttgggccgccatggatgtcaggttcttggcgatttcgtcgagctgtgcttgagtggaagccatgggaacggaaccagagaaatctgataccaagttgtcacggacgaggagattggaaggaggattgcgacggaggaagtatttaaaggctgtaacagaacgtggtcctggacctcgtcggcgcggaggagccgtgttcggcaccgcaccggcaaggcaggaactgatactagattaatctgaactttgattgattacttccaacgaaagcagcttacaatttataagggagctaagggatagaatcctaacaactcaagagataaagatgactaacaaactcctaaactgaacagactaaaccgattactattcctcgtcacggttgtgtcggcggaactctgcgacggcgccgtgcacaatgcaatccccacatgacaatctcggcaagcagccaagcacacccaggagcataatgctctacctggagtcctggacagaccagcaatgatgaggttacaaaatcacgcacccaccgaaaaaactggcacaagattaacatattggggaaaaaaatgtaaagaggtagacaggtccaactgtatgtctgcagataattttccaattccatcggtttaccactacagacgccaccgcgagatacaaagcttcaagacactgttttcaagtcacaagcaccacatgcatgacagataaatataactgaaaaaagaagacggtacatgtcttgcgcaattgcaggtgttatgctggaacagggttacaagcttctatcttgtttctttaggttaagaaatccatcacattgcgtgatggctggatggcggcaggaccaagggaacgaaaaagctagtaagggcgatatcgccggccatgactcccttcgccacctctgctgccaccatccctccggtcaccccgacgcggtgggggcggaggagggattccacctggttgttgcctgtcaagacattacaaacagaactgttaggaaatgaagatgtatggtaagacttgtttgtgagttgtgactctaggacagcattatcttacagaacatatcccagacgaccgtcagggagcaccattggtaccatcctcattccagctggtgctggtcctctaccatatatcataggctgtaacaaaaatgttgatagagacaatgactaaattgtcaatatgcagtggtggatgcaggatttctagcatgggtattcagagttacttaaagcatatttcatggaaaaggacagtatatgaactaccaaaatcaatgtacaatggatgacaatgcaatttaatttaaggtgttacaaaatcattaaagaaactactccgtctgtcccaaattataagggctatatttttttacacg

SEQ ID NO: 8138 - DNA, 12594 bp, Oryza sativa
caccatccaaaataggggcaaaacaaacattcagttaaaaaaagcgagggtaaaaacgaaaaccctaaaaagtaggggtaaaattaatattagacatcaaagtaggggtagaaacgaaattgccccaaacatataagtgctgttaaattggaacggagggatgcgactgatggagtagtatactgtgacgacctgggttgtgctatttttttttagtatagtttttccctttgacattgagatggcataaccgtaacagtcgcagttttcctattgtacaatattaataatgcagccatgcatgcgggcaccaccaacgacgatttccgtcggcgaaatttgcccttacgacctccgacgacgactttgccgaggccttccacattgcagccgtacgtgccgacggcccgacgccatgtatgtagctttccgtttcctaactctgatcgcaacatatggccccgttcggcagtcctactaagcttaggcacgcgaaacgaggaaaccattgatgtttgattaattattttaaactcatgaaatggatatatttaatattttaactcaaattctatataaaatatttttcacagaacgtaccgattattagtttgaaaagtgtgttaataaaaactaggacacaatttgtatcttaatgaaaactggaacatactaattattttcacttcgtgcatgtgtggtagctagctgcagtaaataattgactatactcgctcctctgttgcatattataagttattttttattttttttcatatcaaacattcttaaaattgattaagcctgtgaagaaaatatggcaatatttttaacataaaaacaaaatatcagaatatattcaatgctattttatttaatgaaactaatttgttgttgtagatttcgctaagtttttctataagcttagtcaaatctaaagaattttaacttaaaaaatatcaaaacggcttatgatataaaactgagggagtaatatattttgcaaacccctcattgagtatgatctgataatggattattacatgtggcgattaacaagtcacttgataagaagtgtaaattgtctttaaatgaggaaagcacagggcatgttctttttacttgtcctttggctcattttgcttggaatgtaattgccatggtgttgaatttacatactgtctctctatctttctgggatggtatgagagctatcaaaacaaaaatgaaatctcaagtgggtatggtactgtttgctgggatgttgtggggtttatggattacaaggaatgagtgggtgtttgaaaacaaactaatcaaaactcctttgcaagttgtctgtacatgtctctgtccctgatgcaaagatggaggctgctactaaaataaaaaactgcgctgacttggatgatttccatgagaaagtaatgctcattctggacggtttgcgggtggttgacaatctaccgaagacttggggtagcttgggagagtgtgtcgttttctgttccagttgcgtatatacatgattacgggtggaaaaaagcttgccgctcgtgagctcgcttggctcagtacaatagtgtcatatgcaaaagttttacaccttttctaactatttatttgttgaaaatgataattttgattgtcatattatctatttatgtgttgtgatgacatattaaagaaaaatatcactttattacacattctatgtggtaaaatgttgcttcatttctcttagacctgccaagctagctcgagcccataaacgagccgagccgagctgcacttttagctcgttgtttgtagcgagccaagccaagacgagctttccttgtaccaagctttcacgagccgagccgagccggctctgctcggctcgtttccacccctatacaggatgtggttagtgagggaggttacgttttaggacttttttatggtctgcacctttcatggaaagctggggaccccagtgtcgcgaagccttttgttaccctgtttattgctgtctacttttgtaagattctgtaagaacctattaattttcttctgggctttttacaaagccgggtagtaatatattagcttaattagatctgtgccattaaaattttgctggtttcaaaatataccattacaatttacgcatttgtaacgatgccactgctacttgtttgtaatctcagttgtgcctctaagatacgtattttgcatgtattggacgaaaataccctcatcttctacctctctcttctcttatcttctacctctctcttcacgttgcttcactactgaagaaaccatctttggtcggttgcccaaaatccaaaataatcccggtttaaataggaaccgggactaaaaaatatctttagtcccggttaaaagacctgacgtcactttttgatctttagtcccggttgggtaggaaaatagatacaggcagcaaaaaaacaataaataaataaaacagttgggacgtgaccctatatatctgtagtcccggttggtaatactaatagggactaaagatggatttttagttccggttatttcacccaggactaaagattcctatctttagtcctggattcctattctcggttacaaaaccaggagtatagggggttaggaactgggggtaaagaccatttctccactagtgcttcttgctctgccaccacgctgctcacgctccgccgctgctgctgcttgccgccgtgctgctaagcaggaagagaggaggaagaagaaaggggaagaaagaagaagagggaaaaggggtagtttggtccaattttttctggaaatgcatccgaggggtaagtagtggtatcttttaaatatgtgtaaaattataatgatatatttccaaatacatgaatacaagtggcatatttcgaaactgataaatttttattggcatgtatccaattaaccctaatgtatttgcctgatataaaaaaacaagtgacttgatatattttgcaaatctctcatttatatatatccatatacatatgcttcttcccttcaaagttaagttcctaatatttctcaatgtatatatgtactcattcctacctccagtctggtgaacgggtgcggactgcagtttgtatagtaagtacacgaagatcgagtcaagcgagcggcgtagaggtcatgtgtaccgtgtacttacttattgatgggaaaaggaattaattttgaaattataattttaaaaaaaataagaacgaactgcaattttaagattttggacacatttatttaccaatgcttcccattggagtatgggacctctgtattttggcctatactttcagtttgaccacttactaccttaggtacttttttgtactcctcaacctcgaacttatgttgcgttcttaagttcactttcccaacttcacctccctcgtttttcgagtgcacatatttgttttacttgttttgaaaaagcatgttacttgttttaaaaaaaattatattagatcaacgggtaggtgaagaattagttatattataaaacaaaatttgaataccaaatatatatagctataatatagtattttaagagggaaagagtagatcgtagcaggtggacaaacacagctctgctatctataaatacacgcgccacagacaattggagcttattgaagggaaactaattaaaggaagagctgcagctactcctactcatatatctaggaaataagttcccagttaatgttgtacaacttacatgcgttcatggcattctggctacttgcagacctgctgattcttctggcttctgccgcggagagcatctccggccggcctgccgccggttgccagacacggtgcggtgacgtcagcatcccctacccgttcggcatcggccccaactgctcccatgggaagggcttcgagatcgcctgcgatacccgaacccgaaacggcagcggcgagttggtgccgaccctcgccgccgccaatggcaccatccatgtgcagagcctgtttgtagcgccgatcccggaggtcaaggtgatgctgccggtggcgtaccagtgctacaactccagcgacagcgtcaccgagagtttcttcggcgcggtagacctcaacaacaacggcgtgtaccgcatctccgacaagcgcaacatgttcgtcgtcctcggctgcaacaccatggcctacacgaacaacggggacagtcatggcaaaggcccttacgccggcctctactacaccggctgcgtctcctattgcaacgactcgtcgagcgcgcaggacggcatgtgcgccggcatcggctgctgccatgtcgacatctcgccgggcctcagtgacaacgtcgtcaccttcggcgagtggtcacgctatttccaggtggacttcaacccctgcaactacgccttcctcgtcgccaaggacgaatacaacttccagaggtcagatctccaaaaggacctcaaccggaccaagccggtgtggctggactgggcgatccgcgacggcggcaactcctccgcatcatcgtcctgccctgcgccggaggtgagggagaagatgccgcctgagtacgcctgtgtgagcgacaacagcgaatgcgtcaactccaccaatggcccaggatactactgcaagtgcagcaaaggctacgagggcaacccctacctagtcggaggttgcaacggtaagaacacgtacacgagacaaacaatctactctttcctactcgctatctttcatattgttagacattttaattttttaggcctactaccgaatgctacacagttctaatgaaatagctcatatgtgctgacgatatcttaggtaccacaggtaccaaacacgatactcatagataccatactttgatatctgggtattataataacgtcagtatggtacctacaatactagatttgatatcgggtatcaaacatgatatctcataagtatcaaatcatgatacctacctaacatactgatttcaactatatcgtttgaacggtattgccattttatagtatttttgttaattttttcaaagtcaaacttttcttacgtttgacaaaattagtttaaaaaaaatagcaacatttataataccaaatcaaaatgtgttatattatgaaatagagggagtattgagtttgcactattgtgcatcccacgctagtcatgccatctatgtctgtttaccaatacaattttttttaaaaaaattcaaattaagttatttgtacacccgccattgaatcgaacagtatatatgcagatattgatgagtgcgctcgctcggatgaatatccctgccacggggactgcagaaacaccgtaggagattatcactgcaaatgtcgcacaggttaccagcctagaggaggcggtcccaagatagacgagtgcagccaaaagttccctctacctgcacaaattgctctcggtatgtgccttccaaccaaagtatttcttttataggaggaaccaaagtactttgtttcattctaaaatttgaaatatctagacgcctaaaataatttgttgaaaacggtgtactaaattaaagatgctcccttgcatatatatactcgcaagactatacttgatatatccatttaattcatgcggcttaacgcttttgttcaatgtttattcaaaagtagaaaactaagagcataaaaggaataattaaagcaaaaccctaattaagaggatggaaaagattgagccaagatcaaactatgcggcaggctgtatatgtattcccaaaacaacatgaactagtgaacaaatggagtatataaaatcaattaatgaaaaacaaaattgtttaattcaatactctacagtgagcatctttttctatgagatgtacaaggaaggtgtaatatagtcattcctgaaaagaaactaacggtaaattcacgtagtcaactatttcaactcctagcttacatctggagatgactccgcattaaactatatcggacgcccacccagcctgcatatatatggtaagcacggctgggctcagatcctgcagagtggcagattggcctcaccaaatcgccttttgttcactctaatatgcgtagtcgcccctcgtatgattatactttgaattttgtagttatttgtcgatcgtttgcattaatatatacataaaatgattgttgatatgattttggatatattttaacatgttcttctagatttatatataaaattaaacttattttagtatggagagtgtatgtccgagtccgaatatactttaatgtagcataaaaagaatcatttttaaaccatgtcactaaatagcaccaacactactcagtacttgaatgacatgacatcatttctattcatcctttttagttttggagacttgcagccacatcccttagctatgtcaattaactcaggtggatagctagatatagacaactaattaatgagcgaattgtattgattagatggctaatcacccgaaggtttgcatgcagcgcatggggatagggggtgccaggcccaccctggcaccctcggtggcttcgccactgcttctcacggcccgatgttgtgcattgtgcatggagcccacccgacctatctatcatgcattcttttttcacttttcttatgcgtatacattgttttatatcaaattttaaataatattgtatcgaaaagtgcatatccaatctaccaatctaccatttgattacattattatatttgttataatcaaaacattttagaaagatctcacacaattatactttgataaagaattatccattgtttcacaatttatagaaaattatgctatcacgtgtgcaaatgtttcaactcacctcattatttaagaggaatgaaatatataaacatattacaacaaaacattacatatatatcaacgagtgaaacataaacaacaaaattcatatgataaatatatgtttgcaaatacttaattttataggaggtgtagattagagctgtcatacatacacacacgtacacatatatttggggcgtataaaaaaataggagttcatacacatataatatacgtataattttttttgtatgtatacgttcagaataagtaccccataccgccgtatgtagatctcgcattagcgttttaggatgtcacctgccccaaagtgagggattgcttgtagagaaacgtcaggagcagaactgacatttgttcagtcaaacattattaacacattcgatagaacagtgtcagccccttataacagcggattagtggaaaatatgccagctgcacttcaatgacatttaatatggggaatattttaactgtttgtcactttaaaaaaaatgtcacaactcatatactacggctgtgtttagatctaaagtttggatccaaatttcagtcctttttcatcatatcaacttgtcatacacacaacttttcagtcacatcatctccaatttcaaccaaaatccaaactttttacttttatgataagtaatttttcactctttgctgacatgcatggcatgccagcctgcactcccacggtggacaagacgtgtgaaatgtttatcttacccctcgtgaaccctacaagtcagctgtatctctttgttctctatcagtatagatggccaaagggcccgcccggcacggccccgcccaggcacggctgggcacggcccagcagccatcgggccggcacggcccgcccatgggctgcacctcctgcccaggcacgacctaccagctgtcgggccgtgccgtgctggcccgaaggcatgggtggcccatcgggcctttttaaaataagtctattttttttccctcctctctaggctatttcatttgtatagctaaaataagtctattttccgtccctcctctttgggctgtcatgtgtatagctaaaataagtctattttctgtccctcctctttggctgacatatgtatagataataaaagtctattttagatccctatgctttcgttcatggcatataatgtctatttttactcccctatttttttgtgtatcgggcctagctgccggcccatcgtgccgggccggcccggccgtgccgggccgggccggcacgggcccggcctccgtcgggccgtgccgtgcttgggccgggccaaaataccgtgccatgggctgggccatcgggcctcgggccttttggccatctatatctgtcagtggatccatccaggaaattaagcaccttcttgtcgtccgagttgacagcgatgggctggggttgctgccgctggaataggccaaaaaaggctgaaacatccatggtagcaaatagataaaattaacagagaaaacctagacaacggtatcccgttgtaacgggatactcttctatgagacagtacatatacctgatacatgttgtggtatcaactacatggtacccgatacctgcgatacctgttatctggtacctatgatacctaggacctgatacctgtgatactcgtgcaagagaatagttaatatgtctatcccgttgtaacgggatcccgttttgtagcagccctctaaaattaaaggactgcgtggagcacacaaatgctaaattaattaagccaagttcgatagataaatgcaattcaccgttgtttttttaattggttggttgaaatgaaaaggcagggagctgaaccattcgaatttttttttttcatacacaaaattttcagaaatggatatggaagctttttcacatatcgttagggtttttatcaaatatgcctggatagtttcaatggacaaatggatcaactggagcaaagtattcgcactagtaaccgggaacatatcctatgcacactccgtgcataccaactagcaaatgccacgaaaattctacaaaacattatacacatacttcgaataatattacacctatatgtgaaattttatcttcaaattcattatattttggtcgtaataaaaaagacaaaattctgacacatttttaattacctagaaaactgtcagattttttttgttacggctaaaatataatgaacttgaatatgagactttatatatatgtgtagtactaataggagtaaatgtttaattttatagaatttttcgtgatatttgttagttggtgcgcacgagaaacatgtgtacatagaatatgttcctggtaaccatatatgatctttagtgagttacaaatatcctaactattttcatatttttcattcgtaggaaaaaaaacaattctttagcttttgcatgtcagtcgtacatgcataatatatataaacattacactgttgatatatagtaatatatattcatctcaagtgagcattcgttattattttctattataagttgataacaacaaaatcacaagtcaaatgtatttgttatcgttgctaatgagaacttatgatctttgtaggcataagcctgggattttctttcctgatagttgctgcactttttactctaatgatgctccaaaagagaaaaattaatgagtatttcaaaaagaatggtggttcaattctacagaaagtggacaatatcatgattttctccaaagatgatctaaagaaaatcacaaagaacaattcacacgttattggccaaggaggttttggtaaagtgttcaaagggacgcttgaagataatacaatggtggcagtgaagacttcaattgaggtaaatgaagctcggaaggaggatttcacaaatgaagttataatacaatcgcgaatgatgcacaataacattatcaagctattgggttgttgcttggaggtggatgttccaatgttagtgtatgagtttgccgctaatgggagtctgcaagacattctccatggtgatgccaatcgctcactccttctcacactagacatacgcttggacattgcaattgaatctgcagaaggtctaaaatacatgcactcgtccacaaattgtaccatacgacatggtgatgtcaagcctgccaatatacttttaacagacaagttcgtccctaagatctcagactttgggacatccaagcttcttacagtagataaagacttcaccatgtttgttgttgggagcatgggatacatagacccaatattccataagactggtcgtttaacgcagaaaagtgatgtttatagttttggtgttgtattgctagagctcattagtagaaagccaactatatatggcgagaactttagcctcatcatcgagttccagaaggcctatgatgaagtacacagtgggagggcaatgtttgataaggagatcgcggtggaagaagatatctttatcttggaagaaattggtaagttggcaatggagtgtctaaaagaaaaggttgaagaacgacctgatatgaaggaagtagcagaacgacttgtgatgttgcgaagagccagaaagcatggacaaggaagctataatttgagtcctagacaccatgaggagattagtattgaaacaactcctacgagttttggtgctgattttagcacaaatagtagtgtgagtctttctgcaacatgcactccagaacgcaaagaactctacaagctatagatcaacaactggaagtgaagcaaataagctatatatataatctatcttctggtatgtgcagcgtacctatcctataaattagtatccattgattgaaataactttatgtcttcaagcatgcatctcctacctatgttttctagctatgacagagatgcagtttgttgtagcacaagattgtgtaatctattttctgtagtgtggaacttggaccatgttagatattgttgtatacatgtaatgcacgacttcgatcacattcaagaatttcatagagctaaagtagcttggaatgtgtatagaagctttttatttgtatagtaaacactatatatctaatgatctaaatcgtttgttgacaagctacaaagctaactaatatttgcttcatcatcaaatgaaatgtctgctgaaaattatattgtcctgatcaatactatttatccaatcctgcattgatgattttatagacaattttctccatacgatcagaaaaatcgtaggttgttaaatggctttacgaagagaattcgacttaagaaaataacataatattgccatgactattcatcccccatggtagccaaatgaccattttgcttgccgtttctatttttcttcttattttctttctattgttagatataggtacataacaatcatgacaattttggtaatttctccccaaattttgaattagtaaataatataaaaaaataattgagactctgaaccaagtacttcaagatttcttacttttttggcctagtgtgagataaccgtaggctatacacaaaaacacacggtaattaatactagtgaccaatggcaaaccgtcggcctaatttcccatcggcgatcagtggtcagtaattagcgaatggccgacggtaccctcggctatcaggtttccgacggtggaaagcccgacagtttactttcagccacttgtgcagatgcgcgatttgcaggtgccatctcaattcccatctgtaactagaatgcttggtaactatgttttcattttctttagaattggtgttttatatttctatatttttttggttttgatttctttgtaaattatataatttagtgttcaagatattcacaaatcttggtttccaggtgtacctacatgggaaaacacaaactgcataaataaaaaatatgattgcagcttgtaaagaaatttcttagatatatatttcttatagcagttacattactttatttttagataaaatgataaaataatatagatccacgtgttaacaacactgatatatcagtgattcacgcgccatcaataagtaagaacatttaataaatctagatttggaaataaatgtggatggggaatcataagaatttttctatatgaacagaattggtggtagaatggtaagctctaaaggaaaagtgttgactctagggagatggtatttcatgtactctagagatgtttgggaaaggatccaaaggaaatatatcccagagcaacggttagaggctagagaaataaatggaggggttttgtaaaagtcgaaagaaataaaaaggagggttttataaagtttgaaataaataaggattttataaaatttaaaagagaacatttaactttacaaataaaatttaggtccaaagtaaaagagattaaaagaaagtaaggttgcttcaaaggaaaagtcgagaagagcacaactaaaacttttcgcgaaaatttttcccagaaaatttgagtgcattgcatcaacccttcgctcattcatcttctcatacattgcaacaagaaaaactaatattataaaaaatcacatgattaggttacgatttcgatgtcaatatagttttgaaaatgataaggtgatttttttggataatggattaaattcctgcctttacttcaaataagctacaatcacttattacaaaattctctcaaagagagcaaacattcagaccacttcatagcg

SEQ ID NO: 8139 - DNA, 13930 bp, Oryza sativa
gcagagaggattggacgtacgtgatcaaatcattcagtttggacggccttaattcgcccatctgcaaattcggcgccaaattggccctttttgctcatagctagctggtcgatccatcgattgatggatcaataatgcaagcaagctgtgtttgtattcatcgatgcctatataaaccgcgcgtttgcctcacctttcacttcatccatctctacacatcagcaatatttagctacacagagctagctaggattagctcagcaatggcaggtgctcctcgaggactagttctcctcggcgtttgtgccgtcttgatggcggtcgccgtcggcggtgaggcggcgtcggttgtcgtcggcacggccaagtgcgccgactgcacccggaagaacatgaaagctgaggatgctttcaagagtacgtattccctatgtagtttcgtattataagtcgttttgatttttttaaaagttaaatttctttaagttcatagaaaaatagtagcattttcaacctaaaacaaacatattattaaaaactttatcaaaatatatttaatattggatttaatgaagctaatttaatgtcttagatattgctattttatctataaatttagtcaaacttaaaaaaaataatttcaaagcgaattataatatgaaaaagaaatagtaatatttcacaatgcatgatgcaaactgcatcatctagagaaagatacagctggttacaagtgattcacaatactatttggaattttactatgcagacctccaagtggcgatcaagtgcaagaacaccaacggtgagtacgagagcaaggctgccggaaagctcgatggcaccggcgctttcagcgtccccctcgacgccgaccttgacagctccgactgcatcgctcagctccacagcgccaacaacgagccatgccctggtcaggagccatccaagatcgtgccaatgtcggagggcacctttgtcgccattgccggcaagacacactacccatcagcgttgtgcgcgtcagcgaccatctgcggtcccatcaagaagaagatcatagaccacttccacaagaagccggtgccacccaagccggagccgaagccggagccacccaagccgaagcctgagccggaacaccccttcctcgaccatatccacaagaaggagaagcacttcttcgaccacttccacaagaagccagtgccacctaagccagagccgaagccagagcccaagccagagcccaagccgcagcctgcgccggagtaccacaacccgagccctccggcaaagaactgatgaatatgatccgcactggacgtttgatcatgccgtcctgccccctgtcagattgtctgcataataacagtttgagatcgaagtcatgcattagctttcatcgacaggagttttaatttgtacttgtatctatttcttctctatcaaatgcagttatatatggtaagataatttatttatatttaatcagtactgttgtggcggactattcactgtatcagccaaagccattggatcgtaagaggttagcattggttaaagaaaaagttatttttatctgacaaactagtcccaatgacggaattttcctgatgttgatacgtcacgaataattttcgagacgtttttttgctttatcctagtgatttttggccatcataagtaatctagttgctggtagtatcttttaattcttagaatgtgcttggttgcggcttacaaaacgtgctacgtgcccaaaagcaaccaaaataatttggtgcttaattaacttttatttataagctatggctgaaacatagagaatgataaaaaaacatgtatactaatataaattgaatttttttaaattgagagttaaactgatgagttgccaagtacatacttcaatcatattattacccttataactatttgactaacaagtcttgcctgtctgtcgtaccccccattggtttccccctcagttcagttttaagagcgaaccaacctaagatgaataattcatgaaatatatgtacagtacgcgcacctatggattttcctagactagtatctcttatataagttctttttaataattttttagttttagttaaaatgaatgaaaaacaaaatcatctaatccagaaaatgtaaccaaaaaattgaacagcaaaaaaatcccccatgctagttattgtcctataatttggaatttgtcaagagttttatgtcttacacattgatctccagtcagttatacatgcatcctgatttcatgaacatttctagttcaactgtttaacagtgacatgcatggctaccagcagtagacatatgcatatgaaatagtagaacaaattccacagtaagacctttcacatttttttaataactctggtatggccagttgacattaacttcttccacaatttggcaactttttgtcaactctggtgattgatgcattcaccgaggtggccaagatctcattcttctggcattctgacatccatttcaatgctgtccacacttgctatccacaagtactggttcacctccctagctagccatctctaataccctcaccacccccccccaaaatcaaccaggcatcaagttgatcttctacatgacttccctatctactcccatgccaatcccatcgcatcaagaattcaaggtgacagtaaagtacttcctattataatcacagacaaattaactcagacaatccatacactgctcagcctaaaaaagaccagatacaggagtgaccacagtcaacagtgaaactctggaatctgaactatagttaattaattgggactattcaaccaattcaattctcacctgtcagatttttcactggacaaataaaaatgaccctaccaaatagcaattgggatattagaaaaatgggcccaactgatagtggcttgtacagcaaaaatttattaaattttcatgctgtgcctggttggatttctgctgacatcgcttcctaaatgaattgctagtatcagtagtaccaaatcaatctgaattaactgctagtcaccagtacaaaaaggtttttttctagacggcccaaaacctaatctcgtatgcggaaggtcggcctgtctgccgcaaatgatttgaaaaaaaatctgatttatacgtatgggatgtgcacctgcacgcgaaaatccaattttcgcgtgcggatgcttatgtcgttcacaagtaaaataaaaataaaaaaattaaaataaaaataaacataaccctagaatctaggcggcgtggcgcggatccggccatcgggcgcctgtggatcgagccattgcggggccggctcccgcgaatccggctgtcgtggggctggcagaggtggatccgtccaccgtcgtccaccgagccgcttgcccccgcgccctaggtgtcattcgccactgtcgtgtgccgcgctagctgccgcctgagcgctcaaggaagccggagccatccgccgtccaccgcaggccgtcgcggggccgatgcccgcggatccgtctgttgagggcccggtggcagcggatccggtagtcgcggggcccgcggaggcggatccgtccacgccgtccgccaaggtgccatccgtcaccactgtgcgctgcgcccgctagcgcccgccgccaccaccatgcgccgctaacaccgccgccgcttgccagtgagttagagaggagaggaggtgagagtgagaagagaggagagtataaggttgaaataatgaggagaggaagtgagaaaggatagggatgaaaaattttgaagtgttgaggagagaaatgaggaggtaactcagactttgggcggatccttaagaggctgtatgtgaaaatcgattttcgtatgttgttgcataagaggccccttaagttgtattgactgctatgtgtctacgggagttattttaaagatggcaatctatttcatggattgatagtcttactcaatatttcttatacttcctagatttttatatctagctcgtgggtgtgtttcgactgataggtgctctcattacggttctatcttgattcagttcactgagtttaattaatgaagctttcattatctaaaaatgtctagaagcattatctaccgtataattgttagggataatgacgttcaaaaacataaagacaacatctaactttacatgatgatatagtggtaactgttcaatacttgctgcacctagagagagagagagagtgacagtacagatgtatccatgtaaccaataatctagctacttctgcaggaaccaaccaagaattgctgcgtattggcagcttgcaatgaatgtcactcaatcaagcatgcagcaggagggttgctatcacctttccattgcattgccttaatcagattaatattgtgcagaaattaagcaaaaccacatgcagcctcgtgttaggtgaatttggcgccgaacggattgatgaaacagccaaacctcctcgagctcaactaattatatacccgattttaggctaatgtttactcttaattaagcaatgaacctagatgtaagaaattacgcgtgttcactcttagaattttatatgataatagtagaaataacaagatatgtagataggtagacaacataacttcatatgcttcatttatataaattttatctttgatcgactattaaaaaaaagctacaaacaattaatatggtgatgtttgatttaaaaaaaatgttaaaaatatagtcataattcgacatattttaataaaaaaacatgacagtaaacatgacatgtgaatgaaatgatgatccaatgtagtgctaaacattaatatgtaatagtaatagctagcatcatgcatgtagtaacatgtttagcaataaactgaatagagcattatatttgaagaccgctccagatttcagatgagtcattgttgatgtgttgcctctgttgtcgtcgctgttctctcctctacctctgttgctaatgttcccttctccactggcatcgttcttagtactgatcgacatgatccaagttatctatgtagaggaaagagaacgtgacgtataggatgcaaagccaagagcagtagcgtgaaaaagtgctccctaaaaacttgattgtccgtctacctatccaggtactcaggtggacagagttctggaggcgtgtcccaagtacccgtgcacgtaggctgcatagaaacagaagaatagagtgtgtcgtctcacggagaactagaggagagatctgcctatacttggaggataacgagagagagggagacgttatgggagggattaatttcgattgagtgctccgcccattacaacagaacaagtctccgtcagttatgtttttacacataaaaatgaaacatcctgaaggaatgcagccgttgtcgcctcgctctcttgctcgcacactctcctcggcctcctccacagccatggcctcccccggctcggcgtgactgcacgcacgcgtgtgcagtcccaccaccatatcaactgctaaatatgtgctctcagttaacagccaatttaagatgaggtctttttccattggtttccaaggtagtattaattaatcccatagcattaattgttggcctttggaattactaggtttaattttaggccgatatcatttaattctaacaattcccaccgaattttaaggctcatagaaaatgttctcagctttgtttttgtttgttataccagtgttttggttgagactgttaacttgaactttcacccagaaaaagaactacacctgaccacaactgattaatggattatgtcttgaattatcagtcttgttcagtcaggctttactcaattccttaactgatactaggctggcattagcatcccctctatttggagcatttaagtcatactattggcttttccataagtatctagagatcagccaaattttataggctgtgattagcagtcggactcatattggtgtgttccttctaagatgttttataggccaacatctctactttaagaaaaatcactcaatcacattaatgtatctccaacttgccatacagaccaggagagaactacatcaaagaaagaagcctttttaaggtctcttctcccagctacctaataggatgtttcgccaccctaatttaccagatctttgatcacataggacaggttaccactattgtgtagctcaagtatgtctcaagcccatctcactcgatgcattgtctgtcacaaacccgtatggctggtccatatagctcacctcctccaactccccattaagaaaagttgtttcaacgtccatctgatgaacgataagaccataagaggctaccagaacaaataatactcaaattgtggtcaagcgagcaactgatgaataagtgccgaaaaaaatcattgccttatttttgggtataacccttggccataagtcctgccttatacttttcaattgtaccatcaggcctaaactattttcttgagaactcatttgtatcctataggtttgcagtcgtatggacactcgacaacttcgcaagtaccattagacgtaattgagtccatctcactgcatagcgcttccttccaatagtcagcatcaggagatgaatataccgagatgaatatacctcttctatggttcttggagtatcatccacaaggtatacaatgtattcatcatcaaaagactttgcagtcctttatctcttactctttcgagtagctatagtgttatcctcctcaagatttttccacaggcgttgttcatcgtgttctatcggcacaaaagactcggggataaaataagttcttgactagaagtgctaggtacatatttctaggaaatccattctaaaaaattgtagcatctctaggctcaagaattgtaccaacaatcatatcaggtattccagaatttacaattaagaatctttatcccacgctgtggatagcataactaaggaatacacaatttatggtttttggtccaagtttgtgccttttgactataggcgcattgaccttagccaaacattcccatgtgcgcaagtatgagagattcgacattttcctttccagttcctcgaacggtgttacttctttattcttagtaggaatttattcagcacatgacacacggtcaatatagcctcaccccaccattccttggaaagccctgcaatgtctaacatgtcattcaccaaactcagttagagtgtgattctttctttcggcaaacccgtttgactaggaaaaaaagggagtcgttctctcatgaataattttagactcttcatagaaagaagtaaatttatttgaaaaatactctccacctcgatcagacctcaaccgtttaacttttctttcaagttggttttctacctcagccttatacattttcacgtaatgcaatgcatcatcttttgcaaaatctaatgcaattatctataagtgtcatgaagtatttctttttcccctttagtcaacacaccatacatttcgcacaaatcagaatgaccaatttctagcagtgccaaatttcttgtctctgatgccttgtaaggctaagtatggcatttggaaccttttaccaaagtgaatttcggaattaattaactcattgtagctaagcacaacatgcaactaaaattcacatgacagacgtgaatgccaaacattggactcatcatcattactcacatagttcacaacattattacatgcgtcatccaacattattacatgtgtcatccacagaaaagcggtacaaacctccgttgtcataacctttagcaacaaatgtttcatatttagacacgacacatttattggactcaaacacaagtttaaaattttaaacattgatcgtgccaacacatgcgaaccgttctgcatcagcaaggaggaatctctcctgacctgataaaaataaaacagggaaatatcaacacacaaccaccagtatcaacccaccacttaggtgaatgaaatacataacgaactgtaggtaaaaaattaccataccaagatgttactcctccatcgctaataaccatgtttgcagattttttgaccttgcgatcagggcaatacttggcccaatgacgacttaacacacacacacaaagcagttatcctttgcctttctcttgccttttttttttaaaattggttatagccttgggtttgatatcatatatgactttttttcataaaattagttgtagccttgttgtgggatgcttgagcattccttttctgcaccaaatgctaaaacctccctcaaactttttgtcgcggttgttctttgctatcaccttctcctcaacacccaaagaggcaatgagatcaataacactgaacacttgcctcatgtgttttagacaagtagcaaagtccaaccaatatgtcatctatcacaaacttgtctagcaactcgtagatgttgttctcaagttcctttggtagtgcctgaaactcatgagcttgttttactatagaacggtcatcgacgatcttatactcatagcaatgtttcatgacatacaactcactgccagtatcgaagactccgaacatggcctcaagtgcatcccacatatcctttcgtgaaggcatgtgcatgtacacttctactcttttgttggctaatacacttatctatgctccacggaacaagcaattcgcgaactcgaacttagcctcctccacaggggagagaccgtacgatcgtcttgccctatgaaacaaagaaatattgcatagccgtcaaccacaatagtgcacgtgccttctatctcttataatttgaaccatcaattgcatgaggtttaagtgatgcagcaaaggcaactaccaaaaagacctgtcaagtttttggattgttgaaaatataatcataatctctactatcataaaattgaagatatttttctggtattttggtaagtcatccgtgcttgagtcggttttaatttcttgtttcggttttaatctctactcctcaaaatccgtaatttaaaaaagggcgaaaaaaatcacacggaaaaagaaaacgcccataaaataacatgaaagataaacagggaaaaaaacgtccgattcgtaccggaacgaaaaaaaggcaaaaaatgctgggtaaaacaaaaaaaaccgaccataaaaaaatgcaggacattggcaaagtacttcagatataacatgtactactcactgtagttatgtggtacttctattcaattaatcatctctcagtacacattgcacaaagttataagttctcacccgtagtttacattaggaccagttcgattattgtacttgtaacgatgattcatgctgtcatgcatgcataaagcggtgcgtggatcctacgtatgccagccattaatggataggttattatcatttatattctcttcgtctcaggacaaaccaacttaagatataagatgctactcaactaaggtcctgtttgtttcagcttaaaattattgtaatctagactattaaatcagattactctaagcaggattataataagctgacataaaataagctacgagttgtttgtttctctagattattagagtcatctaagggtagtgggtcattagccacttaataatctggaaaaagctcctctagaggagattattggattatagtaatctggcttatagattataataatctagcataataatctacttgtttgttttagcttactcctaataatctagattataataatcctaagctgaatcaaacagggcctaagccaaccaaagggggtgaatggttggtataccaaaaaaccgaaacttttagcggaaataaaaatgacccccaaattcgacggagatcggtctgaccgcagttgtccagccggtctgaccgcgcctgtgccgtcggtccaaccggtgtagaacgatcggtctgaccgccctgagatcgcctttacgccgccggtctgaccgcctttacgccgctggtctgaccgccgtgatgccgccggtctgaccgccggtgtgtcgctagttagaccgccgaaatccggtgaaatacaaatcgaagaactcttaaagtgggtgactactttattgattctctctgtgtttacaaactcatactagaagtcctatacaacttaggaaaccctctagtacaagaaacaaactttacataaccactcataccaaatttggactcctttcaaattcgactccgcattccatacacacacaatacctccatcgtataccatatggaatcttcaccaaccatgtgtattgaactctagccgtagtatcccgtatgatctctgaccaccacggacgtcgtcttatccccaagccgactcttagtccatcaccgcaaatactctcctgccatccgagtcacctacacatagaacaaacaaagaaatcatattccgagaccaagctatctccaaccttgactcattagtagcaaacaacagtattacatacgtatagtatccatctagaagccataatcatgaaacaatcacggatatccaaacaaacaacccgaaaccgaaaccgacacagagtccgccggtcagaccgcgggctgcaccggtctgactgcgcgatacacgccggtctgaccggtagcacatgcctggtctgaccggacctattccagcagtacctgtagatttacctgtgaaatccaatcatctcctaaaccacttcgtgaataaattctaaatatcaaaaccaataatctccgatgccaattgttcatcacagaataacaatcaaaaacacctttaattttacagttacatagtctagtataacgaatctgaatatcatcatgtccagatttattgtattaagttataccatatcctttcacagatttactactgagtgatcagatcattcagtttggacggcatcaattcgcccatctacaaatacggcgccaacttggtctttttaatttgctcatagctggtagatcatagttggatcgatcaacaatgcaagctgtgtatattgatcgcctatataaaccacgcgttgcctcacctttcacttcatccatctctacacatcagcaatagctacacagagctaagctagggttagctcagcaatggcaggtgctcctcgaggactagttctcctcggcgtttgtgccgtcttgatggcggtcgccgtcggcggagaggcggcgtcggtcgtcgtcggcacggccaagtgcgccgactgcaccaggaagaacatgaaagctgaggatgctttcaagagtacgtaacaatttatctggaattcactgagctgatcagctatacaccatcaggatcagaaagatatagctaattacaagtgattgacaatattatttggaattcttttattcagacctccaggtggcgatcaagtgcaagaacggcaatggtgagtacgagagcaaggccaccggaaagctcgacggtaccggcgtcttcagcatccccctcgacgccgacctccacagctccgactgcgtcgcacagctccatggcgcgaccaacgagccatgccccggacaagagccatccaagatcgtgccaatgtcagagggcacctttatcgccgtcgccggccagacccactacccatcagcgttgtgcgcatcggcgaccatctgcggtcccatcaagaagaagatcatagaccacttccacaagaagccggtgccacccaagccagagccaaaaccggagccacccaagcccaagcctgagccggagcacccattcctcgaccacatccacaagaaggagaagcacttcttcgatcacttccacaagaagcccgtgccgcccaagccagagcccaagccggagcccaagccagagcccaagccgcagcctgcgcctgagtaccacaacccgagccctccggcgaagaattgatgaatatgatctgcattggatggacattagcatgtttgatcatgccgcagatgatgatcctgctcagcacaggagtgtaatttgtacttgattatcgggcatcagcagggatgtttgtactatttgcatatttttctctcccaaatgaaattatatatggtaaaataatttatttacatttagccagatttggtgggacgactgattattcaccatttagcattcaccttagcttgattcaagctactgggctcggccgagagaaacgtacggtacttgatcttacgataagtcatggcagcggtggcaagacggttgtgaccagaatttagggcctgcatggaaatctgaacttttttttttggtcaattaagtgtaaaataatatgtttaccatattggaacccagaaaagctgcttcgatacatggactaaaacacactaaatttaccgttgtactatttgggaaaactttttaagctacgggtgaacgccgaattgtttaatttatatcgactaaatgattataaaatctttttaaacaaatgacatgaatatattactctataaattaacatgctagtataaatttggcttctgcaaattgtaacaaaaataaaaataataaatttgactgcaaataaacgtatactaattaaagtttaatacgttatttttttataacttgcgcataagtcaaatttaaacttgcatatttgtgaagtgatgcattacatattaatctacctttttatcaattttttcagaactatttagttgacatgtgatgaacaggtggacgttcactcgggtgattaaaatccttctccttgtatttgggccactccaacagaaattaggagtgtggtctcaaagaagccacactttttcgaattagggcggggggtggaggggggcggcgccagccaccctggcgccgcggcgccaggggcgggcccaggtttttcaacttgggtattcgaaattgtaagagaaaaaattttctaacccaaggtctaatagttgtataatatgtaacggtataagcatgattttataaagtcataaatagatagaattgaccataaattgaatgcgttaagcatattagagtacattactaaactattattgacaaaacaaatcaaatttatagagcacataaaatggcaaaatgataaaaaaaatcttacaatttagagagaacttttcgtttcttgatattttgaaaatgattgatcatgtcttcattcttaacttgcaagaagaaatctctttcaatgaatgtaaccaagcaatcattcaaatattctggccccatcttgcttcttgcaatcattcaaataatcaatacacttcagttcagtctgaagaagcattcaaacaataatatcctcattagtcattcaagcattgaagcaatatcctcattcaagcattcaagcaatatcctcaatcctcataattcattaatcgatatcctagtatttcctcaccggctcaccgactcaccgttgctcggttgctgtcttgctgactgctgtcgaggatgggaggagacaagttgggcagctccgcagctgggcaagagccaggaggcgtcgaggcggcgtcggcgggcgggcggtgggccgcgccgccgcgggcgacggccgaagccgggctggcgccgtggcgcggcgacggtgcgtgcgtcggcctagcgagctggcggcggctggcgtggcggctgggaatgggaaggggatgggaagggaggtgaggagaagagatagggttagaaaggaagtgggcttttctttgctattgggccaatgggcctgaaatgctgggtggtgggagggttcagtttgggcttcttttgatttttgaatgggtataagtattttttttcttttttcctatatatacatatggaatatatacttcatatatgtattttttgggcaaaaattt

SEQ ID NO: 8140 - DNA, 27304 bp, Oryza sativa
cctctcccatattcctcctccccttctcctctttatactacagtagactacacaaatttttttgaaaaataaaagttagaaaaatttatgtatagaaatactatatataaaaaatttgaattcaaattcaaatttgaatcgagtatgtaaacttttgacttataaactttgggtctataaactttaggtgtataaactttagatgtatagaaatactatatatagaaaatatttgaattcaaattcaaatttgaataagatataattcaaattcaaatttgaatcgggtatataaactttaggtctataaacttactttaggtctaaagtttaaactttaggtgtataaactttagatgtatagaaatactatatatgaaaaatatttgaattcaaattcaaatttgaatcggatatttgaattcaaattcaaatttgaaacgggtatataaacttttgacttataaactttaggtctataaactttaggtgtataaactttagatgtatagaaatactatatatatataaatatttgaattcaaattcaaatttgaataggatgtataaacttttgacttataaatttttggtctctaaactttagatgtgtaaactttaggtgtataaatttactaaaataggaaagtaatgcggtgccaacaaaggaaacaaggtggagagatggagggaaggagggggggggggcgcaaaaactgatcgccctgagcgattaagggcgatcgctcgcccagtagcattcctggccaaggacgattgaaacaacaagcaaccaatcgtcaaaatcaatttatttatccaaaccctctatattctacatatatctccctccttcttgctacctatctcaaattttattatcctcaaatcctcaattgcttggcatctgtcgtttccacggtattagaagatgccctagcttgcctgccgagcttaggataaaccaacgttcgttcaccctggcaggtgggtgttcgttgggcgcaagttgcacataacgtgctaagatgtggtgttgtgattctacgtcaacatgaacaatcttaaaaatacataaagagattacattacgtagaacacataccgcattacatatgcgaataaatagagacaacgacacacaggagcactctgaaacgcgcattatttttcacctgaaaggcaatgcttatgcactgactccaagtctccaacacatatatcgaccgatcgatctcacacacagtcacactcctctcacatctcacaacttttatttattcttcacgaacaagctgacctgcaaattaattaatcacgcaaccaagtgtggattgatggaatggatgatcgatcgattcagtggtagaccggcggagagctgggagacggcgcagctccgccactgttcccctgggcgccgccaccaccgtttcccgcaccgccaccaccaccgttcgccggcaatggcgttggcttgggatccggcttgggttcggggccttggggtttcttgtggaaatagtcgaagaaggggtgcttgtggaagtagtcgtacaggaacgccgacgtgcactccgctggcgacgtggaggagtacatcctcttgccggcgacggccacgaaggtgttagccttatcgacgccgttgtccgttgttgacgacagcggcacgatcttggacggctcctgcccggggcacggcgtgctgctcgtcgcgctgtgcagctgcgcgaagcagtcggcggcgccgtggaggtcgtcggcggcgaggggcacgctgaaggcgccgtcgccgtcgaggtcgccgacggcctagctctcgtactcgccgtcgccgttcctgcacttgatcgccacctggagacctgaacatcaccaaacaattaatcaacgacggtgatatatcgatcgatcgagctgagtacgcaattaattagcgatgaacatattatcatcatcatcatgatatatatacccttgaaagcatcctgccccttcatgttcttgctggagcagtcgccgcacttggccaacccgacgacgatcgccgccgcctcgccgtccgcagcggcggtgacagccatcacgagggcagtgcagacgatggcggcgaagagtagtgctcgtgctacagctgccattgctgataaatcctcgcaaactctatgtagcaagaggctagagctgtgtgtggatgagtgaagaaaaagcaggctatgcatgtggtttatatagatcgataaaggctactagctgggagtgatctgaggtcagctaattatattacaacatgattagcaatttgcgccgaatttgcaggtttaaaatcattaacgccgtgcattttatttgatttgatcagacaccgatcgattaagagtagcagctagtagttcatggaggcactgtgaacattcacactgcatgcagtgctgactgttgatgcacttgccgccgattggtggtgtttaacaaggaaagttaagctttaatcgactggtactcctacagcgcacagtactactagcctgttttataaaaagggagaatagttctatagtataggacagctccaaccaaattgcatgattgatactatttttcagtaaatgagtaaatttcacaaaaactacagatactttgatcaaactattgcaaaactactgatttaaggtgttatatcataaaaactacagatttagtgttaagtttatcacaaaactacagatttaatttgaaatatatggtcacaaagctatagattaagtaacaaaattatcataaaactacaagtttagtgccaatttaatcacaaaactacaacatttatagctcaaacataatggtggtgctatagatttgacctcaaaattttgtagttttgtgataacttcaatgttaaatatataattaattacgtgatacttgaccttaaatatgtaggtttctgataaatttgatgctaaatctgtggttttgtgatagttcgatcaacatatccgccttataaacatatgattggaacacagtcgtgagtgtataagtgcggtgtatgtatttagtggtgactacgtgcatcttgtctgtataatggtagagaatatacttgttgacggtatataatagtttttttaaagtatagaagatgttggtatcaaagtatacgcgagattgccgtaaagtaaacgagagacagagatttttatattgattcaggccccgatgtgggtaatagccataatccagtttatatgaatatctctagaatgtatcaaactgattacaatgggggagcaagctagctaatctagcctaccaacaagcattcaccaagaattaatccaacgacttagaatcatcggctagctattgacttcctcctgattgatattcgatgtgacttgtggctatggcttatgattcgatgctctttgatctctcctaggggctatatatttatacggacaatcaatttcttgttaagtagaattcgaggagttcatatgggatacgagcaggtaagagttttgccagatcctgtagtcagcggtacacgagcataacccaagagtcttagcgatgagattgccgaagctttcaaaaacacttttggcatagatactagggttaaaaagcgtatagatcaaaaactctaccctgaccactattataatgctccatatcctcaagggtttagactgcctcattgtgtaagttcactggagaacatggctgatctactttagaggatatcgaccaatttatttgtcgggtcccaaaattaaaaacttggatccggctgagattaatgtatcaacccctggatcagtaaatattgatacataatatgcaactggttcttcattgcatacgttaaattttacaatactaaggttttacaagaataggtactcacataagtaagactattacatagaggttttatacattctgactagggaggtataacctctagggattttctatgttattggagtcatcgtagtaataatcataggagtcttcttcttgacccaaatctgaaaaaggggttataagagcaagggtgagtattcacaatacccggcaagttaccatggaaacatgttatgtgttggtatagagtagagttctttgcaaaagacaataataaacaatctggaagtattaaagcaagagtttgtaaatacatagactttaggtttctaaccagagtactatatgggtctcggtactcaattccatgagtacggccattcgaatagtttcatgaatattctactacagtagatgtacgctttactcgcagtccacgacttgccaatattcattagcttagtcatgacccagtattaggttattaacaattgtggtacctgttccatgaactctagtcctcatgcgctctgaacgtaacgttatcagcagcgagaggagttctggtgttcccggggtatttaagggggatctcgtatgacaccacgtcatctcgatcagggtttagaattataacataataatttatactcgagtatcatcgaccatttacttgtacatggtaatggtaaaaattgcccttcgtggctatagttgcctcttgctcgaggacttaaaaataagaaccacgatacagaggtaccacattgctaattaatataatgactaggtatgtccctattctagaaactatggtcgtacctgttcgttcgacataagtacctggtaataactatatcgatcgagacagtactagccacccgaaaatcatccaattcctacgtactgtcccaatctaagtatgaaatatttagaccagattgtaagcaaaataagcaatactaaattgtttgggtttctatggttgaattatgcatataaaatagagtattgaatagaaggctataaataaataatttgtaaaatataggcttaaatgatcaaaaggtagaatagtaacttgccttgctcgatgtcctgagattgactgatattatctaatatgtcagaggactcttcaagacctagggttaaacatataaaattcaaattcaaaaggaattcaaataaaatccaaaaataggaaaaataaaataaaatagaaaaatagcaaaagtagactcaaaagatagagaatgattttagaagaattttggtccaagtttcactggaattggatctatattttaaaagatatgagcttctaaagtttgaaaatcaaattaaatgtgaaatgatactgtgtgcgggtcccacctgtcagtctctttctctcttctcttcttcaacctctagccgttccccatttacggccggcggtgctagggttagcgatttcggcggtgatagagggggaaagggggttgcggccgaggaggggaggtagctagggttctccggcgacggcgagtggcggcggaggggttaatttgatgtgtgggtgggctaacggctagggcggcggtgacatggataggccgtgaaggtgatcggggtggtgagagttaggcatagcacggggagggttcctagagcatctacggggtacttagaaggatttaggtagcttgccgactttcggcaaggtgtggaagaacttgccgacgagcacctccattggcgacggacgagctcatgtcggcagcccagaaggtggcatggtaatgctggccgattgcgaatatggaatctagggagtacgtagatggttaaaatgaaagaactcaccgagataggctgagacgacggattgcggccggaaaaacttctcggcggtgagaaccagagcagagcaggggcgacagtgcttagctcggtgcgacgaggtgaaactcgacgcaaagcttcggttaggctccaatatgctagagcatggttgatattaggtgttctaaggattagttaggatggagagtggatggaggggcgtgaagtcaatcgcacacaaggtgttcgaccgacgggcggaagtggttgatggtatggtttggcaaagcagagcttcagggttgtggggttatggttgatgatgatcgatgatggacaaggaagggattggggtcctatttatagggccagaagaagtggatgagctcgggcgccatcaacgccattgatgagcttggaaattgagcacggcaggggtggcagggagctgtgagagggagggcaagatcaatttgagtggcgggaggccacgttcgaattcttactgacgaaggcttgacttgaccatgggtgaaaacgtctggcgacgtgttggcgccaatccgggctcgacgcgcggcagcggcgagggttaaaacggtcagcatggcggtggtcggtttgaattgtgataggggaaaccaccgcttatcttcaatccaacagtgcggcaagaattggcgcgattcaccccgggtagaagcgaattcggacttggcggcggctttggacgggcgtgcacagcgtcgagcggcggtaacttgcggcggaggtcatcctggcttcgtcttcatcacgattggtgcggtggcggtggtcttagggcgtcgaacgactagcggcgcgccaaggcggtcgggcacacgcgaacggccctgaagccgacgcgcggcggctcggcgtgcggcgatggaggatgccagggtggcgcaagtaaagggggtggaaaaggcaaagtgaaccacagttttggatgggttgtggtccccaaggatcaaacttagactttgcaaaggtttgggtagatgttgggctgagatagttgggctgggcatttcatcgaacaccttgagggcaatgaatagtgttttcagaaattttgaatatttttcctagaaaagaatgaatttaatctataagtttgaaagggtttcactagggtttagagtatagaaaattctcactaatgaaagggggtaaactaaagaaatatactaaagttcgaaatttgtgagaatttgctaaaattcactaagttttaggataaagggaataattagggtaagttaaaagagttctaaaggaataatacttgaaccaataaaaggattcaaataaaattttaaattgtactaatctagtcaaaaaccagcatgatgcagtcaaattttagtttaaaatttgaggatgttacattattatacaatgcgaagaagcctagctagtagtattttgaaacttaggcttttcccattgtctttatttggtgatgcatttacttgggtttatttcacttgcaccaactctattcatgattggtctgagttagaacaaaaatatcatgattacttctttaattagtggtgagtccgaattaaatttgtcgtacttaatatcggttaaaaaaagtataatgagcctacttttgatctacattagaagattttatatatacaagaaaccgatgttatagtttaacactttctgataaggtcttggtagatttgccttattctggtttacttgaatatttaaaagaaaagctagatggtcatactttcttagatgtaagccaattacttcaaatggctttgactcaagagagccaagttaaagaggccaaaatctcatagaaatttatgtctgattgttcccatgttaatatagtttatgaacaagaatctttgaacaatgagacagttgatgtatacatagacgaatgggtttggaactccaactctaaaccattcgtttgctccgttcttaagctggttagtcgtaagaatcgacaagaggaaataacgttcacttttgatgtggccaaatgcaattagaaacaaaggtagctcatccacctgcattaccttttcctatacagactgctgaattgcaagagaaggagattcccgatggcaaggagaagaccacattgaagacttcaatacttagggggcaaggtgacaatctggagatatcaaaatatgacaagcaaccaaggagatcaagttcatctaccaagcgagtatgcaccaccggcaactaacttctccttcttcatggtattacacttggagaccacattgaagacttcaatacttaggaggcaagatgacaatctggagatatcaaaatatgacaagcaaccaaggagatcaagttcatctaccaagtgagtatgcaccaccggcaacttacttctccttcttcatggtattacgcttggtttgcattatggagttttaatggtatgtggatgatgcctatttatataccatattatcatccattatgggcattgccggttgccacattgaccgattttaaataatcaaccacactcatctcatagccggttgagagaaaataatcagtcacaaaagaatccacacaagaaagtggcgaggcaagagtggaggctaaagaaaaacaaaatacaatctgaacaagaggggcctctcgtagctttcttacatcaccattaaacatttaagccttagaggcattcatggccggtattggtggatatcgcccttagatgatctcatgcatagtattttttggctcacaagtttgccgaaaagacaggggggcatgtgttgataatcaaatttggcagtagagtcgagttatagcaagtttgagccaaatttataaaatgccagagctttcccgcgaagactggtgtgaccgttattatgtggccggtcaaaccggacaatgcactgtgattagaccataggtatccaggcggttagaccttaatcacatagtccgagtccaatttaatttagatacttctcgtgttttcttgttttacaccaaaatttttgagtcctagttgatttatatgcctaattgcatatgaaaaaaccccaggaagcaagtccacccctcctataaatataagggggccaaggacggggggccctaatgggcgatcgatcgccaggcgatcgcctgggcgatcggatccagcccccctccccctatactccctcctctcccctattcctcctccccttctcctctttatactacagtagactacacaaatttttttgaaaaataaaagttagaaaaatttatgtatagaaatactatatataaaaaatttgaattcaaattcaaatttgaatcgagtatgtaaacttttgacttataaactttgggtctataaactttaggtgtataaactttagatgtatagaaatactatatatagaaaatatttgaattcaaattcaaatttgaataagatataattcaaattcaaatttgaatcgggtatataaactttaggtctataaacttactttaggtctaaagtttaaactttaggtgtataaactttagatgtatagaaatactatatatgaaaaatatttgaattcaaattcaaatttgaatcggatatttgaattcaaattcaaatttgaaacgggtatataaacttttgacttataaactttaggtctataaactttaggtgtataaactttagatgtatagaaatactatatatatataaatatttgaattcaaattcaaatttgaataggatgtataaacttttgacttataaatttttggtctctaaactttagatgtgtaaactttaggtgtataaatttactaaaataggaaagtaatgcggtgccaacaaaggaaacaaggtggagagatggagggaaggagggggggggggcgcaaaaactgatcgccctgagcgattaagggcgatcgctcgcccagtagcattcctggccaaggacgattgaaacaacaagcaaccaatcgtcaaaatcaatttatttatccaaaccctctatattctacatatatctccctccttcttgctacctatctcaaattttattatcctcaaatcctcaattgcttggcatctgtcgtttccacggtattagaagatgccctagcttgcctgccgagcttaggataaaccaacgttcgttcaccctggcaggtgggtgttcgttgggcgcaagttgcacataacgtgctaagatgtggtgttgtgattctacgtcaacatgaacaatcttaaaaatacataaagagattacattacgtagaacacataccgcattacatatgcgaataaatagagacaacgacacacaggagcactctgaaacgcgcattatttttcacctgaaaggcaatgcttatgcactgactccaagtctccaacacatatatcgaccgatcgatctcacacacagtcacactcctctcacatctcacaacttttatttattcttcacgaacaagctgacctgcaaattaattaatcacgcaaccaagtgtggattgatggaatggatgatcgatcgattcagtggtagaccggcggagagctgggagacggcgcagctccgccactgttcccctgggcgccgccaccaccgtttcccgcaccgccaccaccaccgttcgccggcaatggcgttggcttgggatccggcttgggttcggggccttggggtttcttgtggaaatagtcgaagaaggggtgcttgtggaagtagtcgtacaggaacgccgacgtgcactccgctggcgacgtggaggagtacatcctcttgccggcgacggccacgaaggtgttagccttatcgacgccgttgtccgttgttgacgacagcggcacgatcttggacggctcctgcccggggcacggcgtgctgctcgccgcgctgtgcagctgcgcgaagcagtcggcggcgccgtggaggtcgtcagcggcgaggggcacgctgaaggcgccgtcgccgtcgaggtcgccgatggccttgctctcgtacacaccgtcgctgttcttgcacttgatcgccacctggagacctgaacatcaccaaaaaattaatcaacgacggtgatatatcgttcgatcgaactgaccacgcaattaattagcgacgaacatatatatcatgatatatatacccttgaaagcatcctgcgccttcatgttcttcctggtgcactcgccgcacttggcctggccgacgacgatcgccgccgcctcgccgtccgcagcggcggtgacagccatcacgagggcggcgcagacgatggcggcgaagagtagtgctcgtgctacagctgccattgctgaatcaatcctagaaaactctattgctctttggactatgtggcaagaggctagagctgtgtgtgtcgatgagtgaagaaaaatcaggcatatgcatgtggtttatatagatcgataaaggctactagttgggagtgatctgaggtcagctaattatattacagtacaacatgattagcaatttgcgccgattttgcaggtttaaaatcattcacgccgtgcattttatttgatttgatcagacaccgatcgattaagagtagcagctagcagttcatggaggcactgtgaacattcacactgcatgcagtggtgactgttgatgctcttgccgccgattggtggtgtttaacaagcaaagttaagctttaatcgactggtactcctagagcgcacagtactactagcctgttttatgaaaagggagaatagttctgtagtataggacagttccaaccaaattgcatgattgatactatttgtaagtaaatgagtaaatttcacaaaaaactacaaatactttgatcaaactattgcaaaactattgatttaaggtattatatcataaaactaagtacatatagtgttaagtttatcacaaaactaaagatttgaaatatatggtcacaaagctatagattaagtaacaaaattattacaaaactacatgtttatagtgccaatttaatcacttcctcctgattgatattcgatgtgacttgtggctatggcttatgattcgatgctcttctctcctaggggctatatatttatatggacaatcaattttttgttaagtagaatttgaggagttcatatgggatatgaacaagtaagagtcttgtcagatcctgtagtcaatggcacatgagcataacccaagagtcttagcgatgagattgccgaagctttcaaaaatgctttcggcatagatactagggttaaaaggcgtatatatcaaaaactctatactggccactacgataatgttcaatatcctcaagggttttgattgcctcattgtgtaagttcactggagaacatggccggtctactttagaggatatcgaccagtttattattcaatgcgaagaagctagtgctagtagtattttgaaacttaggctttttcccattgtctttatttggtgatgcgcgcaattttttgggtttatttcacttgcaccaactgtattcatgattggtctgagttagaacaaaaatatcatgattacttctttaattagtggtgagaccgaattaaacttgtcgtacttaacctcggttaaacaaaagtataacgagcctacttttgaatacattagaagatttatatatataagaaactgatgttatagtttaacactttctgataaggtcttggtagatttggcttattctggtttacttgaatatttaaaagaaaagctagatggtcatactttcttagatgtaagccaattacttcaaaaggctttaactcaagagagccgagttaaagaggccaaaatctcgcaaaaagttaagtctgattgtgcccatgttaatatagttgatcaacaagaatctttgaacaaagagacagttgatgtatacatacacaaatgggttttgaactccaactctaaaccatccgtttgctccgctcttaagctggttagtcgtaagaatcagcaagaggaaataaagttcacgtttgatgtggccaaatgcaataggatttttgaataattactagtaaaagaagaaaattaaattgtcacatggccacgccataccttcacttgaagaatagagcggcgagcatattataagtgtcacaactccaattctcatgccacaaatgattgcaatgtattccatagacaagttcaatcggcaattgacgaatgacgattgacttttacaaagatgcaggtggatgagctaccttttcctatacagaccgttgaattgcaagagaaggagattcccgatggcaaggagaagaccacattgaagacttcaatactgtcggtgaaatgggcccgggggtacgcacagtagagggaagtatccttcccatctagtcgcgtggctacgtggcctcgcctccccccgcccctcgggtagcgctgaggtggccagagggacctcggggtgccacgtcgcactcctcgggctttcggggcgtgctaccccgaggccctcgcctgaccacctcgtggcggggagagcgggcggggcgaaagacactgctccgcgccttcaatgcgcggtgcaccaaccgccccaagcagcatttaatgcggcgtggagggatgtgcggcgccgctcgattgacccatgtgttggtatttcttacgtccacagataaatccgcaagcgcacggaatactgttgtagcacttcaccttcgggtgaccccaaaaagatatcgaactcagggaacgtgtgtaatttacctaaggctaagacgatccaatgacaacaactatagataggctaggcaagctagagaggactttctatgtgttttaattatctaagctaagttgaaggtaatttcctatttgttgcttcgggcaccgacccctgctggtctgccagcgtggttccggctatagctctatgatgtatccgaacgtggagaattattaggacgggattcagggctgttaccacttgtcgcctacctctgacaaatccgtgggatacacaacaaacaaaggtaatctctaacctagacaccacgtctaagttattaattactactctaatacttgtacatgaacttccttctttatccagagtcctagtactagagcacttagtatgaatactagataaagaacccgcaaagatgaaaatctatcttacttagacaaagtaattaaataatataagaaaggaacacgaatgcttactttatagaagaggttctccgaacccagagcagagtgtaccgacagctccggtactccccccgaattcctcctaggaagctacactcgtcgagatagaagtcggatgagcgccaaacttccgggcactcctccagagcttcccctcactctctaccttattataatgtacaaaagatacaatagagcctcttataattcagctcaaaattgtgtgtcttggaaatgagaatgtgacctccttatataggctccaaatgacggttaggggtatgggaaatgaccaaaacaccctgcaactgccttaggggagaaatccgagccgtccaggtgaaagcagatgatgggaagcgccaggattggtttgtccgaactggtgggttcggccaaacccaaaaactctcctcccggcctctccttcagccgggaggttgcttattgggcccccaacaacctgggctatgttttggcccaattctaaatggtttttattgacttattgggcctctaatccgtgtaaacgcgtcctgaatgcgcggaggtgcattttgtcacatgacggatgtgttttctcctcaaattacttgcatacacatatttcaccaatactagtggaaatgattagtaataatacctaccactaagttggataccatgttttatttcattatatgcaggtattgacggtccgatattatgatttaaggaccgtcaacaccatatcaatcgagcttgaccggcctgtgaccggtcacaggcgacgggacgggggcagtgcccccacgttccgccctgtgtcaggcggagtgggggcaggtatgccctgtcccatcggcacgcttccaggggcgccccacgcgcgtggtgagccgccgaagtcttcatacaataatagggaatgacagggatgtcccccgtgtcaggcgggggcggcgctgggccccacctggagccaggcgaccatgttgcttccagttgaagcaaaggatagcggtatgattagggccatgtgccccccctccgatggaggggtaggtgcaaacagtgcatgtggtatccccttggactataaaaggaggacctcgcccaccgagaaaggggacgactctcagagaacttgagctcggaggaagaacagctaggtttcccttagagctcaaaacctcatgtaaaaattcaccataatcccatacacaagagtagggtattacactcaataacggcccgaacctgtataatccttgatctcccacacagccacgagagcgatctagcgattagaccgcaagcggaagtaggcccttgatcatcgtgccatttcccccggccgaactcacaaaggggggggtctcacgaccacctgctagagaggatcattcctcgacaaatacttaggaggcaagacgacaatctggagatatcaaaatatggcaagcgaccaaggagatcaagttcatctaccaagcgagtatgcaccaccggcaacttacttctccttttccatggtattacgcttggtataaatgtattatagatttttaatggtatgtggatgatgcctttttatataccatattattatccattatgggcattgccagtttccacattgacccattttaaataatcaaccacactcatctcatagccggttgagagaaaagaatcagtcacaaaagaatccacacaagaaagtggtgaggcaagagtggaggccaaagaaaaacaaaatacaatctgaacaagagaggcctctcgtagctttcttacatcaccattaaacatttaagccttagaggaattcatggtcggtattggtggatatcgcccttagatgatctcatgcatagtatttttttggctcataagtttgccaaaaagacagggggggcatgtgttgataatcaaatttggtagtagggtcgagttatagcaagtttgagccaaatttaaaaaatgccagagctttcccgcgaaggctggtctaaccgtcattatgtggccggtcaaagcagacaatgcactgagattagaccattggtatccaggcggttagatcttaatcacatagtccaagtccaatttagatatttctcgtgttttcttgttttagaccgaaattttcaagtcttagttgatttatatgcctaaatgcatatggaaaaaccccaggaagcaagtccaccccttttataaatataagggggccaaggatgattgaaacaacaagcaatcaatcatgcatcaaaatcaatttatttatccaaaccctctatattctacatctctctccttcttgctacctatccaaattctaaatcctcaaatcctcgattacttgtcatctctcgtctctacggtattagaggacgtcctagttggcctgctgagcctagaacaaaccgacgcacgttcatcctgatggggtccttcgcgggtggtcgttgggcggcatctacccactccctatgatggcgcgtctccgagtgctgccgcgagttacacataacgtgctcaaggtgtggcattgcgattctacgtcaacatgaacaatcttataaatatttaaattacattatgtagaacacatgtcgcattacatgtgcgaataaatacagacacgacacacataagcactctgaaattatttatcacctgaaagccaatgcttatgcactgactccaagtctccaacacatacatcgatctgtaaaatcaaaggtgtttttgataattattctgtgatgaacaattgagcattagagattattggttttgttatttggaatttattcacgaagtggtttggagatgattggatttcacaggtgaatctacaggttatcattttatgtggaccggtcagaccgggcaggtgttgccggtcagaccagcggtgatcaagcggtcggaccggccagcccgcggtctgaccggccgacactgtgtcggtttcggtttcgggttgtttatttggatatccgagtttatttcatgattatgacttctagatggatattatacgtatgtaatactattgtttactgctaatgagtcaagttggagatagcttggtctcggaatatggtttctttgtctattccatgtgtaggtgactcgatgtctcgggagagtatttacggtgatggaccgggagttggcttggggataagacgacgtccgttgtggtcagagatcatgcgggatactaaggctagagttgatgcacgtggttgatggagattccatatggcatacgatggagttattgtgtgcgtatgggatgcggagtcgaaattggaaggagtccaaatttggtacgattggttatgtaaagtttctttcttgtactagagggtttcctaaggtgtttaggactcctagtatgagtttggttcgtggctttaggctgcctacctcatgtataaatagagggggagcgtgaggcttcccggtatcgctttagagagcaatagaattgagttttgagttagggtttcgagtttagtcgaaatttttgtaaggagtgttgttggtgcactttgtaaacatagagagaattaataaagtcgtcattcactttaagagttcttcgatttgtgtttcaccgggtttcggcggtctaaccgacaactcaccggtggtcagaccagcggcattgcggcggtcagaccggcgggagcacggcggtcagaccgacggcggcgacagtaggcggcaggcgatcacggcggttagaccggtagatcaacaccggtcagaccgggggctacgcttcggtcagaccggctaatctacttcggtcagaccgatctccatcgatttcgagggtaacttttatttccgctaaaagttttcggtttttgggtataccaaccattcaccccctctggttggcttagttcttgtgattcgatcctacacgatcgatcgatctcacacagtcacactcctctcacatctcacaacttatatttattcttcacgaacaagctgacctgcaaattaattaatcacgcaaccaagtgtggattgatggaatggatgatcgatcgattcagtggtagaccggcggagagctgggagacggcgcagctccgccactgttcccctgggcgccgccaccaccgtttcccgcaccgccaccaccaccgttcgccggcaatggcgttggcttgggatccggcttgggttcggggccttggggtttcttgtggaaatagtcgaagaaggggtgcttgtggaagtagtcgtacaggaacgccgacgtgcactccgccggcgatgtggaggagtgcatcctcttgccagcgacgacgacgaaggtgttagccttgtcgccgccgttgtccgttgttgacgacagcggtacgatcttggacggctcctgcccggggcacggcgtgctgctcgtcgcgctgtgcagctgcgcgaagcagtcggcggcgccgtggaggtcgtcggcggcgaggggcacgctgaaggcgccgtcgccgtcgaggtcgccgacggccttgctctcgtactcgccatcgctgttcttgcacttgatcgccacctggagacctgaacatcaccaaacaattaatcaaggacggtgatatatcgatcgcaattaatcaatgatgaacatatcatcatcatcatcatcatcatgatatatatatacccttgaaagcatcctgcgccatcatgttcttcctggtgcactcgccgcacttggcctgaccgacgacgaccgccgccacctcgccgtccgcagcagcggcaactgccatcacggcggcgcagacgacggcggcgaagagtagtagtgttcgtgctacatgttgaaattgtatcttcagctgtggccccatcgtgatccattttgcagttgcaacggtgtggagaataagtcgccagcaggttgttagcaggcgcgggtgatgcggcgatctgggagttgaagaccgtgtcgtgtgcgtgagtttagcgcaggggagtgtgtgtgtagcgagtcagagaattgcggatcgtgggatggcacgatttttgcctcggattcgttctgttatgtatggagtataaatagtttatttagctcagttttacagttgtaagtttattattcagttgaatgaaaaacaaccagaaaattccccaaagattgtgcgatctagttcagagttctgaaacttctctgttcttcactctgctctgaatttctcctctcagttccttgtcactgttgctgtgttgtgccgtgccggacgcgtgcagtctgcgcgcaaggtgttcgatcagggaaatcttcgccaacactactgatgccattgttgaatcaatcctagcaattagcaaactctattgcccctcctccttactatgtgtggatgagtgaagaagaagcagaggccatgcatggtttatataggcgccagcatgcatagcatcatgtagatcgataaaggctacctgggagtgagctgagatcagctaattatattacatcatgattagaaatttgcgccgaatttgcaggttcaaaattaatgccgtaagtttgattttatcaggcagtaccgatcgattaagagtagtgcactgtgaacgtgcacactgcatgcagtgttcacccttgatgctcttgcttccaattggtggtgttaaacaagcaaaagttatgctttaatcgagtagtactcctacagtacacagtgctactagtccgttttattaaaaaggaggatagttctatactataggacagcttcaaccaaattgcattattgatactattgtgctttcttattactgtcttggttaatttggctcttggataattacctgtttaaatttatcagcatatactgcctactagtatttgcagaaatcgaagccagcataagtttaagtaaaatgttattgtgtcttcgtctattttaataacgtagtgtacgtgagtatatgagtgtggtgtcaccgactacacgtgcatcttgtctatgtaatggaaaaagaaaatctctttgcttccttaggctgaatccaccatggcagtccagcgcatattctagatgccaacctgtatgcatgacccgacatgagcatatgtcaactaggcctttttctttacctcttcacccaccttgcgtctctgcaacacacaacgccacgggctgagataaagacgagaatgctccagccagacgctagatctagcccaaaaaatgggtagcccatgtccaagccaccccatgaactcctccatgaactcttttgtacacaatgctatctttttatctgaattttaggtagtttcaaattgtatttctatatggactatttcttgtagttttaatttttattccgacttttagattgaattatatttatacatataattttatttcaatatttattttaaatttttaatccgaatttcatatttttcagcctaaaaggtatttctacgttgactcttgtcttaatttaatttttaaatacgaatttaagttttcttttcaaaattgcatttctacatgtacttcttttatccttttattattattccgaattacagatatttttaatctatacacttggactctatttttttcttttttattaatatgggaaattctaggtcatgagagtgaatatggtggcttttatattgttttattgagttaataatagatcgacagttacaggtgttcctttttctgttacttcatgaatatttcaataactagatgaaactctgcgcattactgcggaaatttagtatgataacaataaaaaaaataacgtgtaagataactagataacatcagattaagtaaattaatgtggtttacgataatttaaatttaaatagtatgtagaatggtgattcaaacgtaaaaagtaaggtggtatgactttatggaagaagaaaagtagggagatagtttgtaccgtagattaatcatctaaaggctaaaaacaattgatgtgatatgacttaattagaggaaaaaaagagaaagataatttgaaccatagattaatcatttaagcactaactaagtgaggatgaactatataagtatataggatatcataaaacataataaagatatacattgaaacatgatgtgaattcacataattatgttagattataatttaacatgtttgtatttgaaaagctcttaaattataaaaactataaagatatagcatgtttgcatgatgtttaaatgtgatgattgttagtgaatgatgatgtggtatcttgttaattagtggatgatgatgtggcatcttgttagtggatgatgatgtggcatctttgcatgttaagcttaagaagttagtgggggataactttatagtaagataggatatatttgacatttacagctagctctttttttcttttacttaatttaattttttttatagtaagataggatatatttgacatttacagctagctctttttttcttttacttaatttaatttaatctaataatatatttacatgttacagctaactggacaaaaaaaataagggctaaaaaggaatcgaagtctggacctatagagtgtcctcgctagtggaaaccactgcactagaacagcatattgttatttttagtgcaggatgctaaacaaatatttgggtgttagcgtaaacctcatcagcacaaaatcatttatttgtccccaaaacaactcacctaaaagaaatacttagcttcttcatagcacagcaatattttgtatatagtacaaacaactgaacaaataagtccatttgaacacacgacgaaaaaattcattgagaaaatagttagagaaatatatcaaggcagataacaaaattagtgataaaaaatacttcaaaagtgtatgaacatatcacacgatcgaaataacagacaaatcccattaaataatgaagtctatcacaacaaaactagcttgttgggtcatcctcatcactatctgatggttctgtacccatatcatatagatccctcggcctatatggttgtgcaacatgccatccttgtgcttttggttcctgcacatagaacacctgtgatacttgtgatgagaacacaaaaggatcatgctccatcttctctcccttatcttcctctgtcacctccttatcacaacaacaactcaagcccgctggtcaccgcgaacttgttctccttcgagcccgatgtaagtacttttttttttaactaacgtattagtattttttaactaacatatcatattcaatggataaagcactgtcgctatttagaggctcctactgtgtatatattaaatatatataattaaaaaagaaactgtatagatctcaatgcatgctgtctagccattctataatcggaaaaagtacgaattaccccttccccgaactatcgcgatcgtccgaattatccccttgaactcgaaaaccagacattttacaccctcaactactaaaaccgaacaaataacccccctactcaatctctggagtggttttgatcctacgtggcatacacgtgtcagccaagtcagcaatcctttaaaaaaattcggtggggcccacctgtcaatctctctcctgtattgctcaccttctctctcctcctggattcatcccctcccctcgctaaagcacgcagcggcggggcgagcggtggcggcgggcgcggctgagcgagcggaggtggctgcgggcgcggctgggtgagcggcggcggctgctgcgggcacaattgggcgagcgtcggcggcgacgacggcggctgcggatgctagcctcgccggcgagctccgccacgggcccccaccctggcaccaccgcccaccgtgtccacctccactatgccgacgtccacgtccgtcttggtccgcctcggtgcgtgggcgagcgcctcgtcgccgtcgccttcgtgcaccaccgggagcaacagcacggtcgtcgcctccgccaccacgggcacggcggggcgcgagacggcggcggaggcgctgtcagtgtcgtcgtcgtccatctcctccccggcgaccttcctccctgcacggtcgatctccagctccacacgcgccctcgcggactccgtctcgaccacctccaacgcgcgctccagctccgccacgtagttgttaacagtgaaatttggtaagcccggagtagtcatcggcgtagagtcagcatcggcttcgaagtcctgagattagccgatgagagttgtcaagtcgtcagttgtcggattcttgctatattcggttaaggaaattgatctactaaaggaagcttatccagaagagaccgagtttaaagagaatacggcatggtaagttatctattaattaggaatagtttgttagtttccttttatctttaggaaagtgtgtttagtgtcctataaggactttatcttttccttttatctttaggaaagtttctttcttgtccgacaaggacttatatcaacccatggatataaatatgtacacctggggtctatgtaatctgtcctcacgatcaatacaattcggcgcatcgccaccttttttacttctacttttgtttttacgttccggcggaacttggcacccgacgcggggctgcatcgtcttcgatctccggcgaagggataagtccaatgtttcaccggtccaggcaattgtatcgtttacgtcggcgtcaacagtagtcctcaccacctcgacgccacttgtcgccagtcctcgcgtgccgaccgcccgcgacgctgcaccccaccagccctcgcccgctgatggcccgcgctgccaactgtcgctggccctcgcgcgccgaccgcaacagccgcacgcgcttcaaaaacgagaaggtcacacacccctgttcccgcgctgaccgcccccaccgcctgtccccgcgccagccgcccctacacgccgccgcccaccgcccgtccccgcgctgcgctgctgctccccccttccctggagacgacggtgaggtacccctctcgagctccgtgtcaacggcggtgggcgacgagtcctcctcggggagggcacggcgggtgtcgtgcgcggcatgtcgtgctcgtcccccataaccaaaggcggctgtcgtgctcgtccctcatctccgcctcatgcttctgcggaggctcgccggcgcaccgacgtcgccgagcggcgggagcctcatgctccgtgcatcgatccgcctccgccaccggccaccatctcctccttctccagccgtagacgcaaagcaagagagagagaagggaagcagggggaatgggattggggagggattggtgtgaggaaagagatgacatgtgggactagatttttttaatgttttattttgctgaccagatgccacgttggcggccacatatgctgattccagttaaaaccgtccaaaacagtgctcggggggttatttgtccggttttagtagttgagggtgtaaaatgtatggttttcgagttcaggggggtaattcggacgaccgtgatagttcggggggggggggttaattcgtactttttcctttactagaaaaaatgcccgtgcgttgctacgggtaaaaactttttttatcctatacattatactccctttgttttggaccggatgcttctttgtttttggaccggacgttcattccttccttcttttcagctctagtcctagagcagtccgctacctctatctgctcggcctatctctcttcgcctcagcccacaagtggagctgtaggcctagctcgaacaatctcgtgcccgtaccatgacggagccaaacctcccatcaaatccggtaatctggtcgagctcgcatagtaccgtgtccgtatgatggcggagttgatcctctctgtcaaatgcggtcgaatctttctcgatctccaaaattattagagattttgatccacttgatcccctttttcgtttttttaccaaaatcgaagcaatccacaaaacttggggaaaaaaataatgaactgaaagggaaattcaaggggaaaatgacgagagtagtggagaatcgatttttgcaatcaattggatgaggaaacacataaagatgcaaatcgacatggcggcggcgctagggtttggcccgacgaaaaaaccgcaaaaaaaaaatagcgaaacatagttttcctttttacaatcgttttttgccgcactttttttttccgcctttttagtaggaataggaatcggtcagctttttttttttgccgcatttttttgccctgggattttttaattacaatcggacttttttatcatttttttattaacggacgaaggaaacatcttaaactctatatatatatatatatatatatatatatatatatatataaaagtagtagtagatccgtggtaactctattttgttctctagataaccaagacaaaatttgatttttgtctggatttacaaacttgaataggacttatatttctgaaaatcgtatgattgcttgtgattcaaatactccaagccattgtgatgataatctccatgtaaaaggggaaacatatgtatcttcagagagatcagtaaaaatatggcttcaacttgcatgcacgctacaaccggccagcggcaattaaccacaccggacacgatgtcagcatgcacgtcaagtatacagaacaaatgaccgttgaaccatgtgctgctagtttcacccactcaatcaaggagcactgttgcaaaagataccatgtggcatccatcccaaggtgcaaaaacttcaaaaatctagaaaaccgatatggtagctagggaagttattaattacattctccgtttcatattataagttattttgtttttttcttctagtcaaacttttttggtttgatcaaatttatagaaaagtataatattttaaacacaaaacaaacgtattatcaaaatatatttaatgttacatttatagtaaaactaattcgatattgtagatgttgctaatttttttctataaacttagtcaaacataaaaaaatgattagaaaaaagttaaaatgacttatagtatgaaatggagggatcagtataaattagtattcttgagcagaaggttggtcaaaaatagatgttggagagtatcttcaaaattcatccttcctaacatattcctatttttcaatctatctttcatgaataaccagaaaaatactttgtgtttttttaacatatgaataaaatgttgctactaattcactaccttccctgcacgctgcctcccatcattccttgctagcatggctcgttccccgtgttagagtataagtgaattactaccatctttctttgcaattgccccttcttaattagtttaagctcttattttgaattagttgttaatacttatatttaactccatatgttatcggagtgaagtcccaaaatcacaaagaccaaaaccattcgcttttgagtaaattttagaaagagtaaattgctcccacggtacaacaacttggcatgtggatgcgatataatgcaagaacttgaaaattgaacgtccaagtgcaacaacttgacaagtgggtgcgttctagtataagaacttaacaatttagtatttttgtacatcaacttggctaagcatatacaaggtgagtttttttcacgatgtcaatatgccattacatagtaatcatatggatattgccttataagcacatagtagtacaatttacatccaattacctttaagattttttttgttttcttcatcttatcaaatatcaaccgaaatataataatttctacatatagtttaattggctttcagttattagttattatgataaaaatataaatacacttatcaaatctgtgaaatatgcgctagtatattgtcaaaattagtacttaaaaattgaatttataaaaaaaatgctccaaataatcaagttgtagcataactttttaatttactgtatcaaaatcgtacctaccttgcaagttgttgcatttatacgatcacttataaagttcttatactaaattgcacctacctaccaaattattgcactagaacgttcatttctcaactcaagttattgcactaaattgcacccacctgccaagttgatgcaccatggatgcaatttactcttttagaaaacttcgtgttgtatggtcaaagttgtagaaaccatatgtattatgacacgcggcatctaacctcaagtattgttgttttcaaagtttcacaaaactccacccttatgcattttgagcatgaatttacttaaaattaaaaaacgtagagtgcaaatgaaaatttaattattaagttattgactagattgatag

SEQ ID NO: 8141 - DNA, 41742 bp, Oryza sativa
  unsure (1)..(41742): unsure at all n locations
gtattaactagttaatctcaaatttattagtatctcgatgatgatatttcacatggaccgatggactacatcaccggaatacaagagcaaagaacctgcatttgatgtttatgcaactttgttgaaagatactccctccgtttcacaatataagtcattttaacatttcccacattcatagtgatattaatgaatctagacatatatatctatctagattcattaataccaatatgaatgtgaaaaatgctaaaatgacttacattgtgaaacgaaggaagtaataaactgccaattcctgcacaggaactgtcagtaccaaacaaaaatggcatactaattaatttgccagggcagaagttttgaaacataaactggaaaaaaaaaacttaatcatttcatcatcgttcgataaggcacctaagaaggataagttatagaccatcaccaggaaagactaacaacacaagcgtataatgaggcacaaaaaaatggtagacaaccaaaaagaacataaggaataggtgctctgcaaattacagaccactacgatgaaatgatagacactagcaagtaaaatatcgaagaactgaaaagggcaatttgtttcttcgactacttaaggctaacagtacttccatctatggtcatgtattagcatatgccaaaaaaaaaaaaagcaccagagaatcctaagacaaagttacaaaagaattattcaaaattggggaggttggacaagttaaggatgctgacagtgagccacaagcaagcccacaagggagcacaaataagagtgacagtggtggccaaatgggccgcactgcacggacacggcccactcagacgtcaacccgagtaaaaatacttccctctcaaagaaacaaaagagtaaaatactcgttcatcttggcgcgcgaccaagaaagcagaattcgccgtcttcgtgcctctgtttggttaggttagaattggaggactgaacaaggtagtcagtctgtgtgtaactttgcactgatgattagtcagagtcttgttgttggctttagtcccacatcggtatttgatgacgggggagcacgacttaaaaggtgggggtggtcttcacccatcaaactagtcttttgggttgtgtaggctaaaaacctaaagttgtggagcaggtccaatgtaacctgggtggcccacggttggtgggtcaggcctacgcactctaacacttgtgttaggactgatgtactctgtgatcttatattcttctgattattcattacaatcgtatttatatttatgtaatgctattcaatttgtacataacaattcaaggcctacaaattatcagctttatcagcttgttgaatcttgtttcatgactgcttgttttttcatcttcagaaaagggactagttttgtagtttgtggattctgtccttgatctttcagtacataggagtgttaaaatgaaaaacatagtgacctccaaaagaagggaaaatgacgagtagaagacatgtatttgggtagttccataatgcacacagtagaaatcatttgtcagaatcagtgttttggcagaaaaggtagaagaacgcagagtactctgcattttgtaatataggcattggactagcatagaatattagaatcgatagtctcaggattggtgattgcattagtacattggaattgcaatcaggggaatcttattcttctgtttattcattgcaagcataggcagctgcgcagtgggcacagagcgaactattctttcgccttttactaaagaataccgtgtgctcgctgcaaatagcagcattgcaagcatacttgtgtagtattaagcatgctcaaataaatttgaaacaaattcaaggccatgtttgtttcattaattattagcatgttgagtccggcctcatcctcatgtgcttgcttgttaatcttcaatcgaagtactggttcagtagttatggattgtgtcctttcatcctcccttcagtttgtgagcatatagcaggaaaaaacttatgttcaaaataaaaaggaagaaaggaaaaacagaggggaattaaaggaataggattattggtttgtcatgcaaacattcagagggaaacgttgacaaagaaataaaaagaacagtgtgacctatgtatatgaactagtatatgggttgtttcagccaataggttccatttgtcagaatagagtttttttgctgatcggcgagttgcttgaggtcctgccggagcaaacaagtcgacagttcaataaataatggtttcgtcagtgttggtttgtgagtcttcagcaaaacaagtattcagttagagaaaagaaagtctatgtcaataaggctggaattgatagttctgaagtcctgatcatagccgaattcatttgttggaacaggaattttgatataaataatactataatacaaaaaagaaaagtttgataaacctcgtttgttatatctagtctttttgtctgtcaaggtatagaaaatgtttgatttttgttctgaaggggaggatctctaatatattcagtcagtggtcagtgccaactctgataaataattgatgccattacttggagaaaaccttgtgaggattgtaagaaaccgagggaaaagaacattaaaactaaccagtcaaaataactgtgctgacaacaatcttcacttgatgacttcagtcatgtttttttactaattttattgaaggagaacaaccttttctttggggatccaatggtgtttttccacggtagtttctcacatgtgcttggttttagtcacccgcataacatctaaatcagtgtaacttttaggtgtgtcttctgtcatatagacttgcaaaaaacttcttaagaaaaaggcctgcttttattcatagcagtactaagagagtgctcttcatcctggctatgtaattgggaaccttttgaaattgtagcaaccctttgtccctctgtctaactgaaatagaggtccatgtccctgcaaatatgcattactgtacagcaatctggaaattagcacaggctgaaactggacagttcccaattgaagcccgtgctttatttgatatatttgcctacctatttatcatatatcttagttaatctaagtcgattatttaaatttacttatatcggtcagatcttttctagggttttgccagtatcggctaaattgttttgtcgatctagattagctattgtatctaccacccagaaaatcagtcaaagaattgatattatgtttcttttcatacttagtgctgcatcaattgggtttgacctactaagtcatgcttataactataatctctagcttgctttttgattgccaataagggtttcatcagggtttcaactgatgagttatctaggcgttgcttcggctcataaggattatatacaagttggatttagccgatgacaacaaaattttcattgattatcaaatcgtttggatttaatgacatcggagctccagtcgatgtatgttttaacctttggatcagagcttattccattatatcattattagccgattggtttctaccggtttacatcgttgtcttattatattatcattagccgactgtttttatataattatttactcaagtatcagaatatgcattggatatgtagccgacagttcaaaaccctatcaacatcggctggtatcgccccatcggcttgtcagccaagcgactctttagtgatcaacatatttatctatcttgtcagttgcaggatcaaactggctggcatgcccgcatatcatcaatatttaggacctgcactagagctaagcagatctcctaggccattgtgttcgtcgacttagttcgcgctaacacagatcagataccatcggccaagcgcggatttttttgtcaacaagacggaggagaaggtattgaccaagattgtaatggagatggatgtggcggtggagaccgtagttgcggaggagacagtggagatggtggagtccgaggattctcaagctacagcggtgggaatggatgccgctgctcacctgggaaacacgatgtagcgcttgcaccataatatgatggcgtgggatatctctcctagatttgtctacccatctcctatagggatgtccagctcaagatcgtcaaatccttagcagacccactccacctcgatctttgagtatcgaggtggatcgcgtcttgctggacttgtatggctatgccctccgccatcttcacgagaaacgaggttagttagtaacatatgcaccaattttcgcaagctacaaagcaggatgtgcaaactatgagcataccttgattgataggtccttgaagggaatatgcagctaacatggtgtctgttgcgtgatttcatccacggggcatggatttttcaatgatccctcagtttagggatttttcaaaatttggtgttagatccttcaggatatatctgttgtacaaatctttcttgaagcagttgagttgttgggccatcttttttagagtccaatcctttactttgttctgttctacttgagggatcgtgaagatctcgagcatggtggtccctaacatgtccttctctgtatttggaagatatgtttcttccacatcgtcgtgtgaccttgttttgagccaattccgtatactgatgggcacgtgagccctcacgacccaaccgctgtgtgacacaaacttccttgcggcatcttcgggggcaactggttcgtcgtctgctataactgctgttataatcgtctcccctcgaccttccttgcgagaccccattgtccgcgtaccctcttcgatccaatgtttgattggttgtcctgttgctcatcctcgtttccctcctcgtctacttcttcgctcctctcctcattcatgtattggtttgggtcctcgtttccctcctcatccacccagtattgacgcctactctcattgatctcgtccaagaggaactgttcgtcatcgcgaaatgccatatgttcctaacattaaataatacagaaaatgtaaattactacaaaaggtgcatggtatattgttatatctacattgtcaaatatgcatacacccatgggtttataatagataaaatcccttgtatgctctaaaaatttcatcattcccttttgtacccttgaatcatactcaatctcttctatacctccgaattttcaccttgaactcttctatacccctaccgttagttgttctttagttgactggttagtttgcttgaaaatgtccgttatgcccttggcttggttataggttagatgaaaaaaatgttaataggcttctggatggttggtctaacctagaaatgtccatgatgaagataaaaatctctcggcacaagtgcaccattggatccgtcctccaaccagaatcgatgtaaccagctatcccataaaacaaatcatttgcatttacctgcatcaacaagagagaaaaaacagaaaacacaaggggaaaaaaatcccaaatttctttcagcggcttgctgctccagatttcttctagctgcttgctaattgtttcagtcaacgaagcgggcgtgctgccctttccacgccggcaggatctggcatcattacagcaacaacttcatgcggatggtgggaaccaacaaggtgaagcagcagagatgacaatatccagcgagtcgtcatcctcgacggcaacttcgcaagatgctggaagaccacggcttgaagcagcagcaacatcaacggtgaaatcccgttgttgatgcggggctgacggcgacgtgcagtggtgcaggtgcgtcgtgcacctggagagcaacaagtcgatgcggggcccgacggcgatgctcgaccaccgcacgcacgacgaggcccgatggcgatgtgtaggcatgctgcaggatgacccagagatgtggccttgacagcgccaggcaggcacgacgcacgtaggggggaagaagagacggccgtgactttatgggcctggaagtagtggcgcagtttccgcaatgtcatgattacaacgtagagcagtctatgtatttgaggatatcagaccttggcgtcatggagggcctcgttgacatagtacaccgggtgttgtgctttatccctctcgacaacgatgacagtgctaacagaatagggtgtggcggcaatataaggaaataactcttccattggctgaggggcaacgactacaaggggttggacaagtaccacttgagcgcgatgaacgtgttctcggcatcctgtgtccactcgaatttgtccgggtttttaagtaaagcgaagaaaggttgtactcgttctcccatcctagccacgaatcgacttagtgccaccattcatcccgctagcttctgtacctccttgagtcttgtgggcgaattcatgttctcgattgccttgatcttctctaggtttgccttaatacctcgcttagagacaaggaaactaagcagcttccctgatggtactaaaaacgtccacttctccggatttaatttcagtcgatgtcgtcggagattgttgaatgtttccctcatgtcgtcaatcagcttgtcgcttgtctttgttttgaccacgacgtcgtcgacgtaggccaccacatttcggccgatcaggtcaccaagagccccttgaatctcgcgctggtacatgttgcctacactgattagctcgaagggcatcttggtataacaaaaaacatcgaaaggcatgatgaatgttgtcttctccttgtcctctttagccatactgatctggtgatagccggagtaagcgtcgagaaaactaaatagctcacaaccagctattgagtccactagttgatcaatgcggggtagagggaagtgatccttgtggcacgccttattgaggtcaatgaaatccacacacattctctacttgtcattggccttgcgaaacattactggatttgtgagccactctggatggagaacttctcggatgaaactgttgacgaaaaatccgtgcttggccaacggtgccggatctgtgttggcgcgaacttaaatcgacgaacacaacgacctaggagatctgctttactccagtgcaggtcagtttgatcctacaactgacaagatagataaatatattgatcaagaaagagccgatcggctgacaagccgatatagcaatgtgagctgatgtcgatacggttttgaacaatcggctatatatctaatgcatattttgatacttgaaaaaataatgatataaagacaatcggctgatgataatgtaataaaacaataatataatctagtagaaattaatcggctaataatgacatgataggataagcactgatccaaagattaaagcatacatcggctggaggtccgatgtcattaaatcgaaacgattagataaatagtgaaacatttgttgcgatcggctaaatctaacttgtatgtaatccttataagctgatgcaatgtctagataacttatcggctgaaaccccgatgaaacccttattggcaaccaaaaagcaggctagaaatcatggttctaagcatgacttagtaggtcaaacccaattgatgcagcactaagtatgaaaataaacatctagacaatcaagcctttgactgattttcaaggtggtagataccttagctaatctacatcctcctccaggtacgagaggtggttggtgtcctcgtggccttcgagagccacctatcgatgatgatgaagacaacgaaggataactataatcgggagtacgacctctggatctatgccaatgtccttgatttctccgagaaccgggggaacgtgaatctcgtcgtcgtctgttgttatcgtggtgttttcgacctcggccattgtcaccctgacttctccagccttgattgttctcgtccttgcagctttgccaatccagtcggtctcggtcctcatttagatagcttcatgattgccatcgctgttctgttatcgttgtggagaacaacgttggtgatggccgacgtccgtcttgttctcgtcattcccgtctccgcctgttcaagtggtcgcaaagatcacgattacctcggcaagtggggttttccaacttggtcttcttggcaatgcattatggggattacggcctgggtctaaactcaggtgttcgctagggacatcttcaacattgacattcccaactccatgttgctcttctccttgagatggggaacaagaaggacgctaggttgttggtccaattgtctccaagaaggaattgtttagattggctattgtagatcgtatctgtccaacctagtaatctgcttcagggaacatgactgggtccatgttggtatttcttaaccttatagagatataccgatgtaacacttcacccaggagtattctcaggtatcgatttccacagggaacgtctgtgtcggctcttcaccaggtacgtccaagtacataaagctaaggataagcaaaggatagagtggattcaccggtgagaaacagtgtctatggaaagcttaactttaatcctaatacgatacttcgggcactggccagcttactactcccagatatcgctctactacgtacctagttagggaggacttcagtgatcttgagggctgtcaccacctctacacccaccccacacctactgtgggatacggagcgattaataactacctagacacagcgtctaagcaattaataacttactttaatgttaggtacacactaaagcaatcactatattttgctggattatagtgaacgatgatctcgtacgctgattaggaactaaccaagagataattctcaccaagcaaaactaaattactcgaaagatatttctattataatcagagtagttaaacaaagcaaaagaaataagaagaggattaccgacaattccggaactcctctgacttcttctactctactctctctctaatctagtatacaataaagtacaatagagcctcttataattcagctcaagcttggagtgtgtgagtgaagtgaagatgtgaaatgtccattctaccctccaaccgccattagggagtcatctggactgtccctgccaagccgcatatcagacagctgtgggagtggttcggccgaacccatgtatggcccaataggcccacttttcggcctgttgctcctcctcagcctcccatatctatttcttcgagtggaaggaccatttgttgatgttttgtgtagttattggcccactcgttgtatggataggatttcacctccacttaagtctgattttcatcccaacttcggcggtttattacctgcaggcacatatgcaccaacactcgtggaatatgttagaaataaacctaatcactatgttggatactttattctttctgtttatgcaggtattgacggcataaatttggcatttaatagccgccaacaaactccccacacttagctctttgctcgtccttgagtaaaggttagagataaatttcagaataaaattatccaatatataatagaagcacataaattattcaaaactattcttgtacctgtgaacttcagcggtggctatcttactatcctgggtgattgataaatggaacagtcttgaatctggtcctcctcgtattctacttcagacttttgggggtttataaattttcccaaaccagcttttctcatcataatgacttaccctcgatcactcggatattttgtaatgtctgtggatccttaccaaggcatattttgctgaaattattccttattctaaaggctgtatgtgtggagtttggtaggcataattcggaacataccttcatcatatatattacaaaatcaaatacatggactcaagaagataatcgatcatactctcgaaacaaagatcgctaatttttgggtggaaagtgtatgatatgtgtggaaaaatggaaaataaagaaaatgcttctcctttatttatacctgcttctccaattttctccttcataattgtagagggggcatggccattttctttctttcttttttttccatgttgctctatatttttgaagagaaatatttttttaatagccatgcctttccctccttttctttttcttttccaaggatttttcttaggagaagaagggataaattgaatggagaatttattcatcaaagttggtttttctttttcagtggtagtcgaaatggatggaatggtgccaacttccagtgtagaagcttagcatcttatatggataacatagtggttgtgcaaccttgatcgagagagcatgagagacatctaacacgagtcacaaaaatttggtaaagctcaatataattacaggtagtcatacacatgcataaggttcatcattaatggcttggtgtatggccttgttgggtaggaataaagtcatatgaggagtaaggttccaaataaatttttgattttaaaaacaaatccccaattgtcatgagatagaacacaagaatttccttcatctcaactatatctcaattatcatctacttagatgcataaggttccctaacatagatagttgttcacaagtaacaagtctagtcaagaataaaatgtgtacaagatcaatcataggaaaattctattagttggaatttttatcttctcattaagcttgaacatattgtcattgaattttctgctcatgtactaggcatttgggggagaaaatgaggaagtagatgtgcaaacttgtcttccaggagaaaatgacaggaattggggctagtgtgggtttggtcgaaccaggtgttcggccgaaccactcggacgcccaatttacctgcatttttatgcagtgcttggaaatgttcagtggttcagagatgtggctgcagtttctgaatttgcatgtcaggagtccgaaaggtctccccccacacctattttcaacctacaactttatttggacacaaaaaatggaaatagaaaggcaaacattggggtaaacaccaatgtgccaaacttttattgaattaaaactgagataggtgccttattacattgagtaaggcaaaattgaaatgaaaataaactaatgcacctatcatgataaaatgagagggggaaggcctctagttagcacaataaagttcctccttccccatctccctaaaggcatgcttgaccttggaacataatgcacggctaagcaattgaaattcattcctaaggtcggctatttctctcctacgctccgtgtcacgttccctaagctcctcattctccctacggagtcgctagatcctcttggcttagtgaccgaaggttgaggggagttactaccctcaaacttcccggcctcccccttgatagccggcaaatatacttctactattatcatataaaacatctgcagcaatgcgtgagatcccgtgtagttaattactccatccattctttaatagatgacgacgttgatttttagacacatgtttatccatttgtcttattgaaaagttttgtggaaatgtgtaagatataaatcatgcttacactactaaaaggacacatgcaagtcagcattataggtgctggaatagctaaaaccagcgaaaaccggcacctatagtgttttccccaccttcgcaggctgaaagtacaaaaaatggtacgagtataagtgccagttgtagagaaaaacccttttttaaaaaaaaattgacacctttattatattataggtgtcggttaataaaaaatcacacctataatatactataggtgaaaaagacacccgaaaaaaccgagccaagtctggatactttttagctcacaggacgccgagagggggccttatcgactccccccccacctcgtctcgccctcctctcctcgacggcgccccccccctcacctccccatggtggcggcaccctcccctcaccttcccacgtcgacggcgtcgagcgcagctagatctgacctatgtggctcaagtgcgacgaccagatctttcttgcatttttttttgatgtggataatgattttttttttaaagttgattgtgcgattgtgttcaagttgatcgattcaggggtgattgggagctgcatcgagccaccttttttttattattcttgggacatagaaccaacacctttgatttctctcattagtaccacctactatgtgctggttttcccgatcggcacctgtgtggggggtttccaaccggcacctattcgcgtttctgtagtagtgttaaaagtatttttaatcataaaacaattcacaataaaacaaataagaattagcaactttttgagtaaaacaaatttaacgtccaaatttaacaactttttgaggtggtgtttgaatctcctgaagatgaagatgaagatgaagattaagtgtttcacgcaaaatgaggtggtaataacgtgtgattaattgagttttaattattataaacttgaaaaatagattaatctgatattttaaaacaactttcatatagaaagttttcgcacgaaatacaccgtttaacggtttgaaaagtgtgccacgagtatccaaaagttaatccaacttttgttggagaaaagaacagggatgtatttgaaaattttattaaaaaaaattatgggtttctatccaacatttgatcatccgtcttatttgaaaaatttataaaaaaagaataagttatacataaaatattattcatgttttacgatcaaataataataataatattaataaaaaaatttcaaataaaatgaacggtcaaatgttggtcacgaaaacatataaaatacttaagataggacggagggagtagtatactgcgacgacctgggttgtgccgtttttttatagtatagtttttcccaaagacattgatatggcaattcaaaaccgtaacagtcgcagtttgcatatagtacaattaataatgcagccatgcgggcaccaccaacgacgatttccgtcggcgaaatttgtcctaacgagctccgacgacgacttccacattgcagccgtaatttgccgaggtcttccacattgcagccgtacgtgccgacggcccgacgccacgtatgtagctttccgtttccaaactctgatcgcaacatatggccccgttcggtagtacttctagagtactgtttgattcacagtactgtttaattcagcttagggttattataatctgaattattagaaataagctaaaacaaaccgataacatattatgatagattattataatctataaagcaaattactataatctaatccactcaaaagatgctttttttattattgggtggctaacaactaacaaacagcttataatccaggaaaacaaacagctcacagcttattatatgtcggcctattataattcagcttatagtaatctggttcaataatctaaattacaacaatcttaagcttagacacgtgaaacgaggaaaccattgatgtttgattaattattttaaactcatgaaatgaatctatttgatattttaactctatttcaatgaaaataatttcacggatagtactgattattagtttgaaaagtgtgttaatgaaaactgtgacaaaatttgtatcttaataggaaaagaacatggcctatgtactctactttcacttcttgcatgtgtggtagctagctgcagtaaataattgactatactcgctcctctgttgcatattataagttgcatattataagttatttttattttttcatatcaaacatttttaaatttgattaagcttgtaaaaaaatatggcaatattttaaaacatttataaaaacaaaatataaaaatatattcaatgttatatattatttaatgaaattaatttgttgttgtagatttcgctaagtttttctataagcttagtcaaattaaaaaaaattaacttaaaaatataaaacggcttatgatataaaactaagagagtaatatattttgcagacccctcgttgagtatgatctgataatggattaccttacgtgtggcgattaacaagtcacttgacaatattatcttttgaatgaggaaagcacagggaatgttctttttacttgtcctttggctcattttgcttggaatgtaattgccatggtgttgaatttatttttggaatgtaactgtccctatctatcttttctgggatggtatgagagctatcaaaacaaaaatgaaatctcaagtggggatggtagtgtttgctgggatgttgtggggtctatggataacaaggaatgagtgggtgtttgaaaacaaactaatcaaaactcctttgcatgttgtctgtcatgtctttgtccctgatgcaaagatggaggctgctactaaaagaaaaaactgcgctgatttccatgagaaagcatgctcattctggatggtttgccggcgcgcggttgacaatctgccagaagactttgggtagcttaggagagtttgggatggtttagttcccaaacaaaatttttcacatagtcacatcgaatatttgaacacatacataaagtattaaatgtaaaaaaaaatacaattacacagttcaccaggaaattgcgatatgaatcttttaagcctaattgcgtcattatttgataatgtggtgctaaagtaaacatttactaaagacggattaattaggcttaataaattcggctcgcagtttcctgacggaatctataatttattttattattagactgcatttaatacttcaaataccgtatatccaatgtgacgtgcaagggtaaaatatttttccaaataaacaggccctttgtgtcgttttctgtcccagttgtgtatatacatgatgtggttagtgagggggcttttagtactttttgatggtctgcacctttcatagaaagctggatgtccccagtgtgtcgcaaagccttttgttaccctgttttagctgtttacttttgtaagactctgtaagaacctgttttcttctgggctttttacaaagccgggtaatatatttgcctgatatacaaaaacaagtgacttgatatattttgcaaatctctcgtttatttatatccatatacatatgcttcttcccttcaaagttaaattcctaatatttctcaatgtatatatgtacgtcattcctacctccagtctagtgaacgggtgcagactgcaatttgcatagtaagtacttattgatgggaaaaggaattaattttgaaattataattttaaaaaataagaacgaattgcagttttaagatataggacacatttatttaccaaggcttcccattggacctctttattctatcctatactttcaattagaccccttactaccttaggcacttttttatacttctcaacctccaacatatgttgcgttcttaagggtgtctttagttcgcaaaaagaaaatttttgggtgtcacatcggacgtttgaccggatgtcggaaggggttttttttgacacgaatgaaaaaactaattttataactcgcctggtaaccacgagacgaattattatgcctaatttatccgtcattagcacatgtgagttactgtagcacttatggctaatcatagactaattagcctcaaaagattcatctcactttccatgcaaactgtgcaattgattttttatctatatttaatactccatacatatgtccaaagatttgatgtgacgtttttagaaaaaaaaatggaactaaacaaggtataagtttactttcccaacttcacctcccttgttttctacgtgcacatattccaaattgctaaacgatgtgttgtttgaaaaaatatagaaaagttgtttttgaaaaacatattaatctatttttcaatttttatttagctaatactttactaatcataatgtataggtcgttttacgtgcctcccgaacacagtcttagcgtgcaacctgacctccactaccttcctcttgcttccactaccttctaacatccttcatttgcttgaaggtggtgccttgttcaaggcaaaggggtcaaaaattaatagaaaaaaggcaataaaagtaggtccgttgttaaattgtaggacaggagtttaacgtgaataccggtatgaaaaaaaaatctgaacaaaaatccacttgagaattaattttagaaataaagtgttgaccaggagagaaaagcgggtaaggatctgactttcgatcttactgatgtgttcaaacagtactcgattgtagtcgctcaagggactgtgttcggaggacccggcacgcaaaacgaaccacctattattacatgattaattaagtatttgctaatttttttaaaagtggattaatatgattttttaagcaactttcgtatagaaatttttcgcaaaaaatacaccatttagcagtttgaaaagcgtgcgcatgaaaaacgggtgagaagggttgggaactagcactcccgaatgcagcctaatctctcttcaaaaaaactagtattcctggtatcataggtggccaaaaggcccactactaccgaaatgcaaaaaaaaataacagcactatatatacagactatatatacagaaaatactaaaaccgacatcaataatgtttttctcacccaaggctggtccgcatagcgccatcggctagaacaaatacctttgtggagagatagatgtcgattttaaataaaaacatgcacctatattgttagtgccgattttttaaagaaccgacaactataatatattataggtctcaatttaaagtacaggcactaatataggtgttgttatttttttaaatttacacctatagaaaaaccggccaccgaacgactttatctgctcccttgtctagtcatccttatcaccacacctcctcttccgtctcctcctcctcctcctccctcctcctccacacttgctcccgccgcctcactcacacccgcccctactgtcgccgcacgcctacctcctcattaccacccctacccgctacatcctcccacctgtctccgccatgcctcctcggccttgccgtcgtcgtcttcgttctccatctccctctcagcatcttcgtggcgctgtggctggttaccggcaaccccgcggtgcgggatttggcccccgagctcaggacctccacagcagcgaggaggaaaggagggggttcggctaggagcggcagtggcctcccgctcgcccgtccctctcctctcatctcctgtgagatttattttgtaattttcgcctctcctctcatctcatgtgtgatttattttgtgatttctgattggattgtctcttgtcttgtgatttattttggaatgatcatgtgattttcgattggattaggatttagtttttgaattaaatttgtgatgatttcggattcagttatgagctcaaagcatcgagtcgaatcaatctaatgcatcaagctatttttcttttgcctcgcgtgcacatcaaagatgtcggttgtgaaacttacatcaatgacttggggtttcatcagtgccgcttagcaggtgccgtttgaaacaaccggcacctatagagagagctctcaatcgacaccaaaatccttttgtgtagtagtagccaggtctagctatgctggcccagtctcgacacaacatgggcacaaaggttgggggctgtatcgtggttaggctgacactttagcacggccttgtgtcacctagcacaacctactatgtccatattttcccccattttctgctatatttcctatactttcatatctttccttattttcccatgttatttttccattttcccctctcacttctttaccttttcctttctttcaactattttctcttttctccacacacaccaactcgtgcggccattggcccctcttccattcctgctattctcgctccctcagccgtggcacgtgttcacaagccgtgaccagcctataggccactatcacacccattccgggccagcaaggcctaccatctgattgggctgtgtttgggctcaggcattggcacgtgggtcggcatgtcacaaaatattttagcagccatgtcttaagggtattaacttgatgagccgtgccagatgatctatttggctctaccactatcttatattatgagatagaagtagaagtagattagtatattccttccattttaaaatatagcaacctttggaattttatgttgagattaagaagtgtgtactagaatcgaatagggatgagtgttgagatgagaaagttggttgacaaattaaacgaaagatgattgatgcgtttagaggagtgggtaggtgaagaattagttatattttaaaataaatttgaataccaaatatagctataatagtattttaagagggagggagtagatcgtagcaggtggacaaacacagctctgctccatgctatctataaatatacgtacgcgccacagacaattggagctagcttattgaaggaaactaaaggaagaggcagctactcctactcatctaggaaaataaattcctagctagttaatgttgtacaacttacatgcgtccatggcattctggctacttgcagacctgctgattcttctagcttccgccgccgagagcgtcgccggccagcctgctgccagttgccaggctaggtgcggcgacatcgacattccctacccgttcggcatcggccccaattgctctcgcggaaagggatttgagatcgcatgcaatccccgaaacgacagcggcgagatggtgccgacccttgccgccgccaatggcaccatccatgtgcagagcctgttggtagcgccgatcccggaggtcaaggtgatgctgccggtggcgtaccagtgctactactccaacaacagcatcaccgactcgttctacggcgaggtagacctcaacaacacaggcgtgtaccgcatctccgacagccgcaacatgttcgtcgtgattgggtgcaacaccctgtcctacacccagaacgggaacagcggcggcaaaggcccttacgccggcctctactacaccggctgcgtctcctactgtaacgactcgtcgagcgcgcgggacagcatgtgcgccggcgtcggctgctgccacatcgacatctcgccgggcctcagtgacaacgttgtctccttcgggccctggaagcgtggcttccaggtagacttcagcccctgcgactactccttcctcgtcgacaagaacgagtacgagttccgtagcgccgacctcaagatggacctcaaccgaaccatgccggtgtggctggactgggccatccgcgactccgttacctgccctccactggaggtgcaggagaagaaaccggctgggtacgcgtgtatgagcgacaacagcgagtgcgtcaactccaccaacggtcccggatactactgcaagtgcaagcaaggctacgatggtaacccctacgtcgacaaggaccaaggttgcaagggtaagattaatgtttttattttattactcctagttaacagttttgctaaatatatagtgccaccattttatttttacctttcgttgtgtgcaccaaccctgttggtgtttaaattcattaactaatttttttttaccaggtttcatttgatcttttcactatttgatgtaggcgcaaaaaaagtgaaaaaacgtattgtgtattttagtaagcatctatatatacacggccgtgtgttgcaagtttcacaagttgcgtaattttgcgtgtgtgtgatatataggatttgaacgggaacctgttcttcaagtagcgtccttaccatctcacctataaagaactttgtgcatgcgggagagatgcttattcttttgacttcgcccctctaaaacttgtaatatataaattgcactataaatgatatcaaaaggaaaatttatcaaccacaaacttgtagatcacattgagctctacaatttcgatatagagcacagctccatctgagttcatttaaaaacataaaagtttgtttattcaacaatagatttgagattttgtaacgaatatcaggacccgtaaaaagtctcgaatgaaaaaacattcaactatatagttgtagagctctccaattttcataaaaagattttcatcatacgacttcatatatatcaagatactactcctttcctattgtagtagtgctattatttttaagggtggtattttcaagagaaccgcctcaaaagttaatttttgcgtgcctttccatataagaattgccaaaaaatgacatttatgtaggaagcccatctgaaaaaacttgtaattctatgaaaatgtctaaactttaaagatttatggaaagttcattttaagttcaaatgaggtgaaccaaagttatatatgacccttacaatatttttttatttatatttctgttagtataattgtttacttatcatttacctctatatgagttggtatgttatctaacgtgacattagtgaatgaccatactaaaagaaatgttctaagaaaaatattaactaagttttactataagaagtactagaacgatctcggagaactttagtttacctcaataggacttaaaatgaattatctataaatttctaaaattttgatttcttaaagaactgcttatacaaaaatagatactagagcttataaagatatttactacaaagttgtagatctagttaagctctacaattttaatatagaatgtctttatccaagatcgtttgaaatactcaaaagttcgttttcaaaaatagatctgagagtttgtaaaagaaatagatctaaacgtattatccaaaatgttgaaaaaaagtttcaatgtagatttcgtgaagagcgacaatttttataggcggtttcctaagaatttgccagttaaaaaatattttatacgtggtttataatcctggacagccgaagccatcttcacacaggtgattttcattttgagttgcctgtcaagagaaaataaaaagaagcctaagcctacgatttttttttactagtgacagttgatctaacgactaatatatatgatcctttttatatgcacagacatcaacgagtgtgatgtgtccaacaagaagaaatatccctgctacggcgtctgcaacaacatcccaggggattatgagtgccactgccgtgtaggataccagtggagtggtgaaggccccaagaaacaagagtgcagcgcaaaattccctcttgcagcaaggcttgcccttggtacatatgcacctcagcatttttttaaaaaaatataaaataatatactatatatatgtcacattgagtttacaccaattcaatgatttcccattgactatgtttttaattgtttctacaatataccattcaaccaaacaaagaatttcttataatgcctaaaaatataagggttgacagttaattgaaaaaactaaagaaaaacaacaattttaaaaaattagcctcctagcacatgatataagaatataagtgtgtataagtttcatgctttttgcattttattattttttgtaaaatataatatgtctgttatttacatagactacttttctgcatcgtttgtatatttttatacaaatcatctttcatgtgctacacaaaatatttttgttattttgtttgtaagtgatttctctctaatgccacatagaatgacttttcaaaaaaaatacatgcaagaaattttgaaacataaacagaaaattgtatattgtgtaaggaaactgcactaaagattagttacagcaatatattgtgcacgccaatattaatataacattagttgttcacaataatatttatcaaataaaatgagccttcattcatactccctctacccaaaatataaggcacaaccactttttttccatgtctcacaatataaggcttgcatacattagccatcacctcttggttctttaaatttggtttattttaaatcatctaccgttaaatcctccaatcaaattgcttgcatgtatggatgtgatccaatcaagaaggtgattaaattatttcttggtctttgtgttatgagtggttgagccttatattttgggatagagggagtatttctattaaaaaataatactgcaactcatatatggatttgttatgtttgctaataagttttttttaactttcgtaggaatcactttgggattttccttcctaattgttgctgttcttttcacgctaatgatgcacaaaaagcgaaaaatgaatgaatatttcaaaaagaatggtggttcagtgctacagaaagtggacaatatcaagattttcaccaaagatgagctaaagaaaatcacaaagaataattcagaagttcttggtcaaggaagctttggtaaggtgtacaaagggactcttgaagacaatactccggttgcagtgaagacgtcaatcgaagtaaatgaagctcgaaaggatgatttcacaaatgaagtgatcatccaatcgcaaatgatgcataataacattatcaagcttttgggttgttgcttggaagtggatgttccaatgttggtgtatgagtttgccgctaaggggaatctgcaagacattctccatggtgatgccaacatccctctcccgttgggcttacgcctagacatcgcaattgaatcagctgaaggtctaaggtacatgcactcatcaacaagtcgtaccatacgacatggtgatgtcaagccggccaacatacttttaacagataagtttatccccaagatctcagattttggaacatctaagcttcttaatgtagacaaagatttcaccatgtttgttgtaggaagtatgggctacatagatccagtattccataagaccggccatttaacacaaaagagtgatgtatacagttttggagttgtactgctagagctcatatgtagaaagccaacaatatatggtgaaaattgtagcctcatcattgagttccaaaatgcctatgatcaagagaacagtgggaggataatgttcgacaaggagattgcaaatgaagaagatatcctaatcctagaagaaattggcaggttggcaatggagtgtttgaaagaaaaggttgaagagcgacctgatatgaaggaggtagcagaacgatttgttatgctgagaagatcaaggaagtgtggatagggaaattatagtgtaagtcctcaacactgtgagtagattactatcgagggaactcctaagcactttggtgccagcatcagtgcaagaagcagtgcgatgctttctgcaccagccactccacttaactagaaggtggacaataggaagataggagctacaaacaaaaatatgtattttgtggtaggcatgatataatcaatgttatcaatcggtgtcatttcatttaaagtaaattgtgtttttcaagtatgtatctcctatttatgttttctgtaatttgaatcgatttttgtgtattgtagtacaaaactgtgtaatctattgttgttgtgtggaactcaggtcatgttatatattgtctatggttgttttgattgtagcacgtggcttggaaatatttcattgatgtgcatgtactgtaacattgcttagctatatctaaagtaaaaaaagtcattatccttgcaaagattttagtgtaatcttgcatagtttacagagatagattggcttgccacctatgcattattgggttccaatatgtgccaagaaggaaatgtctaacatttgttctcaaaatattttatatttctatacataggcccatttggttgggcttaaactcctaaatttaacttcaggagttggatatagagtggagttgtggagtagcctaaacctagctcaacttttctagtttattttataagagcactctagttagctccgatcctttttttttgtcaagcagaaaccttttggttgggctccagctccaagacaagttggagcaagagctagagcaagaggtggtgccatgccaaacaggcccatacaccagcaaaaatgcccatgcattacaatgtatcaagtcaacctttcgcttattcatcttctcatacattgcaacaagaaaaactaatataataattaaaaaaatcacatgattaggttacgtttcaatgtcaatatagttttgaagatgatgcggtgaattttttggataatggaataaattcaagcctttacttcaaataagctataaccacttattacaaaattctctcaaagagagcaaacattcagaccatgtcatagcgacgggcgcatccggcaataacagatccaatatacatcgtcaccactcagaccaacaccatgtagacttctcgcagcatgactgctagcaggcaccacatgtaggcgtcagcgttaatgaaggaacgttaacatagagatcgaacgaagaaggcaggtagatcgccacaacccaccttgcagcacgggatgacttaatgttgacatccccaaccatgagtggcgttggacggttggagtctgatgatcattattggtggcactagcattatactccctctaacgttttcaatttttttctaagttaaacttatgtatatttgatcaaatctatagaaaaatatagtaacattttcaacataaaataaaccaatttaataaaaccaattatattcaatgctagatttaataaaagcaatttggtgttgtaggtgttgctatatttcgttataaatttaattaaaattaaataagcttaacatagggaaaaaaatcaaagtgtataatatggtacaacagcagcagccacagccatcagagggttcagggtatcaccgcctccgtgcatcttcatatgtgatttcctttgccttccgcggagggcggttcaaggggtgcagactcggcggcagctgttaacctttgactgcttgcctttgacaagatgatgacgggaagaggctgacggcgaaggacgtcgtggagcaccggtggttgacggggaggcgcctccctgattttagattcacaattttttcacattgttttgattagcattgtaatctgtcaaacgagactatttaaatgttgttggtcgacttaagtttatttaatcagattgattgccttcaaaattttataccaaatttgtttgtaacagaagaaattcgtccatcctattgccttacatcttggcaagcacgctacaatactcttcctggacagaggagcaatgatggggtaaaaaggagcgtcatcattcgtccaattaatggcttatcaaaacttgaattttaaaatttgattttaaagttggttttttgatttttttttcaatgtagttttatttttcagctttggcttttaaatcactaaggacacatgtagtaatttttacttgcaaatcattttttatccctaaaaataagctgttacggcttatataagcagcaaccaatgacccaaaatcacaagaagaaaaactggcaggtaggtccaactgtatgtctgcagataattctttcatcccatcggtttaccactacagacgctgccgcgaccgcgagatacaaaacttgaacacgactgttttcaattcacaagcaccacatgcatggcacataagtataactgaaagaaaacgacggtacatgtcttaggctattgcaggtgttatgctggaccagcgtctaagcttctatcttgtttcataattagttaaaaaaaatccatcgcattgcgtgatggctggatttgcggcatcaagggaatggaaatgaagagattactccctccgtctctaaatatttgacaccgttgacatttttaaacatgtttaaccatttgtcttattaaaaactcactacaccatgtaccagaattcgcgacagatatctgttgggaaatattgctattcaacgtcatatgttctgtcgagaaagcattgtgacagctggtctgtcggtagttctcagaaaaataaggacataaagtctgtcggtaatgttactgataaattaggactaactatctgtcggtaactccgtttatgcgagcgcgaggaggccaggccaaaaatcagatgtgttcgcgggctggggccaaattttcgtttccctgcgcgcgcttagtaatctccggtctttatctctcatccccttccggacaaaccctagacttctctcacctcctccgctctcgcatctcgccctcgcaaaatcaggcgtgcgccgccgctcgctctcccccggctccccctcgcccgcgtacgcccgctctcccatcgccgtgtctccactctccattcgggctccctcgtccatctagctattggcgctgccctccctcttgtgtcatcaggcgccagcgccggcgccgccgcactccattcccatagccagccgccggagctggtgtctcctccatcctcctggtcggtctaaccgccacgacattggaggggaatgggggttgtcagatccggctgttccctaccttggggcgactggatccgtccagcgccgcatggtcctcctgcagatccccattttcagtgataaacgggtattttcttttaattagtcattcttactttgtgcgcagtagctagcatgattagtttgatgcgtttatgctcaggtgcgagggccacacgtccaggggtgggcaggcttgttgtacttcccctttgcggcggtactcattctcgctgaccctcgcatctcctcaatatacaagctttacaggtttcgtatattaattatcattgctttggatcttaaataactctgacaaatctttttaacttaattattttgctgatcaaaatgcatttgttatcagttttcaagaaagatatataacttgattcaagaatttgttaatcctgtacaaagtttagattttgactatatatagtgcatcacggtcatctttgcttgcctgatcaggaaacgtagacagggatgttactccactagaagtcttgaacataccttataggtgttgagctcagcagaaaatttatatgttgaactatagaatttggataattacttactcagactactaaattaagtatataaaatttgtggattaatgttcattccaatccttttaggggcatttacaaatgcagagaatgcaagtacttcatatgttctgaatatatgcaaactaaagtattttacagaaattcggtatgagtatattaattcaagttggcatttttatacttactgatttgcacttttaccattttgtgtccttatcttcttagcctgaaataaattggactttaattaatgcaatccatctatgtacctctgaagagcatgcatccagttgagatcactgatcattaggtgcggaaaatcttagcacttcttttctctgaaataaactcctatttccgttgtcaaaattatatatatagaaaaatgctttgcaggttagttcctgtagatcttgtttcatcatgtactcagtggttttgcttcttgaacatataataattctcggtttctatactttcctttgatcactaaaaattccagaagtgatggtggcaaacgcatttggataagataaatcttaatttgggctatgatggagtgagtggtctctgttgtttagctatgttttagctgcttaatgttctgtgacaaaatactttatgttaagttcctgtattgcaatttagacggtcttgtcttaagggggcataataatctttagttcctgtatgatgaggtgatctaatcatctaaggcttcctgctgcaatattgaatagtagtgtaaaggacattgaatgtgggcaggttagtatttttgaatcttctagtatgtattcacatttttattgcactactaggccacctcagtttatagattttagtaaattagcaatatacacaatgaaaagaaaactgttgtgttaaggaaattctttatttgccatccagaatgaaaagaacatgaggttcagtgcatccagttaatgtgttgcccctttgttttttaagatcaaactagtatttcacagctgagtttaaagagggaataaattctgatttactcggtatacatacgctattttgtttggccaacctgtgctgctttttacccatgcatgctgttctagttgcggcatctgctatgctctgattaactggcacagctactctggtatgattagctattttggactttggttaggattggaggctgtgctgtttggctattggttttgcaaaccatgactattagagggcagcaaacatctgattatacactaattgcttttgtatttccttttctttaatcttatcttaacatgcactgttcaagaactaatgcatgtacctcacttgttttcagattcctcatactggatagtgtccttaaccttggtggatatggggctgtagcatatgattaggtctgaactgctaagggtggtgctactgcctctggtttttccttagttcaattttatcacctcttaatcaagtgatttatgtgaagccaaaaaggacttgccacccttaggatcgtcaatgtacaaattctttcttagcttttttttttttaattcacaatcctctgttaaaatgctgaggagaatggtcaattggtcatgtacatgatgaatgaatgaatgaaatgaatcagacatttgagggtggttgtcattgtgaatgtcattagctattgaaattggtatgctcatgtaaacaggtgtaatggacaataatgtgaaatagttttctttttaatggtagcagagcttgctgtcagacagtgtgtcggcaaatctacttttttcatcaactcgtctgtcggtaaagatgtttctgtcgctagacatgtctgtcgttgaaggtaatataggggtcagttcatctgtcggtaaagatttatctgtcggaaaagccctttgccgacaggctttcgcctgatacacgtaatctgtcggaaaactctctaccgacagacaggatgatgctaaaggtggtatttaccgatagatgagctgttgcagctttcaggtcatggtgtagtgacttttgtgaagtatgtaaaactatatgtatacataaaagtatacttaacaatgaattaaatgataggaaaagaattaataattacttaaattttttgaaaaagacgaacggtcaaacatgtcttaaaaaaatcaacggcgtcaaatatttagggacggagggagtatatggtaagacttgtttgcgactctagggcagcagagattatcttacagaacatatcccagacgaccgtcagggagcaccattggtaccatcattcgagctggtgctggtcctctaccatatatcatgggctgtaacgaaaatgtccatagagacaaatacaatgtaacagcagtggcggatgcagacaaagcatttgaaaacgaagaaatatttgtgaataaaatttttacatgtgtgttcttagaaatctaaaagcaaaggttgaaaaataaacttcaatgagaaaatttcaaaatcaactctaaatttaagattgaaaatttaaattttggctgataagcataagcgaaaagatgaggcttcaggattcctagcattggtattcggagttacttaaatcatgtttcatagaatttatataaagatgtgttaacaaccaaatttggaatcatcggtgtcaggaaagaagattagatcgaagcgaagcggaggcggagatcgagttcggaaacagagcaagaatcggctggagtccagatcggctacgattaggatcggctgggtctgagtcagactaggtaagccggtacagccgattccgacaatgcaacttgatgtatgatattgggttgaattgaggcgcttcaaggtgattgccgcacatggatagagtcctgagaaggcaattgtatctattaattaggatgttttatgtaatctccttagagatacgcttgggcaaaagtctgccgcaaagacatatggtatcttagagtttgttagagatagtagtcatgtccgttatggacatatcttgtaattctcgggtataaatagacccgagccctatgtaacttttaacacacatgttcaatacaatttcggcgcatcgccacccttttgctttagttttgtttcgacgagttcttactttcaggttgagctgcatcggtttcgatcttcaacaagaggtaaaacttgttatgacggcttgtattctcgggattagtgctttcatctttatgacactctaatcttgtttatgtaattcgtcgagttatcatatatcttacataatctctggcaatatcgctatctaacctacaatcggctaagatctatcgaagagggcagccgattaggttagattttgacgttgattcagattatataagatatctaccactctatgaaacttccagcggcttgattttctagatattgttcttcttttcatatttaatgctgcatcagttgagtttgatctattaagtcgtgcttagaatatcaatctctagcctgccttctggttgccgattagggtagcatcagagtttcagccgatcttatctgatttaactatatttgctctatatgcttcattgacatgttaaatatgccctttatgtcaagatattgttgtatctaagtacattaggcctttgtttgatatattatacctgttttaatatcctgatatagagtagtatcggagtattagccgatacatgctagatctatctaatcggctatgctataaacatacatagtcctattattaatatatatttcgatctaagtgatttatactgtctcggcatagtgaccgatctatcccaatcacttgatttaagtatatatcgatataagaactatatattggaaatatctacagccgatcgaatagatttagttctttattgtctatttacaactgccgatcgattcacatatgacatcggctcaaagataaatggtatgtcatcggcacctagtcgatcaactatcatttatagatttaaccgcggtttgtttgcttctatttcttgttgattacaggatcaaatcaactggcacgctcatacattcgaaggcgagctttggacctgcactggagttaagcagatctcccacgcttcgtgttttctgtcaacacgcttttggcacgcctggtgggacatttaagaagtcagccaacaattcttcttcatggccgagaaacaaccaccaccaccatctagcccaggctttgttaaggacaagatgctaaagctaggattgactgacgtcaatgaaggaaacgtcgtgccgatcgatccagaaaaattcacacctgagcagaagaaagagtttgaagcaatgttgcagcaagtacgggattagttcttgaactcattcatgtagacccgcaaggggacacttgtttagaagtacaaaataaaagtggttgctgatgatcctgggaccagttcttttaaggatggagatgggaaacaagctccagacggctcggctcagccgagtatcaaaggtgctactgacggctttctaggaaatcaaggcgacaattctcaaggagtccatggagtacaaggtgacggggtgcatggagttcaaggtgatggtgctcaggggctgcagggaggaaatcttaatcagaatagtgatgtggcacaggattttttcaataacttccaagatcgggttgattacgctgtgcatcatgctttgatcaatcagtctggggtgttagtcaatagcttatcaaacatgatgaagtcaatagccgatggttcaatagctgagcatcaggctgcaggcccggtttatttgcaaggaggtgtcttcccaaattatcggtctttgattaccgatgttcagccatctactcaggcggttacctccgttgcaccaacaacttagccaacggcgccggcaacaactcccctacctgcttcatcagcgatggcgccaggccagccggtgaaccctcggttgttaatgagagagcagccacagcatggcgggcaggttgtgaatcggctgacccaagatcaggttgctgccatgtttctgccacctcaatctgttgttgatccaatacatcagcagccgattcaacagacacccccaattcagcaggttgtacaaccaatccggcaacaggtcatgcaaccattcagcaaacaccaccaaggcagcagcccctacagccgattcagcagacgctgttaagacagcaaatcgttcagccgatccagcaccaaggttcaataagcgcatcggccgggtttgcaacgcctggtggtcagcctgtacaacaatttttaaaccaagttgtcccagaacatttggttcaccacgtacagccgggtggcacagtaatgcctcaagttattcctgagcacttggtacgcaatatccagccgaaccttcataattaccaagggggtaacttgaattatcaatatcagcctccttccccgcaagcccaatatcagctaggggcattggctcaacctcagtttgcgtctcaatacggtcagttcgagcccatgcaacagcagtcacaaggggcagctcagcaacaaccgtgggccaatgtgattgctgacgtaatgagggaacagtttgggcttaaaccaaaagagactggaagtttgtatcggcagccttaccctgagtggtttgagagagttcctcttcccaattggttcaaagttctagacttctccaaattttcgggacaagatggtgtgtcaacttatgagcacattagccgattcttggctcagtgtggtgaagcatcggctgtagacgctctgaaggttaggttattccggttatctttatatggatcggcttttacttggttttcctctttgttgtatgggtcgatcaatagttgggccgatttggagaagcaattccacagctatttctacggtggggttcatgagatgaaattatctgacttgatagcgattaagcagcggcatgatgaacctgtgcaggagtatattcagagattcagggagatgaggaacaaatgcttcagcttgagtttaactgatgcccagttagccgatctggcctttcagggtatgattgctccgattagggagaaattctcgtctgaagactttgatagcttgtcacaactgatacagaagctaaccttgcatgagcataggtctgcggaagttaggaaaagctctaagaaggttaatcatgtttgtctgtacatgtatgggtcggatgatgatgaggatgattctgaaatagctgcagccgaatgggtgaggagtaaaaaggtcataccatgccaatgggtaaaaagttctggaaaagaggagaagtatgactttgatattactaaagctaacaagatctttgatctgctactccgagagaagcaaattcaacttcctgctggtcatacaatcccatcggctgaagaattaggcaaaaagaggtattgcaaatggcataattctaggtctcattctactaacgattgcaaggtttttagacagcagattcaagtggccattgaggggggcaagattaggtttgattattccaaaaagccgatgaaggtcgatgataacccttttcctgttaatatggtgcatacagctggccaaatagccgatagggtccgtgcaaggggttttcaggcgaattcggctaagattatcgacaaatatcatgaagaatacgatgatggttttgatccccattggggttgtgagttctttagattctgctggaatgaaggtatgagattgccatctattgaaaactgccctgggtgcagtgatatcgttgagagctcaagccgatcatataataggggtaatcgactaaggcagacaagagtttctgttcatcaaagattgggtccagtgaatcaagatcatggccaagaggacaatgtaatcaggaagaatcaatggtgtccttctggtattttcacgaagaatcagaagaacatttaataaatctagatttggaaataaatgtggatggagaaacataagaatttctatatgaacagaattggttgtagaatggtaagctctaaaggagaagtgttgactctagggagatggtatttcatgtactctagagatgtttgggaaaggatccaaaggaaatatatcccagagcaacggttagaggctagagaaataaatggaggggttttgtaaaagtcaaaagaaataaaaaggagggttttataaagtttgaaataaagaaggattttataaaatttaaaagagagcatttaactttacaaataaaatttaggtccaaagtaaaagagattaaaagaaagtaaggttgcttcaaaggaaaagtcgagaagagcacaactaaaacttttcgcgaaaatttttccctgaaaatttgagtatattgcatcaacccttcgctcattcatcttctcatacattgcaacaagaaaaactaatattatagaaaaaatcacatgattaggttacgatttcgatgtcaatatagttttgaagatgatgcggtgatttttttggataatgaattaaattcctgcctttatctcaaataagctacaatcacttattacaaaattctctcagagagagcaaacattcagaccacttcatagcgacgggcacgtccagcaagaatagatccaatatacatcgtcaccatggagaccaataccatgtaggcttctcacagcatgactgtcggcaggcaccacatgtaggcatcagtgttaacaaaggaacgttaacatagagatcgaactaagaaggcaggtagatcgccattactcaccttgcagcacgggatgacttaatgttgacttccccaaccatgagtggtgttcgaaggttggagtccgatgatcattattggtggcactagcattatactccctctaacgttttgacttttttctaagttaaacttctatatatttgatcaaatctatagaaaaatatagtagcattttcaacacaaaataaaccaagttaataaaaccaattatattcaatgctagatttaataaaagcaatttggtgttgtaggtgttgctatatttcgttataaatttgattaaaattaaagaagtttaacataggaaaaaaaatcaaagtgtataatatggtacagcagcagcagccacagcagccatcagagggttcagggtatcgccgtgtcacaccataaagttcttctcccaagcctaaatcgtattaataaatgaccccaataaattgtttgagtaatggcaagagagaaaccctaatttaataaattcaattaataatcggaattagcatgtggaatttttcttgggttctacatgtcaaaatatgctaacaggatttttagtgaaattttcagagctctagaaataattttaaccaattaaaattgagcacaagcaattattaaacccctggaaaatccttttttctttttctttttcccctcctttttccctaaatgggccgtcggcccatttcccctcccctttctgcccagcaagtggcccagccgccgccccgcgccccctcctctctccgggacaccgacaggtggggcccacctgtcgggcccgcccccaaccttcggccggcgccgcccgcgcacgtcacccactccccgcactcgccctgcactcccctgcaaccgccgccccactttcccgcccgcgcccacgttcgagatggctaggattcaaaaacaaatcccaccactctccctctctctccacctcccccacttcgccggccactccctgcctctctcggccacgtccgacctccccagacctatataaagcaccaccgcttcctcctccacttttttccctctttcgtcatccactcccgagctctccttcgccctagcaccgtgcaccacccgccgccgccgctttagccaccttcggccgccgatcgtcgccgctagagccgtcgccgagcctcaccgtcgccgtcgtcgggttcgcaagcccgcgggccacgccgtccaccccttccccatccaattccgccgtaggagtccgctttccaccgcgcgccggtgagctcgccatggccgcggccttcggccggcgattttgcccgcctcgctctccctcactaatctctctcggttgtttccctaggttgccccggagcccgtccaactgtcgctgtcgttttccatcactcgccgtcgtcgatcgtcatcagtgagacccctccccttttcccctctctcctgcgccgcctagccacgtcgccaccgtcggccgctcgccgccggtcgcggcctcgcgccgccgccgctagcgccgcgccgccgctcgccaggaccgctgggctggcttaagccgctcgcgcatgctctcggccatgcgccgccttcgccgtcagatctactcgtgttctttttatagtaaaaacatagtgaatcttctaaatatcatagaaaattcatccgtgctccgtttaagcccattcaagtctcagtaaatcaagaaaatgcaaagaatccattaaaaatggttttgttctctgtttcagtagtgttatagcctatttgcattgtttgctttgtatgtcgcatagattccggctctcccgacgctctggtgtacttcgaaatagtcgtcgaggttcctccagccgcagagcaaggcaagtcatgcttgtcacttgaacatattgatcccatattgcaaatgctctattattttcctttaaatattgcatcgttttataatgttacaatgggatgattacctactgtctcagccatatcatttgttatcctgttgctttgctagtttgggttgtaacatgactagatgttggattagggaatgcttagccattcttagttcaactagtacacaatgggggaattacgttaatgcatagactccagatgttggattagtgccactgctgtggtgttggttaattaaaatatattaaatggtgggctgtgggtgcatggttttgatggtagcgcccatagcaattaaggaccggttcgcgggaaaccctggaagaattcctcgtacttaccacaagccagcataggcaacggctgggcttgtagtgtagcttccttctagctgacgcatccaggcaagggtgggcgtgatggagttcggatgggccctgcgacggcctatgccgctttcggattcacttaggcacgagaagggactgcccgctgccttgcgaggactgggggtgaaacctgaggtgtggtgtgcttgattagatggggttatgcgaagggtcctatcacggcctccttccggtatgtcgtggtggcatgtcgacgcacgggaacgtgtcgtggggctgtgtcttgtgggtacagttgcaaaactctgatcagagtaaaactattcgaatagccgtgcccgcggttatgggcggtcaaccagattcaccgtgattagtctcaccctagattagtttaatggaactgattagttcaggtggtggtttgggcttgtctcaacgtggtgtagcgttgagcagtgattggtttaatattggctaattattacaaatgttttactgctttcaactactgtttataaatgctagctttatacaaatgaactcttttagccctcctttggttataccttgcatcataccctctgttccggtatgacttgctgagtacagtgggtagttcttgctctatctcccaacccttagagttcgattatgcgtccgatggtggtttctccgaggagtaggcttcgtccgtgccgtcgaggatgcctgtggagtggtgttcccgctgctatccaagtcaaggcttaggtcagccgatggtattatgtggctagcaggaagttgtatatgtttctcccgaattagcaagtcaaaaattttatcagcttttgtatatgtttctctgaacctctggatgtaatcttgcgcggtttcatcatgcctctgcctaactgctgccagatcggagagcttcatctcatgggtcccactgtagaagtagctatgtaattgcttctccaaatcgacccaaccttgaacaaaattgtaaggcaatgaagaaaaccatgtgaatgctgatccggacaaagacaaaggaaacaactgaacccttaaagcgtcaaccgccgatgcctctccacactgagccaagaatcgactgacatgttcatatgtcgaaacattgttctgtcttgagaactttgagaaatcgggaactttgtatcggtttggcagtggaaccctctcaaaccgctcagggtatgggtgccgatacaaatttccggtattctttggcttaagtctaaactgttccctcatgacatctgcaatcaagtcggcccatggcctctgttgaggtactccttgcacctgttgttgtatcggctcgaactgattgagttgaggaacatattggggctgaggtaatcctccttgttggtactggatgcgaggcgaaggaggttggtattggtaattcaagttaccctcttgataattctagaaattcggctgtatattatgcatcaaatgcttaggaacaacttgggctgcaaccgattgatctggttgtacattatgtaccaagtgctcaggaataacttgagccacattctgctgtctttgccgattatcaggtgttctcaacccagttggtatcagctgcaccatctgctgctgaatcggctgaaccgtttgttgttgaatcggcgaaaccgtctactgttgaatcggctgaactgtctgctgttgagtcggcgtcgacaacactggtccggcagttggctgagttggtaggaacattgaggcaatctagtcttgggacagccgactaatattctgaccagcatgttgcggttgctctctagaaaagagacgaggattaattgtctgcctttgcaccgatgatggcgcagctgagatagccggagtcgaagctgctgccgtcgactgaactggtggtgcattggaagtactctgttggttacctatcaccaagttcctgtaatttgggaagacaccacttggcaagtagactggccctgtgttctgatgttcagctatcgtgccaaccatcacagatttgaacatatttgttagtgtattgacgatctctccagattggttgatcaaggcatgttgcaccgcataatcaacttggtcatggaaattggtgcacctaggaggttcttcttgcacttcagcaccatcttcgccaagatcttcaaccacaccatcctgaagcccgtcacctttgtcacccaaggcatctacaacacatttaccaccttgagatgagcttgagccaacttcatcagcagcaaccactttcagcttgtatttctgaacaattatcccttggcgggtttccttgaatgagttcatgaacttgtcctttacgctactcatcatctgttcaagctcatgcctctgttcggacgtcagtttgtctagtgtgattggaataatgtttgtctcattgacctcagactcaaccccagttgatggtagattagttcctggaggtttcggaagcttggttttcggaggaattggcggcttgcttgccgacgacggaagattgcttttctgttgacagtcagttggtcagattatgcgagtccccacgtcgagcgatgccagaaaagcagtgtgtgaggtcggaaaagaacacagcagctggcctgggaaagatgctgctgtaacgttcacgtgcagagtccagaaatcttgctatgttaggttgcgtgagcgtgccagcttcgatttgatcctagtaatancaacaagaaacgaaaggacaaaatgaaacccgtggtttaaatcccatgaagcgatagccgtatcggcccagtcgccgatgacatatcatttatcttcgagccgatgtcatatgtgaatcaatcggcagttataaataagcaagataagactaaatctactcaatcggctgtagatattaacactatataaaatccttctgtcgatgtatatttaaaccaagtgattgggatagatcggttgccatgccaagacagtataaatcacttagatcgaagtatacattaacataaatattataaatgcttatagcatagccgatcagatagatctagcatgtaccggctaatactctgataccactctatattaagatattaaaacagatagaatatatcagacagaagcctaatatactttattgcgataagatcttaatataaagggcagatttagcatatcaattaagcatataggataaaaagctaaatcaggtaagatcggctgataacccgatactatctctttcgatgatcataaaacaagccaaatatcataattatagatattacttaatagatcgaacctaaccgatgcagcattaagcataaagacaagtatgaaatctaggcaagatgatgaaaacctacaagagatggtagatacacgatacaatctaaattaataacaaaacataactctaccgattgcttcctaacaataaaaaccagccgataacaagttatatagcgcaactaacatagattgcaacatgcatatgataactcgatgaattacataaacatgattaaagtgtcataaagatggaagcattaaccccgagaacgcaagccgccatgacaagttttacctctagttgaagatcgaaaccgatgcagctcaacctgaaagcaagaactcgtcgaaataaacgaaagtaaaaagggtggcgatgcgcggagattgtattgaacgattgttgtttgattacatgggttcaggttctatttatacccgagattacaaaatatgtccttgctggacatgacacttatctctaacaaactctaagataccataagtctttgcggcagacttttgcccaaatatatctctaaggaaattacatgaaatatcctaattaatagatacaattgccttatccgagagctttatctccatcgtggcaatcctcatgaagcactttgaacgattctagaaacaaccttgaaaccatcttcatcggaatcggctgcatcacctctatcggttgtatcggctatcctctgtccgatccatctcagctgatgcagactccagccgatgccttcgcagccgatgcatactatgttcttcgaatcgatctctttttcgaatccgcctcgatcccaatgtcaaacctggttcacaatttaccaaatttggtcgtcaacaaatggtgtgggtttaatgttcatgcaaatgattgctctatatcgatcgcaagggtgtagagtagtatttaataatgtaagtgcggtgcttagattatcagatttcactatttgggcttatatgccacgggtcagtagaggtgggccactgatggtgacaactcaatacgggtattcctccacattcgtatataatcctaagaaattttcgtggtatgggtactcctccgtattcatttccgatcagatatccatgacttattgtcgtaaggaactcgataatcagaggtggtctctcgaaacaccaggagggcatagttagggggtattggctacatgattatatactagtaagtgtctggtggcatagttagggggtattggctacatgattgtatactagtaagtgtaaattactgatatctatatactagaagtatatgaatgattatt

SEQ ID NO: 8142 - DNA, 55744 bp, Oryza sativa
cgagacctaatatgcttttgcagttaatctattagctagatatagtgcaaccccaaccagaagacattgggttggtgtcaaaactatcctcaagtaccttcgaggtactcaagatcttgggttatggttcccaaagaaccaagatccatccatggtgggatatgtggatgctggctatatgtcgaatcctcgtaatgccagatctcagactaggttgatttctttgtggtaatactgccatttcctggcggtttgtaaagcagaccctggttgcaacgtcaaccaaccactcagaaataattgctctatatgaggccacacgagaatatgtggggcttatgcggatgatcggtcacatccagaagtcatgtggcctaaacattgataacacccccaccatcatctatgaggataatgctacttgtgttgcacaaatacatatgggctatgtgaaaagcaatttcacaaagcatattactctcaaattcttttatccccatgagctccagaagagcggggaaataaatgtcctgcaaactaagtcatgcgaaaatctcgcagatttatttacaaagtctctgccagcatcaagttttcatagatgtgttcgtggcatcggcatgagacgacttagtgaattgcaagaatcagggggagcaaacaattaagagaatagcccatgattatgatcctgaagaatcacaaacaagtcctgaagacttgatcaactgttgtactctttttcccttggtgagttttttttccattgggtttttctcacgcaaggtttttaacgaggcaacaggtgcaacacaatattcaaagtgccatgtactcttttctcctaccattttttcccactaggtttttgggatgagtttttatgaggcatgcgcataattcaaattcgtccaagggggagtgttatgaaacctatcttattgtggacgaattaaattataagtgggaagcttactacagaagaaagcttacgctagaagccagcttaaagaggaagccagcttacggcacaagtcagcttacagaggaagccagcttacaggagaagccagcttacggcgtaagccggcttacgacgcaagccagaaggtccaaggcttacgacgtaagcctccaccctcctccgcctataaatagggcccagaaggtccaaggcgaggacaatcgatcttcggtctcctgcttctcctcttgtagcttgtactcaaatccagaagaaataaagcttccactcgctcatactttctgtgttccacaactctgtgtttggtttgcttgtgtgctgatcagtagaatcgacaggtttctcaacaattttaaccattctgtggtcacaactgaaagattatcagcagatatacatttgctattctgacgccccatatatatataatcaaggaacacatgcgtaaaaagaaaatccaattttattgcaggctaaatgttcaattcagccacaacatgcacatgcagagggacagccagtagttgcacttgagcattagataacaaaggagtccagttacattcctccaaatgcaattgaaataagttcactttgggtccctgcctagtccgattttcatcccctcgtcacaaaaccggatacgatgggtcccccaacttacgaaaccgtttaaatgaggtccctcggcggtatttagtccagttttagctgaggtggtacctacgtggcttcttttgactaggtctttatccaaagtgtcgttgatggggtgtttatgtggcaattagattcgaaaaaataataaaacacgtgggacccacatgtcagtttcacacacaaataacaaaaaaaattgtgggcccatgtggatccacacgtcatgctcactacctcttctctctatcccctctctctctatcctctctctctccctcttttctctctccagccggcgaagcagggagggcggctcttgccgacaccgaagtccctgatgagcaggatcttgaagctgcacccgtcctcaccaccgccgctgctccccgcccccggtggcgcggcccacaacgccggccgttggtcgaaaattccccattccaaaatcccaatcgcgtcgaattgagtgaagccatgaacagtgtgggtgcagcgtccaggctaggtggcgagcctctgcagactgcaggccggcgcggcggtgcttgcccgctcctagtgccgcggtgccacctggcctgcacggctgtgcgcctgcgtgtagcagcccagctctaagccgagcaggcagcaacaccaacaagtcagcaagggcaaggcagcaaagcaactagcccgattcagcacaaatggatagaaaggggaaaggaaaggctttggcatcataaaaatgtaacatttgttgagtatttgacaaatgacaagtgaaaacattgcaatttgcaaaagtataatgaacaatttgtcattgattcacatgtctgtaattttccgtaattttgtttgtagatttgaagagctatttcaccaggtagtccagtagttgccgagcagtatgctttcattccacagcgcggcggggggagaagtcgcacgacctcgacggcaccgtcgtcggcgggcccaacggcaacaacgtgttcaccgaccaccggggcgcgtacctacagacggaggcctgcacgtacaacacggcggccatggttggcgtcttctctaagctcatggaggtcgaagccgagcgcggcgcctctgcccgctccgcttacgtcgccggcgacgcgcaggccaacctcaagaccctggtcgatggcctcgtcgccaacggcaacaccaacatcaaggtggacgccggcacgcacccgcagacggccacaggccacgggcggctcctctgctcccaacggtcggcgccccgcgcccctccggccaccgccgcgctgcgacttctcccccgtcggccggccgctccgcccacgacgcgccgcttcacccctcgtctccgcccctctctgcctctgcccctctgctctgccgtcgcccactccgcccgccgcccactccactccgtcggttggagagagagatggatagagaggatagagagagagggggatagagatatggtggtgaggatgacgtgtgggtccacatgggcccacccattttttattatttgtgtgcgaaactgatacgtgggtcccacgtgttttattattttttcatctaattgccacataagcgccacgtcaacgacacgttggacgaaaacctggtcaaaaggagccacgtaggcaccacctcagccaaaaccgaagacagtaccgccgaaggaccttatttaaacggttttgttaagttgggggacccatcgtacccggttttgcgaccggggacgaaaatcggactaggtgataaatagagggacccaaagtgaacttataccaatgcaatttcatatcaaacagtcacggatgggctttaggaaagcagaactgggcccggcccagtagatcacatagcccaacaagatctaaaccgcatgctctcgtttcaacaaattatcacaccgattgcatttgcatctgctgcacaggctaaatcaaacacgtagccatgaaccattcacctcacaagtcacaagcattgcatttctatggttaccagtgcaggacgaaatgctcaactagcccaagcaagaatggagcatgacaacctcaggcaccaaaagctctataaatatttgcattgcacaaatcaaaagtttccaagttttaatcagagaagttcaagatatcagaaagaacaacacataccaggatgtctcagctcaagtcttctagcctggctgcactgctgatcttcctcctggcagtgttcaccactgcagcagcagcggcaggtacagaatgccagaacgatgtcgaggtgctgaagacaacctgctacaagttcgttgagaaggacgggccgaagctgcagccatcacctgactgctgcacctccatgaagggcgtcaacgtgccctgcgtctgcacctacctgggcagcccaggcgtcagggacaacatcaacatggataaggtgttctatgtcaccaagcagtgtggcatcgccatccccgggaactgcggaggtgagcaggcttcacttgattggccacactgatcacctgggtaagaactgacaataacacgccggctcctctggattgcgacttccagtggggcccaggtgtcggtgtcagctgggtaagttggtgtcatctggtatgggaaactttgatgttttgtacatgtggtggtgctcttgtcaacattatatagataaggagagaataggacaaacatgacgcttgaatagcagaagagaagttctatccagcaatatcaaaagtacagctgtcattttcaaaaaatgtaaaacaaaaataaaacgaaaaacccactatactagtgccaataaaagaagaaacaaaagagaactacattattgtcaatgccatttgttgatgttattattacttttgtttataagaataacaattgtacttataaggcctacgatttattacaggatccaaggtctaaaacaagaactgattgacttggtgaagttggctgacaaaagcaaggcacctagcagttgcacggctgatataggtaaataatgttggtcaacttttagagtacacggattgtacgtcaaccttcagcatgttgtgataacaaaatatgtatcaatgatggttgtctatatacactgaaaatgcaagagtatttttaaatcacatgttgtattgagtattgacccagctatcaactgtttgttgatgtgccctgttccttagtctgataaatgctaatatagcacattgctaaaagcataaataaatatctagacatattggacagggtgaacgatgaagaaatgtccaaactccaaatatgagtaggataagtttgaaaaataacaaagtagcaatatataaaaacaatctagggatgctctgcaacattaaaatcaatcacatattcagcaatctgcatctgccaatacaaaacaatcaaaattaattttcatacgcaatatgtagggcaccatgatatgcaagatccttcttaaaacaattttcttggagttcccatgcttctaaaaattgtagatgagcagttgacttatatgctagtgttttgattttgagtaaatttcccagaactacaggtattttgaccaaactatcgcgaaactatagatttaaggtgttctgtcacaaaactacatatttagcacaaaatttatcacaaaactacagatttaaggttaacatcacaaaactgaatatttaatattgaagttatcacaaaactacagcttttagagtttaaatccctagaaccgttgttatgttggagctatacacattattattttgttcctaaattggttctaagcctatagttttatgataatttagttactaaacatgtagttttgtgacacttcattttaaatgtgtagttttgtgataaatttggtattaaatgtgtagttttcttttgtttttgaagctgaataatgtgaaattgcttaaaagttataaatagcctggtcaggaaccaaagcttcagaatcccactcttgcaatccaactagacagaagtaacaagaaaaacaatcagctaaatttttggccaactttacaggtacacatataatctgtttaaaatgcctcttgaattacaattcaataatcccaaccaattttactgacagattgattgctagagatttgtacaacctacggagaacaaaactccgatagaacaatcatgaacaacagaaaaaaaaaatctactctaattacacattgcagcaaagaaattactaacccatgtctgctggtcttgctgccaaaatcacctggaggctctggactggaagagttccagccttcccttggcatctggaagtagtgcatcgacacgcatgtcctgtatcatgtgagcctgttttgatgcccagagaagcacagcaagcacaccagcttgagccagctcctcactttctggcacgtgcaatgcaatgaaacagagcagtatcagtgcctctatctgcacctcatcaccgagatacaccagctggacaaggtggcgagcaccaccgctgtccacgatggccttgcagtggtttacatgcaggtggttttcattgcatgcgaacttggtgagcgcaagcacggcctccttaatgactggtggctcacgctcatcgagcagctccacaaggggagcgatgacgcggttctcactcgctgtgaaagtgcgtgcaaggcagccaagagcagtaatgcaagggagcaagagatcatcgtagtctcccttgctgacaatgtgaagcagctggtcgacgacagccttggctgctggagagctaggcttgaaagccgactgtcgcagggcaaggctgtgctcagcgacacgggaaatttccatgattgccattgctgagaagtactgtacgctagtacccatgccaccatcacccttctcaagaagcaccgcgaagcagagcagtgcacgcgaatcagtaatgctcttgcagacacctagatgaccgcgggcaagcttccacagagctctcgctgccatggcctttagccgtgccttggtctccggatcctccacctcccggacagcaccacggccactagaaccactcgtgcccagctgtggcctgaagggtggaaccaacgacccattcgtcttagtcttagcagccatcgcggattgcacgaccgactgcatctgattccttttcgtgtcttgctcattggacacccttgggggctcatcggtggaggaggaggtgccacggtcaccaccgtggcgcatgctgagcgtcttggcaagcacgacagagtgcagcgacgtcatgtgctgaggtgcagcagcgctgttcttggagctgctggagccgacggagtacctgctgtgctcctggatggtccctgaggcgaggtgaccgacgagatagcggacggcgttgttctgcgcaaagagctcctggcacgtagcgctccggtcagcgagagtaccaatggcatcggcaacggcagcctgcacgcgcatgggtggatccttgagcgccgcggcgaagacggagcacaccccggcctggacgagcttatcgatgctctcgtcgtcgcagccgagcaagccgagcgcgcgggcggcggcctcctggccgtcgtcggtgccttccttgagcagcctaagcagcggcggcacgccgtcctcctcgatgatgagcttggcgaagtgctggctgtcgcgggcgagggaggcgaggttggcggcggagtcggcgcgcgcggcgagcccgccggtgtggaggcgcgcgacgtggtcccagatgaggaacagtatgggctcgttctgcgcgatgttggggagccccctcaggtcgccgtcgtcgccgtccccgtcgtcgtcgccgccgccaccaccaccaccaccaccaccaccggagcgaggcgaggagatgcgcagcagccacgcgacgtcctcgagcgcggtgtcgaggagggcgacggtgcgggggaaccccgcggcggggctgagcgtgaagagccgcctgaggcgcgggtggccgctggcgcagcgcgcggcgagggaggaggccttgaggagcgcctgctgcgccccggccatgatgcgcgcggcggggcggtcgtacaggtcggcgcgcgccgcctgtcggagcaacgccgcgagcttgtccgcccgcgccttgagctcgccgcactccgcgcggaagcaccgcgccgcgccgcactgcttggcgacctcgtcggccagctggatcggccgcgccagcatcgccttcaccccctcccccatcccaaaagaaaaaccaaacgattctccgcctgctccgcctccgggaaccagaattccttcgagaatcgcgtctccgcggggctgaatcggcgggcggcgagggatttgggggggaattccgaattcggggtgggggatttggggtttttggtttgcttggtggagttgcgagttggtggagaggtgggtcgtcgagtcgagtcgagtggagaagagagaggggagaggggaggtggggcccacgggcggtgaccgtgtcgtcggccgcgtgtgtttgctgttcttgttttcgccgtggtttctctggagattcccggaagatagggtgggcgttatcctggccgtccgattcgggccggttgcaaagtaccccttctttggagtatgatccttctttttttttatttctttattattatattgttttcttcggcgagggggattacgaccgttgactcgttgaccatgaatatgagctagtacttttttatttttttaatatttctggtgacagttgtttgttttttttttctttttgggtttggattgtagttatccagggggaatgtacaactgtatttggtcctgttctggaaactgataaattctagtaacaaggaataactggggtgtggccaatgagattttggaaattatgggtttccatggttatggctttttagtgtgatacaaccatatattctcataatttgagtaaaaatcttaaacatcgtttaaggagctaaagattttgaaaaaaaacagtagatagtaaaaactccttccaaacatagcctttatagtacgatatgtatcaaatatagcggtcttaaaacgagttacaccacgagataactaaaaggggacacatttatccatgctaaggaatttcatggctttggagaaaaaaattatcggttgcaagagccaggggctttctgttttggcaaaaattttctttcgcggttttggattgatgcataatatatagagcctatagttcctcatggtggggagcacaaagttgtcccctagtaggagcataagagcatcaaccggatatctccctaaaaatggccaaacatgcatgtcactatattacatttgactagctctatatggtcttatggcacaaggaatatgcccattatttttaccttattctgaataggagatgattctttttttaccatatatttgatcaatatatattataggtcccgtttgagatggatgatggttatgatgaagtaagtgcacacgaaaaaaattagcttatgattaattaagttttaattagtataaacttgaaaaatggatttacttgtcgaagtaatttttctatataggaagtttagttgtttagcaccatttagctgttttaaaaacgtgctaacgaaaattgatgtagaatctgaatctcataataaatgaacggagcctcagaattgatagaatcaacaaaatgaactggccaaatctatattttttaaatgtgaccaattcttaatagtctgatctagtttgatccgatttgtcagctgccatgtcctgttctcatctactactactgatgttatcatctcaactaaagaggagttgaacaaacaaatttttagttctgaaaagaaactattttcgatgcatcattaagcttggagaaaccactaatccaattaattaacttgcacgtttcttatatgtcaataaataacaccccgcatgcatttgatcttccatccaagatcgagaggctcacgtacacaatctgacagaggccatatcgcaatcatttataactaatgattccctagtctttatcaatgtatagttatgtcagaagagagacgtgagtcacacaaacacgccaatccaaccatgctgcatgcataccaggtgctgaactctacgcttctcacgttttaacgcgggaattactaattcttaatatattttcttaacatattaataaatatattaaatattataaaaataatatattgatttgttaaaatattgtgcaaatggtgtgaggggtgatgatgggatatgcttgcatgttgatttgtagaattaaataaattgtagataatgttgtatgcttgcatgaggttaactatgtaactattaccagctagtagttgatgatgtgataagattgtatgtcgagttttaggcttagtagattataactttatataaagtatagattatttttctgttattttcagggcaatcgatcatatcataccttggaaattaataccatcaatatatacttactgttatcataataaattatcataataaatgattaaattgccgttgcaacgcatagagtttcactcagtatatagtactagtacattgcacgtggtgactaaaaaaagaatctgccagtaccaatttgccaacacacaaagtagaagtgaagcctagcattaagccaataacaaattggttaaacacagcaaaaaatccgctttactttggagagccagctggaaaaagtgataataatctccgagggccagctggtgtggaaaaaaaggagggaaaaattcccaggccaccaattcttgtcctcagctttttgtgcatcgcacttgcaggaataatagaatttaataccacaggaataatggactagtggtcacctgagcgttaatatcgtcattctgtcactgtaattgtgttaccatggagtcgtagtaaatacatcataatgactataaatgtgtttcatagcactaacattatgtatatattcactttacacatttgtgcatttttattctaatatttgaaaaaaactaaaaataaaattatgaaattgaaagtaccttttgagacatctacacatgatattcaagcagccaaaccaagtatttaaaaatacattttgtgttcaaagtttccttaaaaaaatatacgaagtatatcccaaaatgtgttttgcaatccgatagagtagtttttggttaagcagtgtattttacctcgatttagttagtatcaaataataatatgcgcaatatttcatatcaatattccatgaattgaatatgatgtttttcttagaaggcgttattaatctcaaaaacgcatattgcttttcaaggtagtactccctccgtaatttaattcatgacgccgttgactttttaatcaacgtttgaccattcgttttattcaaattttttatgcaaatataaaaatacttatgtcatcttgatgataaatcaagtgacaataaaataaataataattatataatttttttaataagacgaaggtcaaacgtttgtcaaaaagtcaacagcgtcatacattaaaatacggagggagtataaaataggacgtgactacacagcaagtggtagctggtttgtctaaaccagctaccactcaatctataagaggcactatccacctatacttcaaatacaattttctcttaaactacttatccgatctacgatccgattacaccgttgtattcataacaattaaatctttataacaagatctcacatgattatattttgatgaaaaataataatttacttttataatatatctaaattacttttagattttactaaattacttcttagacatataaaagtaattcaataaagcctaaaagtaatttacatatattatagaagtaacttataacaaaaagaaagtaactctaattaatacatttttttcattggacgtgactacacagctagtggtagctagtttgtactctatctagcatctcctttcaacttgaaccatgcaaaagttacttccaattaacattgaagttacttttaaaaattgttaaacttacgtgtgttgatctgtgctgattaaatttaatttctagataaagtatatttttatccctacaacgaatttacttctaatgtcgtgacaaagttacttacgttttgttttaagttacttttataatatatgtaaattacttgcagactttattgaatttacttttatatgtctaagaagtaatttagtgaaatctataagtaacttatatatatgataaaagtaacttacgtatataataaaagtaatttacaaatataaatattttttcatcgtaatataatcatgtaagatcttgttgtgaagatttaattataacaaacacaatggtgtaatcaaattgtagatcggataaataatttgagagaaaactttgtttgaagagaaaaatgacatgggagagaaaactgtagcctttctctctgtgactctctttgaagcaggaattgcgtgtgcgtgtggttggagatcggacggctctgccagcatcgcgcaatagcgctaaaacgagaggggctctcgaattagattttacgtataaaatagtggcgagaggagtcgttttcgcacagacatgcaacttaaagaagtcgctcgcgcatgagcccacaagcataggctggtttctcacgtggcccgctaggcttttgtgaggctaaaagtgtaccaaacgaagatgtggagtcttgatttttaatctctaaatacttttaactaaaaaattaaaattttctgttcaacttttcaaacttccaactcaaatcctaaacttttaactttacatataaaactctcaacacgagaatgatgaaattacctggaagttcacgagtcatggagaatactcggcatccttagcctacaaggtgcagttcttggggtcgctaaaaacaaactttgacaccttaatttggaaagcttgggcccacgcaagtataaaaccttcgcatggctaataatctaaaattgggtctggacctcggaccggctggcgatcaggggctggcaaaacaacggcgtttgtcccctttgccggtgcacagatgagacatccctacatctgctggcggattgcagatatacaaggaaaatctgggatgccattgctacttgggttgcctgtgaacccatcatgctgataaactgagcgcaattgaccacaacacatcactggtgggaatcacttgaaacacgtcaagaagcacccaagcatgggactcgattcttaatcctcataatctcttgggaagtttggaaggagcgaaaccaacgaattttccaaaacaaggagctaaccacggtggccctaatcgcgaagataaaggaagaggcgaaatcttgggctatggctggagccaaacacctagcagagattcccgaccgtgatgctgtaaatatttttttccttacctgtaaaaagaaaatttcgaacgaaaggcaaagcttgcctattctttttaaatatactatatccgattttgaaaactttcagcttaaacttgaaaactttcaaattacgacattttcaactcgaatatgaaaatattcaagtcaaatttgaaaactttcaactcaaattacaaaaattttcaactgatatttaaattttaactttcaattcatgatttaaaattttcaactcaaatatttttaattattaaaaatatgtctatcgctaattgccattagcattaagcatgctgggaggcgattaacgttacacgcgtcggagatgccgcgttggcggtgcacaccatcgatcctctcttggcgcaggtgcgcgcgcttcgaaagtgccagcgatgtacaaacccaatgggctcagtgctcaacgagaggcattttagactgggctatagcccatcgaatgaagctagccaaatcctggcccggtaatgcccggcccaacaatccgaaatatccagtgaaaggcaggcacctgctcgccggccgtttgcttaagagtgaaaattaagtctgaacatttctctttaagtgccaagagagccattcaagatcattttgtcatatattatttttttgattcgatttgctctccaattttctactctgttcggaccattccagcaaaagtgtgtcattctggtccaagatagctatggaccattttagcttgctacgtggcgttgatgtgacatgccatacaaatgcgagattttggactatttgccactctattgaatggcacattctcaaatgctatccatctttcccagtaaatttgattgtttgtcatcgtgattcaccaaattgtttctattttatcacttttgacggccaacatactaaaagaaacagaaaatgacctcactgcccctctcatatcttctcttcttcctctccggcgtgggaatcccaggtacagttgcagttggatggatgacacaagcctccggtatttttgacggtgaggtcgttgatgagcgaggatatgtcgaggccaccttgaccacaagcgagatactcgtgctggtgagagagcatacaacttgacagcttgacccacgctggctcctgccctcctgtcgacgtttgatgtcgcgattccggtattcgcatggtatggggatcattggtactaggatatacacgagactgaggtaaaagagatggagatagggatttttatacaggttcgggcccctgaattgtcaggtaataaccctacatcctgttggctgatgccggtcattgctcttattcatcataatcacactagtacaatatttggggtagtctatctaactgttgtcgatatggcggtctgaaggtctgactcgtagttgacaacagggtagccttcctcctcgagttcgtgcccggcgagatcaaagatagcgctttcgtctctcctgacagtatctggagacaccgtaggggactagccgtgcttatccctgaaatcgatatccggcatcttgtcttggcgtatgttggcttgtatgttgatcttgtgtcttgatatattgttttgtgtcttctatggtgggtgtgtgttgatcgtctgtatcccctctccttttagggggccttgtatttatacccataggtgtccccttgtccaagtagaactagggaaaccaatatggatacaatccgagtagtccttatcgtttccatgtagaactctggttgtcttttcttatccggaactcctcctatatccgcaggttgtttccgtataggacatggtaagtggtgggtcatgccgagatttagtcaactactattaggtatgtggtatccataaccctgacacctcccccccgggtgccccacctccatttgcgttgcttctctcaagttcacaagatttatgcgaggtagagggcctgcaaccgagatgtattgccttcgccccgacgacccaacggcgaaccatcaagcatcgtcacatccattgctcgtcctgctgccccagctcattcatggcaatagttgtccctactgcttggcttgtcccatgttggagactggttcatgccatgtcggagaggaagatggtagaaggaagatgaatgagaggggcaatgtggtcattttctcatcgttttgctgagttgttagttaaaaaatggtaaaatagaaacaacttggtaggtcacaatggcaaataatcaaagttaatgggaatgatggcatttgagaatgcaccatcgaagagagtgataaataatccaaaatccccacaaatgctgacgtggcaccagcaatatctctatattgactgacaactggggcccacttggaaaagttttctttccttttctcctttttcttttttccattttcctctcttctttccctttcttctctctctttttttccctcttctttagttggacaagcagaagtggcatgccacatcagcatccgtgtggtatgccacaccagtgtcacatagcatgctataatggtccgtagccatcttggaccagaatgacacactttagcaagttatgggacctgaattagcatttttagagttcggggatctagatgacacagtgacacaagttctagatgacacgtgatacaagctaagtgaccggtcgtacactttacttaaaaataaagaaaatcaaagcgtcttataatatgaaacgaggaagtaaatatttgtatggaaaaaatgcaagattttagtatgcatccaataaaattaattaagctagctaagctagtagctaggtatccattcaatccggcaaacatgtaatcacatcatagagaacagaagcttttatttatatctgaatagttaagctagcaggcaggcaacagaccaagcttcaacaacgctagaagggcagtaattaactagctcgagtagccggtgtgaaaaacacacaaagaaacgaagcaattaaaccagctagtactcatgtttcctcgcttcgatcgatcgatcatggcgccgcggcgaagccggcgaccatctatggctttgcctccacctccacaggcgggagcttggggaacttgaggaatggattcttcttgatcaatggcagcagcttcttgaacagctcggggtcagcctccgcgtcgtcctgcatcgccaccttcttctcctccgccggcgggtggtagatcggcggcgacggcgtcggcagcggctgcttgtacaccggcgtcgggtgagagtacgccggcgtcgggtaggagtacaccggcggcgccgggtgcgtgtacgacggcggcggcttgtggtacgccgccggcgctggcggcgacgggttcttgtagtggaagaagaagtccttcttgtggaacgggtcgcagaggaacgccgacgcgcactccgacgacgggaagtgggtgtcgccggcgacggcgacgaaggtcttcttcttgtcggcggcggcgttgacgatccacgacggctcctgcccggggcatggctggttcgacgccgcgctgtgcagctgcgcgaagcattgctgcctcagctcgccgtcgtcgccgaggaggtccgccgcgaggggcacggcgaacgcgccagacttgccgacctcgccggtggccttcgtctcgtactcgccgttgctgttcttgcacttgatcgccacgcgaacacctgaacaaaatcaagaataaaaatgcagcagcattttcaacacaaaatatatacacaatataaaagaatatattcaatgatagatttaatgaaattaatttggtgtcataaatattgcgatatatatttttaatataaatttggtttaatttaaaaaaaattgacttaggacaaccaaaaacgtcttgcatttatgagaacttagaacaagcatttttcaggtagtagtttaaataaatgacaatgattaattggaccatattgcgtgattatttatgatatcaacatacccttgaaaacggcctcagctttcatgttcttcctggtgcagtcggcgcacttggccaatccgacgaccatggacgccgccgccgcggcgtcgccgtcggcggcaacggcgagcacgttcaccagcaagacggcggcgcaaacgccgaggactagagcccttggcagagcccccattgctgaagctcacaagagatatatgatgatcagcaagaagtagtggattgggagatgagcaagaagagaggcagtgatgggtttatatagtgatcaagaagagcatatgcatgcaaagctacatgcaatattatgttcatatccatgcaagtgcaacagaagcatttggcatatgcaggagagagtaaattaaattgcaactaggtagatggtgtgttaaattaaactgcgactagctaggtagtagatagtagtgatcagctgagctaccagttcaatcaggcaccggctttgcagattgttagtaaatgtgccgttaaaagttgatgattgttctctctgttttctcagatctgcaattcttgccattgtgcatctggcactgggcaacttaattatctttcctttagggcaatgcatgcagagatgcatgaacaattaactgcaagtttgcaacaacaattggctgcattgaaagaacagttattgttgagattgtgttggaagtacaaggggtgtatttgcagcatggccggagattttaatttggtcccaggtttaacttgaattgttcaagttgaataactgttacatctgtggcactgctacatctgtgccacattctgtaggtcaccatagagaaagaaaggtattcatgtcttcagttcagcagtatatgtaggtactattaaagagatgtggtggattctgggtattcatgtatatattgttttttaacctcaaatttgactgctagatccaacagtttataatgaaaatttaaccaaaatgttatcaattgatcctgcttggttttgggccctctgtcctgttgccctgttggtcctcttgctgttaatattttaaaactaacctttatttattgtgtcgctgtcaaaaagagggttattgtaacatttcagtttaattcaattatattaattcagatattccaaatgaacttctcagtggtttactgaatttctggaaagtgttttcctactttaacaatctgctatatatgttgaaggaacaactatactgttgactttaatggaatctcattgcagtttagatgtgtttaatggcaaactttaaaagttttcgatattaatgtccttttaaatatttagaatgaattaaaaaaaatactgttagtataattttatcagcatttttaaataccttgcaatagaaattgacggtgaaacttttatcttgaagaccatatatactaatatatatccaaatcaacagtttcttttcccaaggagtttagatggtaacgtgtaacaaaatttgaaacagctaaaatcttttttcaaaattttatcatgctggtatttattgggttttcttttcctgttcctgttgtgccattgccaaaatagtttaaaaaggaattaaagtcaaatataaaatttcaaataacatttcataaagaaaatgatctgcaataagaagttaatttacaagtcttttgcagcaatagtctacccaccagttgagctggccgatggaactgcctgtccatttgttgggttattttacctagatttttttctaccatggctcgtttaacggtccatcctctagaaccgaacccagcctagcccatctgacagtgtgttcagggcagggttggaaatttcggaccgaaatttcggtcacttccgatacgatattattttggctgaaattttttattttttaaatttttttcataaatttaggtaatatttgtttaaattcaactaaattttactcaaaatttcggaaattttagaccgaaatttttaaaatttccgaaatttcggaatttcggtgacccccgatataaacggctcaaccgatagagtgaaccctgttcaggggatggtgggcttgcggctcgtgtgacgccgcttggacaatgcaccgtacgtgctccgtgcggaggaggacgtacggcggccccgccgacccggttgatgatatcccacggcagttgcgttggtcatcgccggcaaagtcgccggccagggcccatcgcaaccgcaccgtaccttgtaattttattgtccgcaccgcactggacgtgtgtaactgtgcgtgtacacatggtactcctaattattttactcatgtgatgtgattcaatgaaacaatatataattatatatagtattccctccgttttaaaatagttgacaccattgactttttagcacatatttgaccgttcatcttattcaaaaatatttgtgaaatatgtaaaactatatgtgtatatgaaagtatatttaacaatgaatcaaatgatataaaaaaaataaataattacttaaattttttaaataagacgaatggtcaagcacgttataaaaagtcaatggtgtcaaatattttgaaacggagggagtactaagtaaacaatatactcctactatcattttgcccctgcaaaagagaaagcatatgctcgatcttttgtgattcaattaaaccgtacgtgagtaaaaataccagagtcctacgaggacttgagtacaacattactagtggatcatattgtaattgtagtgcatataatggaagtaatctttttatcgaccagatctcgtagtaatttagttactaacttatcaaatgagattggcaagaataatggatagtaatatttttatgaagtactaacactactacgtacaaatcaggtttttgctagcgtccaaatcaggtttttgctggttttcattggccttgccgaccgccagcaaaaattgactttcgcaggtggccaagctaagaaggccgctagcgaaaaaaactagtttcactgtacaataggtaaagagacccgccaacgaaaatattcttataggaggaaaaaaattaaaatggaaaaaaaattaaaatcaggatccacaattaatgtcccaaatccttatcccaaattcacatgcatcaacacaagcttcccaaatttgttattgccgagcagtaggaagcaggaacccaagctgaagttgtcgtcgtcgccaccatcaccgagctggccgcaaccctagccaccgagggtaaccattgccgaactacgcgtggagccatcgccaccgagggccaccgtcaccgagcttacacgtggagccgtcgtcgccgagggcagccatctccttggactaccaccgccaccagatatagctagacatctggcggtcccaagcaccgccaccgctagatctggtggtccggtctcgattaccgttgtcttcgttgtccaagatgcacatgcatgatgttgatggagctcttgaggttctgcgtggcagagtaggcagagaagacgaaccatcgccgtggtagccattgtcgtcccggccttgccaactcgagccgtcatggtcatcagggccatcctcaacctgaagcagtcgtgtcccctacgctttgccaccgcctctccccttcaccgagtagccatcgcccccaccctttgctgcaaaccggccgccaccccttccccgccacttattcttcgcgaggtgtgcaccgtaggacggcgaggagttcgcgcagtcctgggcctcctagccaccccttccccgtgctgcaacaaacatcaagagagagaagggagaggagaggataatacgatgcaactgttggttcagtagtaggttttgcaggtggtgttcattactccgccattaaaaaatcaattcttaatggcagggtgttaagagcaccactcacaaagatagaggtatttttacaagcggtgctcttattaaaatcccacctgcaaaaattatttttactggcagggctaggtttttagaccactcttccattttcaggggcaaagctttttagatccaccactggaaataaaactcaattgtcataaaaatcgctttttggtagtgtcactgctacaaaactcctcataggtatcaactcataggtaccgccatcctctcctctctctcgcaaccgctcctccccgtctgtagtcgcacatcccctcctccttgtcatctctctctctctctctctctcgcacaaccctacccctcccccttcgtccctcgctccctccctcttcttcccccacctggccgggaggctgccaacggaggagaaataggtcaaaggaggtacctctgcacccaacgctagggcgaggccgcgtcagagatgagttgcccatcggtggagtgaggaggaggggagaaggtgcctagggtgaatggtggtggtgtttatggtagggtgagggcgtgttgagcggtcgggcggagcatgccactggtgagaagtcggaggtggcgtcgatcacgaccacgaccacggggcccgaggggaagacggtcaagaagtgtgccaacgtgtccggcgagctcaggcatgccaagcgggacaagtgtgagaaggcggggcacgatggtaggtgtgacgtacagtagcgggggcggagcatagcggtcagcggcgccgcatgttctcccgatttgtgtgtaaggcatcccaaatttctcccgatcttgattggttcatgtttttgggatatattggttggtgtttctagggatggattagttgattattggttaaaatttctcgccgatatatgtctattattggttgattggttgttgttggatgcaaagatgctgctctttttatagggatggattggttaacagatccacccgcgaaatatatttttgcatgtgggtcttttaaggagccgtacgaaaaaaatgcatgccgggttttgcaggcacaactagttacgatgatccgcctgcaacctacggggggctcttgtccagaaaaatcatttttttagtagtgtgcataatatgagatgttagacctatgacagtttgaagtcactttacagctcaaagaaggatctaaacgtttctaaaaaaaggaagcatctaaacagaatattggacgataaagacgcatttgccaactttactcatatattctgttgttttaagcatatatgctgatacgcgactggttcccttccactctacctatatgccatacgtttttctcctttgtacaaatcttcagttcacaattgcttttcatacctagatttcaaataatttaagtgaaacatataaaactttttaactcctcaaactttcaactgagatcacaaacattataccaaaatctaaaacatctttatattcaaaatctttaacttcttccaattgaatctctgagtttttgctcaaatcttgaactttcaaccggttgcagagctcatcaccggagaagatataaagtaagggggtgcagagaaagaaggcaatggtcgtctcgctaggaaaaggaccccaagattgctactagcacaacttggggaagaaagaagggcctcgcacttgccgcaactacaacaaaagttttatataaagacacttttgtagaggcattttgcaaattgcctcttagatcgggagttttatagtgtagagacattttatagaggcactttaaaaatttcctagaaaacttttactctatgaacactttagaaatattttcagcacattttattagattttatcttgtagaggcattctttcggtactttaaactgtgcctgatatataaagacattttcttgagacattttaaactctgtaaagacacttcttacaataaaaatatatactaaatgactaaatataagtaactcaaggcaacaacatataagtaatgacttggggttgagttggttagtaccttgaagataagaatgatttgtgcaattgatcataagtttcgaggattggcaaaaacaagggaaaatattttattgtttttttcattggtttcatatgattgtggtacaatctaatgtctctagaaaatatctctaccatcttatagacattttgtaaaatgtctcttcgtttatagagataattcaccataagacacttattagacatttttttgaatgcctatgtaaaggtattttttgaaaagtgtctctatagtattagaaaaatgtctctacaaaatatttttcttgtaatacgccgtgtcactagggaggaggaggaagggtagctatggtgtcttgctatggtgaggaacaggaacatgtgacgtgatggcttgtgtaaaggcacgaggtggtgtcaagccatgcgaagcaagtaaggaagtgatgaactaatgtacttgacagatagagagaaaataaggtgtttgctatttctgtttgcacatggatgttcatcaaataggggctctttggcatatgggccaataagtactttctagatataagttctcaatcagctttctttatgacagatggcaattacagtttagaagatgacaaatacacaatatcagttgtagtacatgaacaatgattaaaatgattcatgattatgattgtagatattgtttcggctaatagtactttatctgttgtctgatttttgtatgtcaccgaggtgagcggcgcaccgagcggcccatgcacgcatgcactcgctcagtcactcttagatgctgccggccgtgctatgcgtacgcgatcctcacttggttgttagagtttgtatcgaatatatatacgtagtcggttacagtttaagacttagagttgtattaggtgtatgactagagtatgagtcggactctatcctaggatctctcatgaatagaggggcgtgcctgttgtaaccgcatggcgacatagcatagcgagagggagcggctgccggcgacgaccggtcgtgagtcgttgtaactatgatacgctgtaatatgctggatcggggaggagcgtccgtaatcagtgccctagagatgtaggcctcggctgaactccgttatcaaatatcgtgccttggtgtcgtcatcgtgtttagatctcctacggtgttttctttcgcgtttagctaccgatgtcgatttcggggctggttttataacaagtggtatcagagcctacgggagatccatggtagaggtacgagggaggtgctccacgccgcgacgactacacagggtgtccagggacggacatggatgcaaggtggagcacggcggcgatcaacggaatttgatcggtggaatcggacacttcaggcggcggtttgaaccgtttgatggctgcaatcaacaaggagatgaccagacgtggtgctcgggttgatggcggcggaagcgattggcaatccaatcggtgggtcggacacttcaagcgggtggctcgaactttccggtgagctactctcaacagggagacgtgtggccacacgctcggggttgattgaaactggaggcgatcggcgttctcggtcggtggaatcgaacactcttggtggggtggccggggcctttcgatgagttgcgttcgacagggagatggctagacatagcactcgggttgttcggcgactgggaagacggcatgtgatttgtcggcttcggctcgcgactggattgaggggtggtcaattggaagtcggagcagatggatccttggtgctgatgtggaggtgttgataacgaggcagtgcgtgatggattgctacagtgacgacgtacgcacgacaagcattgcattgtggcaggcactggttattgatcggcggcattcgctgtcaatggaattgacccgaagtgtttggtggcggtgtaggaagtcgtggaggcgtacatgaagcttggagatggtcagggccgcggcggtgtgagcgatcctcgcgttgtggtcaagccggcggcgtagaccaaagcggcgtcattggtagcaggctcggtttgagcggtgattacgcggtatcttttctgatggggttcgcggcgcagtagcggatgcggactcggagtccggtcacagcgcgtgcggcacaattgtagaagacgaagccaagtcgaacacgagaagaggcggcgatgcggactctgatttgaagaaatcggatgcaattggcctcatgaagtcagcaaaggagttccatgggattgctttgcaatcgaacaaatcaccaaggcaaaaggagatcggattgggacctcttggcggcggtgatttgggacgacgagcgtcgagtggtaggagcacggcttggtgtagtcgtcgtgcaggtgccggcgaagttcgtcgggccagctccggtcggaggaggcggcagcggcacgcgcaggaacatcacacaatatagaacgagcagaagttgtctggaactcgtgcaatgagtcatagccagtcatgtacaggagcaaatccaaagtgcattggttaaattaattgcatgtatatgcaaggtatcaattatgatgcaggagcttgttggcttggtaatcttacggtggctatgatgggaaggatgcatgagacgtacagataaaagaagtttttgcatggtgtgcagggctacggactaatctacaggcgacagagcggcactagtgcattagcactcggattagtgcatgtcgcgggcgtggtgggcagacgtggtggtgcaaggtgctaagatcaggagtgggccaagagaagaggctgatggtgcggatagatgttggagcgagatgaacacggagactggtaggagggactccgaacccgagtccatgatttttgccagccgagtcagtgtctgtgatggatgccgaggccgtggaaaagcaacaacacctagacattagcacttcggggagcccttcgatcaattgtggccaagctatcagtgcaaaaggtgcagctcgggtgtaggtgtgtgacaacaagcgtgcgtgaagaacgtcccgggcaacagcgggtgaaaatcgtttggcagtacagaatatatccataatctgcagggtttgcatgatggggatatatagaatctgcgtcactgaaggagaagagcaagcgctatggtggtaatttcttcgaatgattcaaagcaacggtgattttctcaaattatcaggaattcagtctacggatgcgaaaaagtgtggatgttggatttattagctcggttcataagatgataaggaagaaagggttttctccatgtctggtgagtttgatttatctatttggttatgacatcggttatctagccatggattatatcaagtcatacttaagacggtagatagaggtgaacatggtcttcgagaagtctatgatgtgacagctaggaagaattcaattcgcttggcaagatgactgtggtgatatgagagaaggtggagcattgttgcgggtggagtcagaaggaagaaattacagggatactggagtatcttgttacgatgagcctggtggaggcttgtcagggcggctcggtgtgagcggcgaaaaaggatcaactcaagtcctggtacactgaaattcgagcaagtaacgaatttggattggcgtggcatattcgccaaggtggagtttgttagagtttgtgtcgaatatgtgtacgtagtcggttagagtttaggacttggagttgtattaggtgtaggactagagtatgagtcggactctattctaggatctctcataaatagaagggcgtgcctgttgtaaccgcatggcgacatagcatagcgagagggagcggctgccggcggtgaccggtcgtgagtcgttgtcactctgatacgttgtaatatgctggatcggggaggagcgcccgtaatcagtgcttcggagatgtaagcctcggctgaactccgttatcaaatatagtgccttggtgtcgtcatcgtgtttggatctactacggtgttttcttccacatttagctaccgatgtcgatttcggtgctggttttataacattggttgcctctatacatcggatatgtatatagaggagtaacaatccttgctgtacctgcattaatagagcggcacagttctattacccgcaacacatgcagcatcgtcgtatgcatcaggaatatatagcttgttcacgcctgcaggatgggctttttatgctttagcaacatggatttctcacgcggaggcgccacaatagcttctcctgactactgagtgggtactgcgacaagtaggcgagatagatgcacgtacagaggtgacgagtcacccgaccaactgcaagcaccacatgcacaaatttagtctgaaaggaggaagtagagtcttcacaaagcaatgtcgttactctgctaaaacctggtagatttgattaattttatcaacccatgcatttttcatgcgatgtttgtattgtgcatttttttcactaaagcattttcaatgaattttttcactgattcacccaaaatagattttattataagtgataggaataatacatatataacttagatatccatggatattttttttgaaatattttcatgttatatctagatgacatagtataatgaatgttatttttatataggcatattataggatatatataagctatcaagatatcttttagaattgcaaaatctaaatcgtgcgtgctctcgtttcgtcttatagcgcgacgcgtctaccagccatccatccgtgcgagtcaacaagtaatgtgcacactattttgtctttatccagcgacggatgcatttaaggttgacattaagtactgtcacggcgtgcgccctttcacctgctacgtattgaggccaccaccaaccaacaagattagttatactagtctatctttcttatagaacttttgatgatttatatcttttaaaccacacattacttttaaaattcgtttgaaccatcctactacactcaaaatatcgaatatattcaaatatttaaaagtaatttacttaaattttagaagtaacttagttattcaatagaaataactctccatagtaatagaactaattacgtagcaggtcagttgtaataactatgtgaagtaaattcacaagtaaaatgtacgaagatttttaagtaaatacaaatattttctttatttgaagtaaccactatatttttttttcaaaaaatgtaattttgcaacatatggaaggtaactcttcaaggtattagaagtaatacattgttagagggaagaaattatgaaaaacagaagtaactcttcatgatactagaagcaactagactgctagagagaaataactcaaaaaatagaagtaacttttcatggtattagaagtaacttaagtaccacttgatgctagagggaagtaactaaaaaatagaagtaactcttcacattattagaagtagctatactactagagaaaggtaactcttcgcagtattagaagtaactatgttcttagaggagttaaaaataatgataaaatttatgtcgatttgacagttttatggtacagtttgttttgtttatatgtcttttgcattatttggcacatgtttaaaggatgtgggataattttgcatgattctaaatataactacttataattacttttagatttgaataaattacttcttagatatttatgaaagtaaattcaataaagcctgaaaataattcacacaaattataaaagtaacttaacacaaaataaaagtaagttatcatggtattaaaatttaaagtaaatcagttgtggtggtaaaaacatgtgtctatctagaaattaaattgaatcaacataaattatagaactaactaaaaacaacaataaaagtaacatattcacaatattatgagaatgtctaagaagtaatctaatccaatctaaaagtaatttatagatacacaaaagtaatttactacacatattcttcttccattaaaatataattatgtgagatcttgttataaaaattaagttgcaatgaacataatgatacaatctgattgtatatcagattagtaatttaagagaaaattttatttgaagtttaggtgttaggaagtaggtgggctctttggccaaggcaacacatgaaattggtaggttggaaaacttcaaaagcatgatctgttcatgagcggtattatttttagagagtgaaaggtgcagtggtactattttttagggccgtctctagaaatttggggccctagggtgaaatgcaaatgccctataatttaaaaagttatgtctaatataaataaaacatattttcgctcaattatatagatgtaatatgtgttgtaatgtacaatacaagtaattttattcaaacattgtaatttgatttaatggatcattcaaattataaactacaatcatgaactcatggtaatttgatgcatattatgaatttacaatctatcatatatgtactcaatcactgtctaatcttaccggtccgaggtcaagctgtcaagagtcgagtcgaggatgatgagcggacgaggagggggaaggcaggagccgaggcgaggcagctgttttgccgtcaccgttgccgctcggagcctcggaatcacaagcagcaagttgtgtcgccgcctcgccagtcactgtgcatggaattgggatggacgtctcagcagttgtcacggcgcggaatcagaatcgcagagcagccagctagcagcagggccaagttaggccatcgcacagtccaatagtgccccacccctggcaatctagcatgaccttgctgatcgatctgcctaattgggctattggcagttgcaagctatagctgggcaattggaagtgggcctcatgtttatatgggaaaaaaattggaggccctatgcaatcgcttatttggcacgtacccatcgacatgcctgctatttttagtaacaaggtcgctgattaggacaattcagcgcacaccatttgatatagtctcctcctattagaatgtatgctaataaacagaaggcatcatttactcttctctctctctctcttatctacactagaaaaaatatccgtgcgttgcaacggaaaggttattttaatcatattattattttttagataagttaatcatcttattattatacggtttagttaaggtgaaatttactatgggaattcacttggatttgtttcttttacaaaattatgagctgtaattagaagtttgattatctcaagtaattatcatgtatgtttttttaaagagatttcttatacgactctttttgtattttcaaaagcgaacgaacttaaaaaaacgactcaaacacagatctgtatttccaaaagcgagtgatttaaaaaccgactcaaacacgaatgacgtaccaaaacaccggcaaaaatatctttaatttttgtaaaagtaaagtgcatatgtggtccttaaactcgtaaggttgtgtcatctaggtctccaaagtctcaaaatacagattcaggtcccagaacttgtcaaagtgtatcatttaggtcccaaatcgatatagcccctttaggatcctacgcggcgctgatgtgtcacaccacatgaacgtgacgtgtcattttctcttttttcttcttcttttctttttctttttctttttcctttttgttttcttgtcattcttcggtttttctttcctttcttatgctccggtcgcagagaaaggagaagaaagaaaaaaaaaggagaagaaaaatagaagaacagaagaaaaaggaaaaaggaaaatttttaaatgggttccgtttgtcacgttatgtccgtgtggcatgccacatcagcgccatgtagaaaggggctgtggtgaattgggacttatatgacacactatgacaagttctagaatttggatatacattttaagagtttaaggatctagatgacacaccattattagtttaaggactacctgtgcactttactctttttataatagtagggatatacaattaaaagaatatgtttgatattttttctaaatgataacgtcacgccattgttcatatctaaaataagaagatacaaaatcagaaaagaatacgatcgatcatggcttggatttgttcttgtagtcgtatcgctgcgcaaggtagacgaacacggccacctccagagcggcgagcgcggcgagcaaccagtagaagtagtccaggtgcgcgcggttgaggtcgtcggcgaaccagctctctccgccgccgctcctcgccgccgtcgcccagtcgatcgccgccacgagcgcgccgctggcgtagctcccgacgcccatcacgccctgggacacggcgagccccacgctgtggagctcgccggccacctggtcgtagaagaactcctccagcccgatcacggcgagcacctccgcgacgccgatcagcacgtgctgcggcaccagccaccacacccccatcggcaccgtcgcgcccggccggttgaccaggccggcgtcgcgggccacgcggagccgcctcgcctcgacgagcgccgccacggccatggcgaggcagcccgtcgccatgccggcgccgatgcgctggagcattgtgatgccgccgccgccgccggtgaggcgcctcgcgagcggcaccaccatgcggtcgtacaccggcagcaccgcgatgtaggtgaagctgacgaggcactgcagccccgccgacggcaagacgaggccgccgccgccgccgctgccgacgcgccgatccattgtgctgctctgcttggtgaacagggtggacacctgcgagacgacgacggcgaacactatgctgctcagccagatcggaagaagcttcacaaggaagaatcccctgccgccatcgccatggccatccaccaccaccaccacctcctcttgtggttctagaagctgttcggcggcatcctttcggtttcgggagaagaagaagaagaacctcgccgtccacgcacgacgcgccgcggcggcgccgtcgatggcaggtcgctcggcgcggcggtacgtccccgtgccgagcaagaagacggcgaggtagagcaccatggtggcccagcacgcggcgaacccgacggtccagccgacgttctcgtcgacgtagctgagcaaggtggtggagatgacgtagccccaggatatggagaagtggtaccagttgaagtatgagctccgcgacgcaggccgccgcgcgccgccgccgccgccgccatcgtcgtcaccctctctctcgaactggtcggcgccgaacgcctcggcgcacggcgtgtggaagccctgcgccagagctagcaggtagagcgcggcgtagaagacgacgacgacggcgccgccggcggacgacgacggcggcgacgtggctcgctgcgccgccatggacgacgacgacgccgtgagcatccccaagctgagcaggtagagcgcgctggcgacgatgacggcgcggtaccggccgaggccggaggagtcggcggcgaggccgccggcgagcgtgagcaccagcaccgtcccgccccaggcgttcgccgcggtggccgccgccgccgtggacatggccatcgggccggtgaggtacagcatcaggttgccttgcacgccgaagaacccaatccgctccaagaacccgacgactgcgccatggccatgcatgcacacgtcagcaacaaattaagcctggctgagagagatgatgtcatcactaaagcctgagaagccgccacttaccgacgaggaagaaggcggcgcgccaaccgccgcggcgggcgtcgccgtcgtcggggtcggcggcggcggcgcatggctcgggacgacgtgcaaggaagccgccggactccatggctaatggcgcaacgtgcagctgtgtcaagattatattttatcgtgctagctgtgcactgtgcagcatgggctagtacatttcaaggccagaatatcagtattaggcctggttaacaaaaaaaacattacatccaatctttagatatatacatgaagcattaaatatagataaaaacaaaatctaattaattaattgtacagtttgcatgaaaattgcgagacaaatcttttgagcataattagtccatgattagctataagtgctgcactaaattaggcttaacagattcgtctcgcggttttcagacgagttatgaaattattttttttcattcgtgtattaccttctgacattcggtcaaacgtccgatgtgacactcaaatattttcttttcgcgaactaggccttagcaatgcttctttttccttttttccttttacaatatgtctagatcagaataccaatgatgcctagagccgagtgaataagacataaagaaatagttaatatatgtcactgtatttagctatcagtactgacaagtactaccaccacctaatatctggagtggctgtctttgtactgaaattagttgggcccgccaccaagggtctactccttccgtctcaaaatataagaagttttggttaaatggagtacattttactactataaatctggactgtctgtagggatggcaacggggcagggcggggccgggttgggctggaacggccccgctcccgacccccgacttcaccccctgcccccgcccccggtcccgactggagatgcggggctaaatctagccccgtccccgacccctccgtggccccgcaccctgactggggcccgcattgaataaaatctccatcccatcagcataagaaatacaagacagctatcaattcggcaagaacaaaaatggtacaaaattcacacaccatcaaaaatagcataattgtacataattgactctccgaacggtggccgcgcctgtgcgccgtgcggctcgccggccgccgtgcctgtcccctcgcggctcgccggccacagcgcttcccctcgcggctcgccgaccacagcgcctgtgcgttgcgccgaccgccgcgcggctcgtcggccaccgtgccctgcgcaccgcccgtgcgacgtgcgtcgtcggcactcggtagaccggagggagagcgggagagggtaaccggagaggggagaggaggggaggaaagaggaggggagctggggatgggagaggccgagagggcgaccgccgtgccctggcgacctgcattgtgaagcgccgccgccgtcgcctatgtgtgagacgggaggggagatggggttggggagagactagagagagagctagggttttgtttatatatgtcactattttgttgtattgggttctattgggccttttatgcgctacattttaagagtttaatatacatcccccggggccctgcgggtgaaatgtctctcccgtcccctccccgcccaaatacagggcccggccccaactccccgcaggggacccggccccgcgggggaaattgccatccctaactgtcttactgtctagatacataggactaggatctggacggaccgagtatttgataaggcttcaacttctaaatttttcttcaggatttatgtctagagtgaagttgtggagcataaactcagctccagctctctagttcattttctagagtactccagcctatttcactccctttttgacggagctgaaaccgtttggctgtgcttcattggagctgagaccgtaccctcactttattaaactaggaaatgaattttaaactcccaatgggatattgttaaatattttttttaaatgttagcaggatagacaaatatttgatatattatttcacaaacatacaagttaaatttgacttctacatattacattaaataaataacacattaaagtatagcttagtcaaatttgtcttacagttaaatttaaatttacatatcggtagtgatttatcagatattaatttaaattgttttattattatttggatgatatataaacaatgaatgatgtggtctgaaaagtttagaatcatcccgtataattgacacgtgactgacatatcccatctgttttctgatcatttcatttactgttcactgttcaataattataaccaaaccaaaccgaccatgaatagttgcatagatatagtttaaatcaaaaactcaaccaaaggaccgtaaaaactcacaccatctctccacaaggcaaatttaaaaagttgtgctcccggtgacacgatcgagagggtggtgagcagcggacgatcgattacttctctttcacgtaccagatacttcctccgttttaccatctaaattattcttatattttccatatttatattgatgttaatgaatctagacatccgtatatctgtatagattcattaacatcaatataaatgtcagaaatgctagaataacttacattataaaacggaggaagtaacatgaaaaaaaattctcacaatttattaaatataactggtaaagattgttctataataaacacgctcaatgatttgagatgagctcttcgacctgtatcacaagagatcacgaccagaataagggtgtgtttgaaaaggaggggatcgagaagattggaaagatacgtaaaacgaggtgagccttagcacataattaattaagtattagctattttaaacttcaaaaatggattaatatgattttttaaagcaactttcctacataaattttttgaaaaaaacataccgtttagtagtttaagaagcgtgcacgtgaaaaacgaaacaatctttctctctttctcctgcgctcgaatgcagcctaagagtagtaacacgtggtttcgggaatacatatactattatatcacatcactgctcactctctgtcattactgcttgatgttagaggatacgaacccgcacaaaagatacggggacacgacgaactcaaacctgacatatcctattaataattaattatgaattaatatcgcctgagggcaactcattacccactcgacaaaatcgaaaagcacaaaacgaactgtgaactaatttattaggtaagggctagaccaattatgcaagtcatatcaattccaaccaccgatcgacatgcaacacatcaaaaaataataaaccagtatatatatatatatatatatatacggctctaatgctactaattgccttgactaattaagcacctcacaaaaaaataataataaacagatgcggcttctttgctataatttccgcactaacgatctttgctaatcatacatatttttaaaatatgggtgatatgatcttaaattgtttagttaattacaaatagaataacaacggaaacaaaaaaaatcacatgttgttgccttaagtttatgggtccatggaattttttatttttatacatatatacgaggtttgtatgtatacttaccgagttttttttaacaacgtagtcactcacagcacacgcacactcacccctatgaacgcacgcacgtaaaccctacccctatgagcatctttgaatactgggccggcaaatccttaagattgacgaagttaccaagttaccacaggcgcctcgctgtcgacggataaatcctagaaaattcgctctgtacacatacatataaatcttttttacatttaaagtgtatacatacttatataaagtttatacatatgcaaagatttttataagtgtatatacaaagtttatattgtatattaatgtaaagttcaaatcaccctctacattatgcagtagtacaatttaccctttcgtagcccagtcgtcttcatcggcgtcgtcgcactctagctatgctagtacgtagtaggagcggatctacagttaaagggctctagctatgctagtacgtagtaggggtggatctacagtaaaaagaccggtgttaagtaataccgatgactttatgttagagttcgcagctcggcccaccaaccgtggaccacccagatcacattgggcttgctccaccccagattcaaccggagccacaattttaggtcctggacctacacaacccaacagactagtctcttgggtgaggattgctcccaccttttaagtcatactccccatcatcaattaccgatcactggtggagaaaccatctttggtcggtcggccgaaatccacaatagtctcggttccactaaaaaccggttcaaaagatgatctttagtcccggttcaaaaggttagagctactttttgatctttagtcccggttggtaacatcaaccgggactaaagattatttttagtcccggtttaaaagacggcaggtggtgtcagacccctctttatctttagtcacggttggtgacaccaaccgggaggtgtgtgtaaataaaataacttattaataaaataagataaaataaaataacttataaaacaaaataagttatttaaaataacttatttaaataaaataagttattaacttattttacaccaacctaacaccaatcgacatgcaccgtgcgagatcgagaggaccaaggcgcacgggaggatcagttaataagttctgacatttatctccttctctcctcactcaccccatctcttcctcttcctcctcctcccatctcttcctcttcctctttctcctcccatctcttcctctacctcctctggatccgcctccttccctctcctccccacttctcaacctcctctggatccgccccctcccgtctcttccccacttctcaggcggcggcggccgggcggccgcggaggcggcctcgcgcggccgggaagcgcggaggcgccctcacgcagcggccaggcggcgacggaggtggcctcgcgtgccctcacgcagtggccgggcggcgaggcacagcgcgcggcgggcggtggggtagcgcgcggcgcgcgcggcggggacgcgccggctctcctttctttttttttttataatttgtgattgagagatgtataatttcttttttagaatttgtgattcattgcatggatctgagatgtataatcgatctgtgatgcatttgatttgtgtgtaatttttttaagatttgtgatgtatttgatttgtgtgtaagtaacttaggatttgtatttgtgatgtgaatgatttgtgatgttactttgaatttggagatttggggtttgatttaggtatatgcatgacactcgatttggggatttgttgtttgatctgggtatatacatcccacttgggagaaaataaaaagaaaatagaccaaccgggactgcccctatcctctctttagtcccggttggtagcattaaccgggactaaagatccctctctttatatcgatctttactcctggttatttcacccgggactaaagatagcgatctttagtcccggattcgtagtcccagttttccaccagtggatgtgggactaaacccaacacttttggtaaaacctatagtgaaactctttatccatatgttataacattatgatctaagcataattagcatattaagacatcgatagatatgttatatgacaccaacgaatcgattttctggatccgccactggcacgtagcattgcaacgagctttaccaatgaagaagaagaagatttatgatgatgactagcatgcatgcaagtagttgatttaattagctgctatgtccgtcttgtgcttttttcttcacgacgactgtctctgtccgaatccgtctcgtgcatgctccccgtgtgattgaggcatgcgacgccggagacgccatcgtggccagccgtcgcctggggattacctccttgtcggctatatatcgcgtagtcaccgctgcctcgtcttcccatcctgggttcctgtactggcagctgtggcttgcaaattactccctctgttctaaatattttacaccgttgattttttaacacatagtggatcgttcatcttattcaaaaacttttgtgaaatatgtaaaactatatgtatccatataagtatatttaacaatgaatcaaatgataggaaaagaattaataattacttaaattttttttaataagatgaatggttaaacatatttaaaaaagtcaatggcatcgaatatttagaaacggaggaagtaacggtcagatatctagcctcctctgtcccggcatagagagaggtggcagctacctcgccgccgcaacgggagcactgccttcgttattgctgaagccttggtgaggtggaatcgtcctgctcctctagcttctactcccgcccgcactcgcggccccaattatcgtccgttgaggctgaggataaacacgcatcactgacaattgggcctcaccgattttttatttgtatttactgactagattgcaacttgtacacgtaggtcgaaaaccactctcgaatgagttaggagataattcgtttagagttaagagttcagggtgtgaaatattggtattttaattagtttagggggtaaatcgtacgacataagtttagagaggcaacttgaactttcaccttctttatataatatatgtataaattttatatatacacatctacgtatagggcagaaagatgaccgtgcactcgcttgtggtgccacgcaagggagggggacgataggtgggtcccaacatgtgagtgaggcttgatcgggtttgaagggtagtatcgtactttcataactgtttcactcttaaatttattcggatataataaaataatattacgggtgtctagtaaataattactacttttttgcagtgccctagcacagaaacgtgttcttgcggtgtcccctagatagttacattttttttatatcatgtagcaaattttgcacatattagtttgagctattgacttagaagaaagatttattggttgaaatcgatggttagatttgtttcgtcaaaatttatagtagttttttctagtttattagagggactctcgcccagcatgaccctgtcgacccctgatccagatcaatacacaggacattatacaacaagagatatttgccagtaattagacttgcatacttgaatgttaattattatcacgtactgcattgttaaaatcaacatcaattcagcgcatgcaaagcacattcccaaatgccgtaaacacgcaagaagccatgaacacgcacgcgtggctttgcatccattaatttctccgataaatgaaatgcacgccagtagttgcgagatacagtagctacatcatcaacttatttggtggaaatggagatcgagcagtgaactcgatcgatcgatcagtggctccccgggggacggtagatcggagtcggcgatggcgtgccgtacgccggcgagacagggggccagaaaggcgacggcgatccgtatcccggcgccgtgggaggtgggcatgccgtcgccggcgttccgtattccggcgtggatggtgggcactccggcgccggcgttccgtatgccggcgtggaaggaggatattccggcgccggctggccgcattccggtgccggcgtgggaggaggagggcactccggcgctggctggccgtaacccgggtcggcaggggggcattccggcgccggctggccgtatcccggcggcgtgctgggaggggagcatgagcatcccggcgccggcgtgccgtacaccggcgagggaggcggctggtactccggcatgggcttcctgtggaacatgcgatggcgcctgtggcaggggaagcagatggccaccgacgagcactccggcgaggacgacgtcgacgacgggaggtgcgtcttgccggcgacggcgacgaaggtgcccgtctcgccctccgacgacagcggctcgatcttggatggctcctggccggggcacggcgcgtcggtcgccgcgctgtgcagctgcgcgacgcagtcggcgccgcggaggtcggcggcgagcggcacggcgaacgcgcccgcgccgtcgagctcgccgacggccttgctctcgtactcctcgctgctgccgttcttgcacttgatcgccaccttaagtcctgtcaacaaaatgaacaaaaataaacacaacatttttgtgcatttaatagttgctttgattggtgatcatgcaaatgcacagttagatgacacagtttcttttaatcaaagcgaatcggttacagtgactgatccaagaattttcttgagcctaggtaaagcataatcctatggcctgctagtaagtttttggcccaagcaatatcatctgtgataacaggcccacacatgtcaataggtgtctgttacaacatctgtcgttatggtagaggatgtgcgcacttttagatctaaacataacaatgtttatataatcgactcgatggttattttgtacccaaatatcgcgtatattctacttttaatttatgagaggtgtcaattgtaatctttgtcaaataccactgtcccatcatcaagagtgtactccgtatatactccctccgtttcgaaatgtttgacgccgttgactttttatcacatgtttgactattcgtcttattcaaaaaattaagtaattattaattcttttcctatcatttgattctcatataattttacatatctcacaaaagtttttgaataagacgaacggttaaacatgtgctaaaaagtcaacggtgtacatgtgctaaaaagtcaacggtgtcaaacatttcgaaacggagcgagtagttgcttgcattcgtacttacccttgaaagcggtctcggcgtccatgttcttcctgccgcagccggcgcacttggccgcgccgacgacgaccgacgccgtcgccgtcgtctcaccggcggccgccgccgccatcagtatcatcagcgccgcgccatggaggagcagccagcttgctcccatggcgaagctacagttgtgtgtggctctcaatagtagttgcactgtttgcaggtgaagagcaagggcgtccaatgaactgcttatataggcgatcattgcatatataattgcattactggatgttaataattcagcactgattatttattttatctatttatttacagctcgatcgatatgatgatccatggagttaagatgtgccacgaaaagagttaatgtcaaacgtacgtatagcgtaggagtgctacagtaagctacattttgtttagttaatttaccagcgaattaaatctcactggcagtgatgaaatggtagatagtatagagtatagagtataaatatacgtatgcatactagtagtatgtactttggctatgtataattaaatgccggctcaattcaatatgttgtcgccgttgtcatgatctcttatatcgtgagctacgcttctatgtaataagtagaactctagttctagtttgtgttcatctcagtttcgggggaaaatccagcagtacccactatacatataaaaatctcatcgggagaaattcaaattgttaaaaaatatttcccgaaattgaagcagttcaaaagagctttaatagttccaagaaattttagttgtcactacattgttgattataagctgtaacggtttaccaacaaacaaaaataatttataaataaaacttatatatatatatatatatatatatatatatagatatacattcttagctgtttaaatacaaatgttgtaaaataaactaccgttaacccaaaaatctgtcccaaaattaaattttgaagtttaaattttggtttataagctaaaggatgaacaataggagtgcttatttttttttccttggaccagaaaaatctcaagagggcccgagatagcaagatcctgcagagaatcttgcatgaccacacataggagagtagaggatgtagttatgttggatgcatgatcgaagcacatgcaacgatgatcgacgacgtcgtggggttgactgtcatcttcaatatgttcatgtgtgtgcattcaaccaagttggtgtaaatgtacgcattgtacagtcttgatctccaataatacagatctacggctgtgtttagttcagcgcaaagtttggattttgattgaaattagagatgatgtgactgaaaagttatgtgtgtatgacaggttgatgtgatggaaaaggactgaagtttggatccaaactttagatctaaacacagcctacatttatttaaacccttctaatccataattccctttaagcttcaggtccagaagtacatgttcccaaagggaaaaagattgaatttaagtacgaccgatacctataagattgaattgaagtactatgcctatattaataactattcctagtaggtaaaacgtactagccttaattaattagacaatgtcgtctcaaatgaaaccacagttcaaattaaagaatgaccaatcttcatacagtgataataatcaaggctcaaagccaactcaacctttagaaaagaaaactccttttttgcaatttaaagaacttccaaataaacttttgtgaggcaaggaagtttatattaagaatcatatcaaaatgtttcctttgattattgctagatcataaagtttaggaaatcacaacattagtatgtcccgaccttgcacattccataaagcgtcccaacaacaaaaaaaaccccaccaattcaaccatcatccagcaaatcattgtttaaaaacattctggaattttaaatgtatgtaaactacaacgagcaaagagtttccttaaaacattccaacaataaaaacccaccagttcaaccatcatccaggaaatcattgtttaaaatattctcacattttaaatgtatgtaagctcaaacgagcaaaggatttccttcacagctatgcccggaagacatcaatttcacgtcttaataataagaaataaggatgggatcattgatcatcctgcacttccctgtggcctcctctggcaccttacacttctcaacaatgatcctctgcaatctggagctgcctccagctagggctgccacgcctgctggagttacctgagagcagcggaacaccccacacgcctccagctgcaagcatcctcttgcaatatcttctaggccaacgtcgctaatcgcatcacagcgaagcatcatgagatgtttcaattttcggaatccttcaccaacctttgctagtgtggtgtcaccaattttctgaagaacagtgcaggaccatgaggggaaaaatcaatgctttaattgctatgcatgaaggtaggaaaacaaacatgacgaattctataaacaatttctgaaattaactaagactagaggtcattttagaacaagaaaatcaatatcttctatcttatgatgttgagagagagaggggagaccttggtatcacttatattcagatggactagatcatggcactctcttataatggtagtaagcccataatcagtaatttgattgcacccacatatatctaacctctcaaggaaacgacattgatcaaccgtagcaagcccggtatcatttaacctgtaaatgaaagccaaatgttagcagatctttgtcataatagatagaacaaaagtttttatactcaacaaaaaaaatgtttagaacagaatgatgtcagaatgctttgaagaaaatgttataaaatggaaaaattaatgacatgcaactcaactgtatacctttcactttgaactcaggaagtcaatttaacttttgattggaactatcatctaagaaaggctaacgaattaaagttatctttgattagaacatgtaaaaaagtgaatcatggattcaagtacttacctcccaagaccatggagggtcaactctctaagttctttacaattctcacctacagatagtaatgcttcatccccgatctgcagagtaaaacttcaacttaatatatacaagcaaagttacaatgaaataaaataaaaacattttctcattccgtattccggtttgggagcagccgagcagcaaactctggtgtcggcttgccacatgttggtcttgggataaacattagcctaattggcaaatatgaaagacaactgtaacctggcaaatgccagagttgacaaagcaggagaacattaccacatcgaatgagggagaagggatgtggttaagactcaggaaaagattctactcagagtcatgtgctaaatcctcatcaacaaagccgttatgagaccatgatgactcagcattccttcatcgctctttggatctctcccttcaacaggaggggggctcaggaaatacttgtgcttgtggacagaaaagttgctacttgctacaaactgccagggaatgtggagtcggcatgtgacagttttgcctcgccaaagggattctttgattcatcagcaaggatgacaaaaatcctcgtccatgagatcggtggcatagtctatgacatcaagggccctacccagcaatgacttttgatggtggctccatggacacaatggcagggtcatccccacgacaatggcagggtctattctcacaacagatggtgccaacaatccaatactgagaaattcaaaatttcaaataaagggagactgacttcagttactcccttggaaatgttgagactacaatgaaactttgttacaggaaatttatgtaaaaaaaaggacttcaggatcctccccttggaggtgtttatggcttccatatgtatagcctctaaagggacaaataggcacctttcatcaacatgcatcttttgttcaatgggcatgtctcttgagattgaacccgtattccacatgtactgtattattattttgtataataataacaacaaaaataaggatttttattcttattatatacttcctccgatccaaaatgtagctacctagtatagaatgggacattacctagtactatgaatctggacaggctctccagattcatagtactagataatgtcccatcctgtactaggtagctatattttgggacggaggaagtattgattaacaatgtaaattataatactgggacaagtcgttgatgatcactattcagataaatatagtgatcgtacaaaagctgtgatatgcagaatcactatgtgaagacacaaggtgctctgcaagatcaccctaagacaaactatcatagtgatctgtatgacttagtgataacgtatcatcattcgtatgatcaaaacaagtgactggagaaagcatgcattattcctcgctagccatgcccatttccctatactggtacaaatccatcaccttgaagtgattggagacaaagtcttgaacatcgcaccaaaagaaaaggaaaattgggcggggagatggaagtaaaattttggtggtattaaaatgtaccacaaacttttagtgttataaatctgaaggtaaattttgatggtatagatcatttttttcttaaatgtaaaatcaatcttcataaatgtagattaatacaaactagaaatgtacctgaggacaagagatgatagaaagctctctcaagttcttgcagccttgagctatgtgagatatggcctcatcgcttattttacaacagttggccaaacagacagacttgagaaggaagcaacatcgaccaaatccgagaaatgcattattgtcaatccacagactgtttagagtgagccctagaagatttctgcgtttaacatgtacaaacacaaaagaaaaaaaatcaacagtatattgtgaagtctagcttgacagtaggacaaaggcaaaagtaattgcttagagtagtagcatgtatcgcccaaaacctatataatttagaatgacaaaagcagctgagaacccagttcttcaaaatttgcccataagaaaataacagaggcatagtattatgatattataaattactaatatattcaaaaagagtgaaggttctagtttagagaatacgtgtcatgtgcatgctatgggaattaggcctgatgtgctaatctcgtcacaccaaaccaggtaaaaaaaaatcgtttttagactactccgttgctatctaagttaaacaaggtaaaattacactacttcataaaattgtttttactaaaaaactgtctgttccttaaccacgagactaataagtttaggtttcgacagcacttcaatcattataccagtatattgcacacactgacatttgttagacatgttgataatttgggaaagagtgaatttcacaaaaccacacaccttttgacacttggcacttaactacatatattttgatattgaagtctcacaaaactatactattaacaaatgggcctacctgtgagatgacatggatgtttatctatacatatttaggccgcgaacgtggcattgttgttgttccacctaggatgaagttcccaagtctgcatcctaggtggaacaaccgcgccatctcgcgaatggcccatttcgttgatagtgtagttttgtgaaactttaataccaaaatatatgtagttaagtgccaaatgtcaaagtatgtgtagttttctgcaacttggaccataaaatatgtagttatgtaaaatttactcattgggaaacatttgtggaacacttaacaggggaaacaagtccaatacatgtctgggaattgttgattttgttccaactttttatttctctaatcatagctggattcaagagaatacgaacaattggactaacattaaccttccattttgagcaaacatttgatatgcaacttagattacagctgttgtacaaacatcaaaataacaagtggattgaataggaaatgttgaaactttcaggcttattaattatttgttaccgcatattagcacaccttcagttttcctaatctccaatttaatttatcacaaaacaacgtgcatattttgtcaaaaggaatacatttagtccaaacctcaacggactagcaaataataaaagaaatcctgtttatatatgtataaattgaaaagtacaaggtaggaagtatgttaacaaaaacaaactttgtaccatgtcaaaataaaaattgcgcgagttgcaatatgttaagtaatcaagaagaaacatacatgcatcgctgtccaatatgctccaatgcagcactttccataatatggcacatgttaatttccatgtgttgtagcattttacagttctgggaaacacgttcaatacttctatctgtgaatttgaccgacgatttgataattagacttttcagctgcttgcatccatttgctatggaaaaaaggctcctgcagtagcaaatgattagcagttgaataaagccctaggacatcgctccaaagataaggggcattactgaaaagaacaacagaagtcaaagaatggtcaatgcttgcaataagagaaaaagggaactgaagtgaaaataagtagccatatattcctagaaaatatactacaacaaggtaagaagtgcaagcagtaggcaactagtcattgataaatatttcacatgtataactttcatcatttacagatcagtagatgccaaccattcaaatttgctataaggttttaaacctcagtaaccagtactccttgtttgattaccttgtagcaaagcatacttgaatcaggcttgtacttagccttataagcagtataattacattttgggtttctatattggcaaatctaaaatttggtttatggttttttgatatttcatagagaattacagttgaaaaacataataattttaagcaactatttcacaatttgcttaacctttaagaaatagtatctaaatctagagaaacttgtcacaaataaaaggaacacgcatataaggaaataaacacaacttagaaagaaacaaattattctagtcccgtctatggttcttcccaactaacattgcactgtggcgggataaacggtgtcaagtaacacagtactactacagcacagtcatgcattagaagatgcatacataaaatgtcttgaccaatatatccactttgaatggaccgtttcaggagattactcttaatatgctgatttttagagagaactaacttgcaaatatacataccaattaaaaaatttaacaacatattgtgtgccatgttcatgtaggtataaatcttaaagtaagtggacatgagaaaactatagaaaagaaacttcgcatatagcagatttcttgatgttttgatggggattgcttgactttccatatataggaaaggataaactataaatgatacagtagttcaccaaagtagttgttgttctaacggtgtcttacaagtaagacccatgtgctgatagtttgttcagcacaattataggagtaattccactatttcacaatatatgtttttttctcgaaaacgcaagagaattgagtttcatttcattaaggggaagaaaataaaagaaaaatacaaagtagaagagaccaatgccctcctaccgcaaaaaacacacccacaccccggtcaaccccggctatctagctgcctaggtttgccgaaccactaaaaaacttttggcggggcagatgctcccactagacaccaaagattaccctcattccctaccacctgcaagactgtcgcaggtggaaaaattttcaatagctacatcttgatctcctcaatggagaaataccttcttaagcaatgcacaaatattgtaggtggcttctacctgcaagattaccctcattccctaccacctgccttccaccgtccttaatcaaagtttttgaaagttaggtggccgtattatgaatttattagggagcagccatggtttcttactctcttaccaactttttcttagattttgtgcttctagctggcttgtgcgaactgtgggcattacaaatattttgaaacagaaggaacaattggattggtacttatactagtaaccacctttatgctggttggacattgaaagtgttccaaaaactctccaaaaaagtggatattggagcatttgctgaacacatgtacgcccgcaaaattatggggacaaatgctgtcaaaccaggaaaagttacttatgaagtttactctttttttttgtcataaataatatccacgatgatcatgaaaatttgaaaccaaacagggcaaatatgccccacaagtgatttttcccatattttcagtatattattcacaacccaactacaataatatatacaattactcctaaaagtgagaaatctacaggtgcattattgaacttctttttttacaaaaaagaagtgcatatttctctgaaagtttgggaaggtcctaaaaaaaggcataaattgcaccctcaatttatcaatttcatatttacgctgatttcatttttatgtaaaacatttattgatgttaaccttgtaccattatcttggcctaagaattctaatcgcacaaaaaattaactttcctgtagtctgctttaaatatcctatggtgccaaagttctcaaggtgcagtacttagagaaaacataattctttatttactacttaacatgcaaacttatactcaggtggttcactactgaaattaagaaaagagcatgtgttcaaatcaatataaaaaaattataaaacaattgttaacaaatggttcagcatttctactcttcaattctataagcatcacaatgcagtatcagtataagctatatcaaatttctaagagaaatgagacaccgatacttccatccctgtaaaaatgcaacagtagatttaataattggacctattacctgtctgagcacttattaaggttgtcaagtgacaaattttctaaagcagagcaagatgaaccaatagcttctaaagcttcatcgccgacaccaagccataccatctttaaggatttcaaatattggcatccttttgcaacagagatcattcctttgttttcattaacatgcttggactccacggataggacttccaagttatggcagtaggtaccaattgcatacagggatctgtatgttatgcaaccattgcagaaagaaatatcaagagagaccaatgatttactacgtatctttacaaattcaaccagtccttcgtccgtcaactcttgaacaccacacagctttaattcactaagattgcatccctctgccagagtaatcaacccatggttttgaacatagccaccctgtaagaaatgttgtcaataaaaaatgaaactcaggggaatacaacactaaatatcagcatgaaatgaaacctcaatgcgaagtttacaacgtgaactgctgacttggacaatgataaacctcaaaaaggagaccattaccacaacggaactcactattgctacaatatgatcctcaagtttcattcgacaaaatagttaaaataaaagaggcatctatgatcaccattcaccataaggaagcattaacttcttcatagttccaaagatttgcccgcattggaaatgaaagcagatcatgctacgtgtgaaacaatattgaatgcacgaaagaaaacagaacaagtacaactaacaagaaattaccgaaagcgctaacgattgcagattccggcaacgatttgcaattcccaccagccccttttcagaaatgtgcaaaaaccagtttagagtcagcttttcaagccctttgcaaccctcaatgagatgaagtagcccagcatcagtaaatgaggttgggttgacaccatcactgccattttctttttgcgtatcttcgcttagtgtggaacactgcatatgttgctcatctaacttggggttttcgttatcccaaccctgtgcctgtgacaaaaatagtgcattagtgacttgcaaaattgatagacaaaccacatcaagaaaatagtttccagagatctaaattatatgcagctctggcaaaatgctaatttctcagggagaccaagaaaacaaaatcttaaccacggatttagttgttgaaccaataaaacatcggatcattcattcaattccacaggggaacacaagagatgcgagaatttcgcgcgattcccgaactgcagccagagaaggactcaccctgctccgctccgcggcggcggcggaggcgccggcggcaatgtagaggccgtggtcgaggaagacatcggcgaggcccgggaaccggtcggcgacgcagcggacgacggcgtcgccgtcgggcccgtcgacggggaccctggcggcgcggcgggacgcgcgctcgacgccgcgccagcggcggcacacgagcgcgcagctgtcaaggtcggccttgccccccgcggcggcgacgcggcggaacacctccgcgagcaggtcgtccgggagggcggcgttgacgaggccggaagcggaggccatcgcccgaggcggcggcggcggctatcaccggaggtagggttccatggaatccctaagattggaatgaaatggaattgaagcggaaggaagaggggggttttagagcccaagcctttgcaactgccgttacaactttgggttaattagacacatgccattactaatttgaaggtttagaaaaatatcattactatttgacaaattgtaaagatgccattacaaatcccacgatactggaaacatgccacgttctacgcctgatccgcgattgtactcgtttttatgcgtaccgtatttacgtatggaccataatgcccttgtgtatgagtatgtagggaccgagtggaatcagtttgaccaagtgcattcacagtgaaccgtaaacctaacactaggcttctccggcggcggcgggatttggaggcggcgtcggcggcgtcagcgatggcatcgggctttggcggcagtgtcggcggcagcggcgggctttggcggcaatggcggggagaggcagcccgattcgttcgacgggctcgagcggttgtagctttcagcgcacacgggccgcagcgtcgtcggcaccatggttgagatgtgcttgcggcaaagccgctgcagtgaacaaatccaacacctcgaggaatctagggcggcggtggattcagtgtgggaaagaggtaaaccccattgtttttcattttcttttgttgaaattcctttcttttttgtttcgttttcttgattgatgccattgatttgagatgtgttgtgcagccaaagtgttgctcgttgtgaatatgggaggatctgttgaacgaatatgtggaggaaatggttgcttattcccatgctggtgaggacgatggtcaaagagacatgttgcgacagcttgcagaagagcataaggaagagaggtcgaggatgcagggtttggttgaggcaaaccataggcagatgcaatccatatatcagcagctgaatgattctaagaaaaagtgtgagcagctaaagaagatgttgaaagaagagaagtgtagtcgtagtagacaactttatgtgatgttgttcttgttggccataattatgtatttctatgtatgttctgtaaattttgtggccatatttggtacaagtaggtaaatcagtgccattttgtgtaatgttaatcactgtctataaattatgtggattcaatttctgagtaatgacataggtgtgttaattatatggatttaatttcccactctgggtgctctgttaaggataagtctggcagctcaaggtacaagctgatattgtgtgtttgcagcaagagctaactgctgactcctgcactaaaactatgctaatatatgttcacttggtgtaaaaaaaaaaggaaggtataggacattgaaatatcttttggtgtgaagtatataaagaactgaaagttctgtgtttttatttcctctttgaaaagactgcccatcattgagacaaatgaaaaagaagtacaggaaaatgagttcacaggaaatttgtgcattcagatggtattagttgagatgatcagcaacaaatatttcacatggtataagttgagatgatcagcaacaaatatttcacatggcatgtgttcaaatgatcagcaatatttcacaatatggactgcatgttcacaggtttggactaatttcagcatactgcatgttcacatgttgcacacagtgcatatcacagtgccaggcaacataggcctcaaaatacaggttcaagacagtggcaggtaacatgaaggcctcaaaatacaatatagagtgcatatcactacagcaagtcaggaaggcctcaaaatacaatatatagtgcatatcacagtggcatgttagcaaggcctcaaaacacacaaacttcaggattgtaaatattgtgacaggcttctaacaactttagctgggccttctgaggcagctcgagcatccttcttcttctggggtgtcttctttttcttgggcgtcttctttttcttgggtgtcttcttcttcttagcaggccttgatgaactttcatcttgagttttcttcctgcaaacagtgatatggatatgttagttagcaaatgcaacatatgtaaaagaattcaaaataaatagtcaaccatgcagcatattacctcttcttggggaaagcagtaggcacttcatcagtgtcttctggtgcttcagcctctttgcaagtcttggcaaagtgcccaaaaccatggcatctcctgcatcgcacccttcttgcccctggttcaagtgcacccctgatcctagtgactctaggcctccctgcacccctcttgagtctaggtggacagactttgaagcctaaattcaccacaggccattgtgatttgtctggcatagttggcactctccctgcataagctgctctgaacatgccaacagaaaagtactctaaaacaaatctttaatctcaactcctctgttggaacatatccatgccaaggcatgattgcaaggttttcctgaaacctgcctctttctgcatgaacatgtttggttgatcaaatgcacagtgtgccttctggtattgttgtcactctcaaccaatgtgatctcagccatgtcatcatcactcctagcaacctttacaactttcaggttggttgttgctgcattgagctgtttaatcacactgggcaggattccatcagtcaacttctcaccaacttgtctcctcaaatacatcttctccatgaataactctctaggagaatcaactagctcatggagatgtagacccttcagagatttaatctgattattgaaactttcagatgcattgttggtcaagtaatcacacttgcaagtttccttgaaaccagacctataccatatccttgaatgatgtttgtctaggtaatcaatggcttcaggaaataaattataaatctgctgcatatgatctctaaaaccatcctctgtgaagcatcttgcagcaggatacaagtgcagtgtgaaaataggacccctaaacttcttcataaaattaccataaaggtgtctcatgcactccctatgttcagctttctcaaatacagcacctacagctttctctagccctttgcatgcatctgttgatatgactaacccttcaggagcacctatagctccatgcaactgtttcataaaccacaaccagttgtcatctgtctctgagtcaaaaattgcaaatgcaacataaaacaaccaattgtgtccatcaacagatgtggctgaggctagctgaccagtgtatttaccagttagtctagttgaatctacacctatatatggcctacaaccattaacaaatccatctacacatgctttgaaagcaataaacatccttttgaaacacatat

SEQ ID NO: 8143 - DNA, 1370 bp, Oryza sativa
aaagagtgtttcggtccactgagaaccatgcgatcaaatcttagtatgctgtcccttttgagataagcaagagcgcatccttagggttatatgcatgcttaaaataacatgtgattttactactataatacagagttccgtaaattgcaacatcagaggttgactatgggggaaataactctgatgtcttcttgaactatgcagacagatagggcagctatgctagatgagatccttgattatgtgaaattcctgaggctgcaagtaaaggtttggttcactatgctattatctagtaagcataaaccacattttgtgtttttagttgtttgatagagcatgattctatggtggtaggttttaagcatgagcaggctgggtggcgcgggtgctgttgcacagctggttgctgatattccactttcagttaaggtaaatctgtggccattaactaatatatagcactgtgcccagttactttctctcgacttagtttttactgccattcttaatatacttccttcggtcaaaattatttgacgttggctatgtggtttatttgttagttcaaggttttcttctctcttgtataaaagcaatacatcaagcatatcatcctcataactatgtatagtaaaattgtgaactaattgctctctgcagtgcctatttttcattcttttaaattatatgctacttgttcttgcccattctctctctcccttctcctcctcttgctcctccctcctctctctgtgtgtgactgcagagaaattgatggatgtttgctacatgggaaagcatcagcctgtacttaaatcagatctccatacaaaataaaagcacctttgtctttgtttcatactgacaattactctgtatttccactttattcaaacaaaatatgaatcagttttcccttgcaagaatcattctacttctgattcctctatttttctctcgtgaagtttttcacttctttcttctagacagtggtgctgaaaggcagttcccactcaccacattattttcactgctggccttttattgatttcttgatctaattgtctatgtcagtgcaatccatttgtacttttgctatcagtgacagtgattgtagcttttcctgtctcttcttgaacataaaacttctatgtctatagtttaacaataatgaatagtgttaaagtcttagcaagatgaagatatgacacatttctaccatatgacaacatgtcttgtagatcccacattaaaatctctctcatctctagtttcctgatgagcacagtgtctccattaggcttttgcttgcttcagagcccaattacaaagacttgtatacttcctgatccccatcgatcgctcca

SEQ ID NO: 8144 - DNA, 8509 bp, Oryza sativa
tgcacctttgggtaagcctttactcaatagaaagggaggttgtggggattttgccactgcacctttacttcaataggtacaatctgacatacgctatatcagttttgtttggctccatatttaccaacatagggttttccatagtaagctcattctatgctttctggatatactacttgtcgcgatggttctcggccatgtcataggacatcacctcgtctaacttgtaattttagctgttgtaactattcatccaactttgtggcctcggttttcagttcgaggttcttgatacatgaacgtgcctgatcataatgaaaagtcccattgcaattgtacaaatatctcaattttaattaccatgtgttatttactttccagtaatacgttaccagaatcctccaatttcacatatacaaagaggtgtgtgccaattccatactggagtactcctatatttttaagtcacatactaagggtgtgtttagattccaaaataaattttggtcaaaaatgtcgcatcaaatatttggacatatgcatggagcattaaacatgggaaaaaaaatcaattgcacagtttgcatgtaaattgcgagactaatctttttgagcctaattgtgctatgatttggcaatgtgatgctaagtaaacatttactaatggtggattaattaggcttaaataataaatttgtctcgcagtttaaagacagaatatgtaatttgtttttgttattagtctatgtttaatactttaaatgtgtgtctgtatacttaaaaaaaaaatttggacgatgaactaaacacggcctaacatgaggagtatgtgtagcgagctttcgaatgccaacatgaggagtatgtgtagcgagctttcgaatgcacaaggtcattcatacctgttgttcagatgaagtttttatgtgaccggatgagcagtggggacgtgtggtcctttgcccagtcgcaccaacatctattactagggacacgggcaccaactgacgacattacgaacaatggcccggtttctcgaggagtaccagaaatctaacttgcgagacaactgccacgaactaaactgacgaactagatggaacgaacaatcccgtgcaatagtccctgcctaaactgccgtcctcatacccgtcgttcgtgtcccatacgtggaaccgatcattgcaccgtgctatgtactttggtcgggtctagtccagccagaatatggtggtggtgtcggcgcagccgcactaacgcggcacgtcgactcgtcgtacctgctgcttgtttttttgagtggaaacggactcgcgcaccggcagcaggcgagcgggagaattccgttgcattcaaaccaaaccaacctaaccagcaccaaagctgtggccagccactttaccccctcccgcatcgcacgcgccccgacctaacgcaacgacccgacgcgtctcttctcctcgtcgtcggtgccgtgccgctccggttggactctctcctcgacggcgccggtctcggcctctcgggttatctccgcgtcgtccaaacgctcgcccacacgcgaaagaaaaacgcacacaaaaacacacgcaaaacgagccgttgcgacctgtctctctctctctctctccgctaatccggtgagtcccccaccaccgcaacggtccggtctttaataaacacccagcctcccacttcacctctcgcttcgcttgtcgcttccgcctcgccacgcctcgcttttccaatgccgccgccgaagcgcgcgtgccgcctcgcgctgctcgccgccgggggagcctacctcctcttcctgctcctcttcgagctcccctccgtctccatctccgtctccactgcctcgccggcggcggcggcagcggccaccacgcaccgcccgcgccgccgcgagctcgaggcggcctcctcctcctcctcctcctcctcctcgcctctccgcccgctcaagaccgccttcccttcccgccgctccccgctcgccgtctcgtcgatccgcttccgccgccgcaactcgtcttccatcgatgcttccgccgcctccgccttcgccgccgcgcgcccgctcatgcaccacctcctctcctccttctcttccccttccccgtcgtcctcgccgtccccatctccgtccacgtccgattcatgcccgtccacgatctcggtgcctacccaccgcctcacaagcggcggcggcggtggcaatggcgggggtgtgacggtggagctgccgtgcgggatgggggtgggatcgcacgtcacggtggtggcccggccgcggccggcgcggccggagagcgagccgaggatcgcggagaggaggggaggggaggcggcggtgatggtgtcgcagttcatggtggagctgctcgggaccaaggcggtgcagggcgaggagccgccgcggatactgcacttcaatcccaggatccgcggcgatttcagcggccgccccgtgatcgagctcaacacttgctaccggatgcagtgggcgcagccgcagcggtgcgagggctgggcgtcacagccgcacgaggagacaggtaaactctcatactactatatcttatcacttggtatctaaattcccttcaaaaatgtatatttaaatgttaaattagcctcaaactgatgtgaactttaacattttggcgaatggttttggccattcagttgacgggcaactgaaatgtgagagatggattcgggatgataacagcaagtcagaggaatcaaatgcgcaattgtggttaaaccgtttgattggtaggggaaatgaggtggccgccgataggccatacccgtttgaggagggcaagctgtttgctttaactgtaacagctggtttggatggctaccatgtcaatgttgatgggagacatgttgcgtcgttcccttaccgcactgtaagtttgttaattatgctcctatagattgctggtcagtttttttatgccatcataagatttgattatttgattgtggtttaattgttggtgcaacagggttacagtctcgaggatgcaacaggcttgtctttgaagggagaccttgatatcgagtcgattttagcgggacatttgcccaattcacatcctagtttcgctcctcagagatacctggaaatgtctgaacagtggaaggcaccaccactgccaactgaacctgttgagcttttcattggcattctttcagcagccaatcattttgctgagcgtatggctgttcggaagtcatggatgattgacacgagaaaatcatctaatgtcgttgccaggttctttgtcgctctggtaggtacttatgttcatgactgggtttttcgaatatgttatttgcctgatgcaaactctaaccaaaaaagcaccttcacagaatggggaaaaagagatcaatgaagagctgaaaaaggaggcagaattctttagtgacattgttatagtgcctttcatggatagctatgaccttgttgttttgaagaccatagccattgctgagtatggggtaggcaattggactttactggacaaatacatcattcattttttaccatgcttctatttgattgaccttcatcctcatgttaaccttgtaggtgcgaattgttcctgcaaaatacataatgaagtgtgatgacgatacatttgttagaattgactcagtgctggatcaagtgaagaaagtagagagggaaggaagcatgtatattggtaatataaactactatcacagacctttacgatctggaaagtggtctgtatcatatgaggtaagaatcacaagatgccatttgctttgcgattaaaggagtcacactatgtatgatgctgacccttgattacaaaaatgaatagtctttgttttgtatttccttcataagtggaacttagttgttcagcataatgctgctttatagagctggcacatatattctgctttttatttttatatcaatttatggttcagtgcattcatgttgatcctctttcaaacataactatttccgagttaccatcatttgtcctttaaaacctgacattggcatctgttagtttgttatcatatttctcatggtagcagtgaactagtgatgagttttacgcggcaggagtttgatgtggtttcatgcttctttcaggaatggcaagaggaagtatacccaccttatgctaatgggccaggctacgtaatttcttcagacattgcccagtacattgtatctgaattcgataatcagacgctaagagtacgtttatctaccctatccctggtcactgaacatagaaatggagtattatgtttagaacgtgataaatggatgtatcatttttgtgatgcagctcttcaagatggaagacgtgagtatgggaatgtgggttgagaagttcaacagcacccgtcagccagtgaagtattcgcacgatgtcaagttcttccagtccggttgctttgatggctactacaccgcacactaccaatccccgcagcagatgatttgcctgtggagaaaattgcaattcggcagcgctcaatgttgcaacatgaggtagtatggacgctgacaagagaaagctcgttttaaccactaactaacggccatcaacaaggatgtgtttggaggttcaccattctatgtaccttgtggccattcgttcattcttttggtcagtggccgattgagctactgatgctgaccagatgttccttgtgtttgtctatatacacgttcaggaacgaaaaattctgccactagcaggaagtatgctgattccatccagataattgtctcatcccaattttagattgaattttatgggatagagcgagtataatgtagagttgtagcctccatctaaatttattgtaatagattagattttgttttatcctaattttagatttaatttagattctgttttatcctaattttagatttatttttatgggatggaacgagtatgagcctgttcagctgccagggctgcggccgcagcatgaacagtgtcgcactcactatacgtagccgcagccgcagccctctcgggaaggggctcgataatgtagagttgtaggcactatttacaatgtcatatctaagatggtgttcttttctcttgaagatgaagattaagttttttacgcaaaacgatgtgttattaatatataattgattgagttttaattattacaaacttaaaaaatagattaacaatgatattttagagcaacttttatatagaaagttttcgtacaaaacgtactgtttagccgtttgaaaacgtaccacgaaaatttttatcttcatccaacttttgttggaaaaatgaacaggtatattttgatatattttcgggattaagatagttttactaatttagagagggagcacaagttccaaacttccggtacaaagtgccgcgtgtccaccctgactgttcgtggcagactactgcacctttgggtgggtcactcccaagtcaagcatgacccagcacgcagcagtgccgcaccgcaccgcaccgcaccaccgctcatccgagcaaacgtggagaggaaatggcagaatccgattcccccgcaccagcaccggctcgcattgcacccttgcaccgttgcacgcacgcagaaaagaaaagaaaacgtcgcgcaccgacgcggccctcgtgacggacggggtcaaaaccgtcgacgagacggccgcgcgcccacggaacacaggcgatcccgcctcttgtctttccagtgggcgccgcgccggaattccaactccacagaccgcgctacctttcccactcctctgcctctgctctgcttcaccttccttccaccatagcagcggttaaatatttatataagcgagaaaccgctcacccaagcggccatgaacccgctcccatggcgcccctccgaacactcgttatcttcctcctcctcctcctcgcgctcgtcccggcactctcgcgcccggatggcggcggcggcggcttctatgacccggcgcgcgtcacccagctatcctggcgccccaggtcggtctgcctttgagctctttcttggttgggtacttgggtctgcagtgcttggctgcgcgccacctgtttggcgatttgcgtctgacagcgcgaggctcctcctcttgcagggcgttcctgtacagcggcttcctctcgcacgacgagtgcgaccacctcgtcaatctggtgagttgctgctgctgtgattccctcttggtgatgcgaatgggagattgttgtgagttgcgatcttgatgctttttgttttggggaatttggggttgtgacgttaggcgaaggggaggatggagaagtcgatggttgcagacaatgattccggcaagagtatcatgagccaggtgcgcaccagctccggcatccttcttatcgaagcacgaggtaagcaaaatgtgcatgttatgctgcgcaataccgcttcttcaatttgttcctgtatgctgttcggtgctgctaattatatagccataaattgatcgtatattcatatatgcgtgggagaaaagaatttgtctctgtggttagtgcattggattagctcgatattgtgttcgatcattagaaatttcgccggatctggctttatggtaatgcaaaagagattgatttgttcttcgattttagtttctagaaccttagtgtcttgactttgatacggtactctcaagagtcagcattgctaacctactcctttttattttgacccattcaaggacgacattgtttctggaattgaaaagcgtgtagctgcttggacatttcttcctgaaggtaatttcgcgcgactttatctagtttgtcttttggagtttggagctagattaccattctctggctggtctctttcttgatcagaaaacgccgagtcaattcagattctgcattatgagcttggtcagaagtatgatgcccacttcgattatttccatgacaagaacaaccttaagcgtgggggtcatcgagtcgccactgtgcttatgtacttgaccgatgtcaaaaagggtggagagactgtatttccaaatgctgcggtatgcaattagctttgacattacccccttgtaatttcccaagacatctagtttagaagttctttgccattgcttgcagggaaggcatttacaactcaaggatgaaacttggtctgattgtgcaagatctggcctggcaggtagccttcaccccctatacatttctgaacgaaatggacaatatgaattgcctttctgcacaaagttaattaacctcagtagtaggaactaacgagaccaatttatcttcatctcctctctcagtgaagccaaagaaaggcgatgcgctactgttcttcagtctccatgttaacgcgacaacggatccagccagtcttcatggaagctgtccggtgatcgaaggcgagaaatggtctgcaacgaaatggatccatgtcagatcatttgataatcctccggatgtaagcctggatttgccgtgttccgatgaaaacgagcgctgcacgagatgggctgctgttggagagtgttacaggaacccaaaatacatggttggcaccaaggattcgctcggattctgccgcaagagctgcggggtttgcgatgcttaaaccctgcacccgccaaactgaagatctgaaaatcaaagtgtcatgttaggctgttagctattttcgcccactttacttacacagttacactacttgagaagttgagatgtacataacagacaaagcaggtttattagtatgtgtttctgtgtagtttaaccttgaacgatattgattgaaagtaattggaactttttttcaggtctaaagtgctactgaaatttttcgcaaaaaagttgggagtatttcttttagaggaaaactgcttcaatttgctctggtttctgtacgctgcatccgcttcggattaaaggtcactcgtgggcctcacgttttaccccagcccagaacacgcgttgtaccgttccggccgaatcagtatgggcctcacgtgtgtcacaatctcgatccggccttccggcccatctatcacggtccacaccttcgccgcattcccgtttcggcccaactagtacgggcccgcacgtgcgaagaagcctaagcctatgggcgaaaaggcccacacaacgtgggcgccacttcacgacgtggtgggcagccggaacggcggttcgtccgccgccagttcgccggagcaccgccgcggtcctaccatccttccttccgtcggatccatctactacggccggagatctcaaccagccacctacctgtatggatgcttctagtagagtctctcctaccgatctgcccgcccttgcccccccacggccaccgccgccgccggcggccggcaatcagggaggcaacgcgtcggcgaatgcgagcgctactcaaggtattcacctatgcaggtggaattctggctcgaatttgatattgcgtcaagctcgcc

SEQ ID NO: 8145 - DNA, 665 bp, Oryza sativa
aaaagagattgatttgttcttcgatttaggtttctagaaccttagtgtcttgactttgatacggtactctcaagagtcagcattgctaacctactcctttttattttgacccattcaaggacgacattgtttctggaattgaaaagcgtgtagctgcttggacatttcttcctgaaggtaatttcgcgcgactttatctagtttgtcttttggagtttggagctagattaccattctctggctggtctctttcttgatcagaaaacgccgagtcaattcagattctgcattatgagcttggtcagaagtatgatgcccacttcgattatttccatgacaagaacaaccttaagcgtgggggtcatcgagtcgccactgtgcttatgtacttgaccgatgtcaaaaagggtggagagactgtatttccaaatgctgcggtatgcaattagctttgacattacccccttgtaatttcccaagacatctagtttagaagttctttgccattgcttgcagggaaggcatttacaactcaaggatgaaacttggtctgattgtgcaagatctggcctggcaggtagccttcaccccctatacatttctgaacgaaatggacaatatgaattgcctttctgcacaaagttaattaacctcagtagtaggaa

SEQ ID NO: 8146 - DNA, 13306 bp, Oryza sativa
cactccacttcttgtgtgccgagcttcgttcggttcatgtctgaataattagtggcaactttagccttctaaagcttgcatgcctgcaggtcgaaactagccccgctgctgctcaccatgacacacaagagagagcgtggaataaagttcgtaacatgatactgtaacgcgacgaagaataataggcatggaaaattacgtactataaaccacgtctgtaataaaaaattgaaaactactgttagataaaaataaacgtttgagatttccccacgtcaccaagagtaaaaatattactgcaatatgaaagtaaaatttttacttttataccgtggacaaatcttatacatccatatattttaatcaaatgatagtttttaggttttcattacatgtggtttacaacacatatttttctaaataagctagtcttatatttgcacagggggtccggtctaaggggaaaaaggctcagaattgtttgtcgtcttatagcattcaattcgacaaagaaccataaaaaatgcagccacatcaaaacttgcctgataaaagaattttcatcaacgaaaaactaatttacaagtaaagtccgtgggtgaaaatggagtgtccagatgagatgggacaaaatgaaaagagagaaaaaaaagttgacgttagcaccctaagcccagaaaaggccgaattgcagatccacgaaaggcgccataacccagcccatccatatgctatgggccatgatctcagcctatccaaataaggcccaagtaaaataatctgtccgtaccagcccacgaatagcccacgaactatccaaaggcagtagagcccttcgcctcccggccgcctcgacgcatcgacgacgccggcgaccaggagatcccgcggccatgccgccgccgccgccgccgcatcccctcccctcaccatgccgccgacgccgctgcatcttgctcctcctgctctccaggctgctgctctcttcagcaagcaggtcggtccccttcctctgccacgatccacgctgcctcaccgtgctgtttctcaacctccccgtgtgtgtgtgttttgccctgcagcttggaggaggggagggtcctcaccgtcggcgaggagctgatgggtgagacgatgccgctgcgccacggaagccggctgtacaggctcgacgggacgcggccgtccgcgtggtacgaagtcaagatctcctacccggcctccgtacgaactgactgacccccattggttcagaaaactagggaaatgaggcctccttgtttcaccattgatgcttcttcttgttcttgaaggcatttttgtgcttttagataccgtcgagcttctcgatccggcttgtggacgatcctcactctgtggaggatttggggagcatgaacaggaggttgctcaacacggagaagataattttcaaggctcagagcagcaggccagtatgtgttcataattcttcagctatatttgttgcttgcccgcagaattggactggcatacataatttatagtggctgtgtgatattgattttaggtttatgttcttgtcacggtggagcctgaaggggtagttgcaaagccaaatgtgccggagagagagcttgcgatgttcaacattggtacgatagtatggttctttatgttatgttttttccttcaatgataatgaaatcagatcgatcgaagcaagacagaaattttagaaactctaatgaagtacttttgttgttgggttatggtagcattaggtgtatattctcagagttggttagtcctgtgaatatcgtgatcccataggatgaattttgaatagaggcttaagcaacctcatgcatttcaacctttgatgtagtgctcaatttttgtcacttccctgttcgtctaggaagtagaggatagcctgagggtgtgaagatcaaatgatcaattctaataggcttgatgcaacagttgtaatttcaccttctttttacaataattttgcaaacttcacaatagccaaatatctcattggtgtggagaaagtagatgatatgcagccaggatatataaatgaaagaaattaaggcacttgtagtagccatggctaaccaaaggcaagggttcattcactaacctagcagatggcttcagctccttagttttgtttttagttttcaccttttgaattttgacatggaacctctgtgtccttatgctgtttgcatagacttatttgatgctagtgtacacttttttaatgaaattggtgtgtggaattttggcttttctagttagtttggtgcttttctgctaatagctactgtcatttaagaaagggggaagtaagaaccaacttgttcttatgttcagcaattataagaaattcgttagagtcattccttggagttgggactagagtccaatgttgtgattatggtttggagtttagacatattacctaatctataactcttgtcacgtcctaattgcatatgtagttatccaaatttctgcctcattgataagcatttgtaccccttttttttcatcttgtgacaaagatgcctgaacttcagttggagaatggtattttgtctactgtagagcattttttttgtggatttgaaatccataactacggttgagaaggaaccttgagaaagcttgatctaagataaaatacttatttatcattgatgcttttttagttacttgtcctttagtatttggattgcatctacttttgttttacagtcattttgtgttatttctatctgactgacctaaagcttttaaatattactttgatttgattctgcttcaaggatttgtgtttatgctttgacaaagcacctagtcaatcagaaatatctagaacatcttctggtcgtacaccaagaccttggttgtaggtttctactgaactttcagtgtctaatgccgaaactgaaaatgttattctcgcccatccaaggtcatgagattaatatcaatctgtaaaactttagtctctggttggccagttaactgcatgaccattgatttctgttgataaattatttacttcacattttatgtataatttactttggaaactgtatgctctaagaaatatgtctgattaggtagttttgctgcccttccttgcttctggatattatcgcctatgctccttaacctttcatccggttcaagcattgaaataacacctttgatcagagcggtgttttgtttgtaattatttcttttgtgcagtttgcgacgaacttatgcttgggatcccacattttgcctggtgggttggaattggatctctgttctgtattgcgctggcatctgtggctccctattttctccctctgcacaagctacttaactacgaagccacagaactgagtgatgactttgcggctaagctctcatgatagatggaagtgtgctgaatgatagaaatgtttcattttgcagagtaggctattgtacaggcacctagctcttttttcctttccatcagatgcagctgtgtacaagtatttactgtaccttgcaatacaatggtagattcattcatttcgatcttgtaagattggttccgtgatgggctctagtttactttgttttttcccggaaaaggctatacatactaactttttctctctaaattcttagtagcgccgatgtgtcatgttacgagtgtatttagatttatttattttttataactttcacctatctaaatcaaatggttgagatgattacttgttttctccaactgaatgaactgctaaaaggacagttttatgccgttttctcgaatgtgcttgttgaccggacaataaaaacatattctgtggaacaaacagtagcgaatttatatcagcatactgatatgatacccacaagagatactgagttttcaggtgatcaaaacaaggacagattggaagactccttttaaagcattgatgccaacgtttcttacaacgacatcaaagaagagacaactgaattattgccagcacacttacaagctacagtgtagcactaaaacgagaaaaggaacatcgtctgacctgagactctcagaggtgagagggaaggccacgaaaaacattggaggatctatctcccgttctccgtgagctcctgacgcgaagcactaaaatatatgagactggaacttgaaccacatcaaagttttcattccggcacggcatccgccaactgcaaaccacccttacaatgacgtggtgtgtccccgcgtgtaaccgtgaggttgtgttctatctagtatttggttgttatagtttaaaatagaggaagtaaaaaatatataactttgaaagaaagtaagttgcacttgctcgactcggattagctcggctagttagttcattgacaaaaaatagtcttaaatgataacaagccataaagagactaatttcaaaggatgttaaatgaaaaggtgaatatgtagagaagcgttcaagctaagtatgtgtacagtcctcatctccttcttggcgtttagattaagatttatgcataaacatttgttaaagatcctcttctactaaacatcggtaagcatcctcttctcctagtagatggcaagattattaaatattgtgagaaacacattaagaaaaatacttttgataagcacatcattaaacatctactactatgttggagatgaccatcagccaagcaagcatcttcctggcgactcgcctgctcaattctccgtcgctttcggtgcagtttgccattgatacacacagttacggccagccagggctctctgtcatgtcgtcattaacgtctgatcgagccgtgtaaccacaccttggtctgagtttatttatatttatatattttaatcagcatgtgttttgagtactacagtactatgctaccacttccacaattaaagctgcatatgcgtacacatctttctgtttccgaaaaatagatggacagttggaaaccctgtgtttggaatgttcgacggatttgattgatatctacgtgtaaccaacacatcacctccgtatattcggttaacagttactagtaataactatacatactgtctccgtaaatattacaaagttataaatacatttaaccattaatttttaaaatttcgtatggtttaataaaatgtaagtttgaaagtatttattgtggtgagtctaaaaatataattcttgtgattgttgagttttatgagcttacaagaactgatagtcaaagattaaaattttggatttagaataaatttaaaatgataagtaattttaaaaggagggagtagctaaaaagatcctagcttttgaagttaataactgatatatatatatatatatatatatatatatatatatatatatatatatatatatccaagataatattgatggagtttattttctcttgcaaatgttccagccttgttcccgaggcacatgtgcacatactccctccgttccatattataatgtattttggatggatacgacacatcctattactacgaatttgatcatactctctatctagatttgtagtaaacgtgtcatattcacccaaaatactttataattgggacgaagggagtacatcactatacatgtccacgtgatggtgtattgggttggtcaatatcacacctctggatagtagcgttcatcgctggaaatccatttatcaacgtcaagaaaaaccatccaatcctccatgctgaatattgttgatgtgtgtgtgttatgaaaacagcctgtaaccactagcttgcttgttccaggatagcactgaatcaattgtttctgatctcttgcattcaagtcctgttttaatttattccaaaaaaagaaatgttattttttttacccttattaatgttaattagcgtccacaagccctagtaggcagtagcgccttatactatccagtttaaaatgttggcttgaaactacagatataccttatagcaagttcaatagtatatcccactgctagctccaattcagctatagccaatctaatagccaattcatacaatagttgcttactatactattcatatatggtcccatctgtcatacacacactgtgtcttggagtccgtgctacagctggttacagatctgtagcttgctgctcttctctctcatcttctatctcattaaaatatgtttatagctggctaatagtgtgctattgtacctgctcttataaactagtactcccttcaactcaaaatgggcctgttcagcataccggctgcaaacaggtgaggctgcggctgcgaacagtgagtgcgcgcgcccgacagctgaacatgcccactattacaatttctatcgtctaaattttgttctagaacatagtattttctcactgtattttcttacctcaaccaatcacgataattctcatttactctctttacatgctacctcatttgaagtaatcacaatcattcaaatataatcctgttcttctctatgctccctgcgaaaagctttataatacatgtattttgtgatggagggatagtaaatacatctcgtattaacgccacagctgcaatgtcccatggtgtgtggcatggtgtcaaaatcaaatgtaagaccgaccatggacataaccatgatgcgtcaagatcagcttttgaagcaccgttagtacagtgataggacagaggttagagcatccttctccaagcaacaaactataaattaactttcatgttgggagaattaatcaatggttctagcaataaactctcaagttgcagtattgcaccaaagttcaaccagaaattagatagaccagattattaattactagtttgcagcccatcacgatcgaattgaagccagtggattgatcggtgaaaggcagggatccattgttttgaggctaatttgaacatagctagctggctttgcccgttttgctgctgcatatatataatattaggtgaaaccccgcgcattgctgcgggaatttggtatgataacaataaaaaaataacgtgtaagatagctagttaacatcaaattaagtaaattaatgtagtttatgataatttaaatttaaacagtatgtagaatagtgattcaaacgtaaaaagtaaggtggtatgactttatagaaaaagaaaagtagggaaatggtttggaccatagattaatcatctaaaggctaaaaacaattgatgtaatatgacttaattagagggaaaaaggagaaatataatttggaccatagattaatcatttaagcactaagtaaggatgaactacataggtatataggatatcataaaacataataaaaatatacattgaaacattatgtgaattatattagatgataatttaacatgtttgtatttgaaaagctcttacattataaaaactataaagatatagcatgtttgcatgatgtttaaatggtgacgattgttagtggatgatgatgtggcatcttgttaattagtggattggtggatgatgatgtggcattttgttagtggatgatgatgtagcatctttgcatgttaagcttaaggagttagtgggggataattttatagtaagataggatacatcacgagttgcacgatgcacacattcgtgcgagtctgaaacataagaccatctgctaattaaaagcttagccggacgaacgggtgggaggagcagtgccattaacgactaaaaatttgcaatcacgttttaatatccctaatattatacaatatacgcttaatatcctgtttgacatagctccaaatcttatattctttgctagattatattgtaaattaatttataacggtttgaaattttatactttctataaagtatgaataaaatgatcattattaaaatactatcaatctaatcacaaatttagatccatgaatttttgtagttatgaatgttcaattataagaaatcttgaatatagagctatactaaaataatcttaatttactgaatcaatacatagcattaagcgaaatgatgtaaagtaaactaacagtcaaagcttgattttggcggtcaaaataagccatatatttctagatggagggagtagctggcatagtgttaatagcaagcttcagacgaaaatgttcataacatttttattttatcctttttatttgtgtaaaaaaattgggtggtcgatatcatgtcttaaaaacggagggattgggaacccctcccctccacacagaaaacggagcgatagattaacacgtgattaattaaatattagctataaaaaaatttaaaatggattaatatgatttcttaaagcaactttcctatataaactttttgtaaaatgtgtaccgtttagcagtttgaaaagtgtgcacatgcaaaacgagggagatgggttgggaacccatgggaaataacacaacattattaacttcaaaaacaaaacctatacaacattgttttccaaccagagaaagtatataggcatatggtgtaataactattttctccgttccctaaaaaccaacatagtactaaatatgacacatcctactattacgaatataaagatatatatgtctagatttatttgtgctagaatgtgttatatccaattcgttctttttttatgagaccaatggagtacttatggagattagaaactagtactagatttggcaatggcaagtagtacaaaagggtagaagaagatgaataatacttatgcttcggtgatgtcctgttccggtttctgcttcagttggacacgagttgctgtgtacagtaatgttcttgatggcagggttcatgcatcaagccatcaacccaaaatgaaagtaagctcatgcatctctccgttggcgtcgacagtatccaaatcaaatcaccagtagatatatgcaatatatgcaatgcaatgcacgcgtgttggagtatggtttaggtcaaatccagcagtgcggatatagtaaccggccttatatgttcggttgctagtgcaccggccatttatgtactgcaaacgcgacaaacctgatcagcatcagatcaactgttcagctatagtttcaacaaccgaacacggattcaattctcaaaggggtctagttagaacaagatacagaggaaggatcccatggcttgaaatatatttgttaatgcgatgtgtatgtatgcagtactgcagagccagcaccgtcgtaaaactcgggtgactagtaacattttctggtggccgactaatttttatacgcatcgacagctaatggtaatggaaacgatagcggcagagctcaggcggccacctaatctacccgggagctatctccgccgctatatatattcttttctataaataaatgattcttgtgggttttttactatggtgtaagaaatttttgacagagtattgtttccatgaggatggtaatgattctgatttagttgtatataaaatttaatgtttctaatttcgatcaatttcatataattgaattaccaaatataaaaaagttctaaccaatcaagaaccgttttcgtaattatcatttccgacatttccataccatactcacaggatagatcctgatcctgctagctaggagtagaagatgaagagaaagacagaaacaggcccgaacaaccaattaaaaccactccataattaaattaagtagtaagctggagtacaatccatccattgatcaccatgttgagagactattgcccaggtaagccaatacggcaataccacagccacacgcgcgcgcggagctcctaacgattgtccggtgaagaaattaactatcttctgccattccgtattttccgttgcttctcgttgcacgcacgcgtcacacgagcacggctacctagcctgccacgaccgtacattggcacatggattacgtgccgcttcatccactggcctccagacctccacgtcgtctcgctcgatcgatctcctctcttctccgctctccttgaaccttctttcttccatgatgagtacgagtacggcgcccagtgtgaaatgccccccacaaactgcgtgagaatttaatatttgccactctatcaaactgcctgagaatttaggacctgatcacttttatgacattttcaaccatactattttccttaaagttatcaagaaaatatatacgtttagtttgttgccaaatttaatcaatacaataataaatcctaccaaaattttagcaatatattaccatcttgctaaaacttggtaaggtttattttgactacaatctaaatagacccttactatttggtactctataggtccggtggtatttagaaataagaatttagaaaagtggcatttgagcaatggtattttgatacagtggcaaaaaataaaaagcccccccccccccccccccccccaaaaaaaaaacccacgcaccccaaaaacaccacaaactgcacgaccagcaacacacacgcacgcaatctagcgatctccccaactaaccccattaactgatcacccgtcgactgatccctccaaagattgtaccaccattaatcacccttcatcattaattaattttcctcgacaaaaatgttactcaatccatccaattctaagcgagtaactttttactatcttattttaaatttacgagtttccgtgtcgaattttgatcgtatatcttattttaaactttttatggttagtatttttattattattagatgataaaatataaataatactttatacgtaacttatgttttaaattttttaaataaaataaatgattaaaattgaacataaaaacacattattatacttagaatgagacgaatggagtaattatgtttcttcactaattaagctgaccaatcgccagtgctcacacccactctcctagcctagctagtatctatatatagacgcatataaccacacgcaagaagcatccattccgatattccatcgatcgatcacgtcgcaaacacacacagtacacacgcaagctacctagcgatagcaatggcggcggcggcgagatggtgggtggcggcggtggtggtggcggtggcggcgatggcgggggcggcgaagggggacttcgcggcggacaaggcggagtgcgcggacaagctgatggcgctggcgacgtgcctgacgtacgtggaggagaaggcgacggcgagggcgccgacgagggattgctgcgccgggcttgggcaggtggtcgccggcagcaagaagtgcctgtgcgtgctcgtcaaggaccgcgacgagccggcgctgggcttccgcatcaacgtcacccgcgccatggacctcccctccggctgctccatcgccgccaccttctccgactgcccaagtacatcacattttacactttatttaatcatcatcaattgattgatttattaattagttaactaacaccgccttaattagtttgttagctagtttggttgatgccatgccggccgctttgtttgcttactatccgtcttagacaaaatttaaatggtttttaatcgtattctattttctagccttgcctttgaaacggctaacgatgcagatatttgaagggaaggatatccctccaaatatttttttaagagaaaattatgggcgtgttaagaattaaacataagatatcggattaaaatcactatctcttaccacttcactatttagaaatttcttttacttataaaatattgtgattgctctgtctatttttttactatgatcgtcggctgtagttcaacttcatagctttgcattgcatggacgtgctcaatcaagtttgcttcgtgcatgctgcaaattaatcggtttaattttttttaaaacaatggatagatatccggtttctatatccacaagcgaacatatacaaccaaaatgggtatggatggtataatttagttttggatgttgttcctgtacagtaggagtacaactacatcgatctcgatctggcgaattgaatgaaacactaacctggagtggtgctggaccatgcttgcttgttagaactgtacactactatgattagctttttgtcgtgcttgcacaccgtacagtaacacgtacgttaattgcacggtgcaagcagggtccggtcgatcgaccaaataattaagtactttctagagcaatttgctacagaaatcagaccacctctgcttcaggaatcaatactttcttcatttgatatcatcattgccatgcctttttttgcttctgttgatctgttcgtgattaattcgtcggtaattagcatgactgaactaactgcttgttactaatttggatcgatggccatgtatatatgcagagatgctgaacatgtcgcctgactccaaggaggcagagatcttcaagcagtacgcgagggagcacgagtccaacaacgccaccaagcctgctcctgctgccgctgctgctgccaccggtaataatcattaatcaatctctgatcgatcaaacaataatcctcttaattacactaccaagaagaaataatagtaatcagatgacagataatgcatctgtctaaatcttgagttaattaatcagtagtactataaataataatgatgctaaatcgagagagagagagagaattctgagctttctgcttgcatgtgcgagctaacgacatgtagcacggtgaagtgccatgccgtgcatgatagcaagagttatgtcgagaaagctacagcaaacgctacactagctgctgcattgaagcttcgatgtagaaagcgtagtgccatgagaaatcaatgccacactcctccgtagtaaccgccacgcatggccaacccgtccatccaaccgaaactgctgcctgtactgtactgtacgctggagactgtacccaaaacttgcagcagcagtagaccagaagtccagaataccggaccatgcagctgcggcatgtttggcttcatgactaaaaacgtggagaagatccctagtttttcacgcgcacatttaacatactactaaacggtgtgttttttctaataacaatatataaaatgttttaaaaaattatattaattattttttaagtttaaaataattaatatccaatcaatcatacgttaattgttcatttcattttatatatcttttcaatcttatattggacagcttaggacttcttaggaacatatgaatttcacaggaactgttcatttcctcctaaaagtttcttaagatgaattcctccatttcgttttactaatctgaaagactggtaattgca

SEQ ID NO: 8147 - DNA, 7566 bp, Oryza sativa
ccacattttcagaggcgtgtggagcaaataattcacatcaacaatacgattaaaaagagagaaaaaaaatagatgctggagggataaactcttcagcatatgtgagaaactgagaaaccatgagttggtgtgctcaggcgagcatggagcgaagaacagtcgttttttcctcaaacgtttttcgtgtttacgttttccaaactgttaaatgatatattttttaaaaaaaatctatagaaaagttattttaaaatatcacaataatccatttttctattaatacttaattaactatatgctaatgagtcgttttgttttacgtgtttgggagatgagttcccaactcattgagaagaacacagccgaagtcaggccaaagttttggataatgatggccgtcgggtgactgggcggcgggaggaaaaatcggtcgctcccccctcccccgcccctgcgcacgctgatgtcgctggccccaccacaatacctgtccccacctgtaacaaatcaaccacatattttgaaaaccctctattaaggaattttggtttattttttgttccataaaaaatatttcacctagtgtacttacaaggtttcactatgtatatatctaatgttgcagtgaactgaaatattccattgcaacaaaaaatccacatattttggaaaccccctattaagggaattcgttttattttttgttccacccaaaaatgtttcacctagtgcacttataatgtttcactgtgtatggatcaaatgttgcagtgaactgaaacaatctttcgctatttgctgaaacattgtttttatataaggtgaaacaatacccaatttaaatgagtgaaacattttcgatctacttagtgaaacaattccgatatacttggtggaacatcgtgcaacatttaaaaataattcaataataagcttaaaaaaattgtcgtcggaatatatccacgtgtggtcttgttttgaagatttaattgcaacgaatttaatggtgcaatcggatcataatttggataagtaatttaagagaaaaatcagtttaaattagtttttacacgtaaatcgggcgctgacgtcagcatgacgtcagtgcccgatttttctccaaatcatcgggcgcccgagccgtaggcagcccccaaagttttattatttattaattaatcaacatttgttttacacgtgtatttctatattttgttttctcttaatgcaatggaccaaggccttatgcacaaactaggacacgggcctagtcgcccggcccaccacgtccaagtatgcctcacgctctgcctcgcgccacaggaaagaggaaaggaaaaagtccatttggactcccttaattatacgccgaatcttaagtcgtacccctcaggcctcaaccagaaaaccggataggacgactctatgaactattgaaaccagtgcaatttgactccctcggcggttttgctaatgtggtgctgacgtgacggtgttgacccgatcttcgtcccacgtggcgtctatgtggcattagaattaaaaaaaaatctgtggaacctatttgtcattaaaaaaaactgggtgatactgcaccagctggcgaaccgcaccagccggaacgcctgcccccgccatgccgcacgcggcgaccgccgagccgcagtagtggaacagcgccgccaaatcatcagcgcaacaacggtgacgtcgacgagccgggtgatgagctcctccaaatcatcaccgcgccccggcgccgccatctccatgcccaccgccgcgtgtggcgccgtggcggcagcgtccagcagcagctagttgttgccgtgcacagcgacggcatcgttgaagcgggctgtgagctgctccatctccatgctcgccgaggccaccaccgtcgacgtcgatggatcagaaagctcgaccgctggtgccgagaattgacagtcttggactctggttggcatgctcgatgatcggataaagaagggtttggcttcgtgaatcgtgatgtccgaggagatgacgtcttgcttgctccttttatggcaagaaagcgcgcgtgcgtgcgtcgctgacctgagtccgtctctgtcgtcgggggaggcagcgccgacatcccgagatggagaggccgactcctccctctcgagtgacggagacggaggggtggcccggcggcacgaagaggagctggtccgcggtagcccagaccggcggacggggacagggtcggcctagaggagagatctaggaggcgctctttctcctgctgagtcgagattgataggggtggacaggcagtggaggtcgcggaagccggcgggggtggcggcgttgcaaccggccctcgcccgcccgctgccgccgctctcgtctccggcctcctcggccgcggcggccgccaccagccatgggacgcaccgccgcagttctggccctcgcccgccgccgccgtcgctccagctctccccgcagacggcgaagggggagagaaaggggagagaaagagagataggagatccggtcgcgcggagacgcgtcgctgcatgacctgcggctcgaaggaagagagagaagggagggagaaggaggaggaagaagggttggagagggaggtgggccccacatgtcagtgggttccacaatatatttttgtatgtgaatgatagatgtgtctcacatatattttttaaattctaatgtcacgtaagcatcacgtgggacgaagaccgggtcaataccgtcacgtcagcgacacatcagcaaaatcaccctctaaaaccactgagggagtcaaattacactggtttcaatagttttgggagtcgccatatccggttttctggttgagggatatgaattagattccgcgcacaagtaagaaagtcaaagtggactttttcaaagaggaaacagccaagttggtggcatgattggacaaattatttcacacataagcagaaaactccacaaaaatttacaagccatagaagtttatgagcacagtatgagacgaaatttggagcattttttacatacagaagaaattggtgacttgcgtggtgagagcaacaccatcaatcaaagaagaaaaacaatcacggaatgatcataactggaagagattttcacattagaagagcaaggaaaaaaaaacatgttagtcggatgggacattagtcacagatcaattgtaaatatttctattctagagtgaaacaagtaccgatcaagttcatcttctactccgatgaactccatctgttttattttgttgcgttatagtactagactttaacctacactggcttggctctattaaaacaacatttatgtgatccaaaattataatcttaaataagtacttttaaatataaatctaataaattcaattttacgtcataaagattataccctaatagagcaattgttagccaaagccttgtcgtaacgaaacaaaatacatcatatattccttttgaaaacgggtgcactattttaaaatgacaaactaataaaataacacttaaacatccagttctctaattaacacaggttatcttatcaacatgtcatgctctaataactgtacgtctattgcacagctcaaatcattgtacatcatacatctggaaacccatctgaaacacactaaaaagaatttacatcacatgcctcttttagccacaatagcaagacctctacgttctttgcccaatcagacagcacaagtgaattacacagggtttgaaaagtaattctgggaacactctcttcggaggccatgtagtacccaaccagcaatgctgtcagtactaaggtgtacctttaaaaatatttaactctacgatatcggaaggaaaccgtaaaatttacatggaacatatttggtgcatatgggaagtgagggcacaggcgaaattgtcccatcacaattcttgcccatccaaatctgtcctgacagggtaatcaaggccctgtagaactggcattcttctcaaatcctcttctgagtacgcagggatgaaccaatacctcttgtcatttccaaaaacctggtaacagaacactgtttagttagctttgccttttgttaaagttatgttcacttattcacatgtggctgactgagttcagtagtgatgtcggaatggggtttttcatggcacgcaaaacaagacaagtcattagcgcacgtttaattgagtattaattattacaaacttgaaaaataggttatttgattttttttttaaagaaacttttatataaaaagttgtttttttgcaaaaagcacaccctttagcagtttgagaaagtgctaatggaaaacccggaagttgccaccccctaaactcactaccaaacagggctttaacagataagaattgcaaccttgcagtagaatgcttagcaaaaaaagaaataaaaatgaaaaagaaggcatatttcagatgttgaagataacacatagtactaacttgaattagtactagtgtactaccaggctagcggctttgctgggttatattttagtaatactggccaaagtaaccataagttaaataaatatcatggcccttgagcacctgtaaaatgccacactcgaaatgtatggaactctaaatgacgggcagcttaaaatattagaagtttggaacaatatatacaattttcacaaattagaaatagaagttcaagtaaattcttaatttgccctggaggttgatcacatcccttatctgtccttgcagaaccgctatttggataaggaaaatttggcacttgtatgggaaatgggataataaaatgaggagtgaaaatgggtggatctaccacagaagtctaaattagggggtaaaaggtccacttttgatttctgaactactctggtttacaacctgtactttaataccatttaatttacatcacacaactgttggaattggtgcaaaatgcatccaaagcagctttcttgactggttttgggttttgtggttgccacatcatcatttttttaatacagtatgtcatttattacctcatctggaaaaaaaggagcattaatttccttccgtaaattatttgccacatcagcctatgactctatgcatcatatatatgatgtcatatcatccaagaccactctctaaccatcatatacatgattttgataactggggacgttttctaattagcattggcattcagaatatgacctccctctgtcccaaaataaacaaacctagtacgggatgtgtcacaccctatactacgtttgtttattttggaacaggtggagtaaacaaaagggatagtagaggggccaaaagtatggcttccctctaaaatatctgcatttgtgcatgtcctataatcccacctcatcaaggtgtatcaagcctttaaacaaagataatttcgcgtgcgcttgcaccattacaagaagtaacagattatttaacatgttctgaaagcctaacctgaatgaaattcctcttccggccaatatcatacatccagcgtggcgtagttttcttttcatatgcctaaataaaaaaataatgtaacaaattaatctcaccttggagatatcaaaagtaagtatttaatagacattgataaatacttgagtatttaattatacattctagatacttgcctcaattgttgttgtattagcagaaacaagtgaaacatgcataatcataaaacccagaacactcaaggaaaaggccaggttcaacactgcagagaaaaagaatattataagccaatcctcagtcaaacgtgcccaagaataatttctcatgaatgaaagtaatgcaattaccaaaggtgaggaaagtggttgcaagtgctgcaggacttcctgggatatcaatatcactaaagaaggctatgaagtgaggcaatagagaaagggtaaccagtgttgtctcaaggaaggtgtaaaactgcatggaatcattaaaaacatgaactcagcttcagaaatcaaaggatcgaatagctgtgtggaagaaaaaaggatagtagtccaaaataagtcaaacgaaagcaccaccaaggcagcagcatttatactgccaatattaatatgttattatcagagaagtgaacacactaattactctgatttatatttttttgcattattttcttcactgctatataagtggaatccccaagtagatgagaaaagcaataattaatattcaacaataacacactaattactctgatgcatcaaagccacaaaagccacagaagatgcatatgcagtgggtcagcagcatgacagaggagctaccaactgtttgttggattgcgtctccattagtttagtacttaatatttggttagcttgtttattagcttgtaaacataataatatggaaacgttatgcaccagtgaccaatgacatgtccgatatcaatacatcttcaatacgcctccgatacgtatcgaccaagtattgtaaaattaaatagaaaaaaataattagttttatgttctgatacatggtcgattcatctccggcacatatgacatatgcgatatggcccggcccacatagccacatgataaatcacatccccctacacacccccaccaaagcgccatccttttaggagctaaggattgtccttgaggtacattgtacttgcttgcaatacattattgattattttagttgtaaataattgagaatttgaaagtatttttattaaaatatgtagacgtgtcgccgtatcggtatttttctgaaaatggtgaatccgcagatcggtattgtgtcgtgttgacgcatctatgtccttgcatcatagatccacccctctagctaataacatcgaatagaagaagcattttaagtattcatggtggcttaaattgattatacatttcacgtgcgtgtgtgtggtttggggtgaatggacatagtttgctgtataagatattgatttgtaaacacagtgaataaaaatagactgggcaaaatgaaaccagtctcattgcaaaaagaagggttaaagcaatacaaaaaaaaaaatctgtatagttcgctagcatcacaataaataacagactgtgaatatgttagatataccacaactccagtagttattgaacgaactttttacattttcaccgaggttgtgttacccagagtccctatgaacaatctgcgaggtattcaaacgtcattttttgcatcaacgcgcctggtgaatgatgacaccgctcgctctagctgtcaccgcacgctaccgccctaaggggaagaaggggagagaaagagagagaagggaaacagggaggagaaagcaggtatgacatgtgggccccacatgtcagtgggcccatatttatgactaatgggtcccacgcatattttttatttctatcgctacgttggtgccacgtgtaagaaagactcggtcaatattgccacgtaggtgccatgtggcaccacgtcagcaaaattgcctcccaaaaccgctcagggagttaaattgtaccggttttaggagtttgggggtcgagatatctgg

SEQ ID NO: 8148 - DNA, 10927 bp, Oryza sativa
aattaaatagaaaaaaataattagttttatgttctgatacatggtcgattcatctccggcacatatgacatatgcgatatggcccggcccacatagccacatgataaatcacatccccctacacacccccaccaaagcgccatccttttaggagctaaggattgtccttgaggtacattgtacttgcttgcaatacattattgattattttagttgtaaataattgagaatttgaaagtatttttattaaaatatgtagacgtgtcgccgtatcggtatttttctgaaaatggtgaatccgcagatcggtattgtgtcgtgttgacgcatctatgtccttgcatcatagatccacccctctagctaataacatcgaatagaagaagcattttaagtattcatggtggcttaaattgattatacatttcacgtgcgtgtgtgtggtttggggtggatggacatagtttgctgtataagatcttgatttgtcaacacagtgcataaaaatagactgggcaaaatgaaaccagtctcattgcaaaagatagggttaaagcaataacaaaaaaaaaatctgcatatttcactagcatgacaataaataacagcctgtgaatatgttaaaaataacaaaactccaaagcctatctcccttctaaacacatcctaagaaatatatcaattacagtaatatcataccaggaagagaagaaagtatttgtagtttagtgccccaacacaattaacaacccatacacaatgatgatccatcttaagaacacatcttccacctgaaaccatgattagtgataaatacacaatattgttgactatacaattcataataactagaacaacaaaaaattgatcctgaagaataaatcaacaacttacaaacagagcaatgatggcatcgaggtggcttcatctggttgcacttcctacaatacctagcccttggatgtcctgtgtcattgtgagcgatagattgttgcgagtttacctggctattgaaatctaagccagaaaggggggcagtttctcccctctcctcatcaaagtcgagattccaatttggtggaacagaaccagggtcggtgaatacaacagaaaagtagctccataaaagcataacaagctacaatgagaaataaactaattagtgtcaaaagcaaatatgcgggaaaaaattgaaacggtgcgaaaatgtttaatattacagggctaatgtttatagtcaactattcttcgcatccaatttttgagttaatattgtgattcttaatcattatagcatcaatattgcattttgttcacctcattttgcactttcctttcttaacttctcagtacaatccatccgcatttcaacaatgtgggtagtgtatatcaggaaacatctaatatgttgtcaagaagcatgataggaaaataaatactagaccatggacataacagctcaattgtccgaacatgtatccagctcactcgtagccactcctacttagtacaaaaaatctgaggaaatacaacgagggctacttagtactgattggtatcagggctacttagtactaattggtatcaaaataaaggtggaaaaaaacaaaatcaaaacagtgcgaatatgtccaatataacgggggctagtatttataatcaactatttcgggcaaggaaacttcagttaacattgcggttctctaatcaatatagcatcaacattgcattttatcaactcattctgccgcttttttatccttaaatctatcactgcaacccatatccatttcaacaatgtagcaagcatacatcataggcaaatcatgtattttgtccagaaacatatattaggaaaataattacttataccatggcaacaacagatcaatttatcggcaaatccagtattttgtacagaagcatatattaggcaaacaattactagatcacggtcgctatagatcaatttatccaaatcagtatccagcctgcatatagccactccaaccaagtaccccaaaaaaaaacaaccaacacagataacaaaattttcgacctgtatcctaacattgctccaaaaacactcaatctctcgtctacttgcgagattcgacccaaccagctaatcgttttcaccgtttttgacacccaaaccccccccccccccccttaagagttcgagccaatagttaccaggaagtggaagaggagcaggacgacgagcgcgaggagggtgctggcgccgccggcgaagagcgcggggccgtagttgtacaccacgaccgcgtagtaggtgaccccgacgatggagaggacgagcaggatcatgatggagcccagccccctcagcgcagtgcagaacctgaacacgttccacgccatcgtggcgcccgcggatctgtgcatctctccccacctcccccgcccgcgcagcagcagcagccgacgcacgcctccgccgccctgcggctccccgctggcgaggggattagggaagaaggcgccgccgccgccgccgcgcttcgccggcgagggggattagggaagaaggatttggagatggaagaagacaggggaatggcaaaggttagaggtggagtacgcgggcggtcaggtcgtcttctctcagctccgcgtttttactttgaaaaagaaatcgcacaaaaaagatcgtttagagggatttctagatgaaccataaaagaaaattgaaactaaattaaaattgttgggtaagggttaactgaaaatagtcaaatttgttcaaatcggaatcggttagaacttaggattatctgattatgattcggtgaggtttcagtaccaaactttttttttaaaaaaaagacatatgactatatgagtgggtattttatggaaaccgtttggctatgccggtgccgccggcgctcgtaggatggagatcggtgcagatggtgaattcaaattcgagacaaaagtgtgatggaagcggaataatatacccgcatcattgctggtggtaggatggagattgatgcgcgcagcgagcgaggagacgggagtcgaggttgagaggatggggaaggtcgattgggtggctagggtggtgacatgggtcaacaggtccgttggtggaaaaagtcccatttgtatccctcgatgattctttatagtaactctggttaacaataccttgttgaaaatgtaaaaagttcggtcaatagttactccttacagactaccggctcctactccaacagtccaaccatactttgagttgtagaactgttcttgtgtaattgtgtttttcttttagctaggtgatattgtccaactatcttgtggttagtattaatccatcattcacactagaattaaaaaggattttttttatttgcacgtttcccaagatacattttatgcaaaaaaaaatcctatatatctattatattattaaaaagccttaaaatgaggtaccacgttcgctgtgtgggctataaattcccacattaatcggagaaaaagaaaaaaaaaggagagtccaagtaaaaatacaatctaaaaatagctgaaattcggaattaaaaataagcaatattgaaagaagtttccatataagaactcaatacgagattaattaaaattagaaataaaaataaaataaaataaaatccaaaattagaaaaggaaaggagaatccaagtagaaatacaatttaaaaatagctgaaattcggaattaaaaataagcaatattgaaagaagtttccatataagaatccaatactagattaatcaaaattcgaaataaaaataaaataaaatctaatattagaaaagaaaatgagagtccaagtaggaatacaatttaaaaatagctgaaattcagaattaaaaataagaaatattaaaataagagtccatgtcagaacctaatacgagattaattaaaattcggaataaaaataaataaatccaaaattagcaaaagaaaataaaagaagagttcaagtaggaatacaatttaaatttggctgaaattcggaattaaaaataagaaatattgaaagaagaatccatataagaacccaatacgagattaattaaaatttagaataaaaaataaaataatatccaaaattagaaaaaataaaagagagttcaaggaatacaattttgaaacaactgaaattgaaaataaaaaataaaaaacattaaaagaacacaatacggtattaactattttttaaaaaagatgaaattagaaaaagaaaaataagatttcaattaggaatacaatttataaataactaaaatttgtgataaaaataaatattattgaaagaaaagaccatctaaaacacatgacgagataaattaagtaacatgcctataaaggagtagagtggtggcggttgatacgacatataaaaattgttaataaaacaccaaatagaatcctaatgacgattaaaaggagaaacgtcaggcaggccgtgaagcaaacgagtaaagcagttgccaagacttctagaaagttaaaaaaaaaaaccccattgataatcatattcgattttaaaatcttaatgacaataaaaaggagaagcagcaggctgagtgtataagagtatagttgcagagcctgtaactatagaaaataaaaaatgaattccaacgatagttatgtttaatttttagaatcacaatgataataaagagtaggcggcatacgggttgtagaggggcatagtggcatcgtttgatgggacttctaaaaattataaaagaatgaaactacaagtccaatttttaaaggttcggaacttctaaaagtaaaaaaaaacctatgataatcatgttcgattttaaaatctcaatgacaataaagaaaggaggcaaagggcgagccgtagaggagtacaatggcaaagccgctaatggtttggcgggacttctagaaactaaaaatgaacccaaacgataattatgttcgatttttaaattctcaatgacaataaagagaagagacagtggacgggccgcagaggagtataatgacaacatttgacgggactctagaagttataaaaatgaaacccaacgtgacaataaactctaaaaactgtaaaatccgatttttaaagctttcaagaagaataaatagaaaatagtggtagatcgagcaagcaaataaagaaggagatgacataagaggtagcaaccggtgtgacttttaaaaactatataattagaaacacgaggatgataaggtttggtctttcaaagtcttaagacaacgagatatctattcaataaatttaagtaaaatcatacttaaaaaataatatgattttgtttgggtgctagccgcgcaattgcgcgggccacccagctagtttctgaaaaaacaaagaaatttagttttcaaatattctacgaaaagtttttagataatctttgaccctccacgtgttaaaaaaattaaaaataaacataaactacctactcacttctttcgttaaaagtatatttttaaaaaataaatctcatcactaaaaattctattttatgatcgttatgttctactccctccgttttttaatacatgacgccgttgattttttctcacatgtttgaccattcgtcttatttaaaaaatttacgtaattataatttattttgttatgagttgttttatcactcatagtactttaagtgtgatttatatcttatacatttgcataaaatttttgaataagacgaatggtcaaacatgtaagaaaaagtcaacggcgtcatctattaaaaaacgaagttagtataatataaaagattttaaagagatataatataatcatataatataaaagattttaaagggatatatggacggagggagtagtaccggtctactcccagtctccagagacattccaagaacaaccatatgtctttcttcctttcgcaaccgtccaactcaactcctcattattccacgtacccaaagaaaaacatcccccacccaaaaaaaaaaaaaatccgcgcagctgcaaaggcgagcggagctctcaatcgagcagcggttccacttctagaagcttcttaatcacgcgggaggaaggagaggggaagcccccggcggcggcggcggtggggttcgcctgcgcgcggcgatgtcgtccgccaagtcgacgaggtcgcgcccagccgggcactccggcgtgctgccggtgaacgctacggccggaggcggcgacggcggggtgcctctcgccgacaagatgaagatcttcaagaccgacaacttcgaccccgacgcgtacgtgcagtccaagtgccacgccatgaacgagaaggtaaagggattggtccactcgtgaaacggggaggaaactggagtggtagaattttggtcggaagttcacacgcgcttttgctgttctgtgttcgagaggtgtgagggatacggtgtcgggagtttcccagtgcatttgaactagcgaaagtgtgaattgagcgttattaggattgtttcccttagagggaaaacggtggttgcatggaactagatatgtttattgtgtttgatttttttcatgttcagatactagttatgaaacgggttttttttactctgatgcggagaaatactgattctggccagtactgacaaatttctggttgcgctgcatgcttgcgtagttgaattgaggtcgaattaagtttgtcaataaccttgaatttgcatttgtctggagcttggagggagcactgaagtagagtgctgttagtttgttagttttatgttatcttctagagaagtgaccacatgtagatttacacatatttgcaaagaaccggagtttgtactatattatggcggctctggtgatgaaatgaatcgtacgcaaattttgtaagggttctttttttgttttagaaagttggcgtttattgtatatgagataaatggttgcctttaaattgcttttacctattgttttgtgcgggagaccacttgtgctcatggttgtcaaaggatttgggtagcaacgaatggatgatcctacacttctaccttttctgcatgagttatgctcacttaagacctattttgcagttgtgccgtatcatgcatgtgtgcattttctgaggcttcaaatgttgagtttcctttgcatgctccctgtgtgtgttttagagcttgaactattactttagtaaaaggcacatcatgcttggaaaatctaacaggattgatgctcaaaaactgtgacaggaaataagacacctctgttcttatctgcaagacctaaagaaggcttcttctgaagagatgcgtagaagtgtttatgcgaattatgctgcattcataaggtgtgaacacaattgttgaaattttaatctaacccaagggagtatatccctggactcagagtatcgtgtctgattattctccaatttttattctttttgtttctctaaaatgagtatgcctgctagctttgtttattgctaatctttggcatctcaaccgctgcgcactccatacaagttcataaaattttgaattagtattttgtaagaatcacaatccaaagaattattgaaaaaagaaaggtaggcagcggatttgtcgtttctgcaaaattatatgcagatgtcataaaacttgtgggatgcaaaatcataattgtatttttttttcacatctggtatttctctgtttttcttagttacttcctgggattgttctctgttttatccagttcataactttcggataaaatgttgataactcaatctcctggttttcagaacatcaaaggagatatcagaccttgaaagggagctgctatctgtcagaaatctgctaagtacacagtcagctctaattcgtggtctatctgaaggggttcatattgattccttgactacagggtctgaaggctctgcagaagaggggacagatgaagaccaggagccctcagaaatacaaaactggtgcacagatttccctgagatgcttgatgttttgctagctgagagaagagtggatgaagcattggatgctttggatgaagcagaacgtgtcgttgctgatgaaaaacagaaacagacactcaccacagctgacattctggccgtgaagagggctatctctgataatcgtctgaaattggcaaatcagctagcagaagctgcttgccagtcttctactcgtggcgttgaacttcgtgcttcagcttctgctctcaagagactcggtgatggaccccgtgctcatagtttgttgcttagtgcacacaaccagaggcttcaatgcagcatgcaaactatacatccgtctagcacatcacacagtggggcatacactgcatctcttgcacggcaagttttttctgttatagcccaggctctcagtgactctttagaactgtttggtgatgaaccgtcttatttgtctgaactgattacatgggctacagaacaagcaatgttatttgcactacttgtaaagaggcatgctttagccgcttgtgtggctgctgggggcttgagagctgctgccgaatgtattcagatctcacttggtcattcttccttgctggaaactcgtggtttgtcactttcgtctgttctgatgaagcaattcaaaccctctgttgagcaagcactggagtccagtttgaggagaattgaagagagtactgctgctttagctgcagctgatgactgggtactcacctatcctccatctggtatacggacgtttgctagatcatctgctagtagtttgttgctccaacctaagctctcaaacagtggccatcgcttcagttcaatggttcaggtaatgttctattgcttgacaaatgtttctagcctttgtaattgaggatttatacataaagttattcttttaatgttttactgtattattttgcaggatttctttgaggatgttggcccactgcatagcttgcagttaggtggttctgcaatggacgggcttctgaaaatattcaattcatatgtcaatctgctcataagtgctctgccacactcactggatgatgaagcgaatttggaaggtttaggaaataagattgttcgagtggcagagactgaggagcagcagctagcattgttcgctaatgcatccttactagctgaagagttgctacctagagcagctatgaagttgtcgtctgtaaaccatactggtgtgaatgatattcgtaaaaaaagtgtagacaggcaaaaccgtgtagcagagcagcgagaatggaaaaagaagctgcaacgtattgtggataaacttaaagatagtttctgcagacagcacgcccttgatcttatattcacggaagatgatgacacccgtctgagtgcagaaatgtacatcaatatggataatactgttgaagagccagaatgggttccatctctaatttttcaggtccgtataaattttttgcccttaacaactatctggataaacattactgcttatatttgtttgaagaatgaggttcattatgacattcatcattgaggtagttcttctatgatctataaaatatattgatttttagatgaattgttgtaaaataagtaaaccaaattgtttttctgaatctatgctctatagcacttcctttcttgtttatatacatagaagacatgaaaaaccgaggaatgatgcaagggttagatacatagaaggataaagtaaatatagcatgtttcatgcatgcccacttgacatgtacacattacgtcttaatcagcataaacttggtaaaattggccttgtcgtgtccttttggccttggttcgcacacactagacaagtctttgcactaaaacgagtgtttgccaagttcatccactagattgcacccaccaaacaagttcatgtaccaccaatgcaattcactcatatggtaaagaagttgcattcagcttgcaaataatttcctagttattgcttgtgctattatactggtatgtctagcccaacattaacaagatcaaccaaattgtagaaccaacagtacagaactctgtttggttcctgatgagttgtcaccaaaaatagattttggcagctggctggcttgcaattttgttcgaagaaatgctttatttagaaattgaaaccagaaaattttgcactttgagaaatataacaaaggtacaattttgaattagataatagacttcagtattttgtcaggcagaaattttgttaatgtaaagcttagatgacaactcatgaaacttgggcagtcatgctgcttgcaaatctacccaagaaactttagccttttgttgcagcatctcatatattgttgcaggaattatatgcaaagttaaacaggatggcgagcattgctgcagatttgtttgttggtagggaaaggtttgctacattcctactgatgcggcttacagaaacagtcatactgtggctatcagaggaccagagcttttgggaagagattgaagaggggccaagggctctgggtccccttggacttcagcaggtgagttctttttttcttgttttgatcttatgacaccaactattattcttattttcaccttccttttcagttctacctggatatgcaatttgtcatcctttccgggcgaggccgtttcttatctcggcacgtacatcaagtgatactgaaaatcattgatagagcaatggcagcattttctgctacagggatgaaccctgataggtatgttactatctatctgacttgcatctatccttttgcggttaataaatctatttcagtccgactgtatttagtaggaggtgctaatattaatatctatgcatgttatgctgtaatggcaatcggatgcatgcatgtattttgctccatgttacaattgtaatagattcctcacataccagaaac

SEQ ID NO: 8149 - DNA, 1890 bp, Oryza sativa
ccattatgcaatggattctatggagaatatccactaaggtcacatggctaccaaggaagtgagtgggagaaaaaacctgagactctcgatcgcaggtaacttcctaaatgcttgttatttagttggttccctgctgatgcttaccattgacctatagacatatttatcccattatatctacaggcaaagaaaaagatctcgaaggtacacgcaagattttgttgaggctatctcggacgtcgacccaaacttcgacagtgatgatgatatcattggtgaagcagtctatgatgaggaatatcttagaagtcgaaagcaatataaggccagacttttagaactcgataaagagttccaattggaacaagttgccgatgatggtaatgatgaagtggaatatccttcgagtaccagtgaagatgaaaaggagccccaacggtacaaaagattggctacttgcaatcctcgagggaccaacttgagaactatcgatggattccaaacatgcatcacacgaagtaagcgttccacccgcccacacatgaagtatcatcagtatgatctttctggcacagatacagaattgggaaagccaggtaaaataaaggtaccagatccagatgctggttctgatgcactaaatgacatggagctctcgacaactagtcaagaccaggaggaagaaggtgctgaagtaaataaagagcggccacccctgctttctcctagcaggaataatggaagcgatgggagaagatttcttgacttaaacgaggttgcgcctgtaggcggttttgatgaaacacagagtcgcaacggcgaaaggcgaccacctggataacaactgaggatcatgcccttgggtttagatactgagtaacattgttgatccatcagaggccaatgagcacccatgagagagcgatacaacatcattcatgcgtcaacctgattggaggtgcttttgtcaacttggaagaaccaagtgaagaaacgatatggtccatcataagtgcagctgtagaattaccattagctgatccagtctgatgattgtagaccatggtgagatgtgtgcactgatgtctggcacgcgtcaactgatagcgtattagcgtatgcgtgttagattgccatttttcttcttctttttgagtcattgtcacattgttgtttcaccccggctacatatgcttgcgaaatcgcgaggcctaaatgagtaacattgttggtgtggcttggccgcttcaggatgcattctctgcatgttgtcatcagtctcaaactgtgattcttgccctcccgtatttccaattttccatggcttgtgtagttgtgttgtgtatgtaattgtagcttggaacttcggcaaacgaaagctattcttttcttccccccatctgtgcttatttgaaccattctccgtacaagttctgaagttcatcatggaactaattcaaaccaaaatttgatttatcatgttactatcttttactatctccgtttcaagtttcaagttatataagactttctagcattgcctatatttatatagatgttaatgaatctaggcacacatatatgtttagattcattaacacatatataaatatagacaatgctagaaagtcttataattataatatgaaaaagtattatacttacaatttacacctgtttcaagataagaaacaccgtgaatcaaaaaggaaaatttcaaaagcaaatggcaacaagagcagttgggccgtagttgggctgggccaactggcccagattgacaagcacgataatgtgggggtgggtccgtgtcgcgcggctacaagagtaacaagaccacgtccgtctccaccggcgtcgcggagggatcctaaaccctaacccccaccc

SEQ ID NO: 8150 - DNA, 7180 bp, Oryza sativa
cgacatggtccgcgacaccgacgacgacatcccgcgctcggcgccggccggcgccggcgcccgatcgagcgtcagcgacgccgccaccgccgccgccgggagcttccgcgccgcgacccgcgccgcgccgccgtgcaacgcacccgtgaggcgcgtcgtagctggcgacgacggcgacgacgccttcaccgtgaaagccatgcacgtcgcggtgtgtggcggctacgtacgcgcggtggaacgtaaccgcggcgtggcgtgcgcgcgcgcggtgtgtacgacgtacgtacgcggtacgcctactggttcgatcgatcgggtcgcggtgggtgcggtggtgaactgatggcgttcgcctctcggcgtgtgcggagtttatataggagtagatcgcagcggcggcgaggggagcatggcgtgaggtggtacttggacctaggaacgaacgaagagacgagccgccagactgtccacgcaagcatgctaggctgcccatgcattttctctctcttttttcccttgacttttctattgcatgcatacaagatgaacccatgacccatttacttttaagtttgtggtttacaaatactacttcactttctacttgaatacaccgtactctctattttatccatttagggtttagaggcatatagtaagtttatagattttttacatttttttatttttaaaattccttcatacatttctttaaaaattcatgtcaaaagtttatatgtgtaaagtttacatatataaagttaccatgtataaagttactatgtactatctgcgtataactttccatgtcgaaagttgcaacatacaaagttagtatatataaaatttatatagataaaattactatgtataaattagtagtacatgtatcaagctataaattagcagtatacgtaaagtagagaactctcgatgagcaagagaaaatgcttgagctagtgggtctataaaggttttgcacgtgggctagagaagagggagtcaggggcatatggctgaaagatcagtggctcgttgcagttgctatgcgcgcacgagaatacaaaggaaagaaacagcgagcaaagccgatatgtacagctgaaataggtccggacccgttcgtgtagggcaaacgatcgtgtattagacccacccgatgccgcttgcttcgacgacctccgctcgggattcctcctatgaatacatgtgaaatggtgaattactactgtgcctctttaaaccttccaaaaaaattggagatacttacaccgtgtttagttgcaaattttttcttcaaacttccaacttttccatcacattaaaactttcttacacacacaaacttccaatttttctgtcacatcgttccaatttcaaccaaatttccaattttggtatgaactaaacacacccttagggcatgcacaaatgtagagtctaatatgagctctctatattaattaatgtcactagagactatcctcctataataatagagacaataagatttctaaaccattaatgcactaaatattttttttattatacttctttccttttttacaccctcatgcaacaaactttccgttaataaatgctaagagtcgactctgagccgttgcatgcgtagcaacgttgtttcttatttcttccatctctttcttccacatcatcaaatttacttgcatgacaacgaaaagagcccgttattagaaactattgcacatgcccttggtggacagatgtgatttgggacctccattctttaaagacgttaaaaactctttttatttaatttgtagattttatattttgcggtggagaaatagtaggaaacgtctgcttgataggtcgatgtcgtgggcacgcgggcacgggcgcgtcagctcggtttcggtttggagatgtgtcgggtcggaatagctagccccgccgtgcaaaacgtgcagtgttaagcagcaccactctctgttaatttgttcgtggccacacgctcgcgcgacgaccgttcgtcgcggatggcccagacacgatccaatactccatccctgacacttcagtacgagtacttgttcactgcactgaccagaccaaaccaaagcaacaatgaccaactgaccattccaatttcctctcgaccaccggcagaaacgaaatccaactgatgaacgtcaatgtgctcaaaaaagggggggaaaaaagctgatgaacgtgaacacaattagtacgattagtacctgctgatactggcgttgtgatagtgtctgcatgctctgctgactgctgatcaaacctgctgacgtgtaaatgctgacgtcacgaaaggagcagtacactagtgctccatcagcttagctagtgacgttctcctaaccgtccgtcgtcgatctctattcggtagatcggcgtatgactaaactaattggggaacaaacggagccatcgtttcggtgtatttgtgaacgaaaagtaatttatgaataaaaattttttatacgtgttcttagcaatatatttaaaagcaaaagctgacaaataaacttcaatgaaaaaaaccttaaaatcagctttaaatttaaggttaaaaatttaaattttggctgataagcataagtataaacgaaaagatgtggctctaaatttgtaaatcctaaaaaaagtgagaggacaaaaatataattgagattgaaaattgagacaaacaaattctccgattaataatactctaggttgtctctctacgtatatactccaattaatagtacatagcttgagagggacatcaaagactagtactaatacatgtttatgccttctagaagcttagcatgcatgtatttggccttttcggagtatatgaataatgtgctagaaaaaatgagtatatgaatttcacgaggaacaaatcataacaaaggaaaggcgtgtttcctgctgattgctaaattttgctagtactgatttgtttagacacttccaatttccaaaccatattggccttgcaaaaggctatattcgagaaatgttgcattccagcacccgtgcatataggaaaacacaaatcaatagcgcgtagaacatgctatagcatgtgaacatatatatgtcatttttttctcaaagagagagaacagatatatgacatttttgtgcactgtgcaaattaaacagggcccatattgttgcgagtgtacataatgcaacgtattttgcatttatgaatctgactgagcatatctgatactttgatttttttttttcaagttaaacttatttaaattatatatatatagggcactcatatggggcaccatggtataaaatacacaaattcgtctaaatttttcaaaaaatttaaattgttagtatatacctagttataagtattcgattcatacctatacctagaaacaaaacaacttaaattcaactttatttgacaatccagtattacatacctaactaattatatatttggatgctatatacctagaatcaaatcctaataaaaacatgtttaaattcaatttaaacttgttttgaactagttgtatagttaatattaatacctaaacatttgaaaaaatttcatactcatttgaattgagtatatactcaatttgaatcatggagcccaggcaccatggagcaccaaacaaatttatatatatatatatatatatatatatatatatatatataatttttttaatacaaatcaaatatattattaaaattatattttaatgttatatgttgctaaatttttctaataaagtttggctcaaaacgacatacttacaatatgaattactataacggaagaagtatcttggtagtgcacgtacgctccataatgctgggataaacttacattgatggatgggctaattaattcctaataattggtccgtttattcgcgtaaacaaacgtgtcctaattgcgaccatcatgatggtgatgtcatttccaaattaagctcttcagaattttgctggccgacaccacgtggaagacaaggcctaagaatagtcagagcggtggcgtttaatttccttttgttttaaatttctttcagaaattatatcacccacacatgcgcagtgcaacgagaatcacaaacggcgtgcacatatatggggaaaaagaatccgtgagcaccgtagcaactactccagcaactgtgttttcaattctgcaaatgctattctctgttaaaaacaagttctatatgacaatatcactccgataaattgtctaatctaaaaaatatttctgtagactttttttaaaaaaaatcatacttttaaaagcgtggtaagaataatctaagctatagactcatacttttgaaagcgtggcacaagaataatccagacatacagaacgtaactcaacttgttaattaggtttttctacggtggaaccaacacactcatgttaaatcatggacttcttgatatgatactcatattacaactaatttttttttagtggtgtgaagacttgacctgcgtcttttttaaaaaataaaatccaaatatacacggtgttactggatctcccggccctacagaattgggcgagatggtgactgatctcatgggccatgacgtatacaaacctatatgggccttcgctctatttactggcccggtttagacattggcttcctccttacctcgggaggcctcatttatatggaccttgatttcagttcagattccaagcttacccacccacctaaaaggccccaatttaggcccatcacatcgaggccgaaacgcgaagtgacagtgacaagggaaggacggcccacgtacagcccatcaaggcccatatccacttcgcctcttccctttgatgttgcgagtgaataaagtcgaagcgactcctcctccgatccccacctcgcttcacactagccgaggagacgcgagcgcgagctgctctcctctcctcccgccccgcgtcgccgacgtcgaggcggcggtcgacgtcgacgtcgccggggatggccgggcagcagccgcagcagcagggcccaccggaggacgactttttcgaccagttcttctccctgaccagctccttccctggcgccgcgccgggcggccgcgccgccggtgaccagcccttctccctcgcgctcagcctcgacgccgccgcggcggccgaggcgtccgggagcgggaagaggctcggggtcggcgatgacgccgagggtggcggcagcaaggcggtgagtgcgcgcgcgcgcgcaatcctctctccctctcgctaactttccccatttttgcttttgcgttggctctcctcgttcgagtgggaacggaggcgcgtgtgcttgcgtgataagcttcgagctcgcctctgtaggatcgggagaccgtgcagctcaccggactcttcccgccggtgttcggcggcggcggcgtgcagccgccgaacctccgccccaccccgcctacccaggtgctctgttgcagcagcggattgtgtctcagttcgaaatcggcagagctggtgctaatttttgttgtatttgggcggccttatggcgaatttttcaggtgttccacccgcagcagtcgaagcagggcggagcagccgtcgggccgcagccgccggcgccgaggccgaaggtgcgagcgcggcgtgggcaggcgaccgacccccacagcatcgcggagagggtaatcaaatcagttcccgcagttacactctcttagcttatggtctttcatcttgggtattttactgttgagaacttgtgatctgcataagtcactgtaccattcagacatgctgtttggcgtttgtaaggtgatcagggtttaaatttcaatgcaaatttttgctaggtttagaattggatttggtggttcctacatgcttgtaatgcagaggaaataatcagttgtctcatgctacgagtgagtcaccgaagcagttctgttgtaatgtgagactgtgagtgcaataatgcactctcttgttaggcaagtcggatcaattaggactttcaaattcgaagggattgtcacccgtgatttttttttctcagataaatgtacagaacaaatccaatttgtaagaaaaatatagcatgttctaaaagaggatgttactttagatagatgatggccggccatttggcgcagttataaggtgttttccttctggtctgtactattataccacaagtcttatctttttgacaattgatatgtcatgccgcaatcctgtcatatagcaaatgtcatgtaattgttatctagctgtagaatgcttctgctttaagataggttctcagtactttgtttctagcagttgtagatgtgtccgatgctcatttgctgttatttatatgaatgaccaccttactttaggctgcatattctcacttttcatatttttttttaatttttggacaattcttctaagtgtttgatcagcagtgctctgaagcatatttgttctgatgcagctaagaagagagagaatagcagaaaggatgagggccctacaggaattggtccccaatacaaacaaggtaatattatttgttatacttttaggttttattataagggtaaagacttctgtggttcacatgctagccattgaaaaaattttggcaagtggtttgggtcatgatgtgctcacaatattatattaattcttttttaatataaattttcttctttaaaagagtgtttcggttcactgagaaccatgcgatcaaatcttagtatgctgtcccttttgagataagcaagagcgcatccttagggttatatgcatgcttaaaataacatgtgattttactactataatacagagttccgtaaattgcaacatcagaggttgactatgggggaaataactctgatgtcttcttgaactatgcagacagatagggcagctatgctagatgagatccttgattatgtgaaattcctgaggctgcaagtaaaggtttggttcactatgctattatctagtaagcataaaccacattttgtgtttttagttgtttgatagagcatgattctatggtggtaggttttaagcatgagcaggctgggtggcgcgggtgctgttgcacagctggttgctgatattccactttcagttaaggtaaatctgtggccattaactaatatatag

SEQ ID NO: 8151 - DNA, 7458 bp, Oryza sativa
cgcccgggtttgcccgagaggagagaagtgagagagagaagggagagaagagaggaaagagagtggctgaccaggttgacacgtggggcccacgtgggtcccacgctgactcagctaccacatagaccaaaaccgggatcaaaaccgccgaaggacctcgggtgaccggttttgtatagttaagggaccccgcatatctggttttgcggtttgaggatgcttttttaatctcgctgacaagttgagggacctccagtgcactttttccgttttaatatgggtcagaatggtatcccaacgaacatgtggcctgttctatacgggctggtccaattttgaggccgggaaagccgtgcggcccggcccgttcgatctatctctttccctcatgtttccttccttgagtttgttctagtctactggtgtcaccaactcaccattgattggtttatctttgaaaaaagaaattgtgcatgcttagatatattcaaggctgactattctcctgtaccatgtcaattatgaaaaaaaatattgatataaaaaaattattgaaagtgtccttctgaattttctcttccatgcattcagcaggccatggagaccctataagacagtgctccatggatgtccacatattgggattattcatttatttgaaattttggatatgccgtcaaacatattttgatgtgccttttcagaaatgtttcaaacgagcataagaaagacttgtcgagttgtcgcatgaatacagcgtgttagcaccaaagtcactgtccatcagaaaaagcaactgcgagacctcatgaattgaccatctatgagcagggaaacacacttgcattatcggaacaagcagaagacgcaaatatttggaatcacatttggattcctcggcgaggtctactgcaagtaagcaagttttatttaaaaataatactccctccgtttcgaaatgtttactttttatcacatatttgaccattcgtcttatttaaaaaatttaagtaattattaattcttttcctatcatttgattcattgttaaatatatttttatgtaggcatataattttatatatctcatataagtttttgaataagacgaacggtcaaacatgtactaaaaagtcaacggtgtcaaacatttcgaaatggaggaaataataaaattgattctgacctatactttgaagaaattatagcagttttacaggatgaataagaaaactactaaaaataccaccttgaagacaaagatcttcatctatggttggtcagaggatgcacgaccgttgtttctatcaacggcttacaagttatacacagttcttgtcctccaaacaaaaaagcagaatctccaaaaccagccgtcgatcgaatttctctcccatcgtcgctgacaaactggtgtcgaaccaaagtgaaacgtcggagattagttgagttgtgtaaatcagtctaacttgcaagtaatcaagttaattgatagtaattggctaatttttatgtgtcaaaatcttcaacatggtatggccaagtactagcttataacatgctgcaatttggatggcaggtaagaaggaaggcgttacatgatggtgagtatcagagctctctgaagagtgaagactattggtttcattaataaacttaattatatcggagttagaagctacagaaatcatagaggcgaaagtcaggttgcaaagcgaaaagattaagaccactgtcccaaaatggttaccaccagaagaaggtaataagtgaaaattaatgttgatgttgctatttcacgttctacaaaaggagcagttggagttgtttgtagagatgaaaatggtcttcctacttgagtactttggattaataatagtaatccctacttcctttctctaaaaaaaaatatatatttccctcatgttgccttcgttgagttcgttagtctagtggcccttcatgtcaccattggtttatcttgagaaaaaaaaagttcatgtatatatattctgagtcctctcttccatccaacaggaaaacaaaaaggagaggctcaaactataggacaatgccccatggatgtatacacattgggattatttgcaacgtgccattgtgaaacatattcactcgatgaaagaaagactcatcgagttgttgaatgtgtgtgcaacgttggcactagagtcactgtccgttagaaaaagcaaggaactcagaaacctcatactatttactccatccgccccaaaaaaaaaatccattcctagcatcttaaagtgaaataagtggagagtgagaatgactaaaatacccttaatcattaaaaaaaccgtaagagtgataggtaggtaaagatattgaagagataaaacttcttgttttagtgctaagggtatatgtaggatagtagaagttggttttttgttggataaaatttaaactctggaagttaagttttttttaggacggagaaaataagtatcattttattttattttatgaaaccgatccagtcagatacctcgtgatttgactatctatcagcacactcttcaattatctgagcaagcagagggctgtataaattttgcaacccccatggaaaataatattgcagatatttttaatacaaatgtatttacaataattactaccttcatttcagaacaagttaatctagtactggatttgacatatctcgatactataaatttagtattagctataaatttagtattaggatatgtcacatttctattagattaatttattctaggacgaaagactatggtacatttaataaaggccagcttctgccgtaatggagcggaggcccgtcgccgggaggcttgggccggagcgtagcggatcgtcatcccttttagagttccatcatatatatacctcttgtaagccgccgtgcggcgatgtaacctcaccccagatatagtgaagatattttgctggctggcatccgtggttttttctcttttgttttgggagggttttccacgttaaaatctcgtgtcttctgtgattgatctattattttttatcgtttatttgtccatcgtttcctaacaacattgatttactgcaacatggtacaatgattttgtagctctatcagattttgatatttttatggcagtgcatccttcattctcctagcatactcctccagccttttgagcccttgtttgggagaagctgcttcacctagctgcctcaccattgcactcccaatgatcactccatctgcaccccaccctgctatctgcatccatttacatttgatcataaatgagtcagattttgcagcaaaaatgttggaaaaagaaaaaactaaattgcaaccaaatcaaacattctgaaggaatttgagatattaataagctatttacctgcctaacatggtcaggggttgatatgccaaagccaacacacacagctttgtcagtgaccagcttgatgtcctgaaggagatgctcaacgcgtgtgtttacttttggacggggacccgtaactccattgacactaacctgcatatatattacaatttacaacatgtcatttgatctggatcagaaagctaaactttctaatgagcagtcaggtttctgcatatatactacttaattagcacttacaaggtaaacaaatcctcctgaagcttctgtgatgatcttcatcctctctcccggtgtagctggtgttgttagcagcacctgcagagattaacccgcacaaaatcatcagaattctgaacatgttgatcactggagtagtatactctagctaggttgcttaattaatcgatgaaaggaactaattatgttcataccagctctaggttgctcttaatggcttcactcctgaaagtacatgtgtccacataaggaagatcaggaactataaggcctgaaacacacgtgacaactgtgaattagcatttccactgtcaaagagataagttttgctgtgttcggtttatcatttattattagttactctccgactatatcaattatattggcacagactggtgttggttcgtaaacaaatattatttattacataagcacaataattcttgtaataagggaacaatattccaatgagcacttcattagacatcttaattaggattgtaacatcacaaccacccttacttcattagtatatatagtttaagagacctgttggctccatctaaattgtactgatgaagatttgatgagtttattattactaaaagacaatctaggacagggattggagcccaggagtgtcgcatatattcagcgaaacttccaaaccaagtcttgtcatgaacgtttccctgaatttgggtgtgtacgccaatctacagtatctatgatgtttacacttcactgttaattttttttagataatggacttcactgttaattaatctgcccatcatgttattcaacactgacactgacaggctaatattgttgtttttttttctaaatcaggtagtaaaaggcaaagccgggtatgttcagttttattgggtaatttctttcggtgtatgttcctcttttactacatggtactgagtattatcttcttcttgaaatactcctaaattacagtcctcctgctcttgacaaatgaagtataggtataagatttaagaaaaaagtggagatcatagtagtacaaattaagatgcaaatcatgcatgcacgtaaatgagtaaaagttaattaagggatcagtaaaagtgaaagattaggagagtaataataagttggttaaatgtaaatttaccttgcacaccagcttctttggctgcggcggtgaagttggcggcacctcgccggaggatggggccgaggtaggagaggagcaccaccgggcaggacagctccggcgtcacctccttgagcatcgacaagacggcctccggcgtggcgccggcggcgagcgcccgcgacgcggaggcctggatgacggggccgtcggcataggggtcggagaagggcacgccgagctcgatgacgtcggcgccgcaggcgtcgagcagccgcagcgcctccgctgtcgtccccatgtccgggtcgccggcggtgatgtacgggatgaacgccgtctgctcaatgacgaaatccaacacaattcagcaccgacatgaactcgttctacgtcaatgcacgctatatgtttgttaccttgcccttctccttgagcttggacatggtctgcgacaccgacatgcgccgctcaacggcggcggcggcggcggcgggcacgggcgaagcctccagagcgaccgaggctgccgcggcggcgagcctccgggcggcggcaaccctcgccggctgcgcgacgcaccggcgcaacaccggagccgaggaggaggaagccgacatcggcgacgccttcatcgtcgtgaaagccattgctacgtacgctcgtgcgacgctgtgtacgtgcagctcgagttgtagcctaggtgttcgacgcgaagaccgcgaggctgatgagatgatcgagttaattagccgtggtgtactggtgtggttgggttggggtagtgaggactgaggaggccatggcgggcgtttatatagatcgcggcgcgcgttaattacgagctgagacgacgaacgatgctggttaattagctctcatgagataatccactaccgtggagtggagcgtgtcacgtgtgcgcgcgtggttaggagatcgacgcgcacgcagcgcgcgtcgcgtcgttttcgcgtgcgtgcgtgcgtcgaggccctggcgcacgtggctgacgtacgccactttcgatcgatcggtgtgtttgtttgtttcaacttccaagctagttcgatctatgtattctctatatcttaatttgatcagctacacgcatgaactcaccaactgataactcaccatggttccatagacaccatactgtgtggtgtggagcgaagaatatatatctcctacgaacttcgaagcactgctagctgctcactggtggtcatccgcaccgtttacctttgttcaccaattgctaaacatgtaggagtacatcctctgaaatattgtgtgtgtgtgtatattagatgtttttcgtgaatacgcaaaaaaattacaggtcaatatattagaagacaatagtgtttatttacacaacgcaatcagccagaccggcttatgccaaaggaggagagaaaagacaaaaacggaaaaaaaaaaggaaaaatgaagagactactacgacggctaaacacaactccaattagcgggaaggagagcagagctacactaccttcccaaggaaatcccaaaagaagcaacgccagctaacgaccatagatgatcctcagtgaggatgtactctaaaactattgagaccgaagtgagagcagagtcgaaaacgctgaagttccgttccttccgctcgcaagtatattaggtgttaccaatatatggattctacagtacagatcgaatcacattctaattaacctttgttgtagctaattactcgcataaaagaacatggacatcatgcattggcatgcatgtaccctgcagacagaatcgagtacatgccaccacgtgcgtatcgtgcatgttcaatgtttttttttctttttttcttaaaaagaacatttgtgtgcactttgtactatatttcgtgttattgctatgggatactttcttccgattctaaatgtataaatgtaaagtcgttttacggttttctactctctctctctctctctacaagttagtcaatatacgagatttctttacaaattgctaccactctcatgtataatatgcttataatgtgtaataattccatgaactaagttattacttcagatttccccaaattttttttaaaaaaaactgtcaccacaaaaaatggggctgattttactcggattttaggcgcacgatttaaaaatatatctacatttagaacaagaggtggcgcatgatattgttgtcaaaatcttgggattcccgtttaaatatgaaccagagagcattgaggtgacattagttggacgagatgcgtactttcgttttctctctcctttatttttggaattttggcctttttggtaatcactgcaaacgacgcagggaagaagacgaagtcggtaacgactattgactcgttaagcaccaatataattaaccagagctttctcccgatcgatcgaccgagagggttcaattcgataattatattagtacaaatctagctactagaacatatgagtactggctaatataaacgtgtttcttgctcaatatataaataagatatatcttagccgttgacaacggtggaaaggtcggcaagtgactaattatttctcaaattgacaaaatatataagccagctcaggaaccaactaaaaatagtatatgtagcaaagactacaaaattgtctttctgca

SEQ ID NO: 8152 - DNA, 16015 bp, Oryza sativa
agcttggcgtgccattctcttacccctacaccgacggcgccgtcatccaggcgtccgccgagctggcgctcgccgcgggcgccacgatggacggggtcatgtcgatgctcgcgaaggtgacgccggagctttcatgcccggtggtgctcttctcttacttcggccccatcgtccggcgaggtccggccaacttcaccgccgcagccaaagaagccggcgtacaaggtatatgatattatccatccgcccctaaatatttgacgccgttaactttttaaacatatttgactattcgtcatattcaaaaatatgtaaaactacatatatatatatatatatatatataaaagtatgtttaacaatgaatcaaatgatggaaaatgaattaataattacttaaattttttaaataagacgaacggttaaacatgcttaaaaaaatcaacggcgtcaaatatttaaggatggagaaagtaatatactgtacctaacaattaacattctgtccatggtcatctgaatctaaaggcattctttttttttagttgtaacttgttgtagtagtttgctaatttgcagttgttacacatgtgtgttccaggtcttatagtaccagatcttccttacgtagagacatccactttcaggagtgaagccatcaagaacaacctagagctggtatatatctatgtagatttcattactatatgatcatcagtgaattaatctatttaattaattaccaataaattgaatctatgcgtgaattaatgggtgcaggtgctgcttactacaccagctacaccggcagacaggatgaaggcaatcacagcggcttcaggaggatttgtttatctggtaaatacactataacaaatcttcagaaaccctggttacttgttataagtttaagtagctttctgaaaaagaccaaataataacaaattgcttgctgtaaaacgtgtcatgcaggttagtgtcaatggggttacaggatctatccaaaacgtaaatccgcgtgttgagcatctccttcaggagattaagcaggtcactgacaaagctgtgtgtgttggctttggcatatcaacccctgatcatgttagacaggtgattaaattatcattttatcatgcatatatgtttgtaccatctaagtttccttctcaacgattgcaaattctgaaaaaaatgtaattgtaaaatggacacagatagcagattggggtgcagatggagtgatcattggcagcgcaatggtgaggcagttgggtgaagcagcttctcccaaacaagggctcaaaaggctggagaagtatgctaggagcctcaaggatgcactaccatagaagttattatagaaaccaggcaccagctgctaaaaaattacacgtgagattaattaattaatctctcggtgatcactacattcagatagggaagctgaatctgcctttcttatagtagctgagtaaatggacacagatagtagcaatataacctgttataagtcataatgtgtagccaccttagggaatgcaaaatacctcgtcattgcagaggttatatgttaattcttctattgtatgaatgaaataaaagtaaattatgttgacggtacaataatttgttaggtggatacaatctatctagtactataacttaaattgaacatccaaataaaataacttaaaaagtgggtgcattctaaacaagaacttaacaatttagtattttagtgtagctaagactcgtttggcacagctccaacttccaactccaacttacctagagctggagctgtgacaaatggtctagattcaccaaaaaatagagcggagcgggatgaatctctcctagaaattatactaccgagatggagtggcaaaaacgttgctccgcagatccactccaaaattaattacagctctacccaccatctttcgtcgaaattacaggaaaaatgccaccgccctacccttgacccacccaaaccgcaccgcccattccccccacccccgagccgcagccccttctctctcgagagcgacaagggaggcgataccgcgagaggaaacggcggaagcgcacgacggcagcggcggcggcgcacggtgcggcgtaggcgcacagcgcggcggttggggtggtgcacggcggcggagtaggcacacggcgcggcgcatggcgacggagacctccctcgtcctctcgacgcggcggttggggtggtgctacggctttcggcgtcattacagctcacagcagcggggtgatgcagcacggcgacgacggcggaatcagagcacggcaaggttccagatctgtgtacaaggtattttccaaaccctagtgatttggttcattactctgtggattgattgttcatatttgcaaggttttcacatcggtgtgcatgtttccaaatctgtgtgcaaggtttccagatctgtatggtagaaaatgaaacaagaaaattaactatggatgtatatatggatgtttggatgtacttaatcttacgataactatggatgtatatatggatgcatacagttgtctaaagttcattgtgatgcatatatggatgtaaccatgcgtgctgcatatatataagcgcaagtgtgatgtgagtgtttgaatgtatcatctgaaaactagtaacctctattcagaatgtatttgcgtttcagtttcaaaatgtatttcagttttagtttctgattgaaaatgacaaatgtgttgcctttcagttttggatctgtgatatgccatatgttatgcttgcaatgaacctctattacagatctctagcatgagattgaccaataaaaggttgtcaaatgtcagatagatctctaggatgaattgattgaagtatgaatttggttgcactgtttatatgttcataagtaaaacatatgcagttgggtcagaaaaaacgcaagttatgagttgtttgccactagaatgtcttcaaaagtttagagaatatttgagctccacttgatggctagtcattctactcccctgctttcatcccagaccaaaagatgtatttgtattttagtttgacaccgcaggttcttttttctattggattcattcaccactgattcagagtgttgcttgtttttcatgcagcaaactcatgccaattgcacgggacaacataaaagaatttatgtcatcctctaactggaagaaccttttgttgcctaaagatactcagctggcagctacttgtatgttgtgaacaaaagacctctcaatgttctgctgctgaaatattaagagatcgtgacagagcatattattaatatcagatctatgccatcgagcgagttatgtactggacctttgatttatatttcgatgacaatgctactattattaatgtactgaacatttgtattatttgctaattatgtcaactattttgtcaattattatttaacttacaattttgttgaaattctaaagaaaataaacaattatcacttatataccacaaaaacagcaaaaaccacaagggtactattgtcaaccactctcctatcctctcttttaggagttctggagctgacaaaactagccaaacacttttcagctcgctccagctcccactagagctaagctcctgttggagttggagtttggagccctaccaaacggggcctaagtatgtgttgttttcctcggaaaaaaaagaatgtacatgttgttttggttaacggatggtagatgagttttttttttcacaaagttaatattccaacacatagcaatccggcgaaatattaacttataattagtattgaatttaatctataagaattacactactcatccaatttgcaccaacaatttgtgtcacattctcaaatctcaaccgaaatacaagcatttctatattgtaaaatttaattgacttctaattactagaattacaaaatttaagtattctcatataaatctgtgcaagtatttaaaagctgaatgtgtgttaaaaatactcaaaataattaagatgttgctgcgcttcttaaattattataccaaaatgcaaccaccttgtaagttgctacttcttccgtatgctcacttattaagttcatgcactaaattacaccggcatatcaagttgttgcactagcatacttacttcttaagatttttttttcactaaattacacccacatactaaatttatgtaatgtgaatgtaatttttacacatattccccatccacccaaacctagccctgtcagctccttaatttgccattttgcctcaatcctctcctctccctctctcgctctctccatgtggcggcgagccacgcctccctgagattttaacaaatctgactgagccacctgctccgtgattggtagcaagagtttaacaacggtgatcagaggctgacctcctcaaactaggtaaaataacactatatttactgtaattttataaattttgaaagattagtattatttgccctttccaacaaataaaatttggagtttttggttatgtacactctgtcatcatgcaaacaaaaatcaaaatacccttaagcagtaagcagcgaaaaagcatctaagcagtatactacatgcatgcttctcgaagatatataattattatatactccctccatattttaatttatgacgtcgttgactttttaataaacgtttgaccttttgttttattcaaaaaatttatgtaattattatttattttattgtgacttgatttattatcaaatgttctttaagcatgacataagtatttttgtatttgcataaaaaatttgaataggacgatggtcaaatgttgattaaaaaagtcaacgacgttatacattaaaatacggagggagtatgtagtattaatacactattactagtcttcgtcgttgtccctgtcaagtgtatggctgtatgcagagagcagaaccaacctggttgctagattgttctgtttagggatggttgctattgctactccatagattgttgggttgtactgtactagttttcatggcaatagcaatgcatccctgttcgacgcatctaaagatatttggcaccacaaaccgctacagcataaagtttttttctatacacctagtacaatagcacccagatataagtagcggttttgtgcttgtgcatatgcattgcaggagcagaacatttgtttcttttttctttttttttttgcaccgagcagaacatttgttgcattgcaggtttccttgaaaaagagtcatgatacgagtcggggcttctttgaaacaaagaaaaaaattaaaaaatttaaaggatttgaactatatgaaaaattcgtacgaggctctttagaataaaggtttggatctctaaaatttgtttgatattcctataaaatggcatgtttcatgggaatttgggaggattactagcatgagctccaagctcttggaatttttgctttgtgttcatctctttctcctttgtaattgttctatgttttttattccttggaatttaaggtgtgatgatattcgaattacgtgatttttctattcatgtgttttgataatattacgttccaaaaaagtcataaaggttgcgttcgtttctgctaccactacagagggctaatctcttatttaccgtgagattgtgagaatgtttgtcaaaccgttaaatgatattttataattatttttatatagaaagttttaaaagttcaaatgtataatttttggtttttttaataattaatactcaactaacataataataatgcgctaatggctgtttcctttcgcaccgccgctaaacatccacaccaaaacgtacgaagaacgcagcctcatgagtaacatcgacaaacggcagtgagctgtgtgtgagagtgcgagcctgtgacgccatataaagtgaatatattatctgaatattcttgtttggttctcatctttttccaacgattggccttgttcggcggccacttttgccgtagccgcagcggctgcggcagactagccgttcaaagtctcttcaatctgccgaaattttgtttaactgcattgtctgcacacgttactacatatacaacatcgtatatacacatactcatgaatatattccctaaaacatactctgaaaaggtaaaaacgagtgacacatctctaatataattgataacattataattttgtacgtatttttcatgaaaaccagaatttaaatttagcgaataaaccctagcgaatagagcgtacttcctaggcacaattctatcaccacatcaattgtgtgcagccgtataagctgccaaaagaatcgttacgagagatgaacgaatccttctagatatgaccgcgccgacgatggagggaaccgagactgcacggcgtcgtctgctgccgcggccggctgcgcagcctcttcctcctgatccgtcttgttccccccttccgtcaccgctgcatgtgagtgaccatgcttctcgattagacccacggtgaggataaccatctcaagatactcccttcgtcacataatataagtattttgatattttatttgtactgtttaatcactcaccttatttaaaaagttcatacaaataaaaatacgaaagtgtttaaaatattttagataataaaataaataaaaattaaataataattctattttttaataagacggcaaacagtgataaaaaagtttaaatcttttatattaggggacggagagagtactaagtcaaatagcccatcactagcttttagctgatgtgctgtactagtactactgtttacgtcagcgtgttggataaacagcggagctcccaaacacatcttttgttcggattagtagttaatcctgctacgaattactgctccatccgttcaaaaacaaataatttatcacacatatcaatacaaaactaacaaactagaatacatatattttatcaaatcggaatacaactatttcataatttatctacttccagtatagttattcattgcttttacaaactccggtccaatgattatttacaataaacttacctagaataaatgatagaagttagaaataaaatttattgctccatccgtctcataaaaaaataacatagtactgaatgtgatacatcatactattataaatttggacatatctctatctaaatttattgcactaaaatggatcacattcagtgctaaatttatttactaggggattgagggagtatgatacagagaaagtagtacgtataacgtagtacctagtactagtactagtacatctgtacatgtgtcatgttcatgcagccggtggtccattcatccagaaatacatcgatgtagcaacatgaaacaccgcagtaatgcagtatggtgggagcgtcgccggtacgttcggaatatgaccatctaacttatttttctttggcttcgagacacttgatatgtggattcgttcgagaacggatcatatgtcagcgagacaaataagttagaagaaattaacaagggagtggattcagactctcatgagcacgttcccttgttatttgtatatcatttaaatgattatgaaaaataattcaacaagatagattaatatgtgataaatcactttacaaacaagcaagttaaaatttaacttctacaagttacaacaaaaaacaaatggaactatgactagttaacgtgtattcacggtcaaatttgtttttctcgttgtaatttgtagagtgatttatcacatattaatccatcttgttaatttttttaaaaaaatttcataatcatttggataacatgtaaaggataaaggaatattccctcaagagtttaaaatactttcccggatatgtgaacagttcctggtacaagtagtatactgaagttttttttagataatggaaatgggttacatctctaacctctgcccacaggcacacagccaaaaagtccagaagtgaatataaaagaggttaaaaaaggcgagatgggacaaacccccaacttctaccgataatatgatctactaaaatcatgttttttaaaatcacgtagagtctatcacaaaattctgtaggtactacgccatccaaactggagtaaaagttccttggctaccaattccaagcgtgtagcaccactgcgcatagtatcttgttgttcctgtgaaagcatcatacatcaagagtggagccaattggaacacatgaagataatctgcatgatgttaggcatttttttatggttaaaaaccatatcattatggcaacgccaaattgaccaacatagagcactagctccaaataaaatctttttttttgtctaggcactccccttagctagttaccaaaaatatcttttgcattgtggagagggggaatattgaaggcaaagaatacacatcgccaagcaaaacgtgcaacatgacagtcaaagaaaagatgttggatggtctcttgtgtattaaaaaacaacattgcttgtttcccctccattttctctttatgaggttatctttcgtcaagattaattttttgtgaagaaaccacataaatactttgatttttagtggtacgtttacctcccataagatcctcttgtggattctgttaacagtgaaatttggtaagcccaaagttaccatcggtttagagtcagtatcggcttcaaagttctagaatcagccgatgggagtcaagtcgccatgatgtcgtgttcttggtggagtcggatcaatcaaaggaagcttatctataagagttcgagttcaagaagaatgcgacatgacagttatctattaattaggcatagtttgtcattttccttttatccttaggaaagtgtgtttagtgtccgataaggactttatcttttcctttttaggttctttcttatccgacaaggactagtgtctccctatgggtataaatatgtacactcgaggtcattgtaatcaatctctacgatcaatacaattcggcgcatcgccaccctttttacttctacttttgtttttttacgttccggcggaacttggcacccgacgcggggctgcatcgtcttcgatatccggcgaagggataagtccaatgttccgtcggcccaggcaattgtctcatctacatcggcatcgttcaaggctgcatcagtacattcgacctcttagattgctctggtttggatgatatatttgcctacctatttatcatatgtctatattaatctagttttagcatatcaatttagctctatcggctgcttctcgttttaggatttctgccggtatcggctaaatcgcgttgctagattagattagcttagatatctaccaccctgaaaactcagtcaacggcttgattgtctagatattatgtttcttttcatacttagtgctgcatcagttaagtttgatctactaagtcgtgcttagaaccataatctctagcttgctttttgactgccaataaggttttcatcggggtttcagccggtgagttatctggacgttgcatcggctcataaggattgcatatacatataagttggatttagccgatgacgacaaaggtttcactgtttaatctaatcttgtggatttcatgacatcggacctccagctgatgtatgctttaacattcggatcagtgcttattatattttgtttctagctgattggtttctactggattatattgttattttattacatcatcatcagccgattgccttcatatcattatttacattggacatatagctgattgcttaaaccctatcgctatcggctggtatcggcatcggctattatcggctatcagctggaactactccatcggcttaacagccgattggctgttttgatctactatttgcatatcttatcagttgcaggatcaaactgactggcacgcccgtatctcatcaacctttggacctgcactggagctaagcagatcttccaggccggtatgttcgattttttcgtcaacagattcttacattggaattgatgatcacattatacatggatttgacccaaaaatggccatttttatgtagcgaccaaataaagcaatccttttcatttgacagggttatgttagctagtcgagaaatcaaatcattccactcaactaactttggtcctacaattgatcgtcggaatgaaacatttaatggtgttgtgctcataacctctgccaaagtagaatgtctctttcgaatcacattgtacagagaaggatattgatatttgagtggttgcaagcccaaccatgtgtcttcccaaaatcttatttctattccattaccaggtttaaaagatccatactgaaaaaattgatcttttactttcattaggctagcccaaaattgggatgttcctggtttgtgtgacacgtgggagaggggaatagtacactggagtggctggtctctgttgagcatcagtgtggccactgaaaaatgtacacccacaccatagagcactctggttaacacgtttctcacggcgcgcgcgggctacaccgagcggagagacacttgcaatttccaaacccgagctaattatcgccatcgcccgccgcgatctatataaactccgcggcaccgagagccgagacatcccatccatccaagcacacgcgcgcacacgcacgcacgcacgtacatcgcgcgcgccacgccacgccacgccgggtcacaccgttccaagccactctcacacgcacgcgcgttgccgccactacactctcatggctttcacggtcaaggcgtcgtcgccgtcgtcgccggctgcttcttcttcttcttcctcggcgccagctaagctcggagcggcgccggggagggtcgcggtcaggaagctcaccgcggcggcgacgtcgcttaggctcgatcgggcgcccgcggcgccggcgacggagcgcgggctgtcgtcggtgtcgcggaccatgtcgaggctgatggagaaggggaagacggcgttcatcccgtacatcaccgccggcgacccggacatggggacgacggcggaggcgctgcggctgctcgacgcgtgcggcgccgacgtcatcgagctcggcgtgcccttctccgacccctacaacgacggccccgtcatccaggcctccgccgcgcgggcgctctccgccggcgccacgatggacgggatcatgtcgatgctcgcggaggtgacgccggagctgtcatgcccggtggtgctcttctcctatctcggccccatcgtccggcgaggtccggccaacttcaccgccgcagccaaagaagccggcgtacaaggtaattaattaattaattactctctgttttgcacttggacattaatctttcatacaccctcgtcttttttttaaaaaaacttaatactagaatgtgacccataatggaacatcttagtactaagatgtgtctagattagtttttttttacggaggaagtatatatcagtgatgtaaaatatctaatactaataaacagttaagtacagtaactgtacagggatctgaactgtatatatagtgtatacggtacatttctgatttgcctgcacagtcattttgtgttttctgaaccaatgttgtcgttcaccttatcttgaataggattaatcttcaatcaaatcagatggtcttgagtcgttttcatttgtttttcacgtgcatagctgaggtacagcacatgtttggccgtttctggatcgatgcaaaacaccaatcactgtcctatatacataaagctagccatagattcttcaggccaagctaagccaaaaaaaatctgtgtctgaggttgtgatgtgctctccgatgagtgatcattcgaaatcatttatgtggacaagttacaagtaccattacgtaattagagcaagtttaatagtatagccaactactagttctaattcatatatggtcaatctaatagctcattcatacagtagttacatactacactattaatacctagtcccacctatcatacacacactgcgttttggagtccgtgctgcagctagctacaaatttgtagcccgctgcccttctctcttcttatttatctccttaaaatatgtttgcagctgccttatagcctgctattgtacctgctcttatgcacgtttatgcttttagagttttaggctgtgtttgagggagaggggattaagaaaattgggaatatacgcaaaacgaggtgagccattagcgcatgattaattgagtattaactattttaaatttcaaaaatggactaatatgattttttaaagcaactttcacatagaaattttttacaaaaaatacaccgtttaatagtttggaaagcgtgcatgtgaaaaacgagtgacaatctcaccaatctctccccagtctcctttgaaagaacacagccttagtattcaggcaaaattaatgcgtgctaatcggaattctaaacgcattcttttttttttgttactaataatttgcacacgtgttccaggtctaatagtacctgatcttccttacctagaggcatgctctttcaggagtgaagttatcaagaacaacctagagctggtacgtatagtatctatgttgatttcatcaacatataaccattagtaaatttgtatggtcaattaacaacaaattctggattatgttttgtggattaaaatggctgcaggtgctgcttactacaccaactacaccaccagacaggatgaaggcaatcacagccgcctcaggaggatttgtttacctggtaaagcacactagtaaatcttcagaaatcctgattaattacttaatagaagtttagcttctgacacaattgcttgctgtaaaacgtgtcatgcaggttagtgtcaatggagttacaggatctcgccaagacgtgaacccgcgtgttgagcatctccttcaggagattaagcaggtcactgacaaagctgtgtgtgttggctatggcatatcaacccctgatcatgttagacaggtgattgaattaccattttatcacaaatgtatttggtagatttcctaatcaaatattgcaaattctaaaacattattgtcaattgaaaaatggacacagatagcagagtggggtgcagatggggtgatcattggcagtgcaatggtgaggcagctgggtgaagcagcttctcccaagcaagggctgaaaaggctggagaagtatgctaggagcctgaagaatgcacttccatagaagctataaaaacaagttgctaaataatggcatgagagattaattaattaatctcttggtgatgactagctacatgcataaaagggaagctgaagctgcctttctcatagtctcatagttaactgtaccgcaaattagcactagaaagtgttatagataataagtgatgtataggcatccagatccttggggactgtaaaacacctcgtctgtgtagaggtcggatgttaattcttcggttgttcgaagaaaataattgctgcaaattgtgtgcatatttgtgctaacaatcaacaaaggcgcgaaacaaactccttaacaacaaaaaccatatacacaagacaacacatgtaaagcacatataccccgagttgagctggctcttctcgacgtggagacacgaggtcactcgtcataacatgacattgtaaatgctctaagtaatatcctatatatatctactatcttaaaagcatagtagtcctcttctcagtccaattccgcataaaaaaagcgctaaaagaaagagagaacccactctcataaatttctatttatcttaaaagcacagttatcctcctcctcttcccactccaattccgtgtaaaaaaaagctaaaaggctagagataaaatcaatcaggatttaagtcctgatttctataaatattacacccatatagttaggctttcaagaggaatttaagtcctggtttccattttttaaatcatgtgttaggggacgcgtttgtggatgtgtgagtatggatggtgttgggtatctagttgtgtgtgctcgtatatgtttgccgtgtaatcctaaaaaagttctcaaagaatcaagagaaaaaccgttcgagaaaaccgagagaaaaatatatggaagagggaataaaaagtttgaaacatgttccacggatcccgtttcgttacaagcacaggactagtcatatgactagtaaaaaaatgatttaagttttatttatcgccgaaaataaaatgcgccgactacccacaacttaaaccaagatagccggaaggtctacagtgcagtaacggttaaaagcgtcgcggtcgcgtgattaaccgcaatctcgttgataatgaacattccttatagtacaattaattaccatcacgctgtgtttgtttaagataaaagatcagcatcacaaatcgcaacgtccaaggaatggaagagaaaacaaatccaacacacgcaaaggcgtcgaataattaattaagcaaaccaatgaaaagaagatctaccagaaatgtactgaccttatctattgtcaccttgaacagaatgacactttgcgtcgtctaattaaggaaataatactaaatctgttggattttgacaggagaatatttaaacttggttttctttattctctccgtgttaatttcgctgttggatcggcggccgctgcgtcaatttatgtacgtatgcttttttttctctctttcttttggtgggatttatgtacgtatgctgatcacagcgatgacatgaaaatattagctgctctcacgcccggttggtaacttggtattggtcgtgagcctgtcgacgtcatcgatcttctgggctggctatactctagaggaattgcggcccacgaccctctcggatgatttcacctttgagaaaggaggagtactccctacatcccattaaagaaaagggttaaaaactaagatagtatcagatctgacacatcaaatctggataagagattggtttttaatgtaacggagggagtacatctgtgcgcaggttaaaaaaatttcttaggtttaaaagtaatttttttgtcataataccttatgtttcatattgtaagaatgttttgatctttttactagttaattttttaatcgattttaagacaagtatggtaacatattttcactacaaaacaaacatgtaccaaaatatattaaatgttatatttaatgaaactaattttatgttataaatattattaaaaaaactataaatttggtcaaacttaagaaagtttgactagagaaaagatcatactccctccatcccataatataaggcgtgcacatattttaagattaaacatttaaaacatttgaccaacacttagtttaatataaaataaattttatttgttaaaaaatatttcattggattgacatttaaatttactttcatatggttctaatttcgttgttacaaatattataatatatgagaaattaaaatataaagaatagatttggagaccgtgccaactttaaccacgtcttatattatgggatagaggaagtaacgttttataatatgaaacggaaaattatatactcaatacgggctcttgcaagtatgaaaatgttttagttttacactctgcagaaagacaattttgtagtctttgctacatatactatttttagttggttcctgagctggcttatatattttgtcaatttgagaaataattagtcacttgccgacctttccaccgttgtcaacggctaagatatatcttatttatatattgagcaagaaacacgtttatattagccagtactcatatgttctagtagctagatttgtactaatataattatcgaattgaaccctctcggtcgatcgatcgggagaaagctctggttaattatattggtgcttaacgagtcaatagtcgttaccgacttcgtcttcttccctgcgtcgtttgcagtgattaccaaaaaggccaaaatt

SEQ ID NO: 8153 - DNA, 7123 bp, Oryza sativa
attcttttaaattatatgctacttgttcttgcccattctctctctcccttctcctcctcttgctcctccctcctctctctgtgtgtgactgcagagaaattgatggatgtttgctacatgggaaagcatcagcctgtacttaaatcagatctccatacaaaataaaagcacctttgtctttgtttcatactgacaattactctgtatttccactttattcaaacaaaatatgaatcagttttcccttgcaagaatcattctacttctgattcctctatttttctctcgtgaagtttttcacttctttcttctagacagtggtgctgaaaggcagttcccactcaccaccttattttcactgctggccttttattgatttcttgatctaattgtctatgtcagtgcaatccatttgtacttttgctatcagtgacagtgattgtagcttttcctgtctcttcttgaacataaaacttctatgtctatagtttaacaataatgaatagtgttaaagtcttagcaagatgaagatatgacacatttctaccatatgacaacatgtcttgtagatcccacattaaaatctctctcatctctagtttcctgatgagcacagtgtctccattaggcttttgcttgcttcagagcccaattacaaagacttgtatacttcctgatccccatcgatcgctccatagtactccttccgtttcacaacgtaagtcattctagtatatctatctagattcattaacatcaatatgaatgtggaaaatgctaaaatgacttacattgtgaaacggaggaagaagcaaaagaatggtgtgcattatttctttcgtgaacgatcacaccttcactcaaggaatcaatttgagagtccttttccgtctctgctctttcatatcttttggttgttaaactgtatcttgctttattttcgttagggggaagcaagcgatagtgggggcaaccaacagatttgggaaaagtggtcaacggatggcacagaaagacaggtagcgaagctgatggaagaagacatcggggcagcgatgcaatttctccaatccaaagcactctgcatgatgccaatctcgctcgccatggcaatctatgacacacaacaaacacaggatggacaaccagtgaagcacgaacccaacactccttcctagtatagtaatagcaactgtaagtctgtaacatgaatcgttacaacccctagtagacatcaacctatcaaagtgtaagataaaacagctcgttttgattcactaacaaggaggcaggaaaagacctaagagatcctctccacttgaagttgtaccaatggtatatgatgtcacctttcgttatcatcttttgttcaaaggtgctttgattgcaaggatatggtaagcaatagcctgctcatcctcctacacctttcaatgcccctatgagcgcgggtgattgagagagctactaaagagtctggcatgctctcacattgtctcttttcgagtctgtagtgcaccaaccatacactttgtggtggggactgcttttttggtagtgggtgtttggactaatcaaaagggattgatgtatgcctgtgtctgcagcctgcacaatggttgacggaatttgaacacaagatgaaatggaagatgattttgatggtgatgttcatttatctccatttttccaaagtggaggcggaggctttggtcaatggaggctgagcgtgcgctaagctgatcgctagtgggtctgctatctacatctacatgcactactgttgtatctattgtgacatactcttgataagaaactgcggtataaagtttaatctttctattggcgattaatccatagaattactttgtattttctgccatgagttctcaactacccacattatttgtgaagaacagctgttcttgtactgttcactgccctctaccacagggtttcctgagtttgtggacaaattgtgagaatctacagcaaggactattgagtttttttttgtcaactgacgatttgtttggatgttactgtaagcaattcacccatctcaatacttgatatgtgctcacatgttaataattcatgggttaaatatctggtcaagtttatacttgcactaaggttgtttatcctgcatctttgattttaaaaagtttgatttcaagtgtgattacttatctgggaactgttctataaaaaagtgacggctaccttttatttctacaggctgaaatattgatttgcaggaagaaatgaagtttgttccttccattcatatgtttgtgctatactgcagaaaactgctaccggttttagtgcttttggtactccaatggtgctatccttatctctctgatgatatacataatttttactcatcaagcttactttgcattttctaatggcacagtcaatggtatcatgcactcatatgctgtgcttggctggagaggaaactgctgggctgactatacagcagtcgaaattttttgtgctctgctcatgtctgaatactatggttcattgattgatttgtgtattgcagagctcctggtaaaccaggtaaatctgctttcaacacattgtgtcagactttttggtgttattctgcagtttttttttaaaaaaaaataactgaagatggctgcattatgtccggcaaacttgtgaaaatgacccatttgcccttgtcaacatagataggggtcattttcacgcaaaattggcaatttgtaaagatttactctctctttccaatgatatatttgtaaattcatccgaaagaatagcatcttatgagtgaccgtccataaaagtaccaaatagtcaaattccccatcaagaatcaggataactcacaagggatctgaaacttgggatcccctggagcctgggtcgttgagacggtggatttttattttaattttatatggttgagagagtggataaataggtgctttggccacggctcaccgaataggcaatgccatgtcgacccacgtgctgagactggagcctaagcatggcggccatggcccaatgagatgttgggccatatcgtgttaggctagtacgtattggggtacatgtgttgtgccggaggtctgtagcccaaattcgacatataccaagaaaaaaatgcgaatagtccgttgcatcctgccacacaaacttgggaagatctggcgaggtcctccgctcaccgatagcacattcctcttcctcctcgtcaagcactgtcatggcacttcgtttcctacttccttcgtctcgaatcaatgagctgccaatgatcgacacgctcagtggttgtgctcacgactgggccggccgcaccactatgatgttgtctctttttcatgtacccttttagtgtaatctgttggcaacacctggggatccaatggaatccaaatctggaattttatcagatggtagtattggcaagaattcagttcgcgcataagggctttttggaaatcttcttcttggctgcttggcatatctagaagcaaaggaatggtttcatcttccaaaataatcaccccaccttccaatcgtggagattacttttcaaaaatgaagttcttctgcatatgtgcagaatgaaggatcctctcaaatagctggttttagactggttacaaactatataggaatcttgttttcgtttccttttttctctttgtaactttgtatatattcttttcatttataaaattacactgctgggcaaagccctggcagtttccccggtcaaaaaaaaatgcctacgttgatgagcatccaccatcgctttcctctaccctgagccttggcttcctcaattcttccgttcttctttgctccttgctcttgctcggatgtcagttgctcaactgggggttgttcaccggtcgtcgatcgtcactgtgtcgcatgggccagggcatgccgtgccattcgggggccatgtcatgctagcttcccacatacaacttgtcgtgcggggttggggtggcggcccaagcatggtatggttagatgggtcgtgccatcatgacccatagctaaacagggtgtaccattcctgggtcgggaactatacatacatgcccgggctaatacggaaaggcctagcccattttatatcctataggaagattcggcaaactcatagaagatgattagtaagctagatgttccacctctttatcttatatggacaaaatttatggccccatctttttgcttatgctgatgcttatcaacaaaaaattgaattttcaaccttaaatttaaagctgattttgagtttttttcatcgaagtttatttttcagccttcgcttttaggtcgctaaaaacacgtatgtaaaatttttattcacaaattacttattgtggaataagccaaacaatgaggccgttagatgtctggtactaatcacccttcctttaaaacttacactaaggctacaccataagaaataaaaaaccattttgtatctctgtaacatccatatcggtttgaagcctgcatatgaaaggctaaaaatatttttttttagtgtgtcccaccttaagattaagattaagaaaagaccataaatattgtagcataataatgttattagtgaaagaccatctccatgaacttaaataaactgaggatgccctaggccgagcgttgaacgcggacggggagcaaattgcctgagagccgaaacgcgcgaaacgacccgcccgcccacgcggcccagcccaaccaggtcgcacaacgcaactcgcgagggcgagcgactgagaccgtctcctctcgtctcgtctccccgctagggttcaggccatggcgcacggccgcgccgccgccgtacgccgccccaagtcgtcgtcggcgtcgtccgcgggggcggctgccgaacggaagcggaagcgcgccgccgccgccaagaccgtttccctcaagaaccagatccgctccaccgagcgcctgctccgcaaggtaacttaacctacctggggttcgggtttgggttggaaagcgctgcctctcgctcgcttctgctgctgctgctactgctgctaattctgctcccatgattaacttgtttagtaatttagttagtagcttactatctactgctccggtgtgtggagtggtggtggggaacaacgataaattcgtctccgttgactgaattttgctttgattagtatcttctgctacttgctacggcggggattatggaatggattgttttgaggttccgagcagcttggctcgggttattgcagtagtttcgtgaatggtcattcgcctcacgaattgcaaccctcccgtggggcattgcttatagggggaaaaaagataaacgagcctgatgttaagtatgcaaccacaactagatgaatcagaatgatgttaatagaagtgatgtgtttgctcatttcagagtaggatggtaaaggttgggttgatgatgattggttacaacatacttgtaggttggcagctttaatgtaggaaacaagtagggattgagggacaattgattgtagaatgtagagcaccttgcatgctggtcatagagcacattgcatgcatatatgtctgcccaagctcgcatgtactatacccaagggtaacctttacaagattccaggattccactgaaaatcaagttaaaaacacctataaggctgtatgcaagaagacagcctactgttttggtcattgtaattcaattctattcgaggacactatgcttgtctgtgcaccagtgcttgatgtcaacggtactgacaatgcacgcatggtgtgttttttgggtaggcttgcaggaatcccttcccccccctaaaaaaagcaatgtatcaaatggttataaccatcttctgtggcaacactgctagcagttttaagtattcgtgcatgcttaagagttagaacttctccaagtattggggttgatcatttgttggggtctattctaatcggtatcatttcccttaacatgccttagtgccaattgttacatgcatgcattactctgtttttttttcccaggcctgttgttaaaatgctaatattgtatatttggtcaggaccttcctaatgacattagggtagctcaagagaagaaactggaagaattgaagcggcaacaagagcttcagaatcaactggctattcaacgaacagttcagctgagagatagaaagataaaattctttggtctgctggacattctgcttcattcttgctcctgtatgatgacctttaactgaacatatgtacttatcattttgtttgtattggtatttgaaaactttgaagagaggcgaaagattgagaggatgatcaggcgccttgagaagcagcaacgttcaaatgccgatgatgccagcaataaactgtcaaaattaaaggaagatcttgagtatgttagggtaagcttactgttctttatcccccttgctgaatcagtatctttgcattaatttactacttacctcatcccaaaaagagtttacttttctactcgaatatagacaagtggttgtccagattcgtgtagaaagtgaactctttttgggacggaggtagtacagtttttgtgtggactatcctcaagtctcattcttaaacgactcttgaaataggtgttcattatttttttcaaaattggataaaaaatcattgttccgtctgaacctgcttgaattccaagctaaaattatgctgttttactcatgtgcagtttttcccaaagaatgagaaatatgtctcactgttttctggagggaataccccagatatgttagagaagaggaataagtggcgtaaacagataaaagaaaatttgatggctgctgcagaaaatggaaaagacttggaaggtgtgtgtttacattaccgtttactagattacttatgttctatttgtattcttcatgcacttctagcttttcatttgaaaattgtactgcctgtttggctacatatctactctgaagtactaaattttatttttctcgtcgcctaacagagacagcaagcgatgatgatactgtggatgtgagtgatgacgacttcttcatgtcggggagttcaagtgatgaagagg

SEQ ID NO: 8154 - DNA, 17595 bp, Oryza sativa
  unsure (1)..(17595): unsure at all n locations
actcgattatttgttaaagatagcaccttttgagatcatagctgttttgtgcgcctggatcataggcttgtagtttgtccttttcagtctcttatgttaatgttgtacttagtctaaaactgcatagacattctgcagaaaaggcatctttcctgattttgttagtttaatgcagagaaccagcttccagtgcttcaggtaaggcagcgtctggcatgtcaagcgatgaaaagaatcaggttgttctctctatactggtatttcaatttacaaacttcttcaaatttccagtaggttgctttggtatgcttccctacatttaatcccgtctgttttgcttttcagcgtcagagagatgctcgagttcttatgccaccacctcgttcattagcaccaaatagaactagaccaggggtgaaacacgtgttatccagctcaagcaatacttcaaatagcacaagtggtggcactttcaaaaataggagagcagcaaatcagcctggagatcataacagcaacctgagttcaaattctgatgctcataaaccacgtcgcaaaaggagacatcggaagaaaaagaagctggtataaactttgcacccatgctatgaacttaattaaatttatttttcgtgatatctgtatttgacaaaaataacttgtgcgatttaacattcaaatgcaagttatatcgacattatctatgacctgcatacattatatttgcaattacgacacttatgtgaaatgcgtgctttgtgtgaaatacattatctctgaattttagttttactgaaattttatctgattgtacaaatgccttaaggattttatatgcacattgtatgttccaccacaagtgaagatcatacaaacagtaacaatattgaaacatgcatatcgtttttaaggctatagggaggaaaatatttctgcatgatgtgtgtataactgtaagttggttatgcttgattttttttaaacaaaagttgttgatgatatcattaggaatgataacttggttggtttgctttgtacattgtctgcctgagaaaaaaaaatggcatgcactatcagcttgtttccctgatattaattgtcatgctacctgtccatctcaacaggcatgaatattctggagcgtgaggtggaagctgattttattcccgcaccaaagtgtgtactaaggctggttactatcaaaagaatggagacaacatgtgtgccctgaggaagttgctgattttgtgcgccctctctcgatgtaaaatgaatctcctatcgctcttcactcaatcactcatttgttttacagtaaccatccaaaaagttccgattattaactgaatgcatgctggtctttaccatgaagctgtgcttttccttatttttttttccttcatgacccaccatcaatcaattcacgggtacctgaaagctgtaattgtggttttagggacagctccatgaattcagaatttcggtacatactgattcttgtcgggaggcaaatgcatatgcttttatcattgctaggctgtgagcggttgtcgttgtctgctcccaggtctgggattacatgacctgtaaggcgtgatatggatgttcaattgtctccctactgtctgatccgcatctatcatgtgggtctagtgcacgttgtctgtagtcactgtagcaccagcattttcatattctccctcccatcactttgcaaaattagagagacccttctcactggactgttgccacactgtatttttacctactagtatcaatgttatacagtgcagctacattatctctgtcgtttgctggcattttggccaggttttctcttgcagccatgcatgcatgcatcgcctatgtggtgtagtaggtcagtatcagtaggtcccggttatgacctgtgctgctgtgcacagtttgtgacattctgggctgcagtaaagttccaggtaccatcgttatcagtgtggctcactcgcctctgcatcctatgctatgatccatatgatgtgtcgtcattccatgcatgtagttttcccacaccaccttaaaatgagttcatctttaacctttaccatttgtactaaaataattttacttctttctttttatctattgcatcgatgagtttcatttcttcaatacccccatctacacatccattaatactatttttcttattaatagaaggtactttggtgtttttcactttgtattaatttgcattccaacgatgaaagatgaagttattttgggatagaggtagcttgtttttcttttgattttgccgtgcatttggatgcttctgctgctgtgatctctcttgatgggtactatgtgacgtctctgttattcttttcaagcgtacaccctgtgcaagactggaacgtaacaggagctttgggaaaatcgaatggatggatatgcatctctctctttggaaaattgaatgtactatccttgtactacaatttcctgcctagcaggtgtagtagttgagacttaatagtaggagcatctctgaaggcgattactcagtgagcaggtaataatctgatggctgatgcaccgtcaggtgcagtagttgcagtactgttgagatggtgagagagactgcatggccattactgccagatttgtgagattaatggacagtagatgcgtgattgattacaagaattaaagcagaatacataaatgagtagtatgctgagatctggcgccttcaagtgcttgtcgttcttcacttgtactccatatacgatagtgaacttcaaaggcatactacacatgaaaaaggaacagcaacgagaaaagaagattggtcttgtttcagagaaaagaaaagaagattgggagacaattcttgatgtgacaaggtctcgttttgacagttaacgtactgttcttgtttttttatgactctggtcagcatcagtaaatcacacagagattaaaaggaatcaaacagctgggaggaaattaaaatgaccaaacttccaagtttctctttcttcagctctcagatttcttcagtgacacaacagaagctagaaaaaaaaaagctttaaaaaaaaggcatgtgtacacaaatctgcagaactagcagttgccatttccaacaaccaaaatctcagctagattattctgtacataggagtactgcagctctgctcgatcgatcatatcctcctcctcaccaactccgatccaactgaatcctgaacttttttagaattcagatccttggatatctcatctacacatctacgtagaacaaaaacaagatgcatccacgtgtaagtgtccttcttggccagccgtccgatcgccatgcatgacgatgtccacggatagatctcatctctctcatgcatgaagccttttttctgtgagatgtctactccatgcatgcatcggcgaaaattttttcttcagctcgacgcctttcgatttcgatatatatcatctcgcctcagatcctcgcattatccgcagcttcttgcaagaagagatgaacatgctgcaaaagcacaaaaagattcaaattagagacaaataaacacacaagattttccatggatggataattaacatgtgtgtgtatggtgcttactcccagggcacgtcgccggcgagcatgaggtcgccgtccttgtcctcataggcgacggcgaagtgggcggcggaggcggaggcgtcggcggaaaagcagccgaagagcgcgtcgagagcgtccctgagctccctgtagccgccgtacatccggaggtcgaccttgcggaggtatggcgccccgtccatgctcaccttcacgtacagccctcctcccttattcttcctcccttgatccgtctcgccgccgcccttccccttcgccgccgccgccgtcgacgacgacgaagactggaacgtgctcctcctgtacgaccccaccggcggccaccccaccacctgcactctgctcacccacacaagaaattgtaagattggctgcaaatcgagctggcacacatggcgagagagagagctagagctagaacttacttggacgccggcgaggcgccgtcttcgacgtcccgggcgccggcgccgccgcagcaggccgtgccggaggcctcgctcttcaccgtcgacgacgccgaccgccgcttcttcgccgccacgccgtcaccgccgccgctgccgggcagcccgaggcgcagctccgcgtcgatgctctccgcgccatggccatcgatcgagagagagagctagctcgtcggcgttcgtcgctgcgacactgacctcgtcgtctcgtgctgctttggttgcgcgtcgcgttatatagagcggttagttagttgttgcgtgcgtgccctagcatgtgagtatgccaggtgggcccgggagacagggaggacgcatggttgggtgggccccatcgggcagacaggtggggccagacgcgatgggctaggtcgggtacttactcgggtcgggtatagattccccgcggtgggcgggggcgctgttcgtgcacgtcgggggcagcgcatgtgggggtgacgggtggggcccacatgtcggtgtggggggggggcacgcgtgctggcgggggtgccacggtgtggggctcacacgtgtcgtcgcgacgcgggcagtctggttttggttgcatggggccacgtcacgcgctccggtgtgcatgcgtagctggaacggataggcacctgtcattgccctgcatacgtcatactcattctcgcatttctacgccggtttccaagacgataatacatccctactccctcaaaaacccaattctcccgataaatttggagatacataatgtttaaatcattattattagaactaagttgtagagagcagatattattttttttaaaaataaagtacaaacgtagacgctcacaacacgtgcacactcatccctataaatacatgcacgtacattctacctctacgagcatatctgtaagattggacagtatattttgagattgtgtcagcatagaatggggggacggccctaatgttgtgttggccgggttgcgagcggataaaagcggacgtggggactcgggtcggggcacagcgtaactaagataagagagccattccatttagggcgagacagaatgggcgggcacaagcggtctggtgtccgagccgattggtcagacggtgaagaagttatcacgaacaccttattgtcgagagttaattatctgaatattcttttgattatattattgggaattgatttttatagatggatatagtccgaagttagtttttttttttaaggatcgaggggattggtaaattttgtagcacctttttgccgagagagtttggtgtggttcaaatccagatgagtgagtttattaacccaaactttcatgtgaaccgtgtcggatcgtcaaaggtgatacgcgtacgtgtgcatgcaaatatgcaatgcaaagcatggtatccagctaagcgcaaaacggatccgggccagacatgcacacgcaacccaatcgcccacgaaacttttttgcatgcatatggcaaacggaaaatatggcattcatatgtcttaattatcactgaaaaggcaaaaaaaaaaagaagaaaaacacactccctcgcttcatattataaattatttatctttttctaatcaaactttttataaaaatatagtagtattttcaatacaaaacagacatattatcaaaatacatttaatgttagattaaataaaactaatttgatattttatatgtttctaattttatctataaatttgatgagagttaatagggaaaaaatcaaattatattaaaacggagggagtagctagtagacgaagctaggtgaggaggatggtcacgcagttatcgtgttgcacggttgccgtgacaagcaaccaacaaacccaaccaggtgatctgtctatcccagatcgtaaaccggagggggaggtgcgaaccaaacatgcttttggtgttgggttggtgtgtgtcccctctcgacagcgatcgagccgtgcgatcgagcacgcacgccaccgcccctccatcgcgtcctacgtctatctgtatctgtcacctctcgcatgcaccgtgtgctccatcgctgtcacgtcaccaacagctaagctgactccgatccatctcgttaatctcacgaactactcctactcttcttctttttctgatgaagacgacgatggaatggatgcatgttcaggagacggcattgccatatgtaaaccgtggaaccaggatttaagtatgactgtatgagagacctaagagtatggtggagtctagagagggctaaatatactatatttagattaattagataattatatgtgaaaaaaattgttggaagagggtcatagggtgctcgtatttacggctcattattctttcagtggtaggtggcgtatccgtcgacagtgagacgcctgtggtgacttcgtcaatctcaagacatgtcggcccagtcttccgaaggtgctcatatggataagtgtgctcacgttgtgagcagctacgtttgtactgtgttcctttaaaaaaatgtggtggtcgttcccgttgtcctgtctcagctgccaatggcggagccaccacccgactaccacatatatggctgtccagactcatcatcaaaagttccattaaattttagctgttgaaaagaactattatgcaatttctataaagaatactcgacagggtagagctactgtgtaattactcggggtttaatgagtaatgaccccggtgaagtttcctaaatcccatggtaaatcatgttagtcaccatatataaataagaacagagtgactccatggtgcaatatgagtgaccccgtgaattttctgtctggatagatccacccctgatactcgatattgttgagttttgtcggggtttaaacatcttttccttctctgctactagtctgagagaggcgggcgatcgagtgcgagatcgtcccgtgattctggggagtttcgcgcgagcgatatattgattgctagtagctacttgctgttgatttatagctaaaaatatttatatttaaggatgaagggagtaggtggttacattgctggcattgctgcgcgatacaataatggatcgatcgatcgagttgcgccaatgcaacttgcgattattcagacatgtacattcagtgcagtgtgcaagtggccggccgtgtgatcagctagcaatatgtactgtttcgtgtcacgatctctgatgatatgtgatgatcagctgccatgcatttgttgcaatgacgctgcaggctagatacgcgcgtagagtctctctctctctctctctctccctccctccctctcgtgatctcgtgtctgacgattagctctcgcagcttcacactgcatatgaatagctgaatatgtagcgcgtaatctggcgaaaaagttccagggggagaaacacagtacagtacttggagggtgcatgtcatctgatcagacgtgcatagttagtgatttgacctcatgcgtccttcttgaacaacgtgtatttggatctaagcaggggcggatatagaacaagatttaagagaggactcatcttcttctttcttcttcagtctttctactctttattttctccctgtttttctcctttcatcttcaattctatcaatggtaatccagcgaggtaaggaggactcgagtcccctcagcattcacgcttgattcgcccttggacctaagtatgctcatggtgatggctagctgctaatagcttaactaattaagctgctcaatgacgagaaatgaaccatcgtttaaacatcccccaactcttcttcaaatgagtaaaggtatccatgatggagagatcgatcagaccatacactgtagatgacgattttttgccgtgaaatttgggagatatttatggctacaaaacgagggaaggcgatggttcctcgaaatccagacatacagtcatcattcagcatgaccatacagtatacacactatacatgagaccggcaacccatccagggttccagcgaatgcggcatcgaggcatggatcgttggctgctaattggctgcatcccatgccgcccccgggtcccgcccctgccggtactttggttccatatttattagggtgcagctatacaacggaatcctgttttcaaaccgaatgatcccgagtagctatcaggtgtgatacctatcaagtattagacgattctacacacgtttcaggtgatacttacaaatatcatgtgatacttattaggtatcatgcgatttctatcacgtatcgtgtgatgctcgtgaggtatcatgtgaaacctgtcaggtatcagacgatttcaaccacatatcgcgtgatactcacgaggtatcatgcgatacctgtcatgtatcagacgatttctaccacgtatcgcatgatactcatgtgatacttgtcaggtatcagacgatttttaccatgtatcgtgtgatacttacgaggtatcggatgatacctaccaggtatcaagtgattcctactagatataactgagcatcctgttgggggaggagcaccctgacacgcgcggcggccccctgcagccgtcccttgtagacgaggacggcaatggccgcggcaggggacgggtgcggcgacggcggcggtagcgggggacgggcgcggcggcggcggtgggggatgggtgcggcgtcgtcgatgggggacgggtgtggcggcggcggcggcggaggcgacgggggacgggcgcggcagcggcgggggacggcgacggcggcgggtgagcaggcctggtgcatatatggataagaatcgcgttatgaaggaggagctatcccgttgggggacggtatcgcatcccctagcattcccgtatttcttaacgtgttgagtaaagttagaattaaacttttacaactttaatgatatttagcttaaagttattacaacaatatatataaatttgtcttataaatactatatataaaaataaaagtttatctatttattgtatatattaaaatagaaaaatatagtcaaatatatatttcggatatcgtgctattatccaaaatataaaaaaattatgatatcagaggcagagaaagatatttttacccggcttctacatccaaccagatatatgcaaccttttaaatcaggaacttagccccttaaacaatccaatctgtaaattcgcttatatgaagagttgaactcgtaaccttgatgtgctattcaaatcatcgcacctactacatgctctttcgcatccatgatccacgataggtcgatccgatcagacactgtagatgacgatttttcgccgtgaaattggaagaaattcctggctacaaaacgagggaaggcgatggttcctcgaaattcaggcatacagtcatcatccagcagaccatactgtatacacactgtacatcaaaaccggcaacccatccaggccaggtcccagcaaatgcggcattcgggcatggatccaggcgcgcctgcttggctgcatcccatgccgtccctgccggtcgacgtgtacatacgcgcgtagtggtaattacagaaaatctatcgtacggtgtcccgtggtggctgtgcgggcggtcacgggataaattaaacgactggataacgttttacttcttatccattccttttctcttctctatccaaagctttggtcaacgccttcgtgtttgggcaggccaacacccgccattccagccgtgcatcgctacaagagaagctcaagagagaagttcccggcggcaagatggctgactgctgcgtgttcctccgatggccattgaccttgccctccctcctcggttaccgctccctcgacaacagcaaggtggccggcttgtcgtctccagcagtgacggtcgtcgttgagaaagagtggtaggtgttctccgtcgaccagctcatgctcgacagctacccatcccggctgctcctcgagaagcggtgaggaaggaggagagcaaggcgacgctcttcgtcgatgtcgccatccttttcttgtcagtgttatgtgcaaagtacgtcacgactgatacctaggtatcaagtttggtaccaagtaccaggggtcttggggtctgtacggcgtacaccatcacgcgcctgtacagcgtcttggggtggatgaggcctagccacggtggcaagaggaggtggtcgcgcgagcggaatggggagcgccatgctgcgggcggtgctggtgttcgtgttctctgccgccatgctgatacagctgataccagtatggtaccaactgcatggtacatagtacctgtgacacctggtacccaatacttgtgatacctagtacctgatacctgatacctgtggcacctggtactcaatacttgtgatacttggcatctagtacttgtgatacctagtacctgatacctgtgacacttggtacccgatacttgtgatacctggcacctagtacctgtgatacctagtacccggtacctgatatatggtacctacagcatggtgtacgctaatcaatcacacattaaaattgtcccgtgactttagtttttcacggtatcccgtgggctagcagccctcggtaattgcggcattgcgcgcgtatgttcgcgaggcgttgcatactaaattttggcaatttaacagtattgtcaagttttggcatgatttcttatatatttatcagagtttggtaaaagaactaaatagatacatatatttgaaattaatggcaccaatctaaacaaccactaaaaatacaataaaattgtaaagatatgtaatgtttgcatgatatttaaaatactctagataataattattagtaggtgatgatgtaaaatactctagataacgactgtttgtggatgatgatatgacacactttatggtaagctttaggagttactccctccatacttaaaaaaacctagttggtgatttgacaccacctaggacaataaatttgaacaacctcatgtccaaatttattgttattgttggtgtcaaatcgtcaccatgtatttttttttttgagacagtggaagtagttagtaggataagatatgagtttacttgctttgtatataagtacgttaactaaaaccactattaatatcatgttcaactggtgactttgaaaagcttggagtcttcttcttgtgcttcatctcttctaccttagctacctattcaccatccataaccattgcaccagaagcatcaagcgcgaaatatccataatgttctccaccatctattgacttggttttctagtagcgagaaacacccagtggtcttttggctagtttcacagggtggtgagctagccggcctggattttaaacctcactttttctatttatttgatattaggtctttctctattgtttgttttttaagtagtacctccttgattggatggcttacatttgtttttcttattttgtccttttctcaatctgatggtttatattttgttccctacgtagaccaatgaggtgttttaaaatcatttggctttcactattttagatttggaccgacatatatagtaccaccttcaaatcaaaataagtgtccttatttagtttaaatttaaattaaagaagtgcacttattttaagatagaaagagtaatatgttgacgtcaaaattcctagtgccaacctccaggagctatggttgctagctttagctgccatggttggcaagaggttgatgccaaatcttgttagcgtcagtacattgttagatttttatccagattcgtggtactaaaatatatcacacttacttaaaatacattatattttttaacggtgagtagtatataatagtttcgcttgcaacaggttacataagccataacacttagtgatttaaaaataatttataagtattttttatatatatttgtgtttttagtgatttaaaagcaaacgctgaaaaatagagtaagataaaaacccaaattaactttaaaaattatgctttaaacttaagttttaaatttaaattagctgataagtaaagaggaaagattgaggctgtatacgtcggcgccggtgatgtccagtgtagcgtccgaaaacccaacaggcctgccatcttgtttgcatatcacaccaacaaacgagccagcttgtttgcagtcagattatttttggtgttaatgtaacaagccaagccaatggaggtgggcagaaaaaaaccgaaccgaaagaccgaaccgaaaagaccgagatcgagaaatttaaacaaccgannnnnnnnnnnnnnnnnnnnnnnnnnnnnnnnnnnnntcagtcatcaattcggtcctaggtagtgaaagaccgaattttgttcggtcaattcggttagtctcctcaggtaaccgaatagactgaaaagaccgaattatcaaaaaatgtctaaatacaacctacaatccactatgtttaataggattaaactctaattttcacatccctacttcttctaggcatgcaacataataaaagtctttactcataagtgcttacgaattttttttgtgatttttgtgttgaaaattttcattatttctttgcatatatggaaatgttgttgaatttcggtcaggaccaggaccgagaccgagaccgagaccgagaccgaatttgtcggtcctgatattttttcactgaaattcggtcttcacttttcaaagaccgaaaagaccaaaagaccgaagaccgagaccgaaattttcggttagaccgaatgcgcaccctattcatctatctataggctttggcagcaaagctctcgaggtaccagcagggtcggaatttcggtccctatgatactattacttcgactgaaatttttcaactttttaatttttttcatgaattctgataatatttgcttaaattcaactaaattctgtttaaaatatcggaccaaaattttcgaaatttcggcatttcggtgagacccgatcaaattggccaccctgggtaccactcgacaacgtcgaggccgcagagatacgtccatctggaaagtcagcgccgagccgccggcaccggcgaactccttccgggccgccctgatcgcctccctcatcgcgcagtgcaccgacgacgccagcagcggcggcggctcaccggacgctgcatgccatgatggaccgcaaaacagtttcagatttcgagttcctttacgatttcaatgctcatgcgtttgagaacaaaaggatatgatatttcgagttcctttacgatttcagtgttcatgcgtttgaggaaaaaaaaaaggatcgaaggaagaagacgatgatttcacctttggaagataggacgcgcttgtgatcgcgggcgctgttgatgagctcgacgttgaactgcttgaggatggtgtccacgccacgtgccgtcgtggatgaccagcccatcggagttggtcgcgtactcatcattcgtgaagaagccgatcccttgcacgaacgcgccttaattccacctaaccaagatcaacaacattcagtttacatgtttagtatttacatctcattcttgcaatgatatgcaacattggggaaaatccccctttttttgtatgttattcaaattatcataaaaattaaaattaattaacataatatatcaatacgaggaatgtcattttctacaaaacatgcaggctcaaaatagacttacacaaataaaaaataaaaataacaaattttattgcagatattacataatattcacgttaaattttttatttttgtttctatttgtattggttgaatttgaacgtgcatgtttgtaaagtaatatatcacatattgttctatcttgtcaacttttttgagaaaatatgatggtttttttagcgacatgcataaagtgataaaacgatggaacgtcccctcgaataatgttgaaggtaattagtagattgactgactgacctggcccaagtccacggcaggattgaagctctgcccacagtcatacactagaaaagaaatgcagctttgccgcataatggcctagccaataggaattaaatatcaatggaacagcctgcacaacaatttaatggtcaattatatagagttttgtgctttaatttattaggccatccccaacccagaaactatctagtagtttccatatttgtcatgtcatatagacactatgtgtagaaactatgtattcaatggatggtgtcttcaaattaaattatcatccaatcacctctcttctctctccttttatccacctatccccttaattttattcttggttcttgtgtagaaatggtttcttgcatgagaaatgatttcttcatctttttacctctctcatcattaattctcttgccacataggatttttgcttatgtgtcaatgtatttaatgctatgaaaactagatgacatggagggttggggatggccttagtatccagatcaattccttctcaacctttctcattcgttctgatcaaccatcacccgcattgctatcagcttctacttccttccttacgcctgtcctctccggctttcattcgatgccatcggccgcctcacccaataccaggccctcctcctcgaggcagtattgctatcacagaaaaagaagctcgagtcatcattaccccctcctagtttaaatatgatggttgttttagctctatcaccaatagctatttttctagctcaactggcgaaaagtcaagaaaatgatgccctttatgctattaaataagcgattgccaacttaaataagagaaaacttgatgcccacatagatcactccacaggaacattagatttctagaagggttataatatgatatcgggatgtcgatttctatttctataattaagttgattttcatcgttgcaaatgatgtatattttatctcagttgattgtagtgtatctctataaatacgcaacccacccaacataacataattattggtgattagaaaatgcatttgtatatttataagtaataattttatgtattatttattaatggtacttaacttccttaaatttgcttttttgttttgatttttttctttatactatttcccccctacgtcttccctcctgcctgtttaccaataaataattcttctatgttaatttactttggtaaaaaaaagagagtaaaattaactataggaagttgtgcatttaaaattatgaatcatactattcatctagaaatttaaattgttccatgaaaatagaagtttacattagaccatatagctagaaggactagtattaatattggtaaaattaggagctcacactaacagcaaactactcacatgaaaattgcctaacgctccacaaaaaggaaatactggtactacaattttatagaacatgattatatatagatcacatgatagttcattgatatatgcctctcgatctacagaaattggcagccaactttattttatttctgtgtttaaaacatttttagtaagtccaatataatattgcatttatgcatataaatttcctttagttcagagaactatattgatggaggggagtttaggcatcaggccaatctaagctcttgtttgctcaaactaataatctaaagaatccatacttagttgttatgaatatttgtatttgacaactcacatgcctttttagagtaaacaaaatagagaattgaaaatggaacagttctcactagctattacctgagaaaggaacagaaacgtgaacttacttgctttgcccttctagaagttcaggacttgacggcaacaattgtgggcacgaacgccggcgtggcgacactatggtggaaggcgtgaactgctggtggagttgatgacgatggatcttagcaacggtggtggaagcggacggcagtggcaagggatttgggcgagtgatagcgccgatggtggaagtggatggtgatggcggatggatttgggtgagaaatcgatagcgcttgtgctggtgatagatctaaccgagcgatggagcaatggagagatcgatagctagctggattgattgttatgtgtagagtaggaatagtaaccttctccttcttttactgccctatgcatggaggggaatgggatagtaaatagtcaccttccgagtatacaaagattacctcttcatcttctttaggtaacttctttacttttctaaagaattcatggaccaactaatttatttatttatttttcttcctagagcattcatagatatagtacattggagcatctcctcggagtggacacatggcagatattgggaggggacttttgctgatttctatggcgccacgtcgcccaataagatgcaagatcttggactctgcattaggtctttaagatgagcctgctttaggtctttaagatgaggtcgctccttaggatggtggttgctcctgtcagcatatccacttccacctacaatgttcatatgtaaattttaggtcaagctctgagatttggtttggcaaatgcattttcagagcttctgttgtagtactaatatggatcagggtatttgtagtgcgtacctcactaaccgcaggtccatagttcaagtagctagggaacgtcgggtcaggggtccagtacgtatgctccgtcagcttcacactcgccatgcttgcctgaaagcggggtggagcaaattaaatcaattcccattacaaattacaaatttacaatgcatccagaagatgatcattcagaaaataagatcagcctactgatgcttgcagttgaaaaaaaaaagattcgttttgaaacggaggagcagaactccccagttccatcaatggaaacgcagcagattgatcacatagaaagaaggaaattatagccacgaagatgtcacaggaattggatttcttttttttaaaaaggacatttacaaggcttaatactcacctgggcaatcaaggatttccatggtagggtaccagccttctccttgatggatcatgctcagtgtgtcagcctggatgaggatgacatggaccttgtcgagatcatcgcacaactggcccagcgcgaacgcggtcatctgcttcacctttgtccatagcccctgaccgatctcgaagccgccggcgatggagccatcgttcatgatggacaccttccccagagtcgtccggagcctcacgtcgtaggtgatcggcacgcaagaaatgccccgcgcgcttcttccaagctgcagcagtagcagcaagggagagagatggagcagattaactcaccggctggcaacgccaactaggacggcgccgttgtcgctgaccaactccactggctgcgcgtaggggagtgcgtcccctctctttttgacggccgccaccgcctgatctggtgctagcaagtggtgaggccgccggatctggcgaaaaggccctcgccagcctccttcaagagtaggccacgccaccccactgcgaggggagggggataccggcgccagttccgacgctgctgaggggaggacgaag

SEQ ID NO: 8155 - DNA, 14088 bp, Oryza sativa
cacttgtagccatggttcgtaagtaagataggcctcctccgtagttctgacattatctcttctttttcaaagttacagcttgcacaaggagactgaagatgaagcattataaagctcacatactctatcatcattgtattggccacattagcttctgtactgttagacaaagacaccaggatgtgattttttataatatcatgtccagacaacttccgcactcccatcttcagcagaatgtccatcaggtcgtttgctcgcatttcttctgtgagatacttgttttgacaagacacagatagaaggcggggttttattgtccgaaggttactatatagaacaggaaagttcagcatactacttctggaatcaggttttgaattgagaacatcataaggcaaccatatgggtccatctgctatagagctaaatgaaccatctgaaagtggaatacatggtatttttctgagagcacacaaaagatcttcagggcttgtggttaatggaagatttttggaagaatggtgcatcaatgataaatgaagagaaatgaaccaagcacatagccattccagccccagtgactcaatacaaccatcaactcgacaaatagatgatatgatgtcaatcaaaacttttggtccatactcatgaatacctagggcccttgataatgtatcagatatgattatatcttttgataggtacccaagaccaagatgctccagaagtaagctatcagaaattaatattctagtctgttcatcccaacctcgaagagtgttgcatgggtagacccatcgcgaactagagccctctaaaaccatgcaacgggtgagacgtaactttgaaaggatcaagtgaggtagctgacaaaagaatccatgaacttctcccactagaggaacaaaactcatgaaggttgtaacagcctttccagggcaaccctggaagcaaggaagagcacaaaaggattcttgtgcactgacaaacaaagaaggaaattcagacagcaaccactggttccatgcattatcagcatccacctcctctctggaagaaggtaagacaaaatccccttgaagaatgaatttaagaccataattccttagaggtagaaaagcaaatacgggttgttgcttcaagtaaggctcatactcccccatctgagtctcctgcaaagtaaatgccacagctatctctgtagagcacacatcattgcgtacaattgtgccctgtaacttcttgctaactaccaaccaactcatcatatcattcccatttgaaattctcacaatgccgttaccaagggccttccttctcataaccaatagcgtatcattcatcatgttcttaaacttgatgcattttagccgatgaaggaacaggagcagagatgggtggagatctgaaaacatggatgcaatggagtgcatgccggtaccctccttgaattttgatctgaatggaagcacaatgcaagtattccagaaggaagaagagtccttgacatcttcaacagataacattctacttacagaatcagtattgtaaggtgcaactgcagttggcaatacaaaaccaatttggccttctgtaatatcaaatttcacgtggaaaccatttgaatggatctcgggagcatcaggggatctgaaaaagatataataatggaatgaaaatggaaccattcctacataactcaaaggtcctacaaggtgtaaaagtataaacaatgaagcaattaactgttacgataagatcatgtaactacatataagaaggcatgcaaccacagaatttacacagcactaaggtaaatatagttagaacatgattttaccctacccgaaatactgatttgaatccaatgcccttatttccaatataaccctggttggatcctttctttgttgagctaccaatatcacaaagtgctcgaatattttcagcggagaagccactctcgttgttgagaacaacaataccattgtcttgaagaataaatgctaatgtgggttcaacatcctcaacataagtattatcatcagcattctgtacctgattagagtacattaatgtcagcaaaaaagaaatccagatgttcatgctatcgcctccagagcaagcgaagaaaacaaggcagtaaaaacatgcagggagaagtttaccagctcaagaagtaggtgagaatcctgggagtatagttcttgtgagagacaatgaagtgctctgccaagtcgagcatgctgctttttcaacaaactattttcagtgcaacttaaggactgatccaaaccaaattcttcacggcgtatggtctcaataactagagttgcttcctcaggattcacttctcccaaggtgggagatttgttagtaatgaattctgcagtatcaagctttgctgtgacgatatttaatacattttggtttttacttacagcaacaatttgattatccttgccaggcaatgacttgctcctcttcattatatcaacatcagtagcattaagcaagttagagttttcgcatatagcaactccagatgcagttgatggatgcctagaagaagcatgcatttctatatttgcatgaatttcgtcagttaaacataatctgcgacaatcttcagcccattctgctactccaagtgataacccaatatcatgaagcatgcacagctgcccggtttcagtggcttcaagcaagatggctgaatagcaattcttcgtgatagttcgaagtcctgccaataaaacatctgctgcaagactccggaattcggaaggtagatgaccaagacagtcaagtacaaatttggcaaccagatgaactatgtcgtcaatgtcttttgacatatcagaccaaatgttccttgcactaaaggatttgccttcagatttagtgttcagcaaatcattaccgttgtccattatgatgcctattgctcgttgtgcataacacttcaacaaggaaattggagtgttggtagaaccattataaacatgtagcaaggaaagcagcttcactgccacttggaatggtgaacattgaataatgccttctaaaaattggtcaacagtagcagatggatcaactctaataaacctaccatctgtggtcacgatgcaagctagatcttgaactgggcctgtattcagcaaccagtgcatgaaggaacccagagagggagcaaacaacaaatcccaatgcgaccaagtaagtagatctgacagcattggagccttaagcaaacatttaattgcttcttgtgaggagactgttacagaacaagattgttgaatatcattcattagcccatcaacggtatcatggttacctggaacaataccagaccaccgtttctccaacaaagacatagaaaacatgatattatttatttctatgtttttcctttgtctctcaatagaatcaagaagtccttctccagatttatcttgcacaatatcaaagctaatagttggaaattgccttttgagaagcttagagaaactatcctccgaaaactcaccatcttcaagccaattacccccagcttggcagagtaaaacctcaatctgttgctgcagtacagaaacttccactgaagaatgtgttaactttccgactttcaagaaactgctcaacttagggggtaaatgttgctcatgtttccccaagaactcgaggaaagtaccatggccaagagcgctaaattggttggctgaaaatttagcagttatgcatgtttcacaatcgagaagtgttctcaagaatgtagattttctcacttgcgaagcatcggttctggacactccacgattggactcaaaaaattcagtaattctcctgattacatcatcagctgtgacacctgcaggaatatatgataaacgtgaaaaaggtggtatttctttgacttaggtgttgcaagtttcgaaaagcaacataaagggaatttcaatttctttcagttccatggcatggcacagaattctgtgtgaagatcaaacaaaacaaatagtgttgtgtgtgtgtgccacagggggagagagagagagagagagagtactgcatccaggatccttgctgccaacattggtatcattgtctcctttcgcgacacattttgattttcttttacttggtggtggctccacttccataagctcagtggtggtaccaggaatatttgatgatgatttattctcattaaagacattgatcgcatcataaagactatccagcagaccacatcccatcgctctaacctgcatatccatgttgcagtacataaaacaaacaccccaaaatggtaccaaactattatagcaaatggagaaagggaagaaatgctcttaggcaagtaaagtcggtttgtcctgttcaatgtgtcccaaccatagtttatggctgggccagattttgctggttggacactgttagtcctttaaaaaaaagtctatttacttaaataatgcaagctgttaaaacacaattcaatcctttattggctctccatagaaataatacctccaccaagaaaggtaaagcaaatatctccagggagaaaacatgtgtaactgcatgcaaaatctggctagtcatggatgcttcaggacaatatatattggaatttatttatttagtgcactaccatatgaatactagacagataactacaagaaaataaaaaaaatcaacacctcatttgttatggacatcgttggtagaggtccacgaactgatgaagtgatgctcttgtgtgctgtggtaaactatctctaaggcctatgctaaaaaaagggacatagtcaccaggtaccttgtttctaccacaacctattttcagccactttattgtatttttttaacagtcacttgattgtaaaatgaaaattcaattcacataacaaccacctgtcaattgaaccatacctcgcccatccctatgcttaaacaatccccaaatgacccctacgaaagctgaaatcaacagcttgagtcttcagaaactgagtgactagcgtatttccgtatccctgcaagtataattcctttaacatttaccatggatgcgagcgggactattacttactatttcatctaagctgtttcatctaagtggaagaatcctggatttatttttactaggaattctgctttagtttggtttttctccctcgagaaaaagaatggaagaattcttcttattccattattcagaagtggcaaagaagagatcttatcaattccattctggaatctggaactggctggaatgtgcagtaccaccacccaaaccagcagaggaggctgtgtactagcagctactatgctggttattccatcctgttccgggcagaatcagcctttccactcattcaaataccagccaaaatctgaataatgttttctccattccaagcccaaatgaaataatcaagctaaaatgacaagaattaaacacataactatcataagtattgcctccgtcccatattacttgtcgctttgacttttttcttgaaacgtttgaccattcgttttatttaaaaattagtgcaaatataaaaaataataagtcaagcttaaagtacttttgataataaaacaagtcacaaacaaaataaataataattccaaaattttttgaataagacgaatgatcaaacattacaaacagaaacttaaagcgacaagtaatatgagacggaggtagtatcatatatactcctaaattttatttattactccgttttcaaataactgataatgggaactaatcttttttaacctttgaccactagtccttttttgcaaaatatctaaaaacattaaaaaggttgccatgttattaaagtgtattatgtcctcaatacaagcatgaaactttttctgcactttagcccaatcatttaagagtaattagtggtcaaagttcaaatcaagagtctaggttattagttatttgaaaacggagttacaaccccaaacgctaaattgaaatgggcaggtactggaatactgcattccaaaagccgaatttgaattttctccaggatgaaatggacaaatatgggaggacaggagataaaatagtacagatgagcacacacataggattgatcaaagacaaacaaatctgcttgtcaaacacaaataatgacagtctcgaacacacgcagacatagaatggcccactcaacagaggatataacttgcaagtcgcatctataaatcctatgagttcattaacccgctgtcttaaaatgaattaggtagcaactaaaaggttaaagccattttgtgcaacatatttggatagtatggatagtagataatagatacaagtaaaacgaataagggggatgagtaaaggagaagaaatcaactcacggcaacatttaggaagccaatgccagggtactcggagaaaaactttattattttcttcttctcctttggtgtttccgcatagtaatttgctagcaactctaaaaccttcatggtgaaatgcaagacaatttagtttagaaattggaaatgtctagactaaacacacttacctctttctaaacaatcaatgatgtgttttcaaataagtaatgaaatgaagtacattgtacgaccaaaccatcaaacaagtatgacaaatatcacaaataaatcgaaagaaacttgtatatcagtacatagagctacataattatggtgcctgtttgtttcaaacaaatattggcatcattcaggttaacaattacagaaagaaaacaaatatgatcatgaattagcatacctgttgaactggatgttcacggcatgcttccttccaggtcgttatgaatttctccaacttacctatactcaagaaacaattaggtgataactcatgcttttgcatttgaaccttttgcttcttcttgggccgtttgcatgaagaggtggggctcccattctcttcagatttccttttttctctcgtataaccctttttactactctcttttaccttgctactatccaaaggtggttttttactcgtttcagactttaagccaagacgctccatttcttctgtttttgaaggatatggacagctactaacacgcttatcaacatccttgttatcaatagcagcagaaccagttttactctcactgttatcaactgcatcaccctcagaactagaatcaccatcagtttcatcatcggttgaatcaaaatggatgtgcttattgatacctggtaatttctttatacgactagttatagcactgaacctctcatccaatgcctgtttgctcaaatgaaattttctatttttcaccaaatccttctcacaactaccatcacctgagccactggtgttgccttgaactttaacagcagacacttcagttctcctggcctgccggagaaaggaaatatgcaacctacaaaatctcccaaattagaaaaagaagaaaattctgaagaaagaccaaaggaaactagttatttctatttcaaccttgaagtatgcaccactaaaaatgttggacgcatgggggaagtcaataaataagtacgtgctcaattctaacattcatacctcaagctttgtattcgtacaccaaggttttcctttccagagactgacttttgctccgcaagataatccaagaagttttccactgtaattttctttttagagttgtccataaacttctgaagccaatttataatctcgtcactactaagcttaggtaccaaggacaaatcggcaggtactgaaaaataatgtgcaacaagtggatgctgaagaaaaggccccaaccccaactcttcaaactgtccaatgctctcatttttgcatatctcagactctaaatcataaactgaaacaattttccttgctgcaacatagcaatggatgaatgtattcacctgacaaaaaaaaggccatgcccatgtgaaataaataagcagcatcacgaagtaaaattgaaccaaatactgatgatttgatattaacaacaaaagttcagcagctttatgctcactcaaaagtgcaaaggaaaagcaaataaattcgatacatattgtaaataagcgacatcaaactaattcaatatcacagtttcacaataatgatgtttgcatggaaaggttcttaatattcagcttgttttatatcagaagtagtttgctacttttagaattatgttatctcccatatcatacatcattccacctttttgggtcctttgcatcaaatacctatcacggcgtcacctaatcgcagtactatatataagtaactgattatctatcttctgccaaggcatgctatgcaacattgactttggtaatttatttaactgcttaattctttcaccaagagctgaaacaatttgtaatttcaggctaagaaagtttcaaccgtttgatatttgttttcctttcttctgtttcagaagaagaatagaacttgtaccacttgtagtctcgttccattccaacgtaaagggacaacattatagcaaaaacataaaagaaatggaaattcagcaagtgatacaattatataacaaaagaaacaatgtaaagaaataaacaaagatggcaagttaatactaaaggagaaacgtgaaatttgcatatgtcgacagcaacgcacccagcacagtgcagaatttcatacctatgctacaattttctcatgaaacttcagctttagaatttagcaattgcacgcaaattaagactgaacagaacatatacaaattttgcagggatacatagtagcaacaattaattgcaaactattgttgtccctgcagctaatcaagcaaaactgaccttgccctcgacgaggaagaggtcgcgcaggaggggtacttcatggagctggacaccaagagagccccaggaatccactttgagcgccaccagcaccgcctgcgctatcttccaccctgtaacgccctcaccagccttaatgatctcgtcccgcaccttcctcgccgccgcctgcgccctctcaagagcccccggctgctgctgcggctttggctgctgctgctgctgctgctgcggtgggggcaggggtggcgggggatgcgcctgcggagccggctccttctgtttcttcttcttcttcggctgaggctgccccggcgcggccgcggctgtcgcgggggcgacagggcggtgctggatgctaggggcggccgccggtgctgctggtgcagggacggcagcgcggtgctggagattatgggtagggttttggtggtacgcagatgaatggaggagttgctggtggtggtggtactgttgctgctgctggtgatggtaggcggcgagggcggcggggttgtggagcacatgattgaggacgagattgagagggttgggggcgtactgggggttggggacgtagatgtaggggtttacccccgcggccgccgccgcggcggcggcggaggtcgaggcgtcgccctgccacgcggcggcggggtcccgggggtcgtagcctcggtgcggcggcggccattggtggttgtcgcggccgctcatcggggcggcggggtcggggaggaggggtagcgtgcggcggaagaaggagccagcaactcgcttggggcggcggcggcggcgggggagggggaggggtaggcacgcggcacgccgacgggaggcggcgggtttcgcggacacgcgtggcggtgacaccgggggcgccttgcggtcgcgggttttattgggatactagtacctctttgcgttgcgtaggggaattccttgcgtagtacaggtgccaaagtcggatgctgtttgggctcttcatattgggccgagaagtactacaattgggccggatagtgtttgggttcttgatcttgggctgagctagtagttaagtggaataagttcacttcatgaccctcaaatgtgatcgaaatctaaaccataaccctaaactacaaaaccagatatctcgacccccaaactcctaaaaccggtacaatttaactccctgagcggttttgggaggcaattttgctgacgtggtgccacatggcacctacgtggcaatattgacgagtcctttcttacacgtggcaccaacgtagcgatagaaataaaaaatatgcgtgggacccattagtcataaatatgggcccactgacatgtggggcccacatgtcagaccttttttctcttccctctctcccttctctctctttctctccacttcttcccctaagggcggaagcgtgcggggacagcgagagcgagcggcatcgccatcccgcggcggcggcgatgcggaagagaaggtggacaaggaggcagtaggtgcggagggagtggggggtcgacaacgacggcgacgaggaggcggcccagtagaggaactcgcggggggaaggctcaccggctcgctggccgtccgcccgcgggggaggggctcgccggccgtcagcgcgtgggggagaggttcactgaccgtccgctcgcgggggaggggctcgccatccgtctgcacgcgggggaggggctggagctcgtcggtggtagggagcgccgccggtgccggtgggaccgtcgccgaaggggaagaaggtaagagaaagagagataagggagtgagggaggaggaagaaggactgacatatgggccccacatgtcagtgggcccacatttctttttgtgtgaatgcctaatgggtcccatgcatatttttttatttctaccgccacgttggtgccacgtcaatgccacgtgtaacaaagactcggtcaatattgccacgtagaagccacgtcagcaaaaccacctcccaaaaccgctcagggagtcaaattgcaccggtttttgaagtttggaggtcgagatatctggttttgtagtttagggtcatggtttagatttcgatcaaatttgagggtcatggagtgaacttattcctagttaagttgggccttctttgtacaggttcaggtgtctttctgactcgatcctaccctctccctcccataaaaccaaccaagctcccataaaaccaaccaagtatcgaatgtgagttttagtaccctcttcctcccataaaaccaaccaagtatcgaatgtgagtttttaatagtacgaatctgattagtactagtatgtactagcttcgtaatttataggacagatagaatagtttggtctgttttcctagagcttttttactttccatcaactcaaaccaaattaaaattcagtcagttaattcggtaacaaacaattaccttcaactgaaagattcgatcatcttcagttaaaatataaaacaatatggattaatttaaatttgaaactgaaatggttgtattaattattgaatctgttgttacaactttacacaacaccaatactctatactaatctagcaactggagtatatttatccacaacattcaaggaaacatgatacttgtatgcgtatataggggtggcgcacatgtatttatactgtatttctcgacaaaaatattatatgtacgtacatttcaaattaatacgtatgaacactcgagctgcagcgatacaacctgaatctaaaaacaagaaggaaaagaaaaatctgatactccatgaactcatgcaagatgtttgcagccagaactaaatacatgtcataacttatgaccatgtcaaatcaaaaattctgcgacaaattgagtaaaacgccaagatgttctacgtacctgatgggttgttcatgactttcaaccacaatcaggcatatcaagagtagcaacaatttcaactaagctttctacccttcacatgtacagatgaagtccttgagcagttctattagtgcccactgaacttcgtattcattccctgagttggtttctagctgaaagtttcgacggtcatctctacatgaaaagcaagaaactatggccatttgttagtcatctgaggacttaatttatcatcgcaaaacagtccttcgatcttgggctcaggatcatcatgtagcaaagaagaatgaccactaacacaatcgaaggggatcgatgctgccagtttcattgtcgctatctcatattgcaacattgtgctttcccagactgcagcttatcccacaaacatagcatttgcctcggtgactggtaatgtgcagtgtagtaatcatctatgcatccaaattggcagaacttgatactgtgaacatattgaacatgtctggtgttattgaaccgctcaacccacatgcccatgctcacatcttccatcttgaagagctgcaaaacaagcaaatgtgaattgagtgaattagacatctgccatcattacttcattagtatgtccaggttgttttcttctcaacctacgctcagattattccgaaacatgacatcaaaatccacagtagtttgcttatgtgttatgtacaaggaattcaatagaatattatatgatgaatatcccattgttgaatccaagttacccctatgtgtcgcttttagcaccacaaaaaacaaccagaagcaaatcttctgagcttacccttaatttatgagctgtaaattctgacacaatggaagcagcaatatcagaagatataacgtagccaggaccatttgcatatgttgggtaatcctcttctggccactcctgtaaattaaaaagataagtgcaatgaattcatggcagactttaggcacccaaacctatgttggtataggtgaagcagcaaaagagaaaacgaaattggatagagtacaaaaggacacagaatttgtaggacgtcaattatttccattctcacaatttgtaggacgtcaattatttccattctcctatgtaggttcatacataactgtgtaagcccaaggatgcaaggaatgtagattaccacctagaaatacattgtacatgtacaaagttggtacagaactttcctaggctttgaattttaaacaaattcagatgattttaaactaaaaaggctatatgacaaaggctactattcataagtggtccttggcactagaaaagaacagtgagattaagtgtacatttttttccgtagattgacactatagagaaacaaagttaactggcccagaacaataccaaccataaccaaagactgcaccactaatatgttgaatgcccagttacaaaaaatatcatgttagatccaacttccaaatatatttttcaaagatggaacacatgcacctagttaacaagatctagttaaaatggcggaaaatttagtcaacatgtagaaaatatttcttaattttaactacaacaatgtattgaaacagcttcacaaattgtaggccctgataattgattcatcaaaaaggattcaaagttataatcattattataccaaaaatactaagcatctacataaacagttagacaaaacgacagaaaaatttgaaaatagcagcataaagaatgaacggttgacagcattgctgttttctcagagaaggatcaataagcttgtgcatatggctacaagttaatgcaactacagtcagcaatgggtatcagcaacataagttctataccattgttatgctaagtttcgctgtatggtttacagtaagtgattatttgttagatgcctcaaaagggtgaaagattgagtaaagtacattagcatgccatattgccatgaatactatattcttctgttaagatttcaatgaatcagcaaaaaccgcgtcaggcaggccaaataacttttattgaaatgttctctacagcacttcaatcaatgataagacatataaggtcattgtaaaataaaaacatgcttacctcataagtgacagcccacttcccagtgcgcaatggcttgtggtgataattcatgtttcccacatagagacttttacctcttggtattttcttaagttcatccttcactgattcaagtctaacaaaattatcgtcatcacacttcattatatatcgagcggaaacaacacgcacctgacaaacagttcattagatgttaatagagcagcttgaaagtagcaagttcgaaaatatgtaccaatcttagacat

SEQ ID NO: 8156 - DNA, 3878 bp, Oryza sativa
cggtggtggagctgacaccgaggaggacgcggctcccgcgggcgtgcaacagccggcccaaggtgcctccccctcccccgcccccgccgcggcaggagcgggcgaggccgccggcgggggcggcggcgggggaggaggaggagacgacgccgaaatgccgcgtggtgacgccgctggtggcggagcccgaggcgcccgcggagctgccgcggtggaggctgcgcggcatgtgggagctcgcctccgtcatcaacttcctccacgtgagcgccctcttgctccccctccccccactggctaggattcatggggtttaagggtgtttcgcttggggtgttcggtatttgggcttgacatggctgctctttctccggtgccgcaggtgttccggccattgctgaacattacggtggagttcacggcggaggagctggaggaggcgatcctatcgcccaacaatacattggatgacgttcatatgcctctgctgaaggtgatcgtgtagtttctgagttcgtttgattaggccgctgcgtcttagcctcttatggaatggggtttctgagaacagagtgttttttgcctgttataaatgcaaaaaagatgtgcttttgttgttcacatgagtattgaaactcacaaccaaggaattttggctatttgaatccaaaggtgcatgtagtacaatgctactatgatagtcaaacgtattgttatgatacatactgcacatttactacaacatactactaacatcatgttactctggcaatttgctaaggatatctttgtaagaaagtgtccttgatagctagagacggatataagaacatcactttgtagaataatgcacaacataatgccgcaaaatctgtttgagtcgcccatcatgtatctagtatgagtatctactaactacacattctataaacagttttggagttatcttatttttttcatacttaattgcatcttgcagtcgattcctccagtaactcgaatggctatgggacgtggaacatggataacagtgttatgcaggaaattgaagtactggtggaattgggtatatgattttgtcctttctaagaacattttgtgtggaacagtactgcattcagttgtttagctaataaagctagtactgcaggttgcagaaggtgatcttccaattgttgcctcacacgggtgagttccatacccaagcgattcttgattgaatcgatgtttagtgttgtatcttgaatgacttaaaccgattttccttgctcagtgcggaaattgaaatgtacaaggcacttgagccagcaacacgattagtgatccttaaagcaatatgtgatatacgtgttgaggtatgtgccctatgattccagctatctttttgaaatggtagaattgaatctcatagctaatgtcctatatcaatgtgtagtaactatcgagacctactatcttgccctagctgcttgtcttgtattacgtgttacatataattccctcacacccagcttcttagtggattctgctaggtattccattctacaaaggattagtacataagctatgctgtatttccagacacaagctctttttgtaaagtattttggtcttgatctttacactcaaatatattatgtttactgatgatgctttgttatatgaaagttgaaaacagtctcggtgctaaaaagaaaaggtgaagcctaatcgatattccaaaaatggctggccgtgttagcaattataaaattttataatttatagtggatccttgtgtaaaaggaatattaattgagcatggggcaggggcaaactcaacacttattccttaagattggattgagcacaaacatagctgcaagtcttattgttatgttttcaaggcacatggtttatttatgtattcttgcaagtttggtgacaaaatgtctgatctgtaagcatctaattttgcagcaagaggatattcggaacttcatagatagttctttaaagcgtggttatgagcttcctgtgttccgtaaagaacgtattggaggagattcatatggaatctcatactggtgtgcaacagccaacttttgatataattatgcaattaaatttaagaacatttttttgtggccaggagcatctctaatcaattgatgtgctacaggtatgacgaggatcccgtccttggacatcggttatatcgtgagattaggcaagtggagtatgagaaggacccaaccaaaaaagctaaagggaagggaatctcaaatgccccagttgtatcctatcaatgggagactgttgcatgcaactttattgaatttgaattagcagcagtaagttttgagtgaaccattaccatatgtatttctttattatgcaatctatgattgaagttcttgaatagttatagttcttctgttctccattgactcacacattataaggcacagtgttgattaggtcatacaaatgagaatttctttggatatccttagttaccgttggtacatggtattaccatgccatctctgtaaaatatatccagcagactgtaaaatatatccaacctccatacctctgtaccataactaaacagtactccctcggtttcatattattagtcgtttgacttttttcttagtcaaagttctttagatttgaccaagtttatagaaaaaaaatagcaacatttacgacacaattaatttctattaaatttaacattgaatatattttaatacaatgtttgttttgtattgaaaatgttactttattttgctataaacttggtcaaacttaactaagaaaaaagtcaaacgacttataatatgaaacggagggagtacttagtattgttgattccaacttgggtatatgtataacatgtgtttcatgcttatgtagcaattgtgcttacaataaaattgaattcgtgggtagtagcaggttgtttagtatagcaaatggccttgttagaatagaacttagattgcactaacatttagtattaacaatttattggtgcatgttctgcaagttagcagagggaaaactgtcatgtatttatcaccacaaatggcatatatgctcctaccaacctaccaaacttaaacaggcaactgcacgtgcatgggtcctttttagaaccgattacctacaattcaccacaggatgctatgtcatctacagtgatctaacttgagatagagaatttaccaaggcgacaaattttactcccaattgatgttttagaacccatgaagtcaacttttttcgaaaacaactcgagatattttttacaacttttatgttgtatatacaacaacttaagtcctatatatatattgtaaaagtactgttgtatgcttatggttttgttattttgagggctgtggttgtttgaaattataaccttgaagatcttgaataatgagtgacaccaccctaaaagattggtggatcgtatatttgtccatgctttaacatcttgctgtggagattgatttggagaaaaaaagttcttctcacacatgtaaaaatggttccaagatttgctattccatagtgtggctggcggctgctgtatattgcattggacttttgttagaaaaaggcagagcctatacagatggtaacacaacattgtcattggatatagtttataagaacatttacaaaacaattgtgtatattgtaccctgacgatcgaatatatggaaatttagtgatagtagttcttttctgcctatcttatgtaggaaaaactcttttcaagtaggaacaggactgaggtctcgcttggcaagaagttgaagaacaattatcttccagagatggaaaagattcacaaggtatctaaccgtaggtctcagagagtt

SEQ ID NO: 8157 - DNA, 15247 bp, Oryza sativa
taaaaggatgcttcacataacaatgattatacaatagtacataatacataaaagacaaaactgcgacaatggtgctcaactggaaagagatagtgcgtgaaatccaactgtaacgtacaacttgaatcttacttcatacatggtagctggcattgttgcatagaatagcatatcactcaacagatcaagaaagagaaaggggttttctagaaagagtcacacaatgctgatattcccaaaaagtttttttaaaaaaaacattagagataacatacatggtgttgattgatatcttcctgctcatcttccaatgaaaaataaatatcatctgcatggagctgaagatctgagataaacagataagaataacactatgaataggcaaataaaaaaatgaattcttataccaagtaattacattgaagaaataactagttgaacttgaatattaaaaggcttcttggttgacaaccgcaatacattgtcgcatttgcatgtggttaatttctttgatatggctttcacaaaggtgcaaaaggatatgtaataaaccaaaatatcatcttattttaatcaaaaccccaaaataaagttagaaatattgaagaagaaaaatacttcaatcaaattttatttgaatgagatccataatactagacaaaccattccttgatcttatagctcaaatttaaccaagtaaaacatcaagcaaagctcctcctttgcgatgtcagcttactagtatactagcatataaaggttgatatttttatcaagtttgacctgatagccaacatttttatggcggcattaaattagttcaacatattagctgattttacagtaatgtaggatttaggtggcatcatttagcctccatgaagtgaaacacaaaccagcggaactaaaattctggtcagttgcttcaacaactatataactttacatccacctaaaaagaatcaaaagtcccaataaattaaagatataacccctacaaaaaaacgagccatttttctctcacatataactctatattagattgcaacaacaggcagatgtgaataaaaaaaatcccattccatcattaccaactttaatggttccatttcctattagctcccatcttaataacccaacttagtttagcaggattattgactttcctttgcatatggggcagaaatctcagttgtcctcacatataaaccttgatcgcacttactggtgaaattcgcaagtaataaatgaaggcatgatagacctcacgcgataatcttcattgaggcaaatgcccccaacatatataggccattggctgtgtacaacaagatatgatctatattagttaagagctaactaacactaactactaattgttagactaaatatcccgtccagctagaacattagaaaactacttaaggtccagcgcaatcattacttaccagttaacaataaaacgttccaaattaacatttttcacctgccatgacaacggggaagtggcgctgcgcaattataacgttttcgcgctaaatcacagatcagttaaaagtaggcagcaccagttatgcagtaatgctattttctgaacacgctcaatgctgttttctgaacaatatctcactcccggagtcactaaacataaacctcatccgccccaagatgccacgaaacctagaacaccatgaagctactttctcccgacttgtagctacagtaaaaacccaaacccaagcgattccagcatcagatccctagagtcaatcaaccgatcagcgaagtcgaaggggctcacagttggcgttgacagagttgaggcccgccggggggggggcacgggggaggagcgcggcggaggccttgtcgaagaggagcgcgcggacgcggagctggaggagcaggagcgggcgagggggtggggccgcggagccgccgccggaggaggggaagaggaaggcgtcccaggtggagggggtctggaggtgctgcgcgagcgcggcatgggcggcgtccccgagccacgcccgccacgcgccgcacgcctccagccgccgcgcgaggtcgtaccccctcccgtcctcgcccagcagcagctgcgccgccgccatccgcgcgagggggcgggggcgcacaccggaggccccgcgtgtggtgcggcgtggagcgagcgccgccgccgccgccgccggcgggatctcgtcggtctcgccgccggagtttctgacaccgcctagtcggaacagggcgaagcggaagcgagagtacgagacagacaggttggtggtcatagcacacaggtgagacagacgacgcggaggaggaggagctcgagcctggcccaacatcacaaatgtctcggcccaaggcccactcatgagtcctgacgtggattttcttcgatgcaagaattttgtgctagcatgaaaattctgcagagcagcaaataaaatttgtgagctacagtagtattagtattgatctagtgcaattaaaagagaaaataatagaccagttatacgttggttctatgaacctacatgcgcacttagccaaaataaatgaataaataaataagataatgccaagtccaactttgtgatggatggagaagttagttttagtattcacaaatcacaacaccatagaacaggggagtatgagtagcactatcagtctatcacattagaaaagtaattttgactatatgattgttttagattatgatttgttatgatatggacctactacctagtataagttttttcccttttaccccattataaatatttaacatatagaataagattcgaccaaactttaaataaaaatttcaaagatcaataacttctcaaatgcttggttttagaaaaagaaatagtatgcatagatttgtcttaaaatgtatcaccataatattataatattgttaaactttattaagttaccctaatataaaattattgaacaaagtttaaaaagtttaacttaaagcttgctcctaaggtcaaatatttaagaaaaaaaggtactagtatattgtaccacttgcaatttggtagccgtaccagtacatatcgacttcgtttacctgcattctatatctcttcgcattcgctctttctttttgcatctctatcgtgaaatgatgtcatctgttgccaacgttgcaaatattacgtggatccatccgtcagcgtgcgcgatctctatctgaaatcggtttgacctactgttgtagattttagtgggaaatagctggtttggtaggtagtgggctcctaattaacaaactaattcccaagcttaaaacagaggattacgcccctaatggcctaatcaacgacgcacgacgtctcctgttacacacacatatattgtcaccacactaccacatatatccatccaagacatatatagataagcacaaactttcaatggcaaagtttcagtaatcaacttaattcaataatagtagttttgagaaaaaaaaaacgtgagcaaagggctaattacccctacaattaatcaaatgctgcctccatataacaaaatcctatatatctatataggtaaactttctcacctttcaaatggtgtgtctgcgcgttcggaacctatttctctctttttctgcgctcatgtttttcaaaccattaaatagtatattttttgaaaaaaaattatacagaagttactaaaataatcatattgatctttttttaaaaaaaattagctaatacttaattaatcacatactaatggaccactcgatttaccgatttaccgtgcggaagggattactgcccatcccttgctgcttttaaagtagtagtagtaagagctactaccaaaagtccaaaacacgtctcgttgaacgccaccgcccaccgcgccatattccaggtagaaacgcccaaaaacgtcgtcgtcgtgcagcctgctcgtcagtctacccttcgcggccaagaaagaaaaaccgtatgcatttcaaaagctggaaaaaaaacagaaaaagaaaacccgccccatacctcgtcgtcgtcggcattacgacacaccccacaacgtcaccaattcaagcagagcgcgagattaagaaacgcctagcatttgatccttcgcccaaaagtaaacaacagtggagtactagtctatccagtccactaccaccacatcacaagagaacaaaaacgttcatgtcggcttgagcagcagctgcacatgcgagagatgcgacgacaacgacgactcgaccaccacaccaccaccattccttaccccctttccaagcacattccgcccgccgccgcgcccctataaatccacggcgcgccaagtgccaaagcctccacatctttccatatccatatccacccatatcacatctctgatcaatccttctgcgtgttcgtgaattgggaaattaatttggttttgagacaaatggaggcgacgtcgtcgtcgtcgtcgttgttgaacgggctgaactccggcgtggtgctgagcctgatcgcggtgctgtggacggtggtgtggcagaatctgcagcggctgcagctgcagacgctggtggggcggcacatgaaccggcacgcgcggcggctggcggcgctcgtcgacccgtacctgtcggtcaccatccacgagtacgagggcggcaggatgaagcggagcgcggcgtacgaggaggtcaaggcctacctcagcgcgtcgtcggcgcgcgacgtgcgccacctccgcgccgagggcgccaaggacgccgacaagctcgtcctcagcatggtcgacggcgaggaggtctccgacgtcgtcgccgccgacgacagcaccgacgtcaccgtctggtggtgcgcgtactccacgccgccgccgcgcaccgatggaggcgggtactacggctggggcggcggcggccgcgcgcaggagaatcgccggtactaccgcctcttcttcctcgaccgccaccgcgagctcgtcatcaacacctacctcccgagcatccgccgccagggccgcgccgtcatggtgcagaaccggcagcggaagctcttcaccaacatctccacgcacaactggagcgacgtcgacggcctcgtccggtcggcgtggagccacgtcgtgttcgagcaccccaagacgttcgacacgctcgccatggacccggccaagaagaaggagatcatggacgacctcgacatgttcaagaacggcaaggactactacgcccgcgtcgggaaggcgtggaagcgcggctacctcctgcacggcccgccgggcaccggcaaatccgccatgatcgccgccatggccaactacctcgactacgacatctacgacatcgagctcacctccgtccactccaacaccgacctccgcaagctcttcatcgagacgacgagcaagtccatcatcgtcatcgaggacatcgactgctcgctcgacctcaccggcgcgcgcaagaagaagaaggaggcggccgacgacgacgacggcggcagcaaggacggcggcgcgccgcccaagccggacatgaagaaggacgcaagcagcaaggtcaccctctccggcctcctcaacttcatcgacggcctctggtcggcgtgcggcggcgagcggctcatcgtgttcaccaccaaccacgtcaagaagctggacccggcgctgatccggcgaggccggatggacaagcacatcgagatgtcctactgctgcttcgaggccttcaagttcttggccaagacatacctcgacgtcgactcccaccgcctgttcgccgccgtcgacgagctcctgtcggaggtggacatgacgccggcggacgtcgccgagaacctgacgcccaagagcttggacgacaatgccgacacgtgcctcgcagcattagtgaaggagctcgagaaggccaaggagaataaatcaaaaggaaaaaatgctcatggcgaagacaaagacgaagacgaagacgaagaagatgacgatgtagaagtggtcgggaaggataagtagctagccgccattggcgccttgctggagtggttgctagcttctcgttttttctagtccacgtagcttatgatcacagtaatagactaagtttttttaagaaaattattttcattgtggaataatttgaccacatgttgtgctaaataatttgactcgattttcttagtgaactgacaatctgcttaatttgaatgttaaattctctcaagtgaagaacgccgacaacaatttagagcgtgtacatctctgttgcagacgccctcgctgctcctgatttgctcctccacctccggcccaggctgtcggcggcggccacgctcgagctagccaccgtccaaccggtggtttgccaccatgtgctagactctgcgacgaacgaccggcgcatctcgtcctcggaccaccccctcacaacaagaacaacttacgacttaagctactcggagctcacaaatgatcattttgccgggccaatctgggacaaccacgcttaagtcaaatgcaaaatttcctttgaactgcacataaggggcgcatcttcaccaatgaaaggcgagctcgacgcggattagcaacatccgcatgctgccctttctgccccctcgatgaagatgtggagcacctcttcctacgttgctccggtgtagcagctgtctggcacgcctttggccttgacggacaacagatcgcctccctaccacgtctggaagatgtctgggacatccccccacccaagcacgccgtccctccacgaatctggcgcatgtaccatcctactagctgcaatatggaatatttgaaaacggcgcaacaataaggtcttcaattccttagacgactccactccgtcagttctccggcgctgtgctagcgacattgacttatgaagcagcttcgtaattgggtctcaaacctgtaattagttcttaatttagttctctcttatccctcattgtaactcttccccctatatgtttctttaattcaataaaagttcaggctggtgtcgacgagtcccgccttagtttccctcaaaaaaaaataatttagagcgatactgcgcgacatgattcgattaattagcttacattgtatttcggaatttggagaattcaggtcaacgtccaaaacatcacctgttcatgatctaccagtatgaagctctatattgaaaatggctataaattaatgcttcaatcagatcatatcatgtgcgtgtatattaagttattaaccaacacagtggtgacactaaaagggcgatgaaaaaacaaaaggaacattggtgcatgacacaaccacatggtataattaagctaatcaagttcgtaggtatgtctggtaagtgtcttgttaatgcgcatacctacgtagcatttccggtcaaagacttcgacgattgatcttagccagatgacgacgataggtggtgcctttgcacaccccaatgcccaaagacacctaaaaaactttcacaaatatctccagaagtatataaagtaggagtagtcggcaatagagagtaaaatacgccatcagtccttaaaacttatcttgagattttacttaggtacacgaacttgtaaaacgcacgtcgagatccctaaacttgtttattgtatcatcccggtccaaagtctcgtttgatcgtggtcttgtctacgtggcacgccacgtggacgatgacatagaattttttattttttttctcccttctccttttttttcctcccttcttcctttttttcctctctggcggccgctgcaccgcgagctccacagccacgccttcatctccttctccatcagcctccgctccacttgccgagccgtcgtgctggaggcgcgcacgcgacgggagggaggacagtggcgctgacgggagggagggggacagcagcgcatatatgtcctactcgatctcctccggggtgagctccaccaagaacggcgcgcgcttccggcgtcgggacaaggacggcatgggcaccgctgccacccatgacatggaggcggctgggcgccgtcgcgtccgctgtcgcaggttccacggcctcactgcaccgtccacttgcggctgtggtagggcgagatgtggaggcggaggcggcgtcttgagatcaggctcagagtccatctccacaggtaggctctcgggcttcgtcgtcgtcgttggcggtggcggcggtggaggtggcgggggtgggggggctaggctggggcacgtggagacggtcgacgggtccaaaaaacaagggagaaaaaatttcatgtcatcgtccacgtggcgtgccacgtaggcaagaccacggtcaaacgcggttttggactgggatgatacaataaaccaagtttaggaacctcgaagtgtactttgcaagttcgtggacctaagtgaaacctcctgacaagtttaaggaccgatggtgcattttactttattaaaaaaatacaatctatgctacaaggaaagacaaaacaaagcaacaaagttttttttttcacaaacatgcaaagcatgtcgatatcaaatactcctctaagagtgatgtaccaattttggtctcgaggactgtaaaatttctcaatatttaaaggtacttatggtgtaacttttttgcaaatgtgcaaaagcttttaacgtcgatatcaaatatacaagtgtccttaggtgtgttctttagtactccctccgtactcgtaaataaagtcgtttaggacaatgtttaagttaaaccttgggaatataaatcatgaataactctcgagttgttgagtttaaaaatgtaaaaattatatgaatagatttgtcttgaaaaatactttcataaaaatatacatatatcacatttcaataaatatttttatagaaataagaagtcaaagttgtgttttggagaccgtgtcgctgtcttaaacgacttcctttacgagtacggagggagtactaaatatctaaggatacttttggtgtgtcaaaaaaaataaacaaaaagaaattaactagttatatcaattagtgcaatgctatatatctagctatggcccatggatgactggatctcccggccttttcttctttccaccatcaattggtcgctgtcagcaaagtgtccctttctccttcagaaagcgatccactcctcttcagttcaggagcttggccgccatggcgccaccactcgattaaatacactcgagccgtcgagaattgctttaagttttctacgaaagatgatggccttacagctcagatataaaaacgacaacggacagctaatcagatgatgtttcagtctccaatttcgtcagtgatgacaagaacgcttttgtgcgcacacatctttttcctacgaacacgacatgatccgatcgcatcagtgcgatcaacggttacgattttccctgtctcttacctctggaaaggtaagatcgatggtgcactgccaaaaagcttgacgaacataaatgcgaaagtttggcactaacaaaaacgatgcttttatgagtttttggtagagtttttgccctctgaaagtctgaaaatctgaaatgcacgtgaacccattatgcaccaaagtgctcacaatttggtctccaattcagcaactttacgcgtgtacctcactactttgtgagtgatcgatatcactgatatttttgcactctataaatattgctctgttgctacgatgctagcaatgcaagaacataaaattcggttcatcaaatcagaaggaatttgtttgttgaagctgtagaattgtagtgaagagatcgatagatcgatcggcgatggatttggcggcgtggtttgggccggtgaattcggggctggtgctgctgatactgacaatgctgctgcgaaacctgcagaatttccagctgatgcagacgttcgtggcgcggcagctgaaccggcgggcgcggcggctggcggcgctcatcgacccctacctgtcgatcaccatccacgagtacgacgccggccggatgacgcgcagcgacgtgttcgccgagaccaaggcgtacctcgacggcgccgtcggcacgcgcgacgacgtgcgccacctcaacgccgaggacgcgcgcggcggcggcggcggcggcggcgcaggcgaagggggtggtggtggcgctggcagcagtagcagcaaggggctggtgctcagcatggcggacggcgaggaggtggaggaccacttccgcggcgcgacgctgtggtggtcggcgcactgcgagcaggacgacgacaaggggcggcgcggcggcggcgggcgcgcgtcgcagcgccgctcctaccgcctcgtcttccacgagtgccaccgcgacctcgtccgctccgcctacctcccccatgtccgcgaccagggccgcgccttcatggccatgagccgccagcgcaagctctacaccaacatccccagctctcgttggggcgacgacgggtaaaccaattagcttaatcgctcacactaattaacacacgcaccaactaagatatttctaactctacaaatccataaaacgttgataacattcgactgaatcattatttatttattttggatgaaatataaaacttttgtaccatcataatttagcatacaaacttcaaattcagtgaatgaagacctaattcttgattaattaccgcacttagtcacgccaagacggaggtgacatgtgttcgttctcattttaggagttacatgtgttcgttgtggacggaggtggtgttcaagcaccccaagacgttcgagacgctggcgatggatccggagaagaagagggagataatcgacgacctcgacatgttcaagaacggcaaggagcagcaccggcgagtcgggaaggcgtggaagcggggttacctgctgcacgggccgccggggacggggaagtcgacgatggtggccgccatggccaactacctcggctacgacgtctacgacatggagctcacgtcggtgcacaccaacaccgacctccgcaagctgctcatccagaccaccagcaagtccatcatcgtcatcgaggacgtcgactgctccagcaacctcaccggccggcgcaaggccaccggcgacggggaagacgacgacgacgacgccaagacgaccaccaagaaagtgatcgatcgcggcggcggcggcggcggcgtcggcggcgacagcaaggtgacgctgtccgggctgctaaacttcatcgacgggctgtggtcggcgttcggggaggagcggctgatcgtgctgacgacgaaccacgtcgaggacctggacccggcgctgatcaggacggggaggatggacaagaagatcgagatgtcctactgcgacttcgagacgttcaagtccatggccaagatccacctcgacgtcgacgaccacgagatgttcgccgccgtcgagaggctgctgccggaggtggacctggtgccggccgacgtcggcgagcacctcacggccaagaacccccgggacgacgccggcgcctgcctcgcgaggctggtgaacgcgttgcaggaggccaaggccaagaaggatgcagctgaacgacaagatgaagacaatggagtggtagtctgacataaatagcccacccgtctttatacattttgtagaacgctgtcaattgcaaacatcaggattcaggataccagcaatgaatttggcacacgatttcattctcatttctcaacaatctcgagtgctagactaagtggatacattggacagaataattgtgttatagcatgatgcgataatataagttatctatcaaaatttcatagggccaagggtcttttgagactccatgtattgaacatctctagaatcttgcaaactgccttttgtcatcaccgccttttcttccgtagggatttgcagcgctgatgccatgcctccttccaccgtccactttcctcatcttcctccgatgtttggatgcagagctctccaaatcgatgtttacctttggtgggttcttaaaacagaaagacgctgccacatcctgccagatagaaaggatttagacccatctgtctgaatcaagatttattaatggtgggtttgtaaaacagaaagataaaaatacaacaaagattcactaccataagcacataaaacaaattatatactagaaaaataaactttaatctagctcagtaaaaaagtgcagaagaaattcagttagtttatataaaagttaaagatgataaattaccatcacttacctagcacatactttatataaaagttaaagatgataaattatcatcacttacctagcacataccattttctctcaagagagctaaatactactaaaattgaagaaaaaacaacagacactccacttgacacttaaaagatttggaacatgccaaaatgaagagcatttgttgtgaattgaatgtccaatacaacaaagcatataatgggtaacaattggtcatgcacaggggaaccaaaaatccttcagaaagaaattcaataagcagtgtaccttcagattgagattatgaacatcaaaaatgtctttcatggagtgtgagtcgtatgccaagatgtaggatctgtatgcctctttagctgactgattcaggaaataattctcgccaacgatattctcctgtccaacaacttgagttattactactagacacatttgacaaacagtgttaaaacaactcactaactgtgaaaaaacacttacaaggtgcgattgcaaatttggcactttgttttcattgaacactaattctgtcagcgaaatcttagcagcctgcaggcaccaatataatatgttataatttctcttaacttcagaaaatagaaaacatattactttgtaaagtactaccttcaggtagataagaaacttcagttcttgtggcagtaaaaacaacagtgcttctcctttgcctttttcaccacgtgcagtacgtccaactctgtgaatataatcctgaaagtaaacagattactcagtacattgaaatgagcaaataagtgaaaataacagaaaactaacttggcacattcagaataacccacctttggttcatctggaggatcatattgcacaatgaaatcctaaaacattgccaaacatccttatatcagaaaagggggactccatataagagatttttaaaaaatcaccattaaaaactcaccacatcaggaatatcaagtccacgtgctgccacattagtgcatagtaagatacccttttctgctttgcagaagttaaagaatgttgtggtacgcttctgctgcttttgttttccatggatatcagaacattctatctggagaaaattcagaagttctgcatggaacttgactgaattacatgatgagaagaacaccatgacctttttattctgtttcttttttaggaaagcataaagaaccaaaaaccttcttgcgctatcaatgacacaatatccctgctgtaagccctcaacagtagcctgtaggagcattatggttattatcctacaaacattatgaaaagagaaaaaacaacttggctgacaatttccttacattagtttcagcatcatcaacaccaacataaacaggttttgaggtactttcttcgtttttctcaaatgacaacttggcaaattctttaacctgtgtggaattcatcaatgaatcagtacatcacccagagaaaaaatgaatgaaaagtttcaacaaactgaataataaattcactaacctgctctgtctgtgtagcagaaaaaagaactgtctgtctattctgcatagcataagtagcgatttaccaaaaaaagaaatgagacattatgtaagcaaagagttacaagttatggtctgcatatgtaaaatgataaatgtcagacggccagatgaaatataccagaggaaggcgtttaaatatctgtttcatatcttcttcaaagttctgctccaatagacgatcagcttcatcgattataaggcactacaaaaaaaaagtgattcttttagtcctgaaagaaaaaggttgacccaaaagcacagaatgagcagtatagtgtagacatgagaacaaagactggttatgtgatcaggtttatagtgcagtagaactatgaattttgtgctttctcttcagttagttcatggatggtctaaatacctacactgtttccagagaaatcatatgcaccctttcaactgatagaattaaatatgggtttcttttacctttagccgtctatatatgaatcccttggtattctgcagatggtccaaaagcctgcctggtgtagcaactaataaattgactccctttgcaagctgatctgcttcacctctccggccattaccgccaataatatatccaagagtttgtgagtgatacttcatcaattccttggcaacattgtgtgtctgaaaaaaatatatcaatggcaatacatgaataagaacctcaaaaaaaaatccataaatgcaataagcaaggcatatattttgctcacaagcctagaacggactacagaaactatatttcccatgtttaacaaattcaagtacttagtattgcaaaaatcaacttccagcatgactgattacatagtttcctcaaacaggctgtagcatgattgattctattagttgtaccatgatttcgtttggtaaaccaaaaatgcaaaaccatacctggatggcaagctctcttgttgggcaaaccacaacaactccagtcccattcctcggcatgaaatgtgcgtggtggagcatctcgattgctggtatgaggaaggcaagagtcttccctgaaccagtcttggccgcgcccatcacatcctttccattcaacaggtgtggtatggacctagcttgaatctgcaagcacaagaaacaagaacaatttcatgtgagcatatctctaccaaacccaactcactataggcatccaattaagcacgcgcttcaaactacattatagatttccaattgagcaccgcatcaaactacattatatctatccaattgagaacactaggcatagtataaacagctatcaattttcaacgcaactaaggaatcgtgcagcgaatgaggtagttagcaatttataggttcaaacggaggcaaggcgaacctgggtgaggtaggtgtagttcatctccctgatggctctggcagtaggctcggagacgccgagctcggagaacagcatgttggtcagaatcgccgatcccccctca

SEQ ID NO: 8158 - DNA, 23733 bp, Oryza sativa
atctctcactgttgtttccgaagaactgaagcctttgtagttttcatcaaatccagcaaggcaagcagtgtattgtaattgtagatgtataagtggttactaactgaggtgataagatcgatgtggtaatttatcagaaacttgagattccttcatctgcctgtcctgctagttcgattatcttcaagaaaatctgagctccttgtttctgtgaaatcagctggttttgatttaccaatccattagcgaactaataccgtataagcaaagcttaagactcagactgaagggtattttggttagttaccccaccccactttaccatgcatgctttaatcatgccatggttttctaagagcaagtttaataatatagcttattactaaatccaaaatttaaatcatcatctataatcgatctaatagcttactcgtacaatagttagctatagaactacatcattaatgaataatccacccatctccctcacatagtttattggagctcgtgctatagctggctataaatttgtagcctgcatttgttctatcttctcttatctctcctccacacaaacacaaatctgatgtggcaacttatatagcccgtttatatcatcttattgtacttgctctaaaacacttgtttgctttgatgtcgtgattaacttataccatagagtctcatcgatcgatcatatttcctaataagttaaagtggcgaaataaaaattagcttattggtagaactttatatatttatatatttgttcgtagcgatttaaaagccagggctaaaaagaaattacgttgaaaatattttaaaatcaactttaaaatcaagtttgaaagtttaattttaacttttgctttgataatttttcaacttttgctttgacttattagaacaaccaatggctcgtacttttttagccttgaaaccccgacatcaaaatcttaaatctgaagccaactgtgtcacagttgtggctaattatttcttagggccgttcactttaatgctattttcaatcttaccaagttttagtaaagttgccaaaaaagtggctatatttaattcgttgccaaattttggtaactatataagaaattctgtcaaaattttggcaagttaccaaaattttagcaactataccaaaattttggtaaggttttttttggcatcaaagtgaacaggcccttagccacggttttggctagttatttctttgccacggttttagctttcaactcaattttttttgtttgaaggaagctttcaactcattcgctcatatcacaacttgcctaaggctctgtttttttcagtttgggattattataatccagattattgggagtaagctgaaagaaacagacaacttattaaagtagtttattataatctggagcccagcttattataatctaataagctcatttaggtaagctttttctagattattgggtgaaaaattacccaccatgccaccctactccctttttagacttgcaaacccaataatctagactctaataatctagaaaagaaacaactaatcgcttattctactacaaattataacaatctagtttataataatctaacacaataatctagattataacaatcttaagctgaaagaaaaacagagcctaagctagttgtgggaagcttaggcatcaacaaacagcccgtctctgcagcatttaaaggcaaggtacacaaccaggtctggtctggcgccgccaacgcgattcggctccctttttttctcttggaagttggaaatgagcaggacttcctccggttctagaccgtctccctctgtcgctagacaatgacgcaccgaaagaaggttaccgtggcttgtcgagtcgagccacccatttttctccagaatgcacgtgtcggtgtcgccctttctagaagaagagttttatgcagctcgtaggggctctcttttctttggcctctgattcgttgttaatttaatccgccgcaacgcaagcgtaagaaagcacaacgcatcagagacttcttgcccgaatcatatgcttttaaccacttgacctcagccgtagaaaaactagtccggatgcctagtgatttcttgttcttgtgcactcaattatatgattaattaatacagatgagaaacaaatgctttaatagttgctaatatttcaatcgatccaaatgaacatgatgctaaacacaagggcaaacaaacgcgaacaagctgcatacacaaaggataagtaattaaaggaggacacagtcgtttattaatcacactgataggacacagtacatatatatataggaagcagcagcagctgtaagcaataagctggcataaaacaattcgagaagcagattaatactgcatccttgatgaggacttgaggatcaagccgtgctgccgtgtctgtacaatagatgcgacctgaggccaagccaggtcgatcgatggatgcatccttagctgacgaatataatcgacgggtcgcagcagcactcgtcgatcaagcagcagcaacaaagcgcagccaaactgcagcaaaatcaaattaaccagacagttcgaaacgatggcacaagttgaggtgaatttgattggcatatagtagtaattcgaaaggaagaaggaacagtgaatgcttaccagccttcgaggaaactaggctgccgcctgggcggcggcgcggcgtactgcggcggcgccatcaccggaggcccctggtacgggccctggtagtagccctgcgccgggtaagggtacgcgtacttgggatcgctcatcttcagcttcctcctcttactacgaacaccaactcaaaagaaagcagatgcgagttgcgaactagaggaggtgacgcgatgaggaagaagaagagaaagaaagcagcgtgtggtaatggagcaggtggtattcggagagcgaaaagcttaacaagaagagaggcgtcacggcgcggctcgttattataggcgggatgtaggagagccgtgtcgcgcggcgatgggtgggcgagccgacgcggcgcggtgcggatggagggaggcatctggaaagcgcgcgagagagggagatgagatgggggtttgcttccgcgggaggcatcggatcgcaccggttttcctttccttgcggttggactggccacattcgtttcgtcgtcgcgttttctctgactttttttgggtcggtttccgtggcggctgcgatggcggcagtttggcctggagtacgtacgtgcgcgtagtgtgaggcgacattgaacgtgagcagccgccatcgtccgtcgtcgcacgtacggcggcgcgtcggcaacgaatgctttggaagaacagtgaacacgataggacgtcgaccctcctggaccttggtacacgaaattcaaagagagaaaagctgctggaccttttgcgttttttcccaagaaaatgttcgccaaaatcttgctgtattgccgtgttggcccgtgttcaactatttccagattcgaccaataaaccctatctgagttgtaatttttgcttgttccgactgcctcacaacataccctcaaagaaaatccacccaccggagtggcagttggtatttgaggtaccatacaggttgatgtatacttacaaactatcaatacgaaacacctccgctcaaaaaagaaaaacgaaacacctgaattttattgttggaagagcatatgtccgcagtaaaattccctcaagatttattactccctactagtccgtagtacaatccttttagcgtccatatgatctggcattctggctcgtggttctggctgccgccgacgtgatcccttcaccggttgtgacagtcaccgttagctcggaacttgggcgaattccgtaatcggattccagtttccattgactgctgaagagaagaatgaaaaaacctgtccaaggaagcaagcttcaagatcactttcaaaatgcaaattgaatagaagaagaaggaactgctcaagctgctgccgcggatgatgaatcttccaagctgtcatgagtgtcttctgaacaaggaggagcagttgattccttctcgcaagcttaggtttcaaaaaaagaatcacaagctagcaagcggtgacggcagccactgaaagtggccaatgcattttgaacacacagcgaatttgtttcatgccatcgcaattcgtaaatgtgttacaaggtaatcttatgggacataagtaaaagcttccgtcacccgacctttggacttcagttgatcactctcaacaaaatgtaaattttgtcatgcacgaattctcctctggaagggtctcttgctgaaattctgtcatgcacgaattctactagtactgtatacagtactactgtggagcaatgggcatgcgaactgaccactgaactgcttcccaattcagagtttcagacttggaatggcttcctggtgccgtcagtttgtttgtttggtccgattctttgtttagtcccatagtacttgcccttatatgataaaatatgattaatactctatgcgtgacttatctttttaatttttttcataattttgtcaaataagacgaacggtcaaacattggacacggaaaccagggtttgtctttttttgggacggagggagtatatgtcatcagtaagctcatctgaattcaaatacgaataaacacatggtacaaacaatatagaactggaaatcagtcagactaattgaactgcatttgcccccaacaccaaaacaacaagcttgcttagatcacctaagaaaggctaacaataagcttcagtatgaccagttcactacaatcggcataaaactctacaaaaatacatcggaaggccatgctccaacgtgtgccccatgacataaagcaaaacaggctgatattgagcaaatcttcactattgcacccatcgttttcagttgatagatcgatgtgggggtacctgaattctgttagctgttgcctgttcggttgccaatgagatgataaaaatccttttttagttctcaacctcatcacgtaaactcctagtcctacaaacataacgcacacgagctataaacgaaattaagggggtgtttgagaaacaccccctaagccttacatggattgcatgagcagagaagactcaagaatgagtacagccatattcatataaactagcatggtggctcgcgcagattgcgcggctagcatcattatattttctctcatataatagcatatatgttttctcattatattattcaaatatattaaaatgacaacataattttaaattttgcaataactttacaaaactactaatatgtaatattcatattgtattttatatatacgtgttagttattaattatttttaatatcaaattttagttatttgtaaattataatatttctatatggactctagaatcgtcttttaatatttctttttttaattccgaattttctgtaaattgtatttttatatagactctatgctcttcttccaatattatttatttttattctgaatttttattatttctaattgtatttctatgtggactctaaactcatctttcaatattctttaatttttaatttcgaatttcagttacttctaaattgtattcctatattgactttaaactcttcttcccatgtttttcttaattccgaattttatttatttgtgaattgtatttttatacagactctaaaaactctaattttaattttattatgtttattctaaattttagttagttttaaattcctatatggactctatactctacttctaatattccttattttttaattccgaatttctatttttgcttaattgtatttctatatagactctatactctacttctaatattccttatttttaattccaaatttctattatttcctaattgtatttctatatggagtctatactctacttctaatattccttattttttaattccgaatttcaactatttctaaattgtatttctatatggactctagtctcctcatctaatatttcttatttttaaatttcgaatttcagttatttctaaattgtatttctatatggactctgctttttctttttctctgattaatgtgagaatttctaggccatgagagcgaacgtggaggctcctttttctattcctttaataatataatagatactagcatttggtccattacatcagcggtgttactcaaacttatcaaaaacaagaaacgtttttatcactagaaatgcactcaataatacctaggaaatataccatttacattagttccaagaaaaagtatcttttgcatttgactttaaactcaactattggggagagacatcccacaaatctttgaacttagatcgagaaagacccaaacgctggctgccaaggacgcttttcgcatataactctgaaagcagttatctcatcaaggaccttttttttggtgagacccagagactgaaccctggtcagcaaccccacaactaggtgggttaccaccgtgctgccattcacgcgttctcaaattggcattagacttgcatataagatacacacaaaaaatggtaaaagcaggaatatctataacaatatttaaaaaaaaaacagctacatatccaatatcaaattcaattttgcaagactgggtgtaatccaaaccggactgggccagttggaccaaagctgaggagacccaagttcatccctgctgttatcttccaagttgaatactccaatatcacgtctattattcttgaattctgttatccaattctggctgtcatcggtgaagtaggcatgatttgccttgagagacggaaattcttcagcgcggaggcaaagtgtctggttatgcccaacaaacaggacatggtcttgcaagcgattgatcttcacaagcttttcttccaccaagtcagacttatatacttcgatacttgcagtattcttcaaaatggcatcataatcatcttctgacggatgaatgtagtcgtcctcttctgttttccagatttgcagcacatcaccccatggcgcgtgaagtatgtatgtatttctgtcaccatcccctatatccatgacctttcccataacaaccttcaccatggcaatagggccactgaggtcaattgcatgaatttctcccaacgtagtgactgcatatagcaggccatccttgtaggtgcagtcttcatatcggccgtactctggcaggtagtcccattcatcatcccctactcttgcaaatgagagctgaccgaatggattgcgtataagcaccacaaggagctttcctgtcgatgtttcagagaatacaaaagccctcccagtgaggaacaactgctgccatctaggagaaatgatggatcccattgaccttgaggaaaacatcactccgtcgtgccagaactggctccgattctcatacttgacaatagcgcccgactcgtcgtaggtgggattaacctgctccatggtgatcactggcgggagggccatctgctccctagtgactgggttgaggaggtgcatctcacacttatcatcaatggttaccagccaaccatctgatgacccaatcaggtatctatcacggatgggtggatccgggagagtaatcttgtaggttctctgctctgcaaggctgtagatacaccctacattcttaccggcagattcagaggtgtagaagaggcaaggtgtctggtgccgtttatattgtccaaggctgtgtagtgtggtgtatgcagagtgccaagaggagcagacggagctcgcacgcagcaagtcagggatctccaagcgggaaagtatttgtaccagcaaatcctccggcagatgcggcaattcagcctccaccatcgatggcagcacgccaacatgttcttcttcgatgtgaggaagagctgagagcttatgcaaagctcccaagattgcagagcacaaagccgtagctagcctgcctatgctcattatgctggctacgatgcaggtcgccatcagatcactgcttctacttgcaagatgaaaaaaaaaaagttgagttgggcttggccctggatagtgtatacacttataggcaacaaggcaaggacggcttcgaatccgaaattgaacgggaatctgaatccaagaaggaaactgctcctgtcatgcctgcctgcggaattctggtattagtgcacgggcgagctaaagcacttaaatagattcggaatcgggagtttgggaccaaacctgaaacctgttgccgcagagagtccgaatccgacgagtgttgagttcctctctccctgtgtcgtcggaagcaacagtagtagcaaaactgggccattccactcgccaggaggagccagccgacgagggcgcagcggcggcgcagttggttgggtcgtgcggctacttggcttggttgggttggccatggccgccaccccgcccgcatttcctctctctccgtcgccgctgcgccacccaccccgatcctccctccgccgccggccgccggcctcggcttatcgtcgtcgccgacacgagttgggctccgggcccaatacatacttgggcttaggccggcctgcgcgttggcctgcttgatgtgtcggcccaaaatggtggccggcgacgctgaacggggtggggtagtctgctatttaacctttctctcgccaacctgcccaccgcgctctcgctctgccaccgccattgcgccaccgctcgccggagaagccaccaccaattatcgctttcaaggataataaggtgcatcctgttcctcccttcttcagttcttccccatcccgttacagagtctttctttgcagacacgtacgccaagaagcgttcttggtttcttggccgcgcttgcgccaccgctcgccggagaagaagacaccaccgccatttctggtttcttggccgccctctgccaccactcgccggagaagaagccaacaccagtttcttggccgctctctgccactgcgcttgcgccaccgctcgcctgagaagaaaccttcaccatttttggtttcttggccgctctctgccactgcgtttgcgccaccaccaagcaccgcgccgcgtccaaagataataaggtgcatcctttcttccataacgagctcttcttctcttctctttctctcttcttccccttcctctcttctctttctctcttcttccccatcccgttacagagctcatctttgcagacacgcagggcaagaagcgttcttggtttattgcagacaagaatcgtctctccacgactgtatccggcgcaagagacagatgggtcccgactcaggtagcgtcatctcatggtgggctgaggcgccatgttgtcgttggttggccgcgctgttcggctgtccttcgcagtcgcgaggatcttctccaaggctgcagccttcttcttcttctacgcgatcacaggtattttgatgtgtttttactgtttgctggagtgatggcgccagaaattgtggattcgcattttcgttttcttttgctctgtatacaaactgctgcatctcttttaacaaaactagctgggcggctggcgcaattacgcggctagcacctatacaaaaattatatatttttaatatgattttaattaaaatttattaaatagttatctcgttgtcttaaaactttaaaagactaaaccttatcatcattgtgtttctaattttatagtttttaaaagtcacaccaattgctactccttacttctgtcatatcattttttttatttgcttgctcaatctaccaatgtttctatccattctccttggaacctttaaaaattagatcttatagtttttaaagtttattgtcccgttgggatttgtttttataatttttagaagtcccatcaaacattaccattataatcctctatggtcgtccactgcctcttctttttattgtcatttgtattttaaaaatcgaacataactattgtttaggtttatttttttacattctagaagtttcaccaaaacgtcagcgaccttgtcactgtactcctctacgactcgcccgccgcctcccttctctgttgtcattgagattttaaaatcaaatatgagtatcatgggggtttattttttttattttttagaagcccaaacctttaaaaattggacttatagtttttagagtttattgtctcgttgggtttcattttttataatttttagaaattccgtcaaacgttgccaatgcactcctctacaacccgtccgccgcctactctttattgtcatcgaatagtaaaaatcgaacataactatttgttagaattcatttttcttttactttctagaagttccaccaaccatcggcggctctgccattgtactcctatacgacccgtccgctgcctctcatttttattgtcatttagattttaaaaatcaaatataattatcattagggtttattttttactttctagaagtcccgctaaccgtcttgaccgattgcttcacgacctacccgttgtgtttccttttaatcgtcattaggattctatttggtgttttattaatagttttaaaatgttccatcaactgccaccactccactcctttataggcttgttacttaattaatctcgtcatgtattttagttggtattttctttcaatagtctttatttttttatcaccaattttagttatttataaattgtattcctagttgaaatcttatttttctttttctaatttcagaatttattttttttttgaattttaactaatattgtattgtgttcttttaatatttttattttttatgttcattttaagttgtttcaaaattgtattcctacttgaaccctctttttaatttatctaatttcagattttattttattttttattttaaattttaattaatcttgtattgggttcttatatgtttcttatttcaatattgcttatatttaattccgaatttcagttaattttaaattgtattcctaactgaactcttattttcttttctttttactaatttcgattttttattttttttatttcgaattttaataatctcgtactgtgtttttatatggactcttatttcaatattgcttaatttaattccgaaatttagttattttaaacttgtatttctacttgaactcttattttccttttttgctaattttggattttattttaatttttatccaaatatgtattaatcttgtattgggttcttatatgaattgttatttcaataatgctttttcatttcttgcaatgttaaactaaattgtagggggttcagtctcgaaagggaaagcatcataatgctttgctttatggcaaatattctaatagcaggacctctcgttctaccgctagggctatcaaccttcctaccagtgcagagtcttcgaacaaggaagtggtacgaacgatgacttctcaaattataacctgttagttttttttttcattttttgagttaatggttaatttgattttcttttatttgtatataaaaagggaaagagaaatatctcatataagtttaaaatctatttgaattaaatatgtacaaattatatatagtggtcacaatcagacaaatatgattttaatcatagacacattgaactttcagatcatattgaatcatttaaacatgacgcaataggatggtgtgcatggtgatgctatggtgctttaatgattgccaacttaattagtatatggcatgttcttatatgatttttcttttcctgaaattcgtagaccgtgggtgagagaaaatttccaaaggaagtggtagttgcttatgttgattactgtaaacgtgcatcagtctgtgaggagaatcagcgtgtgtgccatatgtgtgtgttcatcgagcaaagatgtcagaactacatagtcaaacaatctaaggtgagtaatctaaatgcgcattgtaggtattacgtagagacatttgtattcttgtccctatttttggatttaattgtgattttctctgtttttttccttaaaaaaaatgaagcaactgtttgccctgtttttgagatgcattgcccttgttatgtatgtaatgttgtatttcagcaagtctaatttccatgtcgtatatagttgataatccactgcataaatttgcacggcgacatcggtgtggagtgtgaagcgccaggttgcagtgtaagggcaatgacacatgaagatcttgaggttcactcctacttctgtcacattcaggctcaaggtgatctaccattctgttgcaaacatggatgttaactgtggattaacattaaatattagcgcttaacttaattctcttttgtctttttaggatggtggaggcaatacgaaaatctcgagactagccagtgaccacagaatgccaaggtgtaccgagacatcttggtgtagagcgagtagtatagcagtatgaactttgaacaagagtttccgctggtggttgttttggcatgcacttgtacatatgcttcttactacttttggagctgttctttactggatttataatgcgcttacactcttgtcataagttgtaaatgaatgtttgccgaaaaagattgttacaaaactatatgggatttgcatctacttccttcacttcacagtgtaaaactttctaatattgcccacgcggtacgagcacaggctggtttgttcttcttcttcgtgtcgtgcggctacctggctgagtgtgagtgagttggttcgggtttggcttgcaccagaattgtgtttgcattcagacactttcagaatgccaacagcgacttcttttcacgttatttaccgattattttttttcaaaaaaaaaatcttctattgtagtgattacaacacatgttttaatttatttgttaagtctatttatcaaaatatttaaattattctacaattaatctgttttaaactaaaagctagatagttctggtggaaattaagcctagtccgctcaataatatgttttaaatccagcctaacatggctttttgtcgtcctctttgtttagaaattaccctggccctacattttatatcttttgttcataaattacaacttccattaactacacatagttcaggtggaaaccaaaaaattacatcaaattggtctcacactacagcaactatatatgctagtatatattcagttcactgaaagcttgagactgaaggacgcagaaaaaatgctgaaacatgtattgtttgggggtaaagaactaatcaatgaatcaatggattccctgagagtagtccatcgatcctttgttagagtacttcaatttatagtacctgtttaactatcacattagtaatctcttacttactcctttggattcatccactaagtggtagactatcaaagccaatttagtctgtacaaaaaacaaaaacctaataaactcgattgtaacatactcatttttccttcaactcataggccaaccccgggtaatgatctcaactcaatcaaaatgattcaatatacccgattcgaacttgaatttcacatacataaggatacaccctatttgtatcagaagccaggtaaactatatgcaacaaattactttggttcttccattatcacattggcatttgacattgtacacctcttaccaattcttgatgaggcgacaggttagcactggaaccaccacacagccatagccatggaggatcagaattgagaagcttcagaagcttccaattcaagatcccttgaggccggacacctcgggaagcatgccctggatcctcctcagctcggccagcgcctcccgggcgtcgggccggtcgtccttgtccggcgccacgcaccggaacgccagctccgccaccgcctccacgctggccatcacgccggcgccctcgccgagcaccggctggtccaccacctcccgcagctcgcccacctgaatcttggccaccacccagtccgccagcgtcacgtccctccgctccctgcccacgtccaccggccgcagcccggtgacgagctccagcaccaccacgccgaagctgtacacgtcgctcttctccgtcagctggaacgaccggtggtagtccgggtcgaggtaccccggcgtgccctgcggcgccgtgcagcacaccagctccctcccggcccccgtggcgcatgcgtccggcggggacaggaggcgcgagagcccgaagtcgccgaggcgggcgcgcatgtcggcctccacgaagatgttcgacgaggtgacgtcgcggtgcacgacggcgggcttcaccccgaaatggaggtactcgagcgccgacgcgatctggaccgccatggcgaggcgcgtccgccaggggagcggtggcggcgggggcgccgccgcggtgacgccgcatcggcggtggaggtggtgggagagggtcccgttggggacgaagtcgtagacgaggagcagagcgcgcgggtcggcgcagaagccgtggaggcggacgaggtgcgggtggcgcagcgccgagaggatgagcacctcgttgcagaacgacttggtgatggtggcggatgcggaggggaacgacggcgacggcgacggcgggacgtggaggcgcttgacggcggcggggcggccgccgggcgggaggtaggcgaggaacaccgtcccaaacccgccatccccgagcttgcggcttggatcgaacccagcggtggcggcgcggagctgctcgtaggtgaacgaggggcgatgctggtggagcccgttccggcgaaggaacgccgcggcgcgggcggccgcgttggtcggccccgcggccggggccgggccccgcccgcggtagcggcggacggcgatggcgacgcagaggtagagcaggagcaccacgagcagcaccgcggcggcgacgagcgcggtggtgagcacgccgttgccgccgccggccttgtccggatgctgcggctgcggcggcgggggcgaggcgtggcgtctcgccgcggccggcgggggcagcgccgcggcggcgacggcggcggcgaggaggagaggcggtgggggcatctgggctcgcgatccacgggctggacaaaagttgggatgcgctgcgcggtggaggagaaggtcacaactactatgcagtagactccacaactcacgtcagcacatgccgcgcctggcaggtggggccggattcctttttcattaaacatagtataaacgtagacgctaacaacgcgtgtgtactcacccttataaaaacacacgtgcactatatcactataaacatctccaaaagattagattgacatatcttgatattgacgaagttatctcgaatatcttattgtcgataggtacgtcgcctatcactgaaaaaataattagttgtaaatggagtacatgtgtcaaagtatagaattttaatctagtgtattggttccattataggagatctaactagttgatctatgctcacttcataagtcggattccttttacttaaactcccatatcaaatggttcaaagcgacaaatttgaacgaattttgttcgttttcactttgacgttggcgtgtttagtcactcaacacgaagttttgactccgatgatccaatctatctccgggggtgtgatagcgtacgtcgttttcacccggcggagcgaagtttcttttctcttttcggcgtcggtttcatgaattccaagagagaagtggtgggcatcacacctgatttggactcttaacagaaaagtttaaggggagagattaggcgagtcaacccaactcaaagccatgggccatccatcgtagtggagagcgcaatagatagatatatatactccatttctagatataccacacactattgactattggacattaatcgatcattcaccttatttatttattttacaaatatataaaaatacgaggtatgccacctttaataacaaaataagtaatagatagatatactccatttctagatataccacgctattgattattggacattgattgattatttatcttctttttacaaatatataaaaatacgaggtatgcaatcttttataataaaattaattatagaaaaataagtaaaatttatattattttttaaaataagatgaatggtgatggagaatggcagtggatagacatgaatcacacaaggagatcggcgatgatgctgttttgcagcagcgtctcgctgtggctgtggcggtaggttttggtcgccggtggtctcggctacttttaatggcgctcatcatgttgggcgatgccgacgtgagatatggatttagtagtaacagcgacctggcgagatgggaatggaacggaatgcggctcttgttaattacttgtgccgtgtgtctcgacgcgatttcgattagtttagtgagggtgattagctgtttatgttaggacggtcgtcgcgattacaagtcgttgtactgtggtaggagtactaaaatacagtagttggagcgcggccactgtagtagaaagggatggacagtatatatagatagatgacagtcacaggctcgccaccagacaaccagcttcatcaatgggggttattcatggtgttccgtgccaaatttcatccaacgatagctttggcatgttgcattgaccgactcggataatcggcacgagtcaatgggccagtttggagagcattaaattctgagaagcagctgtttggtaactagtttctgagaatctgtaaaagttctgaaactcagcttctccaacttctggtttcttagttcatttttcagaatctgtaactacagattatcagaagttgtgaactgtttgaggcagcttctaacagaagcagcttttgggaaaagctgcagctgggacaaactcccctaaacagggccaatgagcaggagcaaaatttactgcccaaaccgttgtggtcttgtggatgagttcgattgtgctgcacaaagcagggttttctttaccattttgataatcgtttttggtgagagttaccgcagccacgatattacggctacagctaaaaattatgagttctaaaaacaacatattgatgagttctaaaaaattatttggctacagcaagaagtaaccgcaagatattgcaaacgacgctagcacacagcacacatatgtccggcaatgcaagatcaactttaagctgtgtggcaggtgttcgattcaatctctgtttgtgtgtactctaccgttgagtattctgtcccggcactcttttgagatggaaagaaaaagaggagaaaacaaaaagaaatcgaaaggaaaaggaaaaggggaaaggagaagacggcacgcactttgcgacgacacggattcagttatccatcccagtcgcaggctcgcaactcgcaaagcagcggcaagaagatgcgaatgcgatagtagtatcagtgtttgagcttttcttcatgtatgcacgcctattgtctacttgatcagaagttcattgtccactacttgatcagaagttcagaacatgataaagcgtaatagcttaaatcgcctagaaccgctgatacaggcagattcagattcattacccccaggctgaattctgccgagtcttcagaaatagggtatccatggatatcagaaataaacttctgaaaacctctttcccccaaaaaagatcatcaataaatgaagggtatagccgtatagatggtttgaggtctcaaaactcaactatgaactataaatatctcctcttcttttctttttctttttttgcatgcgaatacctcagctaatttaatttaggctaggctatatacacacgacaattagatcctaccaagtactccactggtacagggaaaaaaatgaatggagtaaatgtacaaccaatcattccacccaattcgctaccttctctccatagattatggaccgtatggccatggaaatgtttttgccactgaaatgcacaacaaaaagggaagatcattagacgaagaaaagaaatatcaagatcatccggttgagagcactcagcaagcagctgagtacactcaacaaaaataatgttaggagagtactcccttcgttccaaaataaacaaacctagaatgatgtaacattatacaatgaatctggatacactgttacgtcacatcacatcctagatttgtttattttagaacgaaaggagtacatgcaaatggacttgtccatattctgactgtaatagcaagatggggcaacaaactcttacaaaattcttactaacaaaactctcaacatttgattcaagtaattggaagttatagaaaagctagattaaaacatggtatgccacatcagcgtcggtaagaaatttgtaacatttttttggtaagtgtagctttttcctagtaattgggttctttggttgaaataccaaaagatgctgcgcatgcgcatgtcatatagaccacaaaaccattaccaagttatgttcactgtttaaggaaaacccacgacctgaattgtactatgtttgctgctaacagaatgataccaccatcttcagtacggtagctctctatcagaagagatgtggcactagattttgtgtatgcaccatctaacatgaacagctcatggtaacactgaaccttgtcatgctattcgtgttctgcaaaatccaaggatgcactaatacatttcttcactcttctaaataaaaagtttagtctgaaacataatctaggacagaaaccgttggtagatgcaaggacttcacatacaatttgcaacaatattgtaaaaggtcaactggatctaaataacaaaaacggttggttgagctgtaatggatgtgtagtgcaacctcattaacagctaaatccatcttctttttactgcttactctctgaaatctcggctttgtgttttttatgttctctatcgacgaaataaggcaaccttcgttaaaaaaaagttactactacttactctctgaaccaaaatctgaagaggacatagtacggaaaggaacctttcctacaacttcattataaagacatcctactatcctaaacttgctgaaaagggggtgccttagcattgtaaaagttggttatgtggatatccattctttgattcccagctggttgaaaaacttaaaattagtggctgcctggctggtatcatcatatcataaacaaattatattatgttctcataaaaaaatatattaggctctagtactccagttaacaagaggtaaagtactctaggactggaagcatgagagggaacaatggcaaccattgatcctctggctctactttccagctataaaactaagcaacacactgaactaactttacctaatacccacgttatgctctgcaagacctaagtcaaatgcgccattgagctagtccatcctcaaatcatctaatcttagactaatcagacagattcagggcatatcattagcctaaataaaatttagtttcttttacttttacaatagcatccaatagaagcaggagtagttaggatggtgaaaacaacaaggaatgacaaaattcaccttttgaggactcctggacaagcacaatatgcattgctgcattgtttggtggcagctgcaagcggagaggagcgagtttgccagtgatagggctgcgtgtgcagatgattatgtcatggaggcccgtctcttcctgcaacttgtgtgtgagctcctccaagttggagccattgaatgtgaatgagcgtgtctcgtcgtcttcgtccacatcgcccttatcatctgcaatgtggtagtagattgcacggccctccaccttgtgcaatggcgcagagaaagaaagggaggactgacagcacaaggaagtctcagtgttaattttctgaatcattgcaaaagtttcagaagtaattgggaaattggagaaatcaactataatagttccaaatttcttggcacacataatgattaaaagttccaaatgattgctaattgcatttgagcatctctatttgttgattctagaagcagctttatgaaatgattggttagttcatccaaaggacgacatattagcctacgcaattaaagagtgctccaaatctgaagtcaatgatggctttctttgctccaaatctgaagtcaatgatctcaggatgagatggagaccaattcgacgaacatgcactggtcaattcaatggagagcaagggaaatgttcgaacaaatgacaaacctcgagtctagagggcgcgggcttcggcggtggaggctgcggcgacgcgtctttctccagcggctgcggcgggttcccggtgtacgatttggtgggccggtggtggacctcctgcggtcgcggcggctgcggcggcgcgtctttctccagcggcggcggcggcgggtgcccggtgtaggacttggtgggccggtggtgcgcctccggcggcggcggcggcttcttaagctcgggcgcgtgggccggcgacggcggcgcggcggaggtgggggcgcggtcgtggccgggggtgagcacctgcacgatctcgacgtcccagagcacccagtcctgcgtggcggtgcggtgcggcacgtcgtgcgtgaccgagttccgccacggcgggaggccgccgttggcgcggaggtagtggccgtaccgcgtcttgagcttcgcctggaagccgtccttgacgggctcccactccagcgacgagtcggtggcgcggccgccgggcggcggcgcctgcagcaccttgcggcccgtcatcccgagcaggaagggctcgttggaggcggagaggtagcggccgtatcggctgcggaggcgcacgacgccgggtgagtgcggcacccgctccaccgtccaccgcgcgttcgtggcggcgccgttcctgtcctgcgtgacgtgcacctcgtcctcgtcggcgtagaggaacttgtcgtggtggctcttcagcctcaccacctgcgccctcgcgaacagctccatcgccgccggatctcctcctcctcctcctctctccgaggcgagagagattttcttcttcttcttcttcttctccaagcggcggaggcgacgaggtggagttgagttgagttggccggtgacgaggaggagggggattaatgggattaattaatgaggggggacgacgcgtcgctgccggtgggggccacggttgggggagagcccacctgtcggtcagttgcgggggtttcgactttgactggctcgcggttgcgggtgtccggcacgttgggatgggtcgcgcggcgagaaggcaacgcgcggaaatggcgggacgatggattccgtttacctcgcttgattactgcctctctcatcatgtaaactggagtagttactgctttggtagccaaccttgtacgacgatttcgttgtgcctcacgtgatgatgatgatgatgatgatgccttgatcgcaaaccagatcgttcatcgaatgacaacttgcattgttgtttttagttcatgtagtacaatgcaaacattggtttttttttaattacgagctcaattactactatgaggtcaagtaaacatgaaggcagagcagagcagagcacacgcgtttgaagttgtacttgggaggatttaagcgccgacggggaaaggtgtggatggccatcaattcaagcggccttcgtagcatcttctgctgataagtttggtttgacctggagtctcgcctactagttccaaatagagctcccttccaaatacggcggcgcgtcatcaactgccgaccacaacatggccgcccccaaatactcctacgagatctccatcggattcagtgttgcttgcacccgtgcaatccaatactcacgtgatgagcgagcatcgttcgtaccggtctaccggacagcttgagttccgatctcgcagcgacaataagatcctgcttcgtaaatctctaactttaaaatttagctttaggaggtaggtctggagtagaattgtggaatagccaaaacctagctgcacatcacttattcattctgtgagattactccatctagctccgctcctaattttagatggagctaaaactgtttggctgagctccatctccaggagaggtggagctggagctgtgtcaaacataacctaaacccaccaataaacttagtgattaagtaacatgaggatagaacaacgctgcacttgctcactctttccgtctttcgtgtggcgatgaacaactaaattctcagtgtaccagcaagaataatcaggttaggagttaggagcatctacttttgccatacgagaacaaaaaaagaaagtaatagaaactttgatcagtatagctgattaatcctagtatgtcaccagtctggtagtgccgtagtggtagcgaatagcccgtgtttgtacatatgaccatatgataggataaatttggagaaaagtcttggagatgtcactgtcttccagactaaagtttgcgtattgacagtgtcaagccatggcgccctgctatgcatccctgtatcattaaggccttaaacaattagcaagagaaagcagtccaaccagaaatatagtgtttagaaaattaggacaagacaaacagctcagcctttccacgtttgcatgcccttctttaaagtcactacatacatagaagttttttttttaaaaaaaaaagtgtgcgtccatgaactccaaatgtatggaaaatttcctaattatatacaaacttttaaggataaatatattgttatgcaaactttctttgaatagagttattatcttgaaaggttattggcacatccggttcgatgtagatgctggtttttacccattttgaagagaagaaaatcacaaaaaatcgttgtacgaacgtacatctgttggttcggtaagatagtactactagtggtgaattccatcacgcaggtgacattctggacgtggtaacaacccatcaaaacttgaatcacaaatactcctatgtggtttctgaaacgtattggagtcatcaaccaagcaccggcgttgaatgcggtccacgtcaaaagacacagaaacttggccaaatttagacaagggagaacatggtgcttgaaaagtttgtcaaatgcacataaccattcgttgtctcaaccattgttgttaccccttccatagcttagatcacaaggagaagaaacggtattgatggcgagaatagcataaaaggttaggcaaataccagaaaaacatcctaatctacaatatccaatgaggcaaacaccaattccacaagaaacatacaaactgagggcattaagacaccagtctcaacgcgaaaagaatacccaggaaaaccacgtcacgtccataacacgcaaccacgcaatcaatccaactgtgtcagtgcacctcgcagtaatcaaatgggtaaatgaccattcaccatcatggacaggccaatcacaggaagcagcacatatcgtacctgttagatggatctccctccccttgagcccaacggctcaagggggccttgacccgcgtcctgatcgggggcgcccagcccaatggctggtgggcccccgtcacactgtgccatataaagaggggtggaggacgggacggcaagagacacaaggaacgaggtttgtcgccgccgccgacacttcaccccataaaccctaaccgatctagggggcgcagccagtgac

SEQ ID NO: 8159 - DNA, 19528 bp, Oryza sativa
  unsure (1)..(19528): unsure at all n locations
agagaagaaagaaatccaaagcaaagaaaagcaaacgaaccaacggatcgaaaagatcgaaaccctaaccctaatcttacctcgtcgccggccacggagggggagaggggcaaagaggcaccgccgaggagccactcgacagccgcgcgcgcacccgcgggtgcacgcgcgcgccggcgagggggcccgcggcggcgccaccatctccgtcgtcgccggtctctcactcttcactcgcgtggaggggtgagacggtgggggggagaagagaaaagaatagagggcgtggcggcgcgagagcgtctgccatggcgcgacggcgcgaaggctgccggcgtcggcgacgccgctcggcacggggcacgcccgcaagagaaaggagagggcgccgcggcacaaccgctcgacggcggcgcactcacccttgagtgagtgcgcgcatcggcgaaggggagtgcgacggcgccgccgtgtcgccatgccgccgccggcgctgtgctagggttccggcgacggcgtcgccgctccgtgcacccgcaagagagaagagaaggagaagctagggtttcggcggccggtcggggcgagagggggttttgatccccgttttcggcgcccgaccgtccgatcataaaccctaagatcggacggccggtggcggccgggccaaaaatggcccaagaagggagcgcgcggcggcggttttcccggcccaggcccaagttgcggcctgggaaaggggaggggccgctcgcccgcgcgcaaggcggccgtgggccgaccggcaaaggccgaaaaaaaaaattcaatttaggtccctcggggccgaaagaaaaagaaaagaagtttaataaaagtccctcggccgaaggaagcattttcaatatgtttaatgattgtgtttatttctaagcaatttgaaccaacgtgaaaattgtttagataacagataaatgtgagaaatgcttctgaacatgtattttgtatattttcatgcaaattacaatagaattttgaattgttcttacatgttttacctctgtttaaatttgaaccaacgggagaatttttacagagagtaaacaacagagttttgttattgtttatatgaattgtatatagatcttccgctgcaaacagatgaaattgatgaaaattagtgtttctaaaattaaatttcgaaccaacgggagattttaattttaggaacattaattatgtgctatgatgttgtaatttttctgaccaacgttgataattgcaatgttatagttatggctttatgtgttatgtctattttctgcccaacggtgatgtagacttaatacataataattttaatgttaattttgttctcacaatacatgattatctcagatggctactccttgatgggttacattaaagatattccgaccctgaaaggagataactacgaagaatggaaaagagaactcgaccttgcttttatcttgggagaggtggactgggtgttgactaccccatgtcctatagaacctgctgaaattttcagaggtgaaaaagagtcagatgctgaatggcaaaagagagagagggacaatgcttccctcatcatgtcgtatgacattgagcatgcgaaatggtcttcagccaacaagaattgtttggctgcggtaaagaacacgattgagccaaccatattgggctcaatcccagagtatgacactgtctctaagtacctcgaaagtataaagagccggtttactggttcttcaaagttttatgcgacacagctgataaagcagcttgttacagagaggtaccatggaggtggtgtaaaagaccacattcttaggatgagcaacatggcttccaaattgaagcaaaaagatttgggcatctcagatgactttctggtccatctggttttgtcctcattgccaaagaactttgacaaccttgttgtcaactacaaaataagtacagagaattggaatattgaagagctcatctctaattgtgtgcaagaggaggaaagacacaaagagaccaatggtgactccattaaccttgtcaaagataacaaggaaaagagccacaggtcaccctcctcaaaagaaaaacagcctcagcatctgcctcagaagcaacagtttacagttgagacaagatcagtgtctacattgcaagaagacaagacattccaagaaagatcatcctgacttcctgacagtgatcatggcaaagaaaggtgagaacattattacatttgtaaagaatctcattatgattggttattctagatccacatggtggattgattctggagcaactattcatgtgtgtaattgtttaaagggattccgttcaatgaggactacgcaaagaagtgaaagatccattagagttgccaatagagttgaagcaaaagttgaggctgttggagatcttcgcctagaactcgcgaatggcttcacacttttacttccagacgtttttatgtcccttctttgcaaagaaacttgataataagtgtatccaaattggattttgatagatatgattgccattttggaaatggcaaatgtgaactatggtataataatgaatgtattggtcttatgttgcaagatcagctttatttgttatctctttctgagaatgtgaatgttgtgtcctcgttgacaaaagaaaagaaagcgaactcctgatgtctcatcgaaattatggcactgttgtttaggccatatttcgagggggagaattgagagactgttaagaatgtagttcttcctccattggagttctcagttttagaacgatgcatacaatgtatagaatgcatcggtgcccaaaacaccgtatgagctatggatcctccgtgtgtgggggagtcctgcaaaggataaagtatttaacccaaaacagtaagctgccattttattggctattctgaaagatcaaagggtcatcgtttctactgtccaaacagttatacaaagtttgtagaaacgagacacgccgtcttcttggaagacgaaatgattagggggagctcggtaattcgagaaattgatcttgaggagaggcgggtgtctgtacccgctccgtcgactcaggaacctttcttctctctacctgctaatgttgtgccagcaatgcatgccgttgcggtaccaacacctgttgttatctctcctgtggcaacaatgaatgaaagtgaggaacctgttctacaggattcaacagaaattattgccacatcagaggaggagctgcaacagcctcaaacagataatgtgccagaataggaggcccctagaaggcctgaaagagtcgcatatggaggatgatcccatctcatacgaagaggccatgagaagccatgaaagatgaaatgaaatcaatgaaattaaatgatgtctgggatttagaagaaattcctaaaggagccaaaacagtaggctgtaaatgggtctacaaaaccaaatatgactccagagggaatatagaaaagtttaaagtgcgactcgtggcaaaaggcttcacgcaatgagaagggattgattacaatgagactttttctccagtctcttgtaaagtttccttcaggattataatggcactagtggcacattatgatttggaattacatcagatggatgtaaaaacggcatttctaaatggagatttggaggaaaaagtatacatggcgcaaccgaaaggttttgtcatgaaaggaaacgaaaatatgggatgccgtataaagagatccatttatgggttaaagcaaagcttcgagacaatgctacttgaagtttgatggaacaataaagaaatttgggttttcaagagaatgtagaggacaactgtattgattcaaagttaagaatgggagactcattttcctaattctgtatgtagatgacgttctactggctagtagtgatgtcaatctactgcaggaaatagagaaattcttgtcctcaaannnnnnnnnnnnnnnnnnnnnnnnggcttcatatgtttttgggcatagagattcaccgaaatagaacaaagtgtgcattgggattttctcaaaaggcatatatatagaaaaggtgttgaagaaattcaacatgtacagatgcagtgctacacctgctcctataatgaaaggcgaaaagtatggggcatcgcaatgtcccagaaattcagtatgagctcaataaaatgaaaacaaagccatatgcgtcagctgtaggaagcctacagtacgcgcaagtgtgcacacgacctgacttggcatttgttaccgggttatttggcagatttcaaaagtaatccaggcctagagcactggaaattggtatagaaagtcttgcgtgattgcaaggaacaaaaggcctcatgatgtcttacagaaaagcagaatcgctccagatagtggggtattcggattctgactttgcaaaagataatataaagttaacatcgggatacatgtttaccctggcagtaggagctatttcatggaaaagctcaaaacagactaccactgcagggtctaccatgtatgccgagtttatagcatgccatgaggctacggggcaggtgaactggctaatgaagttcatacccggttttaaaggtggttgatagtattgagaaaccactaaagttatactgcgataaagaacccacagtaatgtactctcacaacaattagtcaagtggtgctgccaaacacattgacataaagtactatgttgtgaaagacaaagtccaggatcaaacaatcagtctcgagcacataagaacagaaaggatgctcgcggatccgctcatgaaaggcctacctcccaacatgttcaaggaacatgtagcatgcatgggttgtaagggaagccttatgaatcctggactatagggcccaaaagttaaaatatctgtttctgaatagagatgtgtatagtggctgtcgaatccatcggtaatcaaccgtgacgatgaaacatgctctatatgtaaatctgtgatggaatagaaaaagctaaaggaaatagtgagatcaagggggagaatgttagatggatctccctccccttgagcccaacggctcaagggggccttgacccgcgccctgatcgggggcgcccagcccaatggctggtgggcccccgtcacactgtgccatataaagaggggtggaggacgggacggcaagagacacaaggaacgaggttcgtcgccgccgccgccactccaccccataaaccctaaccgatcgagggggcgcagccagtgacgagaagactccaccgccgcgccaccacctcgccgggatcccctacgaccaccactgccgcgcagcaccgtcgccgtcacgaccaccatcgccgccgccgccaacgtcaagcagagcacgacaacgacgatggctgggacttcctcttcatccaacgcgtcaaccggtcacatccctaaaccctttcccttattctctattgttgttcaatcatccatcgcaaatagaaccacccgactagatctaaacctaggtgatccaatagacaactctaacagtaccattttaaactagcgcgtttctgtagacataagcattcccattcaaatggtcataatagatggctccaacgaccatcagccactgtcatcaagggtcaagatcgacaagagtgggacaaaacaaccaaaatgtagcaagcaaaattttggcagaccaatggtggggctgcaaagtttgtggaaagttctctggaaacattttagccttttgacaagctggtccgggtcaccatgttgttctccccacgatgatcacactcaattatcctttggttttgttcagaccatgttgcaaaaatttggaacgatattgctccaccagcgatttatccacgcttccttccccagccagctctttcttggtctttctttgagcccttcctctcttttgctccgaatgactatcatttctgtttttcctctttgccagggcatctgccggattatgtttactcgacagagttcgctgcaaaacggagactatgttaaactacttcgcttcatcgagatcgataattttgtggtgccgaaaaacaaaaggtccaatattacttacattcctatcagcggttggtgttgcatcttgtctatctccatccaacgcggtggttcccttgtttgactttcgtgctctttttgcaggcctttgatcctttcttttatcttcaaccatactttccacagtgccaccatctccagctgccgaaagatcctctgcaggcccttcaccagcgtagggtaacttagatgatctatcgtgtgattttctcttgttccctttgttgaaagcccttctgttatttgcatcagggccatcagttgcagactgatctcccagaggcctcgccttatcttgcgcagcttctcgcaacttatcacggcggtccttccaaattttctggagtctcactttctcaacgttctcaagtgcaaactccacaattggacgacgttctgcaccaaaagtttctgcaaatgacaaaaaacaacaatgtaactggagataaacagacaacactaaaaaaaaatgcagcagcaaacaagcaaatgctagttactactagaaaggaagggaagacattaagggtatagtatgtctctgatgatctgcatactgaggaaaagtgaaaactgcagctagagctaacagcagctcaaagacacagaaagctcatgattggacaagaaacagcacagataggtagcgcgaagccatgaacaagtgatacagtgattccatgcaatccaaggatgcagcattatgcaataggcaagattaacacatcacattcttctcagagaaagacatattgcacattagaaagtaagtgagacgatgaggcagttagacagcatggctgcaacaaaacaatacttagaagcatttggtatagaaaagagtaccagggttattgtttaggactcttagagccacaagagcatgctcatgttcttgaaaatctacgaaggctacaccacgggaatgtttctgtgcagtactgctgctcttcttttcatttttcagaatatttacctgttcaagacaaatgcacatgcataagcattataaagatacctagaaatagaataaaacagaggttgaataaagaaaacccaacaaacctttcggatgacgggattttgcttgtgagcacgagaaataactgcttctctacaaagcttctttacatcattaatggtcatagtctttggcaggttgtagatgataagccttgttttggacacatgaaattttggagactggagcatttccgcttttcttctagctaacctacatgacaaaatcaaagatttcgtgagcattgttcacatgatcctttggccatgagcccatgattgagagcataataaaactccatcttaagaaagattactggacattcaataaaaaaactaaatacatattatagaagaaacaattgaaaaatacttgacaaaataaaattaatggaaaaagactatgattcaatagtttcatctgccgtacagagacacctttttattatagaaaaggttgagacaccacatgctgccaatgaattataaaaattgcatctatcatagctgtttattcccagagaaatattaacacacatgtacagtggacatttaccaatataatagaaccaacactttgcctatatttcttgtcaaaagacattggctatattggtactagctgtagggtgatctaatggtgcacagaaagaaggaaaagatcaactcttaccaactacgtttattcatgtcagcatcggatacgccttctgcagctggcgtcccagcaagtatttcaccttcctgccgcaacaatgaatttgagataggaaaattgatttaagagatgatgagagagtgagagaggggggaagggaggggggaggggggaggctctagtaaaaaggttaccttagtcaagtataggttacgtcgatcctccacctcattctttgccttctcaagttcctttttgtgagctgactccttgtccagtgctttcattatcttaagagccctgctctttataaaaattcccaatccaggagcagcattggcagcagaaactgctgcatcagctgcctctggtgtagagaacttcagaaaaccagttcctctaggtctcctgtatagatagcacaaaaacatgcattaatgagtgtacatgcaaacgacctctggttgatacaacagcaggaaataaaggaaatatgatgttctaacagatggtgaaacatactttgtgagtttgtgaagaactgggaagaaagattcaaccttcccaaatgctgagaagcgctctgttacctcctcattacttagatcaaaaggaaggttgcttatgaataatgtcctatccagcccagcgtcttgtttcttgaattttgtggcaggaagggtgttttcctcctgtgccacacgtttagaattttctaacttgtcagctgcaggtacagatgtaggtaaatgggtctgcttctgtttcttttctgatgtatcttgttctgtttctgtgtctgtatcaatatcagaaccctcattgccagatggttcagccctctcagatgacttgatcaaattttcaagaacctttcttgaaatatccatttcagttttgaaatcatcagcaggacaattggaagtctcctgctcaagttcatagctatcatcttctccaacaagattatcttcagactcctcgtcactgcctctgtctgatacatttgccagctctgtaggtacagcaagttcatgatatttcagcttccaaagtagtagttcagaaagcacaaagaattgacaggatttaagagggcacacggtgtattaaaacaaatatttagtttttaaacaagaagccagctggtcattttgaacaacatgaaccaccgtttatctgttgcctgagaaaccataccaacgaaatgacatggtacctttgccaaaagccaaatgtccatgttaaaatagctgttaagaatatcgttgaagtacataaagatattgcaggtcacaggatgaacgaaggcaataattaaaataattgatacaaaagtctatatatttaccatcatccttagtgctggattttgcagcaacagtgtatactttctttggaacagcccaatcaacagctacagttctctttgcaactacttttccattaacattttttatagcctgttaaagagaaaaaaatataaaatattaggacttccaaagattttttttttttttgctcttactgaatagggcactgacattttctgcatcttgtttacgtgtgaaagacacaaaagcaaagccttttgatgccctgtagaagaatgaatgcaacagagttatcatatcttgcaatttgcttaaaccgctgaagaaataaaggattcaacgcgaaacatacccgtcatcagacttctgtggaatggacacatcccatataaatcctgctaaactgaatatatccatgatctcctttactgtaatctgcaacaatgaaacaaaaacatatagcctctgttttatctcttctaggaaacaaagcttggaacaagtgaacttttgcattcaatcaagcaccttaaatggtagattccggactatcactctccatttcctgatctttgagccctgtatagcaagcaagttagaaacaactgcaggtaactggggaaatagctgaagagaaacatatgatagtggttccagagtacagataaacaccatgcaactcttgtgaagaagggggacacacaacaactgaaaattaggattttaagtaatctcattctatctcctacccacctattctcacagctgcaattgtagccatgcaagatagtagtagtagattataagtggagacaaagcggtagcatatctattgtgtcattcacggaataatattaggatctttctaactgaaagtgagaaaagcttgattaactcactgactaatcaatctctagaggcttgtacatcttttacagatacaaaaatggagttagcggtggtgatggtagtatcttatgatgaataatatagtagtgccttttgtgaacgattgcatgtcaccatctgatctaatgtgaactatgtatgcaatatttaaaatttggggatactaacttttttctagtttagaacttataatatttagtttagatccattgcaatgaacaggcactatgttggttctggtaaaatatctagtttacttattgcaggtcttacaggacactgtaactaactatatttgaaactgtagtcaggagatctgtaatatatgtggtattcaggacgttgccaggagacacagcagcagaaagttattgttagtttgagactccagaatttgaagttccaacccatttttaattagcacatacccatccgttttaaattaccgtactaattcatgatagccaccttaggttagaacataaggataattatatgtagctttgaggagaaactaaatgtgtgcacatgcactactacactggtaaacaaaaagtggaagaaaaacggaagtatttgaagtttgtttaattgtagaatagaacaagtctatcaagctaaaataatgaagtaatggcagcacatcaaggtaaatataatgcaagaagatacctctccaccaagctgacgagcccaaacaactgctcccttgacctccttacgatgcaagtgaacaaccgaatcccaagctgatttgacactggcaaaaagtacagctgctgcatctgttgtgcatccatctcgttcaagccctgttgagaatgacagccattccataaattatactgtttcaagaaccacatgctagtggtattaaaggagaataattgtgtgtacagcaggaactgggaaaatgagataaaacttaataagtcataccatggagctccatttcctcttttggaagtggatagctaacagatacaactgtgccaatctctccagctagacgaaatacttcactcgccatagcaaagtctcgaagaccaccgaatatcacagtttttgcaacccttcatcacaagcaattacaaatgtcatgctggatgaaaaataaacaattacagcatatatccatgaaaaaactaagaattttgtgaggttatggaaaccaaactagaatgggatgggggaaaaaatcagcataattacttaaattgtttttaggtaatgttatggcttgatggtatagaatatttgagtccacacctttgcttttctgagcttttcaccttagcagtattggaaatgctgacttcctttgatagtgtagtttcctttttcaacaactgtagtggttctggttcagtaatacaccatgaatcagaaaattaaagcattgataaaatttaggaatggaaacagtgttggaatcgaacaattttcctttcaaacctgtatctgttttatgagatgtctccttgtgttttgcagtagaagtagcatatgcttcatttgttgcattggcatccttggcttcatttgttgcatcagcatccttggcttcatttgttgcatcggcatccttggcttgcacggcttacaagcaaaaacagccaggcaatcaaaatctcaatcaattgaaattcagaaccaaataccagaaatagaaatttaccattctccttcttctgtaaacgttccttcagtggagcacgatgcgttgctagcttaactctaatttttctaccagcaacagagaatccatccttttgctgaatagatcgctcagcatcttgaacagttgcactgtatcaatgtaaatatgtcaaaaatgtataacagattacgcgtcagttttatgccttatgcctatatattttctgcagaaagatattcctacatgaataatcacacgacacatctgtaagagaaacaaaaagatcgagctaaaccaacctcttgtgatttggtttgtgcattagtacagtacataacatatggtgaaagcttcgtgcagtaacatacttgtaataagaactatcggtgtggggctaacttctgtgagggacctgataggctggtattaaccagacaccatcactagagacactgaataaatgtatttccgcttagcattaaacaatttgctcactagagcattacactactcacgatcaaaatcacttctcgaattctggaattgtggcaggaaagggaaacacatttccatcggaaaacaaccagaaaagcaagcaatgaaacttacaattgcacgaacccaaagcctctgctcgtctctgaccctgcattagaaacaaacacaaccaaattactccctgctaaacagccattgaactcactgtcactgaattctcatacctttcggcgcgaccatgaagcatcgcctcaccggcccgacctcgctgaacaccgcctcgagctaaaaaaaaacagcaatacacaccgcgtatcacagcctcgcagaccgaaacagcaaaaaaatgctagccgcatagcttcgcaggggataaggctttgggattggggctcggcttgcgcttacatcggaggacttgaaggtgtacggcaggttggagacgaacacggtggaggggctgtggcctccggcgccgccgccggtggccgcgccgccttccgtggctgctcccccgccaccgccgccgccgccgcgctgcttccgcttacccatcgccggcgtcgtaggggaggaggcgtgtgaacaagctcccgtactcgacgaggcgagaggttttgttgggctaggccgctagggtttatagcttagaatgggccattgtttttgtcggaccggatgtcctagcggtgtatgcttggtttgggcctgtttgcgttaagtgcaaaaaggtccactttacgtccctcaactaatggtcgagtgctcgagtttcatttacatacaactatatactccatataaaaaactacgatggtgatgggagtaaatctgttattctacttgtgcttcttcggtttttataaattgccgcttgatattttctgatactgtagaatattctaatatttgattcaagtaaataccatatatgcaaataagcaaacaattacatgcttgataaaataatattatgctatgatattataatatattttttatctataacaaaacatagacattttctagtcaactataaaattaagtatagattgtcctaacttctaaaactagtgttaatcgagccatcaatattaagagtagtttcaactgacatgatgcttatcaaacttctaggcaccatttaaaaaaaaaatgaaacttcatcaacatttcttaataataccttttcattaaatcttcaactttctaatatcttatccatcatctctactttcgaaataaaaacttggttctgcatatcatttttcagcaactttattttttttccgtaactttataacacaacagccttgagacatgtttaagggagcttttggtagctgaaaatttttccagaacaagaaccccgcgcacacacaccaaacggtctagatttttgttcggattctgataagttgtagttgtaaaattcagaaaataaattagaaaccataaactaaaaaatcgctccgctgtattattagaagtaacaacttctcgtaattttaagttccctgaacagatccagacccttggattatgaaataaccaaggtcactaaacacaccctcatctaacgggcaggcagctcgcccgtgacgcgtgccgcgtgcgtgactgccagcagcagcagcaagcggaggagaggagagacgcgccgccgccgccgccgcctgcgaagcaaagcggcgagcgagaagccaacggcgcatcaaagtgaggatatggagaggggcgccgccgccgcaggagcgctctcatgcaccttccgctccccttccccttccccgacgtccccggccgcgccccattggcggcctctcctcggcttccgctcccgctcccgctcgcgtggccggggctggggccagcgcgcggtggtcgccggggcaccgcggttattcctgccgccaccatgccggcgcttcaggtagcgagctccctgctgtctcttgttcccttttccttgtcctccttgtctcggttgggattgggagtattgctcctgcgctcgcaagctgttcgatgaaacgcctgtgctttttgggggtaagtgatgatgccgtcatcttaggaatgggattaatcgattaggacactttatatagtatggattaggactggcaactttggatcgttgagcctgttcaatctcgtgccagtgaaatgttaactttgacagctagtagctttgctatggttggttggaggcttggagcattcggacagttctttgtgcttgtcttaccacctttccgggtttgacaatgtacattaattctaattttggatatttcagtctagatactttgagcttctagcagatgatgggcaaaagctagaatttcgaattagctgcgaggatgaaaggggttaaattagcatgtctccatgtcaagtactttcatggctcaaagttgcgggtggcttgttgcattttactggtttagtaagtgtaacgttaaacttgtgcggaactttctaacgtcaggcaagaagtatatcttgcccaagtctagcctgttggcaggtgaagccaattaaaattaaagagattatgtggaacaactgtgcccattggatatttgcaaacgaaaaataatttgtgaataaaacttttatattacgtgttcttagcgatctaaaagcaaagactgaaaaataaactttgatgaaaaaacctcaaaatcaactccaaatttaaggttgaaaattcaaattttggttgataagcataagcgaaaagatgaggccgtatatttgacgtgttccccatgtaaggctcactattgcggtattgccatatgatttttcccactggtaatcctaagatttcaggattttatttctctcttacagacctcgcataaagctatggtttataatcacatcaataagagtcgatcttttatgtttactgctgtaaatgcttaataatgtgaacttggtttctcatttaaaactttaaaatttctcttacacacttgtagatactgcagtcaaagcaagcttctaggcacgaacaaagggcaaaacagatgctcgttggcaactttcagctcatttggacagtcagggatcagtctgaacaatgaagatttagtgaaagataagctcctaatagattgtggggaagatcaagattgtgtgattggtatgcactatgtttttttttcttcagattatttaagtttcatacttgtgtgcttattttgcatgtaaaacctataccatgcacctccagtaagtgataattgcatgccaaatctattatgggcagctcatgtccttttctaaggctgcacatatactttcttagaaaactctgcacaaatcttgcatgaggctaggattaaaccagattttcattgggtattcaatgcatgtttcagatgggatagttgccttgggaaagtttgatgcccttcacattggccatcgagaattggcaatgtatgcttctaaggcaggaactccctttcttctttcttttgtgggaattgctgaggttcttggctgggagtataggtgagtgtaaaagaggctattcataatttcccttggtaatcattagccccaaataactgagtgccttgcttgtggcaattcatgactgctttcctttcatgcaggcctcctatagttgctcagtgtgatcggaagcgagtgctcacctcttgggctccatactgtaagaatgtagtgcctattgaatatcaagttgagttttcaaaggtcaggtacctaactccgcggcaattcgttgagaggttatcaagggatcttaaaatacaaggtgttgtagcaggtagaaacatgttgtcttctcttgtaggtgcactatcttactgtattgtcataaccttttacaatatagctttgtttgttattatgacaggtgaaaactacagatttggctacagggcatctggcgatgcagctgagctagtgaaactatgtgaagaatttggtttaagtgcatttattgtacggtcagtcatggacacagctagatcttataatggagttacaacctccgtaaattcaagcgacaaggggcaggtttcttctagtcgtgttcgccatgctttggctatgggtgatatggaatatgtttctgaattactagggaggaaacaccgccttgtgctgacagttaaggaaaaccaccttcaggaaaggaaaaggatcatgctgccaaaatcttgcatgttgaacatgccaccagctgatggtttgtatgagaattgtgaccttcttaatggaggccatcttggactatgcagggtgatcataaactcagagaccattgtaattgagatgaaagatgagaacagtttattaccaaatactattcaagaaaatcagcaattaggtattgaatttggatgatatggtacagctcaattcatgattggtgacatggcaggtcatattttgtactatatcttcattatatctggcaccttgcggattagtttgtgttgatgctaaatagtgctgattttatctggaggggatatagagcaagaaagaaaaaaactgagaactttgtattcaagggtgtatacctcatcgtgatcaagccaaagagcatcttatagatgaacagagattttgtgcaaatttgcatttcatgcaacgagaagacatggtagtcagagaggacattgtcctttttctccctgggaattggcaacgatagaactgactagcttctagctagctgtatcagcaaagctgaagcacaaggaaacatacaagggaactcatttcccaaatcccacctagtacgtttttccagcttatgaaattgtgatttgtacaaataggtttcatttacacagcaacttcccattgttagatagcagcttgttccatcaacagttaatgaaatatgttgcttgatcttcgaacatctggagaggtctggtccctaacaacgttgagtttagcctaatctagcttatgaaattgtgatttgcacaaataggtttcatttacacagcaactttccattattagattgctgcctgttctatcaacagttaatgaaatgtgttgcttgatcttcgaatatctggtccctaacaatgttgagcttagcctaatcgatcgctggcgtgtattggagctctgaaaaggctaccggacaaggtaaaactctgtaaccttaatcgtctgtgtaggtccgtcagctcacaaggtctcagacaaacagttcatactttcggaacatagttcaaattcaacgccttcattgctatgaattaagcaaaaggtccagccagataaatagaaatatgtacctccaaagttaaaaaagttagaaccctaaaattgttctttgacaaaaaaagaaaagaaagaaaaaggatatacaacaatgatactctggtacacaagttgcgctgtacagatctgagcttcccaagggtaaagcttattgccacctgactaacccaaacatgtcacaaaatggaggggaggccccgctttgagcgtaagatgcacaaataacaacagatgcaaagatcctttaggccagaggcagctgagaccaatggcttgtatttcactgaacttccgcaaatatgactcgagacaaaaacaacacgtcgtgacgctgttcttgttttgacttagtgcacaatcaggtagtttttatttgctcatatttttcacctatgctcccacctttctgcttctggaattcaatgtaacgtaaagtgcttgcaaagaaggcctctgtcgatggatcagctacagtgttctcactttgcttctctgtcctaatcaattcaatcaaatcctggattacagtgttcgtgatctctggaattcctttctcgaagaagtacaaatacctggaaataatagaagcatgtggattacaacaatagcaatcatatgcacaagagaatatatcagactaggtcttgagattacttgttcaaaatttcgataaatagcgcgacagatccgctacttccccttgttacattagccatctgttgagcggcatttgcaattcttaaggcacgctttaaacaaaggaggaccctggaacaacaattcaaagaagcaacaaataaaaacttgtcagttttcatagatacaagaatataattcaaggataatgaatatatagtagtgccttttgttcccatgaataattgacataaccatgggaaactcaaaaggatattgcaagtttgctgtgtacttgcgtgtgcacctgctgttgctgacagctgcagctgtgttttatctaccttgtgatcttttaaaacagtttgactcaccacaaaattataatagacttgtttccgtatcattaggaaggtcctaacatttcatttgcaagaacgaactaaaagttgaaaattacggatggcataactagtctacaagtttcaacaaatcagtatgcttagaagtttacctttcaccatccattattccgtcttggtcgtcagtccagaaaaggtgtgaacatgcataaaccgctcggcattggtcaggtttctttagaagttttgctgagtactgcacaattattcagcaggatgttattatgtgcatagaagagactgatttgagagagagagagagagagagagaagagaaaaacataattcaataaggaaacagcatagtaattgttacccctgttgtcttgtgagtcagggtatctctattttcaaccccgaatatattcatccgttgaagggttccaattataagatgaattgcagtgatttgagcctttgaatcctgcatgtagcatgcaaacattgtaggtcgaaaatcgtatagagttataaaatgagctattgaccctagtgttggaatgcatattgcatgtgtttatgatatgatccaggggttatatcaaataactcaattgaagtaatgtgacaaaatggatgtgcacaaggaagggcaacgcagggcttataccgcaatttcttcttcatataagatgaatgcttgagtaaagaactcataagcaaccggttccagatcacaatcattggccgcctgtaatatgaaaggtagttacatgatatgcagagttatggaaagcataaatcaattgttacagcaatacctctgcacactgcagatataatctgagagccagttcaggagaaggaacacatgagagagcttcaatggtctgcggatgaaaaaaatgatgagaacattgatgagggagaacaatatccccatcaacagatttatagccctcatccttatgcaagcaagtaaatcaagccagggagagtttctgtgctagaggaagttggataaaacagttcacacttatgt

SEQ ID NO: 8160 - DNA, 27706 bp, Oryza sativa
ttcctgcagcccaatgaaagcaatgggagctatggaggaaggagatgctgtgtttggttcaggagctgaagtgaaccttgattcacaggtaacatgaatttttttatatctagagaaacagcaatgctatcactgtaccaccttgccttctaaacagaacagtatctgatacccatattgcaatattctgtgttgtaaaaactttgtggttggaatgcttttaccagagtccagctctaactctgcatactttggcaagtttttagcccctacagagctcataaccacccatgtctggtaaaaggtggtcctgttgaatcatgaaccttatgcaggatagctttacactaatttgttcattgaacaaccctctacaacatggtctgtcacaaagaccttcactgcacttgttatttcctcatttaaccccaagatcatttgatctggattgtgcacataatattagcccaaagcaatattgtggaggctggcttgcttttacatgctagaagatttatttaacaacttaagtgcattgatctgcttccagtgaacttgaatgcaagctgactttgtttctgatgaaaatatgcctgtttaatgtgctcacaggtatattggtggcacgacaagtatcgaccaagaaaaccgaagtacttcaatcgggtgcatactggatatgagtggaacaaatacaaccagactcactatgaccacgacaaccccccaccgaaaatcgtccagggctacaagttcaatatattttaccctgacctggtggataaatcaaaggcgccaacatacacgatagagaaagacgggagcaccggtgagacatgcctcataagattccatgcgggccctccatatgaggatatagtaagcctctattcccatatcttcaaatttaatcctgtagagtttcatgggcacttcacttaattactctgttttcttcaccaggctttccgtattgtcaacaaggagtgggaatactcacataagaagggcttcaagtgcacattcgaacgtgggattctccacctctatttcaacttcaagcgctaccgctacaggcgataaaatgccacgcaaggaagacgttttgatctccattgtgctgttagaagttggtcttgcttttcttacctgagagccctatgcaaataggtttgctcggataccaactctggagtcgactacacatgctcatccgagatcatatgtactaagtgagaacagggtagcatactagcatcccgtacttatgctgattaggctctttgttagcggtttgaaaatagcaacgaagtctcctgtgtacattgtaacttccttttttctgctttggaaattgagttcagatgtcaaaaatcaacacatctttttggtggcaatcaaactaatagtgcgtatatcattaaacttcttgtttctggaactagcgaaagtgtggagtacttagcacaacatcagaaggcatgaccaattgacttatagctaaaaatgtaatagctgttttttttttgttttttttgttttgctcctacacaactttgtgctattaacaggatcagagatgcaaagtggcagttggtccgaggctcctagctccgaaccactatcagtttgcagctattggcctctacatccatcttctacacaagattataaggacaagagatgattttaaaaatggaaggcaagtattcactcaaagtttagatgccattggatggtagaatctaaactgcttctaaataagttaccgcatacaaaaaataaattaacagagtcccctttttcacaagtgaggtttgctcacttagttcccttcgcactggcaaactacgacagtgtgtaaatttcagaagggatattaaaacaattaccaatgcagcaaaggtaaatagtgcaatgggcaaaattgaattgattctgaggacaggatatctccaaaaccactagccactttggacttggtggctaatggtcgggtttctccgtccaatttccagaacaaaacaggtcaactcctatgaagtcagagactcaggagttgcttttaaaaaacaaggaagaaagaaaaaaaatattttgagttgagaaaatggcaaggcaaatatgatatactagtagagcacaggagcaaataacaaaagccacagggaaatttaaaagacttgcattgtctcaagcagagttaaggccttaaagaccacaaaagctcagtcacaatccggctactcggaaacagcaaatggaactacaagcaaccagctccaaaccaaggacacaaacaagtctaccaaccaaaaaactaccagaatattgggctctccttgccaacaatctcctcagcagtagaacatgacgtccttgacgttctccttgatcttgggaagctggcgcacctccacagggccctctcgcgccacagcctgcccgctgctgccaggggtcgagccaccatccgaactctctccttccacgtagtagcgagcgcggaatgcagcaagatgagcatagtaggccggtgggactgcacaggaaagaaaaagagcaatacatcagtgaacaaatgcaacagatttgaaaaggagcaccacgtagaaaagaatctctgtagttcaattgctagtgcctagaaagtagcatgagagcatcgcatgcgaaatgataggattcagcagatttgaaaaccacatgtttaggaacagttaacatgatgacattgatggtgcttgacaagcaaataacactaggttcgattcacttcaaaaagcaagatcacatgatgtgcattacatacagtagacagacacaatttcaatcttaatgaaatttggtcggctccttcgccgacctggcaaaaacacaatttcaaaacatgctaaattgcacagataggaaaatgagtactacatcagtgaatagaaaggaaaatgtttcggtagttcaattgctagttccagaaagtaacatgggagcatcacatacaaaatgataagatacaaatggaacacattcgaaaagaaaatgctgaggacaattttgaaaagcagatgttgtggaacagttaacaagatgacattggtggtgcataacaagcaatgacagctgtgcagttcccttaccacatgatgaattgggtgcattacagtaaacaaaggtccaatttttaacacaagctaaataaggatttctactgttgagaacaacagcctactcctagcgcttatcttttccagttcacagttaaaccaatgccaaaaattttggtgtacacatttgcttgctcatcgaaggaggtaaacaaagctaagcaaactaatgcagaaatgagaaacaaagatgcaagaaaagaagactcacccacagacactgcccgggtgcatcgcgcatagctgcattttgccaacagtaggaattatcagagttggggcagccgaaataataagggagctaagcaactaagcagaaacagagaaatgaacttacgtatagcaaagattgttggtcagggactgaagtgcatcggctgtaaaatggttctcatcgtaaaggacatggtaatgagttggcctgctagtaccctgagaaaaggaatgtcaagagcacacattaactgaaaattttgttggctggaaaattttgtgcaatctgcaaacagcttccagcatgggttttacctgtatgccagcatggctacacaggtagaaatcgaactctgtaggatggcaaatctgacggtccacgacagttcctgcaggaccaaaaagaaacggaatacaacgatatatccaatcatcaaatgcctgaagaagtagcagatgtatgttctcagtagcaaccaacaagaaactgaccaggaaggatgtttccgctcttgtcagtcatgtctcgcctcccatgaacctctgggaaaagccttgtgtgatgccttttctgaactactacaaatgtgacaggtggtagatatccctcctccaaagatgcacaagccttgcaatgtaaaaggattaaattcagaaaaaacaatgaaattggcttgtccagaatagataacacagacagatgtatcatgatgcgaagctcacctttctgatggcatccatttcatgaagaagcacatggctgaactgaccttcacttacaccatctctgcagaggagaatgaccactcaacaaatttcatttaactggacacaccactgaacagaacagaatttccaggacatacctatagaagattatcctctcaggccttctgccagtcttcttgcggaatgcgataagcaactccctgtaaacaagagcatggtcagttcccagttgaacctacaataatatacaattgcaataccacattgaccacaaatttacctgatcatcccaccatttacaaccttcactggatctttaccaacactaaagagatcttctattatctcctgtctatgtggttgagcagagaccagacctcggtatttggtgatttcaggccaatccatagatgccacaacctacatgaacacaaagaaaatataccagtaaagtttgtatatgcaaagcaataaactttgggaagaaaaatatagttcatctattgcatcaagttattcacaggatagcccatgatcttgtattgtaggacaacatcaaacagaccaagtaatgaattgaagaaccattagctaggagggtactaaccgcagcaatagatgatgcagagtcctctccaggtggagggtgtgtgacatcagcgccaaagatgattgttgggacttctgacacaaatggtatgccattgcggataaaggctcgctcaagaacagtgttgcgccctccgacctggttatggcacagaattgtcatacttctgggggagaatactaaaagcacacaagatatagtccacagaattggtatagttctagggaaaaaaatacaagcccagcagaattacagaccttgacattgattttgagtgcaacattttccaaatattgcttgttcggcctgctggcatgccttggcaaacaacattgagatacaatgccaaggtcagtctcacagacccttttaattttccctgtaaaaaccatgcatatacgacatttaataaataaatcagggaatggaaaagttacccaaccaacaatatacataccataagaaccactaacttcaggcagaattacaattaaaagctgcaggcctccctttccctctctggctagcagttctgatgttctcctgtgaacatccctcagagcattctctatattgttaggatttgttgaccggacatccacgactggtcttggattgaaagactacagggtcaagtcaaagttaattgcagcacatataattattaaactgctttaatagcattgtaactatgccagagttaccattccagtggcattgcacatctgaatcaggtcaccacagaacctttgtacctcctcaggacgcattcgtgaaaaactcagacatgtccagttatccacagttcctccattgatcattttctgaaaaaattaacaagtattagtgtcttcctttaaacacatcagcaagtaaattatgttggctcagtagtttgtatctttacaggttctgcaattatgtttcagtacaaggttgtcaatttcagatactctccaacaaaaaataatgctaatggtcaattcataaagaagttaagcaagtgtacctagaattcactttcaaacaaaggcaatacaaaattaacctgagagagaaattgagttgtaataataaagcaaggcatcaccttgttaatcatgttccactgtccaacactgggtgcacaagttttctcccttccagaatcatgatacttcaactgaaaagcgcaaagattaaggttgttagaaattcccagcagtttaaacaatgcgaacaaaagaaatggaataaagcatagtaccatgggtggaggcagcacacgggctggaacagagactaggtcattgcagaccttgataccgaactcctgagcaaacctatcctctgtatacttgttgtggagaaccatctgatagaagatgaaatggaagtcaatacaaatacatgatattgtcttcattatctcatcaagaaaaaaatatagccttatgttctacggaaatgttattctaataaaatgtgcagaaataaaaggccattaaatgtgagcaaaaatccaaaagcataaaaagtttggctctgcatctacatggtattgtacctcatgaatgctctgttccctctgctggggcgttgacaggttgctctaagaatgttggtcacttgtttgtcattaagcttcttggagtacctctgcccttctacaatcttgcacacctgcaaacacatttgcatgaacaaactgcacacagcatgcacaattcaggtagaggtaaatggatgatgaatcaatacctccataggtaagtatacagggcgagaatcactgccagactgtaggcagggccaaaaagcgtacttcagtctgtaattgtacctatcccagaagtactgaacaacagtcttccttgtcccattatcatcaacaggaaatctaacaacatcaaaccaggcatcagtttggtgaaaaacaagttatgttcatgctataaaacagtgaacaagcatgataacaaaatgcaggtcctaaaaaagatgacaaagcactattctcaggacagtaaaattatgtgcacttcaacctttacacatcaattttgttgaacattgaaggacatttcacagcattgacagtatggatatcaaaggaacatacattgatatctaaggaataaacctttgaaaaggattaaaatgtttctatcacatgtccacaaacaattaatgtacttaccatgcccaagatccataaacaaagacatttcaaatattccatcaacaatctatattgattttctgtatcttaaagaatgtaaacaaaaagagagttatagcagaagcagaggaaagataagtacatcagctggctcataggaatgggggtaatccctgttatcttgtatcttctgatttggtcctcttggtggtttgtttcaatgcgaaccccacgtaatgctttctttatctaaacatcatgaaaaatgagttaggatcagtattgcatgattttatgaattccatcagtaggaatattaccttcacacgatcccggtctgacaaaggtcttgaggtgtcacgtatgttcaggaactcctccacaaattggatcactgtcacaggcttaaaaaaggacgttgcagatatatctgaatgaagcataccgaacagtagttagtatctgaaaagatcacttccattcagagaaaactgataaacagtaactgacagggaagtacctatattcagcgaaaggcccatctgtgttgggcgcaggctctgatagtaacctctccaacactcaagtccctcaccaatgtcaccccggtgaccaaactgggtagagaagaaggatctggacactgtgacataactgcagaaaaagtagttatcaatgcattatttgtaccctagtcagtaaataatcaagcaaaagtcaaaacaaagacaagaaagaatcatacttccaagatggtgactccctaaggacaacatcaagaacttgaatggtttcttggggcatatccctctgtcttccaagcaaaaactgctggaggtggtacaagtctgttctgccagcaatccgaattgtgatcttgtactccctctccgccctgcagaagacaagaaagaaaaaataatatgagactgcaaaacacataattcataagaatttaaatctctagtttgcatcatacaaacctttctttatccttcttttcgggatcaattagcttaaccacaaactcctccgattcaaaagggagtgaaccagcagtatagagactctttcttccatcataggcaggcaatttgccaccaagagatgtcttcccgtgcaacttgatgagctcattgagtacttccctatttgttgctcttgattttgactcaggattgattgaaacctgtaacataatccaaaaagaagatcaacggcctttctattggacatgaggggcagattttttttttataaaaaggaagatcttagagcaacttaacaagaactctacagtaaacatcacgtaacaagtagtttagatcagagcagttaaccatcactaatacaccaaactactcaatgtgtatttcgtctagacctaaatgagtaattcagcaccaagttatgagtagtacacacattatccgagccgattgattagggaaatgaatgcaggccgaacaaaaaaacagaatgccccaaagtaacgaaatctaaatcagctagggaccaacagaaatcaaacaacaaagaaggtggtaaagattgatcctctccattgaggtcacgatagaggtagaactacacttgcaatactacgggtacgacacttacatggggcgggcatccatggcggacgctagagcctggagggaatcgccggcgaagcgttcgaggaatggggagagaagcatggggagagttgaagaatagctgtactacgggtcgaacatgaagaatagctatactacgagttctttaaagcccaccaaagcccataggaacagggccaagaatatcggtacagctcaggaatcagaaaccaaacatcaaagcccaaaaacaaaataagaaatggaactactactaaaagccccaaagcaaaacaaaacatatgaaacgagtttgcaagaattccacctgaaaaaacgttattgttttttgaacgaataaaaaaaaagctaggcgtacaagatcatgaatgagaacgacatcctgaagacaacgataaaattttcatatattttgccaaaaaaaagagcagaaaacacaaaaaccaaaagccacatgtatcatgagtttttaaacgtggatccaccactctacttctgcaagcgacaggcttccggccgctggagagttgctgcaagaagatcagagaaaggacagcggtcactagtccgctgctacaagaaaacaagaatcgatctgaccactttggatgcaaaagttcacgcgaaggcttcgcatacagggagaacaagtttaacatgtcccttgcaagaaaatagcaagcgaacgtatccgcttacacaaaaatggcagtctccaaaagacaacaaaagaaacagtcaaaaccagaggtagaaccgaccgggcagggcacagagaggtttcgtcgtcttccaactcacacaaaaaaaagcaaacttgtaaagtagaacaaaacgatgcaaaacctttgcttgcagagggaaaaacccgaccagctcccacgagggagagatcagaactacccttgtacgaaatcagcaaccccaaacacagcaaccgttctgaagaaaacgggatgcgcgcgcatgtacgccagtgcgtttagcagatgagatgcatgtcacgaaaacgaacgcaacgaaacgcttcgaattggtgagctgcgtgtgctgcggccatgagatttctgtcgacatcggccagatctctagcaccaaactagcagcgagcaccgaaggtgtaaatggccaaacaaacggaggggatcaaaaaatcggagaagaaactttatgcaagaaacgaaacgcgacgctccgaccaacacccacgaactggatgataaactttaaacgaaagcagcagagaaacgaacttgcaatcgaaagaacgaaacagaaggatcaagaagcaaaactgaaccgagcaacctacccttgtacgaaacgtaaaacgttcccaactaaacaacgacatgcatgtacgccggtgcgttgagcacgtgagacgcgtactacatatgtacatgcatatcaccaaattaaacaaacagaacgaaaggcttcgaacgggtgagctgcgtgtgctgcggccctctcgacatcggccagatctctagcaccaaactagcagcgagcaccgaagtggagaaggccaaataaacggagaagaaactttatgccagaaaggagacgcgactctccgaccaaacacccacaaactaggatgagatcggaagccctcgctccatgcaaaactgcaaacgaaggcagcagagaaacgaacttgccatcgacacaacaaaaaaaaatcatccagaagcaagcaaaatccatgcatacacacaacatgcaaggtaaatttaacagatctgaccatcacacgtacaggagtacagtagtagacagcatgcatggagtatgcgtagatctaggggtgggaagggaagggaaagagggtcaggggtgagctcacatcgtagtggaagaggttgttgtcggcgacattgacgaggaagtggttcgcgcggatcatcaccttcttcccggccgctccgaaccccggccgcgcagggtgggcgagccccttcttcgacaccggtgccagatccttgtccgactccaccgacgcctcgccagccggcgcggccgcggccgacgccaccgccgcgggtggcgccagcgcggtctccgacacgaacagcttctgctcgaactccttggccagagccgtagcggacggcgccgtggaggacgacgagggagccggcgcggccgccgccggctggtacggagccggagccgacgagtgcgacggcggaggcgcccggatggtgacgggcgtgctgcgcgcgtagccaccgatcaccggaacccccggggagggcgcacggtacacgcccccgggctggtacgcgccctggtggtgcgccgccggcatcggcgcgccgtagacgacggccggcggccccggccgcgggtactgcggctgaggaggccccggccgcggcgtcatccccggcggcggccacacgaagcccgaggcgggacggtacggcggggctccacccccaccaccaccgccaccacggccagggacgtcgccgcggccggagtagggcggccgctgctcgccgccgcggccacctcggcctccgccgcggtaggccatggcagagagagaggtggaggaaggcaacgagatggaggtgagggtttgggaaggggtggggagtgggtgagtgatgttgcggccttgcgggaatggaaggggagggggattttataggcggagggtgatcgacgaggagaaaccctagctagacgcggtgggagggagaagggggtggtgatcttaccgcgcggtgactgtatgcttgtccgtacggaagagtgattaattaggcggccggttaatcaaacttgctacccaagacaaattatgtgtcattatagaaagtgaatttatgtccggtttttttttgtgttttttgaaggaaaattatatgtcattaagttcatcgatcggggtgaactaattaatctgagtttgttttgttattaatttgggtgttaagatattgtatagaaccaagctatgaacgtgaagttatacatatgtatagtcaagtgtacgagtgtagcaattcataatgtttaaagttaaactgcaaatggcaaaaaaggccgtacgtctagtgtagtatcccatttgacaccatccttccgttttgttttctcgtaattaatattgaagttatatatgtttggtgtggtttttgtgatatacattgtccaaaatttgacaaattaaatactatacagatcaataatgcataaaaaaaactagctagaagtgcatgcgtaccagctggaaggatcagactgaaattacttttttgaaaacctaccgattgaaattactgttgcctagtattctcattttcccagcgatcgagtctcgaattgctgccacgtaatgcctctatcttggaccattttgatcgctatgggtagaaaaggtttgatttaaaatcaagtcgtgttctaattaccttcatgaagggatggtcaagacgaagcgtataggcaacattgatttttactgcagttagaaatatttgagaattgagatgtgaatatacatgtgcaaggcaaagcacgtggacgcatgcagtgagtgatgagatgagtccacacctccaagacaagtcacaacccgatcacaccggacggaaagaagaagattctggaggaacgaatgacccatgcatgcatctgtagccagtctctctctcatgcgccttggaattatctctcgtacggcttgggcccacctgtcattctcacactgtattgtacccaaggtgaaaatatcttcactcctaattaatggctaggtagttttaatcatgggtaagataaataatctatatactattaagctagctactctgtactcctgagagaggaactcgatcaatcatgatcgagtagaactttacactggaaaaacgatactatatggtgtgatcgtctatcggcgattcgatcggcatacgtgtcacgtttgaaaaactggatcactgctcgcccctctctctctcgctctgcaaagagatcgtatcagatcgtcttggctgcgagagccacccagcgatcgagccagaggcggtcgatggctgtagcagccgttcttccggtgaaagctgaggctatgggaacatgcagatgcgtccaagcggtcggcccagctcatccatgcatgtatacgttgcggcgcagactgcatgcagtagtcgaaaagcaaaaggaaaaaggtagagcaaaattttttgatcgtctccaaacccgggttaaaagtgtgtgtggactgtgtgattttaactgcagttaacattatctccaagcccgggttaaaattatgttctgtattctgtagtggctgctgacatgcggctcggtttttctgatcactaatataacctgcgagtaggaacattgcatgcagcaaattttactgtctctatcccggtccgttttttatcatagcgcagaacaaaatagaagaagagctgcgcagtgcatgcgtggtggactggtggtaaaaacgacgaggtgtgtacagtacacgatgcgctccttttcccatgccgcttttggcatcctcgcgccctcctcccctgtgcaaatctctgctgccgctgctgccgcaacctcgcaatatcgcattcgactacgaccaaaccgcggaggcgaggagcgtgtaggggaggggttggtggtggactggtggtcaagcgaagcacgcagcggttcgagccgcaaacggcaaagcatctctggcgctgcgatgcgctgcaccgtggggggaggggacagcggctgcaggtatcagagacaggagcagcgtacaccgcggccaaaagcaaaagggtgggtgatcgtgctggcctaagttggcaatactggcaagctgtgaggctgtgaccatgcatacaatgggtaacccaaacccatgcttctctgtttgcgagacgatcagacgagacaccgcgagtgggtgtgtgtgactgcctaccatggaattgcatgagactgaggccttagttctcaaaataaaaacttttcacccatcatattaaggtggtgtttggttggagggactaaagtggggctaaagtttagcccctctctacaaaacgagagggacttatgtttttgagagaggggctagagagaggggctaaagtttatcccctctctcccaaacacccctaagaccctgtttagatgggactaaaacttttaagtccctataatatcgaatgtttagacactaattataaatattaaacatagattattaataaaacccattcataatcttggactaattcgcgagacaaatctattgagcctaattaatccatgattagcctatgtgatgctacattaaacattctctaattgtggattaattaggcttaaaaaatttatctcgcaaattagctttcatttatataattagttttgtaagtagtctatatttaatactctaaattagtgtctaaatacagggactaaagttaagtccctgtatccaaacaccacctaaatgtttggacacatctatgaggtattaaatgtgaaaaaaaaataattacacatttacgtataaatttcgagacaaatcttttaagcctaatcgcgccatgatttgataatatggtgctatagtaaacattaataaatggtggattaattaggcttaataaattcatctcgtaattttctggcggaatctgtaatttattttattattagactatatttaatacttcaaatatgtgtccttatatccgatgtgacaatcaaacctaaaatttttccccaaccaaaacaaggcctaactatgttaacgttgcttattgtaaatattactagtattgtatatttgtatactctagtactccactacgaggactcatctctgcgtgcagtttgaagcaatttgaactcaggccctctttatttcacaccccaaaattttacatcatgtaacatcgaacgtttaaacacctgcatgaagtattaaacataggttaaaaaataactaattacatggataaagactaatttgcgagatagatcttttaagcctaatatctccataatttgacaatgtggtgtcacagtaaacatttgctaatgatggattaattagacttaaatttgtctcgtgtgttactgacggattatgtaattactttttttattagtgtctaaacactccatgtaacactctatgtaatattcaatgtgacacgctaaaactttacccctctaaatctaaacacccccaagtttgaactggagttggaaaaacaaccgcggtaaaagatgtgcccgtgtgtggtaaattaaacatgcagcactagtggagtggggctactacacgtctacacccttggtggactggcagagtgggcccacgcaccggggcagaatgttggatgagaggagagagatgcttcttgttggcttcgcagccaagaaagaagctcctgtatgcctggctatagctacctggaacatgcacggcgcgctgcgccgcctgcgcacgcagcaggcttcgcggccatgcattcgtccaagcggtcgtcccacctcatgcatgctgcacgtatacgttgcatcgcagactgcatgcactcgaaaagcaaaagaaaaaggtagtagtagagtactagcgaaagcgagtgggcgggtggcatacgtacgtgtgcactccaatacttaaccatgcacgtagacgtagggggtgcggattaaactgcagttattctgtagtagtagctgttctttttttttttctgatcggtaattaacctgcgtgtaacaacagttctattaattagaccatgaacaataatgtacatgcagcaacttttacgctccctattatattacgttccgtttttacacgtatacgggtaaaacgacgaggtccacacgaggcgctcctttcccatgccgcttttggcaccacagttctcctctgtctgtgcaaatatctctgccaccctgcaggctgcagctgctgcctcccactccaatggtccaacctcgcattcgatttggagtacgaccaaaccgcggaggagggaaagcgagaccgaaaacgctaatcagcgcgccattgatcgcgcgccctccccccgtgcggcgcagccacgtggcgcacgccgagagactcgtgagcgcggttttcttttttttttttcggttttttcgcttttctttaggttttcttttggttaattcccggttttatccattttccattcggtttttcagtatatatacttatcgtttggtttttaatctatatatgtatatacaaagtttatatatgtgtgtattcgtacttatagccaaacccttctacaatgtagagcaggaaggagttaaaagaatcagttgggcataagcaccagatacaacataattagaaaaggggcccataaatctctataagtcagacaattatgttccaggttttggacaagttgaacgaaagaggaccataaagctacagccgattccaagcaaaaaaacatggtacaacgcatcaacactaatagcaagcaagccagcatagatgagaaagatatgcatgggagatcacatgtactcctaagtcatagtaagattaaattcctgtttctgaagttactgctgcaatacataagctaggaacaaaataagcagccagattaaattcctatttctgaagcacatccagatctacagacaaccatatatagcagcagcagccatagaaaacgtagaagcagctcgcaaaacaaagcacgacgatgcagatttcgatccctgatactgtaagtataagcagcatgactagatgaggtctgctccagcaccacaagacgtctgcctccaatccttccattccagtgctgtcaaacagaaatattaattatagtatagcttagaaggatggcaacatcaatggcaaaaccaacagtattaatactaccaaataatgtttaactcagggtaatttaaatggcaagccgctaagaagtatagctgtgattaacacaaaccaataagtgcagaatgaaattgcaaacgaagttaattaattaattgcatgcagaagaagtttagcggtttgagttacctgacgaagatgtcaggttcttgacaacctcctcttgattgcagtcgagcactcctccaaatcatcacgatccctcttgggtggaactggattctgaatgtgtttgggaaattctacacccaaaggctgtgttgggcaggaggagagcctggtggaggacatgatgttcttggtgtgcatgttgaggctgaccatgtacaccccttcttcagcagcattgagcatgaaacagatgacaccgttttcctccatgctcaggacggggctagtcggcttgaccttaggcaacccggccttcttgaagccctccagctcccacaggcttgccacacggagttccccatccttgtgccactgcgtggtggccagggtcagagtccaagtcgtcatcatagcttcatcagggggcaccatgtcaatagaagcgaacttgatggagtccttaacgcagttcattgtccggcataaccgcagctgattcttcatggggtcaagatggcactcaggcggcagcgggatgtagcggaacggcacatcgtagccaccggtgagcacgtcgtggcagctgcagtagaggacaccttgcgcgaggttggcccagaaagcctgacctccggacgagaacaccatatgggccttgaagcgattcggcgtctctggagggaagagcgggttcttgaattgccacggcgtggtgacagcggagaaggaggatggcggtggaggtctcgaggatggcggcggcggacacaggcagaggacatcctggaagaagcgcctggtggtttcccggtcggaccgcatgtcccttcccaggagggcaatggtgtagtcgccgccggcgccggcacgaagagggagaggctggaacgtggcagagggatcgcagcggttgggcaggcaagggatcatggagagtgacttgccgatggcgtcgtagactaggtagcggtgggtgcgattgcggaggcaggaggtgaagacgatgaggtcgtcggcgacggactggacggaggtgtgcaggttgagggcccgtttaggcaagtccaagagctgcaagacggaggagccatcgtcgaggatctcctctggtcgggcggcgacttgcacggggggttcgctgaggcggatggacagcttggagagatccggcggctcggcgatctgcactaggagtgacaagccatacaccacctcgtcgccgacgtggtcgttgcgcaggtaggtcttccgatctctacactccatgatcgcccactccgattcttccttgacggcttccttgtccagatgaaccacgcggtccagcacgacataggaaggtgcagaccccatggtagccatcagctgtggatggaggtgtatgaaggcgaaggggatctgcgagtattagggtttctctgggtagaccagtcggacgaggggaaaggttcgatctcaactcgacttacagccacagccgggaagggaacgcgatatggtcaggggcaggcagacatagcgcatatcgaatcgatccgaccgttagatgcatggcgacgcggatcgtggcttcatcgaacggctggtgtctagccccaacaaacacaacgggtgaccaacacctggactaggtgcaccatgccgcactccataattgagtcttctgggcctgcttcaaagcccctaggctcggtggccccggtgccaatataacctggcccgcctttaggataaataagttcacttcagatccctcaggttgtcaacaagtctgaaatctgtagctcaaccaaaataccaaatataatgcatccctcaacttaaaaaaaaaactgcaaataagataaaaacagttttgatgacggtttcatccaacgtggatggtttgatttggttcttatcccatgtgatgttgatgtggcattattagaacgaagattgacaaatttaattaaaaattaaagggacaattacttatttgagcctagtttatagcctaactaccaaattaaccctactcttttaggtttgctcatttaacccaaattgaccgtcttaaatttttttcatgaaaaatattatttttcatgatgttaaccattctattttcaaacttcacaacaagcacttctatgggggattcattaagaccttcacagttcatccagtataaggataacaagcacttctattggtgggggtgggggggggggttcccaacaatcacagtatgaccctattctgtgtaaaaggttggttcaagcacttcagagttcaataagcactactctgaaggttaacaagcttttatgttcaaacttcaaaaaggttaccagctgtgatcctgtgaaggcctcaaaggtaagcattttcattttgtataataggaaaaatagagggagaagtttacagctagaattccctcacaagggtgaattcttctttacaacgaaaaaatagttgcatgttcattacatcatttagcattcagtgattttttgagggatcgaaggacaccccacatgacagttgataaaaagaacagaactaaaccagtgataatggcatacttcaaaccaagattcataagcaaatttaccaacagtcctgctaagacaacgcccacgaaatttgctgaaaaacctgaccagaatggcatgccaagaaccgatgaaattattgccccagtccatgctccagttccaggaaatggtacagccacaaacagcatcaaaccaagccattgaaattcctcaacaggtgcagccttctgccgcgcccgctcaaagagaagatccataatccgagttgcagatgcgcttctttgagagagaaatgctgcaagttttttcaggtagaggataatgaatggcacaggcaccatgttcctggataataacataatggcatcagatcctgaattgtttttgtggggatattctgtatatttacgatgaggcattttccaagagatataaccaaattgtttattagtactactgttataacttataactagcagtttctgttctaggtgtgtcagtgtcactgagaaataacttcatgtgtcgtcgactcatcacaaattaacaaccctatcatatcacaatacaaaggaatactcagtcaaatattaaatttagttgctgccatttcactgctttgctctcttatgctgacaatgcttcaaattactgaccttcccatgtaggaggtccaaatttaaacggtaaacaagcgtgcatcatatttttatcccaaatgttcattcatagattgatatttacacataatctgtcacgttgatcgaatcagcactgatcagttactatatgcagtttctttctttatgtatagtaactgatcagttatgcataaagaagaaatggcagaaaggtattgttgctggaattgctgctgtccagaacaaatcagaaccaatcaggaactatgcataaagaaagaaattgcaaaaggttcttgctgctggaattgtgatccagaactgatcagtcactatacatatagtaaaatctaactaaaacatgtgctgttgtttaattgctagagcctagaagtagcatcagtgactaaaatcagcatggaattgcaggtttgcagttatcatttccaggttatcctacattgtgagtttattccatcattagtttcagtatacatattccattacccaggacctaggtaaatcaggctagcatatttattcataccatattattattttacagtagacccttactttgtttattcatcaaactgtgattttgatttgtggactgtgtgaacaaagcccaaaatttagatggttctgcaaattagcaccagaacattttgtaccactgtatattagcactacattttctaagagacataaccaaattgtttattactactattgtcattattagcagtttctgttccaggttagtctttgtcataactagcagtttccaaaatgtttattagtattattgtcaacccatcacaagttcacaatcctatcaattatcacaatgcaaggactactcagtcagatattaactttagttgctgccattcaactgcttttctcatgtaggagtgcaaagttgtactgtaaacaagtgagcatcatctctattctcaacaattcattcatagattaataatcacacataatccgtcacaatgattaaatcagtactaatcagttactatacatatagtaaagaaagaaattacaacatggttcttgtcgctggaatggttatccagaacaaatcagaactgatcagttaaaacctgactaaaacttgtgctgttggctaattgctagaagtagtactctgaattaaacacttaagtaaaatcggcatggaatcgcaaactcgcagtcatcattttcaggtatcctacattgtgagctcattacatcactagtttgttgacctgtaaaaatgtgataatgatttgccggacgtgtgaacagaagcccaaattttagatggttccaatacaaattagctccataacattttgtagcaatgaatattatcactatgttcaatcccagtgtcacaggcaattcagcgaacacctcatgggcaaagctcgccaaaaggaaaaaggtaagcaagagagacaaacccgagaacggataggacggtgaggcggatggggtcgaggcgcatccagtacccaaccggaatggccccgcgcagctcgatcaccggtagcgtagcgagcgtgaacacgacggcctcgtccgcccacccgagcctccgcagcgacgccgccacacgcagcccgaagccggacgccttgatcgagtcctccgccgccaccgccgcaccgccgcagcagagcacggcgcaccccagcgcgcccagagccagccgcctcgcgagcgcgccccagtctggcgccgtcgcagccgtcgcatcccgctccgtctgtccccacccatcggcgccaccagacaccgccccgtccccgcgatggcgcgagattcgccggtaaccggaggagacgccgcagcgctcaggcggagagcgagcctgggatttgtcgctccgcgagctgcacctgcaactgccagaagaggcggcggcggcggaggcctccatctccacgacgcgagcgcgagcggaggaggggaggaggaggacgaggcggcgagaaccgacgccgccgccatggccatctggatcgaggaggaggaggaggaggcctctcgcggatcggattgagcctgccactttggactcgatttgattttgacggttgttacgaggcaacgattcgtggtgatgcgggaggaggagaccccgaggctacctgcggctgctcgctcgcgccatgggagggaagaggaaacgggtggcgatttgttacactgagaggtggggccggaaaggtgtgggcccaccgcatccggatgtaatagctttttttttttttttttgctggttttggtggtgtgttgatccagtcgttatcaggttgagcgaatcaaaatcaacagaaggaatgcagcaggtaaaccgtcaaaattaacgactaaatgaaagaattttcgatggtgatggccactgctcgctacagacaatcagagattcaattatcagttcttgaacgggcaaaaaaaaaaacaaatattgcttctattgcggaaatatcaataaagaattgaatatgatcagatgatgactcaagagcaacaggcaattacatttccattcccaagtatcacaagtttattgtcttaaacgcgtttactcccacttcacatcgaattttgcagcatttttaagaggacaaccacagggtctctcactcctagcaccgagagaaaccagagcctggtactaaatgaggaatgcaggcataagtttgggatttaggatgaggaggatgaaatgaacatgttgactttcctctccagttcatccttcttagcaccaaccacgcgactaacctccttcccgcccttgattaacacaaaggtcggcatggcctccactttccattgcctcgccacttcctgcaaaattcaggttcaccaccattaacaaaacatcatgttcttgttatacaagaataaaagaagacgaaacactagcggtgtgtgctcgaattgccagacaggcttgcaaatggaattcttaagaaccttttgctacaaaccaaacaaagtacaataattggtctgcagttacatactttataactttataaatcataatcgggacgtacacatttgatgcatccaagtagtgcgccacatagacccatcattcccgcccagctatttattagtgcattcaaacttgcacaataattttgttgtggagtttgagataaatatgagaggatccaatactcaatgatgcaagaatttgtttatgcagactggctaactgaaacttgatcaataatttgctctaaattctactagttgaactatgtaaaatgcacaattatttgtggtggtggatgaacctccacctctgatgaagtgataattcgtcctggtatgctggaaccaaacaaatattctgttaggtatgaatacaacgatacttccatgattctaggctgtaactgaacaaattcttcttatcctgaacaagtccccataaatcatgaatatttatgatgcttgttatggtatcatcttggagtactctacaattccccataaatcatgaatatttatgcttgttatgtcatcatctcagtccatcctacatcttcccaaaagatatacaatgcgctctaaacggatttggtctttgctttataaaccataattgagccatctattcttgatttgatcttgcttaggtgaattcttagaacattatcaagtcgaatcactcaaaccaaagacaagttcatccagacccataaagctagatactgtttacagtacatataaagcatcctaggacaatgcaagacagcaaagaatgtcatcacattgaactccatagtccatatctggttctagacttctagtggccaagcaactatattgcttaaatactacggcaagaaccaaattcatgtgaaatcaaacatctcactcaatacaagtgcgcatgccagccgtatgcaaccagcacgatttctcagaaattatgcaaaatttctatgattttgaaccagctttgaactaaggcgagagtcaactacaagtactgtactaattagtagagtagatagtaacataataaccaatataactcaaattctttcccccttctaactctgcagaatctgtcgatttggcaccgaggtcaagcaaaacaaaagaagaagaaaaaaaaaagcaagacatgccagggtcgtagcaaccgtaccgaaagttcgtcgacatcgatcttgaagaagacggcgtcggcgaagcgtccggccatgtccttgaaggccggctcgatgaagcggcagggcccgcaccaggtggcggagaagtcgatcacgatctgccgcgcgagcagtagacagccaacacacgctcagatccaaaccagcactcgaggtcgaggtcgatcagattgggggggaaacagcgagagcggagctcaccagcttgttggggttgctcttgtgggcgccccactgctcgtcccaggtggccgtggagtggacggccaccacgcgcgagtcgccgccgtcgtcggcggcgggcggcggcgtgaacatcgtcgagaagaaggagcccatctcggtcgcgtgcttggtttggttctctctctctctctctctcttttctcgccttgctcctcttcgcttcgcgtgagcgcaagcaacaactcttcttgttggtttttgacttgtgatgagggaggagagacgactctttgtagtcttgtggagtcacctactcctcttagccacagaaaatctcacgcccaattttactatcaacggtccagattaatcttgcaaaactaggccacgtgtcagtaacgaaggatgaaaatgatatgaaaatttccgacaatcatttttgtaaaaaataaaaagtaaaaaagtaatagtttttagcatttctatttagtcatttataaaatttagttttctgttttctatttgcatattgaaatcgacaataaatagttaatttataaaataaaaaatagaccgttttcatcctatcgcgtgcctttttaggtttcgttcaatcttgaccgtccacgtgtccaaacaaagcggacaacgatgaccaaccactgactcagacaaggggtggattgtggtgtgccagcatctgaactctgcagatgtgtaaagccaagttgattccagacttgcacgggtatatgcttcgaggacacaaggaaatggagacccaaaaaggctaaagaacccaatggtttcttgccaaggtgcatcctcttgctgtagtagcatagatgatagaaccaccacacttttttacatttccaaccccactggtcggcagccatctacaatttacatgacaggaaagaatgaataaatactacggagaagcttttgttgctgcaggctgaggctgcagaccaaatgtgctagcttagctactggacatgaaggattcatgcttcatgaaccgagcagaagagagactacttgacactacatgttacacatttacaatctaggcacacggagcgagatgagcttccatggtggtatcacatcctacttgaaaaggagtagagcagcacaacgagcccaccctgtgagcgctgctcactcaatgatctccactagttaccagtgacaatgtggcattgagcttctcataaggggttgctgaacaaaaccagttaggatctagtgctccggcttcggggtgcgtgtgacgaattgcgttacagcatcctggtttacatgaaaaatgaacctcatatcctttatctgcagtaaacatcgacagatcagtaaggtgagcgtgagtatacttgatgatgaaaactaatgacattttcagtgaaacatctttcaaacaagccaacgtgaactaccaatatgtactaacctttccaacaattaattattgaaactcagcttatgaatctatgaatcatcattatatctctgaagattattatgagtgctacaccaaatgctaaaataaatgtaaaaggagctaaaggtgagtacttacgctgaaaggcccaataagattaactgtttaacatcagtattttggcatgtctgacgaataaggccaagataaaaatggcaaagggaacatttttaacttattccattatatatttgaaatgtatgtgattatctcaagtaaaattttattttgattcctgagcattagccatttcagtctggtctttatatataacaagcataacactaggcacgtctcatgatacatcgtggatcgagtataccaccacatgccagtcagccagtaagcggtgcaagctgtggtacagtggtaccctaaacaaatcatacatgttcaaattattctaagcactagtactaaaattgtgtagcacatcaaagttaagtatggaatggcaatccttcttgctatctggcataataagaatatgaacagttcaataaccgccctttcataataacaattttcactaatggactccaggatctggtaacacttaacaacaaagcatagtcaagattttcttaaatatctattttccatagtaattacatggataatgaaggatttcaaccatgtttatcagtacaactcattccaagttctaggaacagccatacgtcatatatatcacactgaaagttcaaagaatataaatgcacatatgcaaatttttataacatatgaacacactactatcaaaagacaggaccagaacaattactacagggatcatttcttaatcatgaggttacaaattaattgtgtaaacaatgaggtttgggtagtttactgcttttggttcaatcagtgataaatgaaggaaacaggaaataccagtacctcaattaacgaatctgaacttaagatgatgcgtttgcagcttggtacttccttgctattaacaaaaattgaacatttcccaatgtttttgatatgaaaagaaccagcttcatccatcttgataaccgcctaattttcatagcacacatggatttatataaacacaaaggcccaaagaaaaagagaaaaagaagcagatgtggtaaaacataatcccaggataagtttttttagggtactgcacgagcaaacaatgggggttaggatgtaatcagataagcctactattaattacatgaaaacagttgctagtttaagcagaacgacataatccgatcaagcactagaaaagttatgctgcctagttgtatgttgtttaggaccatttccatgattacagacctgtagttaacataaatgactggaaaatgtattttaaattagtcataacaactcactaacctaaggctcagaattagtgataaatcctacctttcatcatggatcgacgctatgtaattttcttgcttgtacaaaaaccatataaatgtcccatattttaatgtaccgtgtgggcctccctcactgttttacagtaaaaaaacaactcactaaccaaaacattaaagacaccagtttctaactgaaaacacaaaatcatgacattcatgattaatatatatctggaactgccccataaaaaaaagccctagatgaacataaatcatccaccactagatatttgaaccccaaatatatccaatttgataaagttgacttcacaattcgagcaaacattatggccagcatgagaacaacattaatacatgatcaatgctttttttactgtcatcaaggctgcatagacctagtaggctggaaattggagtaggaacaaccataggcactaacaatacattcaccttagaacacaccacagcaaagagcatccaatcaaagcgcgcatgaggaaaataagaaaatataaatttaacctcctccaattgtacatgacatatatgtccttgccttttgtaactcaagtagtcaagtcaactactattgggcattagatgcttttaataagttgtagtttaagtctcataatgtaaactggaggatacgagcaaatacctgtctacgagatattttgtttg

SEQ ID NO: 8161 - DNA, 22166 bp, Oryza sativa
agtatgggcctcacgtgtgtcacaatctcgatccggccttccggcccatctatcacggtccacaccttcgccgcattcccgtttcggcccaactagtacgggcccgcacgtgcgaagaagcctaagcctatgggcgaaaaggcccacacaacgtgggcgccacttcacgacgtggtgggcagccggaacggcggttcgtccgccgccagttcgccggagcaccgccgcggtcctaccatccttccttccgtcggatccatctactacggccggagatctcaaccagccacctacctgtatggatgcttctagtagagtctctcctaccgatctgcccgcccctgcccccccacgggcaccgtcgccgtcggcgggcggcaatcagggaggcaacgcgtcggcgaatgcgagcgctactcaaggtattcacctatgcaggtggaattctggctcgaatttgatattgcgtcaagctcgcccaagtcaaaagcccctctccccaacttgcagttgttttactgcggcctccagcggtcgccgctcctgcggttttccgccatcccgggcgcgcgatgccgtgggccggcgagggcggcgacacgttgtttcgagaaatcgatgctgtatataaacgattcttcagagattggctgtggaaacaagagccatttgatcttggattgggaaggtcaggttgcaagttcagttccattaccagaatcgctgctactagttgctagaccatggagatgcgtcgccttcttgtcttgttcgctctcctctccgtcaccgccgtcgtcccggtgttcttatggcccgacaagaagggcggtgctagtgacgtcgccgtcgtcgtcgcggcgcctccgttcaatgcgtccagcgtcaccattatctcctggaaaccgaggtatagtggtgtgatagtgataccggaggaagtagtagtgcagggcggatatgatgtttttgctaagttctttgtgttggtattgtgcaggatatttttttacaagggcttcctttcagatgatgagtgcgaccaccttgtcaagttggtacgaattaaacattatcaggctatttatcgttcttaacatgctaaaatgggaagtagtggataagtttggaatgtttctgatcccaggggaaggagaagctgaagaggtccatggtggcagacaatgagtcgggaaagagtgttatgagcgaagtgcgcaccagctctggcatgttcttggacaaacaacaggtagcagaaatatgcagctttgcatacgtaacattgttagtctaaatcttctgatgtttacatttatacaagttatgtgcttctcaattgattgtaattatcataattcttcctaatgaaggaccctgttgttagcggtattgaggagagaattgcagcttggaccctgcttccgcaaggtaaacttcttcaggtgtttaatttttctttcagttatgagcgttggttaatgtcagctaacgaatctgcatttgtaacactgctttgtcagagaatgctgagaacattcagatactccgatacgagaacggacaaaaatatgatcctcattttgattattttcaagacaaagtcaatcaactgcagggcggtcaccgttatgcaacggtgctgacatatctatcaactgttgagaaaggaggtgaaaccgtcttcccaaatgctgaggtatctgggttaatctttaatgttagaggcatttgttgtcttagctattaaggctctgaattgtaattcggaatccaaatctgatgcaggggtgggaatctcaacctaaagatgattcattttcagactgtgcaaaaaagggcttggcaggtaatattccaacttaactgagaatgtgttaaacccattgaggaaatgaatctgacaatgttgattatgcagtgaaagcagtgaagggtgattctgtgctgttctttaatcttcagcctgatggcacaccagacccgcttagcctccatggaagctgcccagttatagagggcgagaaatggtctgcgccaaagtggattcatgtgcggtcttacgacaatgcatcaagcatgaagcaaagtgaagaatgttctgatttgagcgagaattgcgcggcttgggctgcatcgggtgaatgcaataacaacgcagtctacatgattggaacggaagatgcacccggtcagtgccagaagagttgcaatgcttgcagtttatagaacatttcgcatttggtagactcacccggtctagttggtttggatttgacaaatttgcagacggtgagcttagatggttttacagttcttttgtttattttgggtgaggtgtgtgttccaaactgccaatagccattagttggatacattttgttgttactgcaaatgctgaagacagtgttatgtaactcactgttgtgcagttcagagtgtcatgctggcaggcaactacctgttccccctttattttttttgttgtcttgcttcacagtggatttcagaacagaaaactgtgtcagcttgtctcgatgataaccaacttgtttggccctttccacaatatagaagccactttgtgctcagtgtcaagcttgctccttcaaagaaattccagtctcagtcctgcagtgtaaaagagagatgatttggctacagcaacaatgtttgaggcacttcttttgcaaaatattctgagatcaaccagtcgttttcgcccaaaaagcatctccaacatttcagacaaatatttgaaatgaatggacatcagtgagtatgctctaatgtcatttcaaggggaatttaaacatagattcagaatcattacagattttgagaagagaattactttgttatctctccctcagtgaaaaaggattgtgacacatcacctgaaagtagagtttatttcttcaggatgctgctcactttggacctggcttttggacctcactttgccagggcaaatctctcatgtgtcattcttcccctctcttcctcctcctagagttactcaaagatgaaaaaaaatttccccacatacatctttcttatatgtgacctgaatcatcttccaatacgaatgtacttgatggagaacagtggcagccttaaggatcagatacagatagcaatgcctccttcctactaaaacttttcttttcttttctcactgtcttttctccccctctccatccacaagaacaaacaaaccaagaaattgaaaagaaaaagggaagaaaacaacataactcaaaaagcaaagtgcagaaaagcaagcatggctccctcacttcacttgcctttgattctactctcctctcctcacctccatttaggtccttgaaaagcacagcagaatcagctaaagcaaaagaaaccccagaacaaaacaagaagcaaggatgccacaacagcgactgacacaaatccctgctgctacttgcccacattataatatgcagcagccacattgctgcatccatcgttcagctgcaacaacaccactaccacctcccccataagcagaagcaactcgtagagccacagcagcagcagcagcagcagcagcaagtgtaagtgcaggagagtgagagcaagaagaagaagaagaagaagaagaagagagtgagaaaaccaagaaggccaccggttgctgctatgagacggccggccgggtcatcatcggcggcggcgttggcaatggccatcttgttgggggttcttgtgttgatggcactggtcatggacggcggcgagaagaccggtgcgccggcgatcgccgccgggaggaggatgctggtcggagcagcagacgcagggcagatgaggactctggaggatttcaaggccgatgatcctttccaggacagcaagaggagggtgcctaatggccctgatcctattcacaacaggtactgcaaagcatgtttcattctttctttgcttattttgatttgtgtctccaacttctgttcaaaatactagtccaagttttctgtgtcactatgtcatttgcgtttgaaagcaccagaaaagaagtttgttttttttttgaaaaagaaaacaaagaacagaagtttccatattcatgtccatgcataggtttcttgaagtttggagctgctgccttgttggagacggagtaacaaaatgctgcagctcctcatcaattttaaaataaatgaaacttctattgtgttgttcttgaccagaaatatgaagcttttctgttaaggctaaactacctgcatgtttttcttcttttttggtttctttcttaccaacttgtgattaaggtgtatgtttctgagttctgactcagctgtgatgtgagcgatgtgctggtacctaacaaaacatctgtctttttcaaatttgttatcaaactacaacttcataacactccaaacaaaaatttaacaaaacaaaaaaaaaacaacttgtagagtaggctggggaaaaggaggataaggtgatttggtgcccaaattatgtctgggcataaaaggttgagaagaataaagagaatagaatatataaatatatatgccatgcatctcttttctcattgcactcacattcccctatgatgatatgcaaatattttagcaaaagcaagtagattagtcctagtctcgtaatgggcaacatatatagatacacagatcatacttgaagtgattgcattgcatgcaaatgtagtaatgcaggtaatcaaacaaagtacacctgaaagtctaacgtttttcagtgtagggtcacctgaaatgcaaacttgcatgcagtttcaaatccttcctcaaaaaaattgatcatgtttcacttcttgcattctgcaggggaaccggcaagtcaggaagatctccgggccgagcgtagcggcacgcatcccgaggcatggaaggttccgattcaaggaaggcaggcatatctgtggagcaaagagatggttgcattgcaaggaggaacaaaacaagaacaacattatgatggggtctggctgtggatgttggtgtaactagggggaggtggcctatatcttctgtaagcactgctatttaagacagttttaagcataaaaactttagctttttgcaaacaaaggctgttctagtggtggggaaggtttttttgtaaagagagcagtgagtattaagcttccctctcacaacaaaacaagcatcaaagattcttggcaaagggatgtgggcaagagctcccttcttttttggcactagtaactttagacatctaagtagtactttgtttcttttctttttttttttttttgttccaggcattcattcttttcccttgtcactgtgtatcacttacaacatcatatcataagtttgcaacagagaaaaaacaggtcaggaaaggaccagcattttttttaggctctggctcttaccttctgattagatgctgataaaatcaattgcggccaaaactgactaatttatgctgtaaaaacttcaaaactgatctggtatcttttgtcttgtttctgtctgaattactgtactttaaatccccccccccccaaaaaaaaaagaaaaacaaattctgcacactgaacatgccacaagaaaacaaagaagagaaaagagaagagggtgagggagggagaggataaagactgaagagaaaagaaagaaacggcagccaggcagacagccagagctgcaagaatgcttttttctcctccttttgtttcctccttccctctctccttccattgtccctcacctcttttaacttcttttgttgtaagttagtagctttgaaatttgaacaggcatactcgtagtagctaaagtggccttggttgagctctctaaagcaaggactgatgagaagctgtggtaaaataggtgcttgtgtgtccaaaagatgtgaacttctgaaggactaatctattcttttcttgaccagtcatcttgtgtcctggaagaactgagttatatgtactacatgcatggaccagtgtatgcttggactgctttgttcactggaagagatgcagggctaagtggggacaaagatatttcctatttatacatgaacccacacagatgctccagggtcccagcatagaccctttgtttgtattcttctcatctcaagcatagaactatactactgtactgcatactacaagctatagagttgcattgcatcaatgtaatcttcagtatcacttggtctgttttaatcccagacaaaatgagaagaaagtttagtccacattagtcaatacttaatactccctccgtcccagaatatagactacgatgtactaggtgatgtcctatctaatcttaggttgctatattctagtacggatggagtatcatttatctgatctggtgatctacaatactccatttccaaatgtagtactttatcatcaaatactattcgtttttaaattttgaccatttgtcatttttgccaaaaaaaatgtaaatatttaaaaagacttagtattattgaagtgggatacaccataaacattagcattaagctttattcatcgtaatttgaaaaaatattagtggtgaaagttgaaacggtggcggccaacggtgctaagtattattcggggaacctaagttaagcaacagtttcaacaataatatataccacttgtttggacgattcaagaagagacataagatgatacatgcatgcaagctctcacaaattcaagatgcattgagacggtgagacgtgagacctgaggcgttttattgaattttcatagagaattcgttcgttagtacaaacaggaaagttcagatgcgttgggttttcaagaaggccattgagtagagtgttcgtctacctctgaattttcaggaaactttaccaggcctggcaggtgtacccaagccaggcagaggatctcgtcgcgtgatcttctcttctggttgggctcctggacccctggttcttacaccgagctgttagccatcacagcttcttctcctcgggttctgaaaaggttttggttatctatatttataatatctctatatattgccaattggcgtactggtagaatacaacttgtagaagcctctgtgttctgaagtctgaagcagacctgtactggagcatctgaccagtttaggggaggtgagatgcacacaagacgacagttcatgtctcagcatgcaatgcaatgcatgatttgtttgtttaatggcctcttatttacatctttccagcagttcgcaagcaaattaaacttcctaagcacacccttactgaatgaacaggaggattgtaggttccctgcctgaaggtctgaaactgacggtttgcacaacgggagggtgaaaatgggatggctacccgcccatctgttaagctgtgtgtgcaatttacccttatcaaatatatatgaaaatatattttaaatccacctacaaacgtgatgaaagattggttaatcgttattttacaagctcataagtaatattacatttttttcctcgatgtatattttttaatgcctaatcgcttctctagatttgttatctatgaattagagatacaaataaatatccatttccgaatccgattccgaagaaaaaatatgagatataatacgagttatatgctatccgatactatccgtacctaattctaactttgaaggaatatgcgtatcgggatgctgggatctaaccatacttggactaatttcacctctatgcacaattacgaatttttcaagttgtttaagaatttataagaaccattaacatacttgtacgttgtaatagaccaaattcatataattgtgaataagctagaagggtgattggagataaagtattggattcgatggttactcacgtgaaccttacggacacactcatatattgcacgaactgtccaagttgaatgttctattacttgatccagcaattcagaacacgaatatgtgattattacaaaaaaaaataaaagagataaggtttttgttatgaagcgcttgatttatacagcctcgtagtaaaactgttaccaaaattttggcacacggtagacaactcgtatctagatccggctcctctgcctttagactcaaaaggtagagaggtacacagcaaaaatatgtcttgttctacagtagttcgttcgtttgttgtgaatcgaacggctaaaaatacttccaaagtcagagcagtagagctctcagatgatccaaatccctcgcataccacccccggcacgtccatagacttttgagacatatttgtacttcctaggccgagttgctgagttatgatctgctcccaaccggaagcggcccatctggcggcccaacccgctccgcattacgcatttgcactcaacgcagcgcgacgcggcgtgtcgcgcacaacacaacgacagcgcgcgcattccacctcctccacgcctgcacgaacgtactgtactccactactgctgcgtcgcactgtgcattccaccgatacggaggccacgtcgccgtccacctccgaaagctagtagtattactgttactgcgcgcgcatttacacccaccacttgctctcatttactccccttcacctgcccaccctctccctcctctcctccctctatttaacccgcaaacgacgccggccaccattgcaccacctcagctcgcgccgcggaacacgagacacagagagagtagagatcgagatcgagtgctaagctagctagagtcgacgatggcgaagtggtgcagcttcggcgtcgcgtcgtccctcctgctctgcctcgccatggcgcacgccgcggcggcggccagggccgtgcccggcggcgacggctcgacgacggcggcgtcgctcccggcggcggcggcggcgggcaccggcgcgggcgtggaggacaagaagaacctcttcgtgggcgtcggcggcatgggggacctcccgggcttcccggccgtcggcggcggctacggcgggggcttcggcaacaacggcggcgccgtcttcagcggcgtcaccggcccgctcggcggcgtcgggggcggcatgggcagcgtcggcccggtcggcgggttcggcggcgccggcggcggcaccccgttcggcgggttcggcggtggcggcgccggcggcgtcacgccatgaaccgtagtattactgagagctacgtacgatctcatgcatctacgtgcgccgcgtgcgtatatacgcacgcgtggtgcacgtgtagtagctagtgtcatcttttgcttttgagtgtcgatctcaggtgagttgcatgcatggttgggcagggaggttggagtttgtaaaagtttgggtttgtggcctgatggcaagagtcgagtttactagtagcttctagtagttgtgtgctaagttaattgtgtgttgttaagtgcacgtgatgcatgcgagatatgatgactatctttagttaatgactaaatggtattcatgtcgtgcgtgtaaatgttctctagtgggaatgtgggatggcgactcttacctgtttcatggcacagcactggaactggatgtatcccccacaaacgatgtgggctcaggctcagagcctcagacaccatatgcatgacgacgcatggcatagcaaagcaatatgccaatatctatcgagcatgtacagcctgagcaaaagcgccatgaagcagctgtgttcttccccatcttttgcaactcatctctttactttttcccgcgtgcacactttttaaattgttaaataatgttttttttaaaaaaatctatactaaagttgttttagaaaaatatgttaatccatttttaagaaaactaatacttaattaattatgtactaatataataaagattcgttttagtgcgcgtaggattagttccaaacaccacataccaaacacccgattcactcattcacagctacagtgctcatttgcacaagcatgatactatgtactagtaggccaacttaattaattacacccaatccgtaaataaagcatactctatattgctgtgttcactacagtactccggcaactagcagagtactgtacagtctacatcgagatgggagtaggagtttgtaggtaacgtggcgatctcgcgatgaaattagggtgtgttcagttccacgtcaaaattaaaagtttaaagaaaaaagttaaaagtttatgtgtgtagaaaaattttgatgtgatagaaaagttgaaagtttgaagaaaaagttagaaactaaaccagaccttaatcgcgaatccacgatgctgtttttggtacgagggggtagtggactagtggtacgtggttgctcacttgagcctgctagacctagaggagtactactcaacttcaattctgatgacagttgacagcacggccgtgctgcgtgtgctgcatctctcgttgcctccacatcatgctgcagcggatgagtggagcgatccttggaccttgggatctcgaaggcaaggtcagtagtcgcatcgcaccgtacggtcccggagatatggtactacagtacatttgtaaattattggtcgctttgactttttcttatagtgtttaaccatttatcttatttagaaaattagtataaatataaaacagataagccatacttatagaacttttaataataaagcaaatcacaaacaaaataaataataattctatgatttttttttgaataagacgaatgatcaaacgctacaaacaaaaactcaaaacgataagtattttgggacagaggtagtacattagagttgctttcgaggagatctctctagtactcctatcccacagcgccaagctagccaagtactttctccatcccaaaatgtagctgctcagtacgggatgtgacactacctagtacctgtccagattcatggtattagtagtgtcacatctcatactaggcagctccaggcatgacctcaacttgggctatggagattcgatatggctgcattgattgatcgaatcccgcctcgagatctattcctatctcatctcatactcctacgcatagacgtatcacgtaggtgaaccggtcaagggatcagggccactccactcccctcgctctcacgccgccgctgcttggagatgttggaggtggagcaagcccgagcgaagtagcgaagtggtgtgccttgacatggatcacggtctcacggacgccattggtccacccgtcggtcgagctggtggtacatgtggctgtagcgcagtggctccggataaagcttgggcgtacgccacggcggctggcaccgcaagaggcgccatttatgacttggcagcacagagcgggcagctgagccgagagtccgcagatgagagcaggcagctgagacgcagcgtacgcgggtggccttaaatttgcggcagagctgaagagcttgcgataagatgaaggtagaatcaatgcactgcactcatcaggattggccaagaccaaggttggactcggcagtgcgtgcggattggccctggcagcaacggacccatcgggatccatcaggatttctcccagtgtttgcctccgcgtgccctgcatgtgccgaggtgcagctgcagccattgatggagggaggcctagaacaagcctctgggctctgcctgttccgggacgcaccgagcaatgcgcggtgcacacgcactaatgcactgcaccagctcaacttggaatggtcttgcattcgctgcagcaacacacctcgtcggtccttatctactccttgccaactcttcatccaaaacttgggtagctatacgaatcatcacggaaaaatcagatgttactctgtttctacaaccacgacgttcaagaatcaagactgaaccatacaaaacatgctgacgaaaacagaaacgagcttttatgtttcattgaggcctctgcttccatataagatgctgaaaaatagtagaaacgtgaattttctgtttcattactaccggtaacttcttatattagcaagcagaccaggaggaacggaggcattccgggggcaattaagtgaatctaatcatcatataataataataatagaacaaggaggttaaaatccaagctatacacacatagcatccaaaaatacacgacacttcaacccacaacccactgaccgagtcaccaaccagcattcaacagacacgacagcgtaaacactcaggcgccgtaaccagccagagcacaaactagaaagaaccaaacacctctccaatttccccccctttttgccccaagcaagcagtactgtaagtgcagttgaatgagtcaatttatgcctacttgcatttgaatccatggcacacggacaggattatgataaggatgagcgcaattattatgccaagaacaatcagcttgatcttcatgttttgcagccacatctttctccttacctgtgttcctgcctgcctgaaatcttgggcctgcatatgcccagaagcaaaaagcttagatatattgttatttcagacatacagaattgcagcataatttcataaaatcttttgttacggaaattccggctcatgcttagtaaattacaacatcaagttaatctttcttagagccccaaacttagcaacattcaggttagccagaactaatacaagactgttaagatacacataaatttagcccagatggcacaaaagccaaaaacttcaatatccgacgtggaacaccactccataaactatcaataattatgcatcaatattcaagtttgttccattcctttcacaagctcaagaactctttcagaaatgatcgtaaacacctctcagtaaaaactgatactaattcatgaccaatttttagtggcaagaaataataatttgaacaaatcaccacgtttaaagtgaaaaaagtagcacctagacaccacctaataataaccaaaggcagccagtctgccatcaagttagcacctcggtgaacactggaacacctaataccttgacttgtgttttaccaatagaactatgcatccctaataccatgacttgtgtttttacacattcaacaataacaagagtaatctaccccactagttaccaccagggtgctagtgactagtcaaaaatgaagcacacacccaacgtaaatttgcatccacttaattgtgtcattttagcggtatttagaaatatttggcatctagtaaggaaaaccaactgcataagtgggtctctactctctaaaagacagtattgagtagcactaacaataaaagctccaaaagaaacttgaagtgcaataacaggtacagtgcaggctgaaggaacatgtcaggacctgtgaacgcagattctcggtcttgtcaacgagcagttcaattttctctccacgatcaagaacctgcaaagagaaagcaagatcagaagcattcttcaaaggaaatcctcaatgttctgagcataaaaactgtagaacgaatacacaaacacaaagaaaacaaataccttctcaatattttccatcataactcctttgacttctgaaacttgtgccttcactttcgcaagcttgctaatctcttcaggatgatccacacagtactgcatgtgttctttaagtttcgatctacaaatagtaaatagagaagtattagtcgaagggaccaccataactttatcgactctatccctggcaacaatacgtacccaaaatctcggttgaggctgttcgcagcagcagtagcagcttttccaccagcatatctttttgtgaaatcatccttaactctatccaagaatgcaatgggaatctgccgccctactgattcaacagctacgacacagtatgctgcagaagaagtgtggtattagaaaatcaacgtcacaggctttcaagtgataaatggttaaagtaaatcgtaaaacgggtgctctcatatgagatgttaacagaagatacaagcacgtgtgccaaattttagaaatgtggtaactgtgccaaatttgcaaagctaagatcatatgggtataaaaatcagctacttaataaattttccctgctccttattggaaagtttttcaagcactataatcattgatagttggcaacatgatacctcataactaacatattactacttttagtcatcaccaaatcgtggaatttctagcattaatcaccatggcaactccaggtcttattctgaccaaagaaattataataagacatttcagcactgaaactaaactataaattgcgtgcataatagaataacaaggtagcagccgatttcattcaacgcgctatctgcatgcataaatatgagctgaaacttgacaggagcagcatgcaaagctcacaaacagctgtctactaaaaatagcatgcatatctagagggctcgccattgactaaatactctaaggcactggcttacggctttgcgaataatcggggcagacctaaaatccaagctcttacaccatagctctcctatgcatacagtcagtccagggactaaaaaaccggataaaggtgaaaaaaacaatggataatcatatccacttcgatacggcggaactattgaaaggtcctaatcccaaccaacatctgcatctaatctaaccaacaagtgcgatgaccaaacttctcgcacgaactccacagcgcatcacgatctcaaccaacatcccgatcgccgatgctaaccaaaacgaaaacgacctaaccgcgtctccaacaaatcagcgagatctacacccaccatcccaaatcgagcacgcgcggtatcagatccacgcagatcagatgcactccgcggggaatcgatcgggaggaagcaaaaaggatcggacgggggatgggcgagaggggaagggaactcactgaagccgtcctccacgaggtagttgaacgtgtggccgtcgcagttgtaggtgaacttgttgttgctcgccgggagcttcatgaggcactgggaggcgatggtggtgaagttgccggtgaactccgtgtactcggccaggatgaccgtgccgcgggccacgaacgcgtagatcagcgactgctgccccatgtcctcctccctctctctctcccctcgccctccgcctgtgctcgccgccggtgacgtgctcctcgccgccggtgaagttggcgaaccctagggctagatctcggcgaggtaggagaggggagaagaagggggaaaggtcggtttcgctttgggtagtgggaggggaaatgatgggggtggaaatgggaaaagaaatcaaatttggttggtggaattttcaaaaaaggccctttgtttcctttctagttaagtataggcccctggccgccacctgttttctttgctgttaagcgattgatattagctggcattttggactattgtttttcaactttcaagttgattatatgacctctacgtctggtattatttttctctttgttgtgatggaaatcatcggtaggttacaccgttatagctgccttgtaattaatcaaactaattgatgggcaccctaatgacaattttgaaaaggacagatacagtatttcatttttagccacttgttcgttatttatgactgatgctcacatccacaaaattttcttttgctatggtcaatgctctagaaaatagtatatgtgttgtgaagctgtgatatgtctttgtagctataatgggaaacagagttataaaaacataattggaacataggaaagttatccgggttgataacagcaaaatattaattgcaaatatatgtattatattaaaaccttatgatgtagcacgtgtgtaaagtttaaaaaaacattgttctatatatattgtcacacttttttttaaaagttttcatgcatcctcgctcctctttttttgcttgccctgttctctatctctggtgaatcatcaatcgtagtagttgccacttttttttagcatgcgtataaacagattcctctaaactttcaatatcatccatcgatcctcaaattctggaaatagatagaatacaaaatatgtgcattgaaccacggtaattgttggctaacgccgtgtttagttccaaaatatttcttcaaactttcaacttttccatcacatcaaaacttttctacacacataaacttttaacttttccgtcgcatctttccaattgcaaccaaacttttaattttaacttgaactaaacacaacctaaataaggtggtgcaggtgcagctcttaccctcctacattgaaccaccagctctctatatttgctaagttgcacaagtttcaagcaaaaggaagatttgacaaagaagacatggatgacaccgatctggtttgcccgtttctgtttagtagtgttggttgatcaagttagtttggtgttttatttatttgcttagacttagctgagttgacgttttgttcttagcgtttctgtgtgcagtactattttgtgttcacaagctgagatccccaatatttgaaggactagattatgttagacatgtagtaaagcttgatgtatgttttttttatctaaaaaacgatattcttaacggtgaattgcaccacttctatacagtgatgtttttaattcgaaaaaaagaaagccactacacatatgaaactgttgtcttactaccgtccgaccgcgttatggtgagtagcgttcataagcgcgtgtcaaaatttatcacgacgcaagccatttactcttgagatgattattactccctccattccgtgatttagggcgcaactatatttttttccacgtaccagaatatagggcggcacctcctcaaatcctattcatgtgcacggatgcatgtaggctttgaagactttaactcttggttgtcctatgcatggccgcatgcgagcattgaaacatgtcgggacaatgttgtgattggtgctgcatgcatgcgaagcaaagctacgtgttgggacgagcaaactctaattgatttaacggataattacaccactctttggtctatgcgtacaagacagttacgctctaatgctctatatttaggaatggagggagtatatctctgaccatacattatagtagcagattatatcattttgaagaaaaatattaatgcactagcaaaaatagaaaagtctcaaccggagttgttcccctcaccaaaccggtcggtcggaccgaatctccgatccaaccgcacggtcacacggccacagctcccattccgaatctccgatccgcacggggtagaggtaagactagacgaccgcgtccgccaatcaccgcgtggccaaatcccgagcacccccctcttctcttctccccactgtttttaattctccacggctcccttccactccatccactcttctctaaagcgctctctccctctcgtcaccgctactactagtgtacagtgccactgcgagctctcctctccgcccccgatctggtcgcctcgctcgcctcaaaccctagagctccatccaccggcgagccctcttgggcggaggtgcttcattgctgctgctgctgccatggaccccgcccccacgctcgccgccgagctctggcgaacgccgtacctcggtggcggtggtggtggaggaggaggagggcgtgggttggaggcggcggcgtccggggtcacggagcagagcaatgggagccgcgggggtggcggaggaggaggcgcagggcggaggaggcagcgggaggcccccgcgctcgaggacgactcgtccaggatcgtctccacttccggaggaggaggcggcggtcaggatttggtaggtttttttatgctccgcattggtcgtgatccgtgtggcattgggtgagtttgggggtaattttggtgtgtcagccttcggtggtgggaatctggaggtttaccagggaaaatggcggctttagactgaagtaaatttgcttgtgcgatctggccgtgtctactattggcgtggtgctgttcatgctttcttatagctctagctgggttccccgttgatgcttgtttttgatttggtaatgtacagtggaacgagccaatctgtagttctggctgcagatagacagtcactgctatgataccagtatgtaagaaaaggaattctcagcataatttagtctcgaaagttccgtaaattgaaaagaacacagaatgtgcacacaaagtgcagtaaggaaaagctagcactgtcaatagtttcgaattctataattagcaaatacctttggtaattgagagttgagaagacactttgtcaatgctgaatgcagttaggcgtaggaacatggggtgtgtcctcctcacgtggaaggcttcaccagatgaggtttcaagccttttgatcgatatagtttcctctggattgcttgtggaattacttctacatcgtagtataatatagaacacaatttattgttcacagctgggctgagctcagttgagagtgtcatgctctgttacacaggaaaacatggaacaagcttatgtgcaatcgttcatccatgtgactttcatattatagaatttctcattcaaccataagtagtgtttgacctttagtatttataaaacctggagtattagattgtcggttttctattgttaacataatggtttcactatatccaagttgattctgggtgctgtttttgacaaggactacttctatagtgtttgcacctttgtaatgttctcaacttttgtcaaaagaaagaacattataagacattcatattatagtactagttgttagcacccagtagtgctgtagtttgcatctatagtgaatttcctatcatgacattttgatttttgttgcttggtaatgcttgttatgtttgattcactggagtgttggtagcatatgaactcaactctcaagctaacatactactatactagtttatttttcccacaaaaatctaaaaaattttacctctagaagaaatggaactagttttttttgaactacccatcgatgtgaatatggcatagagcttgatatttttcttctatacataactgtagccaacactcaacactcgacattatgttactgctggaatcttcttggagctgtttatatttgatcaagctattggccaacacccgtcttaactatccttgtcgaatgccaagtgcttagtaactctggtgcaatgcaacagcttttgggtctttgactaaattgcaacagttgctgctatctgttcacgctggttaaaagctgttgttagacagactattaaattctatttattatctccattctccagtactaactactgagtcaacaacctgttggtccacacaatgttttggctggagacaaggatcctgagtggttccatggtccaccgtataattgaggcattctgcagcaccatcagatctataaccctagaaattgcatgagctcaaatacaagatgcaatcagcatttctttgcttgcatttagtagccaaaggtgcctgtaatttgaatttgaacatgcacacttaatattagtggaggtcatcattgtcaggcattctagttctttgattctattggtgcatttctatgatttttgcctcatatattcaccaattattgatcatgttgataacttgagtggttgttttaacttttgaggtcagaaggcaatatacagtgccttttcccctttaacctttaaagagaaaaaaaaaagcatggatcatgttttgatatgcacggattatgtggaatttttatgagcagactgattcagaagcaaagcgtttcaaggcaagtaaatcaagtggagataatagcagtttaagaacagaggctgaaactgattcaagaaatgctagcaagtctggtgatcaaaatccgccaccaccagaaccaccaaagcaagactacatccatgtgagggcaagaaggggtcaagctactgacagccatagccttgccgaaagggtcagttagtgtacttgtttttgttaccgttcttgtcaatcacagtcccattacaggagtggaaaatctggttacaaatcgaacctctgaagatctttcttttttttggggggcaaacggtcaatttcatgtttatactatgatatgaccactgaaaattctgttcatttttggcaggcacgtcgtgagaaaataagtgagcggatgaaaattctccaggatcttgtccctggatgcaacaaggtctcaacatattttcctcattttgtcccataagttggggtttaaatattatatttttgtaacatgacctctaaaacatccccagttctgtttctgtaattgattttcattggaaaacttttgcttgcttggccaggttattgggaaagcatcagtacttgatgagataattaattatatccaggctttgcaacggcaagttgaggtatgctgtttcaccattggcgctttatgaaatttctttaccctccatatctcagctaatcgctctataatttgctgttatctgcagtttttgtccatgaagcttgaggctgttaatgctcatgtgaataatggaatcgaagcatttccacccaaagatgtaagtcaagtagtaaaattaacagtttaaatagcatgatcattattacaataaaaggtctcaagatatatttgaaagattctgtggcatactatgcgctactggcactttatcttagctccaatctttgactttgaacactgtgttaatatgttgtttttttcaacaagtcccatactctacaggcaagccagctatatgctactaccatatgttttagtttttgaaggcgttatccattgctcccttctgaaaattattaccattttattgaagctatactcctgaatttcaaaaacgtttaggcagggcaaggcatttaatatctgcagaggatacacatcattgaaacattttcctgatttttactctttatctaaccatggcatttgtctgtttgtttagttcaatgtgtttatgtatttactaagtactagtagctctgtggagctttatgtaaacttccaaatttggtttttagtattaaaattgtttattttcttttgggtcttttggttgcagtttggtgctcaggtatacaacacggctcctggattgacgtttgatccacaaacaccaagagaatacgcccagggatcaacaccatcggaatggctccacatgcagattggtggcacctatgaaagagtgacatgaacagaacaaagtcaggatggtggcccaaaataaagcataccatgagttcagtcagaaaccacggctttagattatttttcgaaactctcgtgctccaaattcgatttcattcatagcatggagctcatgtatttagagactgcgagcacagtatttttacatctgtaccgggatacaattctcatcagattcatgtattccacggaatttcggcaggtcacgctcattcgtagcatgaaagaaaagtaataaccatcaataattctcttgctataaatcctaaagcccttcatttttttttgccatcgtatgcttatctttctgaatcttaccagtagtttgttggtaatttgattactcacatttgctacttcgatcttcgatttgtgtttgtactcccaagtcaaagccatcaatctggcaaattttcacaggatagttccaacaatttgcacaaaattcatctgaactcgttctaagcgaaagaacagggtggatgaatctggagcaaaactgcacaaccagaactgaacctcccgaaaaccccgcaaaccgcacgccacgaatttaccatcctacccctgtatcgcagatgcgtctccgttccgtttcgcagtctgttttgcccccacgcgaaatctccttgttgcccttttcccccttctctcttctcccctctcctcctcctctctctctctctctctctactcctttcctctcctctctccttgccctcctcgcccccaatggttgccgcggccacggcgccacctgcccattccgcggcgagcccttgacccacccctgatctcgcggcggcggccgatccggcacccggcgacgtgtcccggcggcgatggcggccgcaacggcggcgatggcggccgcaacgccgccgcgggggcggcagcagcgacggggggaggagggggagggggatgatgc

SEQ ID NO: 8162 - DNA, 29962 bp, Oryza sativa
catttctacccctcattgacatgcattatacttgtacttgtgaggggtagaaacgtcatatcgtgtgtgtggctggatcaagacggacagaaaacgatcgagaattgacggaagtgttaaaaatgggaacatggtgaactttgggtgctattaaagtgaaccggtaactttcggtgctataaaaccaaaaacgtgaactttcaatgctatataaccaattttagctttaattagttaaggcacgtcggatatctggttttaacattttttagcttgatgacaagttgagggaccttcggtgtactttttcctttgtcctgcgtttccgggtcacggactccaggtttcggcccatgggccacggcctcatatgggacgccaccccacgtgagtgttgacgcggcaactgggccgttctttcagctcaatggttaaatggtacttcatctaccctaaaatataacaacataaaaatcagatggaatataatctagacataccccttacatattcatactattattctacttcctccctcccaaaaaaaacaccatctaagacaacgaatccggacattgattttttttcggacggagggagtatctgattctatgttcctataattttcatgatggagatggtaccattattttagagtaggaaagaaccaataaaatgatataaatactgaaaatagattaagaataatattctaagaatttaatctgtaaacaattttttttagaaattgcacgtttagtttttgttaaaaaaaataatccttagttcctctcatcacgaacaaacttacccagggctgcaagcatgtgtattggctttgtagtgccctgcccttgagaaaaatagtagagtacttcattttacaatcctttgattgctgagatgaaattaaacctgtttaggacaataatagtggtagctagtactcgattgttcggcctcgcttaccatatcatgcattccatacggcaaagtggaaaatgtcttgggtccagaaaatctaaggcgcgaggaaaatagtacaggctggttttgggaacaagggacgtggtggagagcaaggccacgctaagccaacacgacctccacggcatgagtaaaacatagttgcaccaaccgtcaggcattcatttcggatggtttctcacgaggacatgagagatctcatagggtgtgtttggtcgctcttgcagcgaacatggaagagagtctcctatataacacttcgagggccatatgccatgtagaagcaccgtgactgctcttagggcaggagcaatacaacacacgcaatcacgcatagcgtgtctctagccctcctgaagatgcgagattggtccaaggccagcattttcacagtgtaggcgcgattttggatgcgacacgaggagacgaggagacgaaggcacaactgtgaaaccttgggtgtgtttagttcacgttaaaattggaagtttggttgaaattggaacgatgtgacggaaaagttagaagtttgtgtgggtagaaaagttttgatgtgatggaaaagttggaagtttgaagaaagagtctggaactaaacaaggcccttttagcttgctaagcgtgaaatgtcagatatgactatccctcaaaattcttcgcgggcattttgccactattgagggaattcaggcccaaatttctgaacgagagttcagcccaggggtggatctacaggagaagagccggtgtcagacgataccgacgactttcggcaaaaactatagcgaaactgcttatccatatgctataacatcatgatctaaatataattagcatactatgacaccgataagcacgttctgacaccaacaaatcgattttctggatccgccactgcttcagcctatacgttttccttgaacatttgatcagctcctccaccactgggctctcgtttccacatgtgcttgaccagccgaaaggcgagactgtctttggcagtttcagcgttgcaaaaacacaaatgtttcagtttcagaaacgaacccaatcgatcccccctactactgcagttgctcacacacccacaccccgactgcacacgtcgcctcgcctcgtctgcgtctgcgtctgcgtctgcgtctccgtctccaacccaggcggcgtaggggaaggagaaggaaggagagatcgcgcggcgcgctggctgtcgctgtcgccgtcgcgcaggctcgtccacctcgcgaaatcgtgagctcgcgcgccgctccgggcatgcagggcgccacgccgggcgatgccgctggagaggaggtgggaggcggcggggacgtggtgatggtgaggcgggcgagcgtggcggcgtgcctgacctgcccgctctgcggccgcctcctccgggacgccaccaccatctcggagtgcctccacacctgtgagtccccctcctccaccctgctccgctcacagtccccacgctttctcgccccgcgcgctggggaggtcgtccccacgcgtcaaatctgcacatttgcgcggtgattcggggtgggtttttgaggtgacgcatggaaggtggcagtttccgccgttccatgagctatttctgcgtgggcttatttttttttccccgttggtgcgtcaaaggtgggatgattttcatcgttcgttcgcgaaataggaatttggttgtgccatttccgtggggttttgaggtggtgcgtgaatatctctcgatgtcggcatgtcgaggagggcctagcttgtgattcctgggttcgttgctcatcagctcatgtgttctacggggatttgggatgaggctatcaggccagtggaagtgatcggttgcggtggacttttgtgcggtgacgaattacgtttgcccagaaaggggcgcacgctacttatttaataatatttaatttcatgatgatctatttcttcgatgcgaggattagaaaacttgtcaggcaaatatacaaaaaaagattaatgaaatttatgaagagagtaggaaggtcctccctattttcatcaggaagaaaaggggcaagaggatgtgtaaaaggtggcacttttggttagtgtagtgtatgccattttttttttattgtcaggtgcttaaatgcatgaagcaaaggttgcatacacatcgttttttattgtcaggggacttcattctttgaaacatgttgagtggccttgttataaacaataactagttactgttcattcttggaaacatgcttagttctttttctttctagtttgttgaaatatcgtaactgtgccattgtatggatgcttggcatgtaatactgatcgaatgatgggtgagctcattaggaagttaggcaaccaaatatatagataatctagtattctgtattcggttggtccttcttatttctaagttattctggaataagagaggagaaaaatcctaatgtgggcacactgattcattccatattttttatgactcttgcaacgtattcataaagcaatagtattggagtaacaactctacccagtgtccaaccaaaattttgtaaatttggggagtcttactgccaacagctgccaatagaaacacttgatctgttaccagttaattcttgtaatatcgtgcttcaaccattgatttatacctttaaccagtctgcagaaagtgtatacatgaggagttcgtcgataaggagtcctgctgctgccctacttgcaacattgatctggggtgtgctccgttggagaaactcaggtttgtctttgtcactgtttccctgaaatattttatctacactattgcatacttctgaggcttaaaaccattgttcagttattgtattattttcttttctatgtcatgcccccaatttgatattgcgatttcaatgcagcgcatgtacatacacctaagaagttagtgacatttgggagttgggagagttttttctttaccacctctgctctcttgcatgtacaaatgagatagtcttctgtgagcaatcatccttcctccatcaatataacaactattgtgtcctgcttttttgatattattatgcatacaacactatgttcttcctcaattgccagtgataatcgtgattttgcaataccagcctagtgctgtgccactgttctgtttgcatcacatggactgttataacatcataataatctccatctgttcaatcttggcttggatggtcttaaagactttataattgttttgtttttgctcggtttattttaatgattagttgtttgttcgttacaagttataacttcgaaaggggtgagatgagcccaaacttagttcacacgatcacaccttgattaatctttagccgcttgataccgagttatcagcagcatataacaaacaagttttactttccctttttgtgatattgtagcttatggtattttcaattgtgttttgttcagagttgatcacagtatgcaattcgtaaggtcaaggatatttcctttcaaacgaaggaaggttgagaacccagaaatcatttgtccagttgcgtcacctgtcaagaggaaagaaagatcactatcttcacttacaatccctgctcctcaggtgtctatacagaaatgtttgacaaagaggagaacgaaagcttcgtgcttacgcaactttcctttggtatgtagttctcttgtaatagttcccctgagaatcggatgtgtgaagaattctaatttcttatctgtaaatccactattagaattgttcaaatgaatgtgactctgcatcaccagaatgctgtaagcaaccctataggttaggtcataccatgtatttccattgttttagtgccatagagccatctacatggtatgccagctattgtcgtattattgcagctggcacaatcacagatgtgtgctaggtaacagttcttggcactgtccgcatgtgttattggtatgctaaaggttgtgatagtcaacatgtgaatatttacgggctaatacataacaaatggttatctgaatcttctgaatttatttatagtccaggcgacattaatgatagatgcacaatacttttattttgccttcaaaactcaaatagtttcctacaaattgaggcaatccatagaaatttcatactccaaatacctttgttccaaagacatataggaaagtttcgttaggattgaaattcttcaaaaatcctccaaataccttttgttgcaaaggagatgttatgcatgaattaaatgcaaccgatgcccctcccctccaaattctaaatcgatgcgatttttattgctgttgtgtagagtatttttttctggtctgattttaatgaataaattttcttttccccgccttgtgatgtagcattctacctcgaggggcagtaaagatacatcaaagaaacttgggggttggagaccattgggttgtcaacttaagcttggcaaagacaaaaaatctctcaaatcaagtgtaaaagatacaaacagaaccaaaagtaagtctggtgatacagatgatggtgctcctgctagtaaagcaaaggctagagaaccctttacaagatatgggcgtgcagctaagaggactggaagaaagaaattgctcatgttgaagaacaaaaagaaaaggttcaaggcaaagcagcccagtaaaaagaggagattccgagcactatggttttatctacttgctgcttttgaccagtgagaaacactagacttgtcttgtgagatttgtgccgtttcttcaaaggaaaagcagaaatcatgctttgtgtttgtaattatttcaggagaggagtaccaactttaccacaactaccagcaaagtatttgaggatcaagtgagttatttggttgcacttttctagtcaaaacagtatttgttaagccacactaacaactgccttttgttatatttgtcaaagggatgttgatttgcctgcttctattatacagaagtaccttgcacagaaacttaacctctcaagtgaaactgaggtatgtctttacatatttctttcttgtagtgatcatcaaaaccagtctgttttttgtgccagtatccagattagttagaatcagcagtgagaaagaattccatcaatatttggctttcctgccagggacaagactggctaactggagctaaaatctcacaatctaaacatagttagatgtagttatggcacattcttagctgttctttggaggaaaacaacttacttcatgattatatttgaaaaggcaagaaaattcaccatactgtttccaattggtgcttgattgaaggctgaagctgaccggtgttcagttgattttgtgctgtagatacttttgccactttgttttgcgcataaccacgtttgtctttgcaatgaacaacataactgttcgctgcttcaagtttcatggtgctgcttgacacttgcaacatgtgaaattattaccctatattgacaaaagttgacagaacattctgctcattgcacagcctattttcttctgctctcaccaacgagtcgtggttgcaggtagaagtgttgtgtggtggcaaagtagtgaaccaagggatgacactgcatgatctagcagattgctggcttgagaaaggaccaaagagccgaatgcgctcatcggtaggctccccggccactggattcatggtgacattgttctatagaaggccagatgtggatgtgtcctcatccccagctccaccccaacctgacactgaaagttgccatagctgatgcagagctttgcttcgtttctgaaccatctgtgattggcttcactcattgggctgtcagcccttgattgatctgcgaatcggttccaatttgtgtgaggctcaagccacaccaattcactaatatgtagataaatgctactaattttacaagccatgttgggcttctgatcatctaccttcttcaaccattattttccttttttttctcttcaaccattgtacctaggtatgtgatctgtaatgagatgttaatcgttaagtatcagttgttagagctagggacttcatgttgtctccacgtagctagtagtactagattatgcttgtgtatttgaatttgctggtgcattcatcatgcatgtatatatataagctctggaattccttgtagttaactggatgttaagctgagaatgtataagctctagattatcagtttaccactccatgcgtgatgaaacgtgctactgcttactctgttcccaaatataaataacttgaaattgtttaccagagatcaaggtttgaaaagaaaatgctacagtgtttcttattaaggccgagtttagttacaaacttttttttttcaaacttccaacttttccatcacatcaaaactttcttacacacataaactttcaacttttctttcacatcgttccaatttcaaccaaacttcgaattttagcatgaactaaacacgccctaagtggagagtggttagggctcattcgggatgtaggttgaacgaacacagtgattggaaaaaaaataggaatgtgataggaatacatgtacaaaacatatgatttgaatatacataaatttcgtaggaacagatggctaggtgaatacacagtacagggtgtgtttagttcacgccaaaattggaagtttggttgaaattgaaacgatatgatggaaaagttgaaagtttgtgtgtataggaaagttttgatgtgatggaaaagttggaagtttgaagaaaaagtttggaattaaacttggccacaatctaattaacgcaatataaattcattttgtatttcattctcttctttttctgcttattattattaccccctatgtttcaaaatgtttgacaccgttgactttttagcacgtgtttgaccattcgttttattcaaaaaatttaagtaattatttattcttttcatatcatttgattcattgttaaatatactttcatgtacacatatagttttatatattttacaaatttttttagtaagacaaacggtcaaacacgtgctaaaaagtcaacggtgtaaaacattttgaaatggagagagtattatttttaaaaggaagccaaagtccaaactcgaaatattcggggctcccgcccaaggggtcccgctctctcgtctcctcgggactcagccccaaaaactcaaatcccccgccttcttgtcccctccgcttccccttccacttccacccccacgtcgcctcacctcgcctcctctccccctccaaaccccaccaccacagagaaaaccccagggagaaggacaagggctccacataccaacggcgccctcctcctcgactagctcccgccggtaatcccctctccccctcctcgcgctgcttcgattgcttggttcgcgtggcgcgattgcgcgtgcggtggtgggttttggttggtagttttgtctctgccttggttgcttgtgggggttcgtcgctgatcgtggtgtcgtggggagagctgatcgcggtcgcgtgatgcggtgtgtctgcggcgtctcggtcggctcgcgtccggcttcacgctgtgttgttttctgacgcgatcgtacattcgccgagattttttttttgggtgtatcggcgtggtgggtgaggcggcgattttgttcgtctgctccgtatcatcttcgatcgcttgttccactgctgatgctgtgcgcgagcgtgtcctctatttcgtctgtgcgaatgtggatgagtccatttgagtttttggtgccatttttttcatgctccgagtagcatggcgctttgatggttaatgcggctggttttgttgtgcaggggttgcgaactcggcgatggatcagtgacccgccgtggtgaagcctgcagattctacctataaggtatatcgccccacccctcttcctcggatttactagtagctgaattgttgttgactggtgaatgataatcgagcggaagctgttcaggattttgcactgctgcttgttatgctctgtgtggccctctagtaatgtggctttcattaaatcagtggttgctgcaccactgttgaaaatgcattgcactatttacacattcaacaatctatgtggtataatactaatgagaataaagtgtttattacattattccattatctaaataaattatttaattttagtgcactgtagtacgttacacattcagcaatctatgtggggttgttaacttagcgcatttgtgtttgcacatgggaatgggatcaacttgtgttgtacactagtataactgtagcttccttatggagcctagctcaatatgctatagaaaccgtctgctgaaactaataggattctccaagaaggagatgatgcggtgatggtgtgttgctgttattattttctttttgtaaactgtttttgatgtcatacaaacttcttgatgtacttgctaaactcttgagttttgcattttggttcctatatttgttttgaacttctaattgaaatgcctgcttgattccaaatttacaggggagctatggcgaaaagtccacgttctgttgttaccacaggtcttcttctgtctactttgtaactgcttatctcactttcacataacatctcatgcatttatgatttaactaagttttagtcagatcgtaaggcagtttatgcagtgtagcttacagcttatttttaccattgtgagttactgaattcaactagagccacacacatatataattatatgcctgcatatatcactcataatcacttggagttatcatgtttgatcttgcttgcaatctagaatcttgcaatagctttctacatatacatgcttgacagttataagtaagatgctgatgttgatttacttgtttatatttttaacgtgcttggttcatctgatggatacatgcttgtatggtatccaattatttcaaattgtaatataaccaacaccattttgtctctcaggaacaaaaaggcgtagagcaaaggttcataaagaagatgagcctgttgagaatgaaaacttggagagtgaatttgatgtttccaagaaagagagcaatggtgccactgaacctggtaatgagcctgttgccagcaagagaccgaagagagcagctgcctgttctaacttcaaagagaagtcattggacttatcagaaaaagattcaattatcacaatcaaggaaagtcgggttgaagagaaggaaatagaggctgttaatttgacaaggacgggacctgaagatggtcaaccttgcagaaaaatcatcgatttcatcttacatgatggagatggtaatctgcaaccctttgaaatgtctgaagttgatgacattttcataacagctcttatcatgcccttggatgatgatctggaaaaggataggggaaagggaatatgttgttcggggtttggacgaattgaaaactgggcgatttctggctatgatgaaggtgctgcagtaatttgggtctcaacagaaacatcagattacaaatgtgtgaagccagcaagcagttacagatcttattttgaacactttagtgagaaggcacgtgtctgtgttgaagtctataagaagttagctagatcagttggtggaaatcctcaggtggacttagaagaattaattgctggtgttgtccgttccattaattcaaacagaagcttcaacggaacagtaaccaaagactttgtgatctcctctggtgagttcatatataaacagcttattggattagaccatacagctggcaatgatgatgagatgttggccacactgccagttcttgttgcactgaaagatgaatgtaaatcaagagcaggattcacacatttgccagctatgccctcgaatggaactctgaggattaaggatgggcaagacaagggactgactgaggatgaggatgcaaaattagcaagactgttgcaggaagaggaagaatggaaaatgatgaagcagagaggcaagcgtggaacttcacagaaaaatatctacatcaagatttgtgaaactgaaattgccaacgactacccacttccagcctactataaaccatataaccaagaaatggatgagtacatatttgatagtgatattggtatgtattctgatgatgtacctgtaagaatccttgacaactgggctctatacaattcagattccagactcatttctttggagctcatccctatgaaagctggtgcagaaaatgatattgtggtatttggatctggttttatgagagaggatgatggtagttgctgttcaacagctgagctagcacagttacattcttcctcaagtaaatctggccgggaagatccaggagttccaatttatttgagcccaattaaagagtgggttgtagaatttggtggttcaatgatctgcataaccattcgaactgacgttgcttggtaaataccctggcagttctattttctttttgtattaccattatctccaaggggtaccatattttagctttgttagtcttgatcattgccagctcatgatggaaaaataaactcaatgcatttcggataacatatcttacacacacacacacacacacacgaatttggcattttgtttgaagcatggaattttgcaaccatgttgtgtttaccttctctctaatttacatctggtaatcaattccaggtacaaattacgccagccaacaaagcaatatgctccatggtgtgagcctgtgctgaaaacagcaaggctagctgttagtatcatcacccttttaaaagagcaaagtcgcgcttcaaagctttcttttgctgaagttatcaagaaagtagcagaatttgacagtagacaccctgcatttatatcatcgaaagcaccaaccgttgaaagatatgtcgtggtgcatggacagataatacttcagcagtttgcagactttccagatgaatctgtcaaacggtgtgccttcatcacaggtcttctagcaaagatggaggaaagtaggcacacaaagttggccatcaagaaaaaatctcaacagatgagaggggagaatctgaacccaagcgcaaaaatgggtccaatactgagaaagaagcttatgcgtgctacaactacaatgttgatcagcaagatatggggtgaatactatgccacttatttccctggggatacaaaggaagaagatcagaatgaaccaaaggaaattgatgatgatcaagaagaaaatgaagacaatgatgctgaagaggaggtaaatgttcaagatgagaaggccacaaggactccaccatcaacacggtctagaaagtcgtcagcagatactcgcaaggaaatcaaatgggaaggtcaaacagctggaaaaacagtgtctggagaagttctgtacaaatgtgttattgttcaagacctcagtatttctgttggtgcgacagtcacaacagaggatgattcaggagaaaccatcatgtgttttgttgagtatatgtatgagaaacttgatggtaaaaatatgattcatgggataattctgcaagaaggttcacagactgttcttggcaatgctgcaaatgatagagaggttttcttgactaatgactgtttagaatttgaagcaagtgacatcaaagagttggtgactgttaatatccaatcactgccttggggccacaagtacagaaaagagaattctgaagctaagagaattgaaaaggccaaggcagaggagaggaaaaggaagggcctgccagtggaatatatttgcaaaagcttatactggcctgagaaaggtggattcttctcccttccgtatgataaaattggaaatggcacaggcatctgtagctcctgtgagagaaaaccagttggcaatgaattcaagttactttctgagagcagctttgtctttgagaatattacgtataacatccatgactttctgtatatcaggcctgaatttttctcccaaggggagggccatgagacctacaaggctggaaggaatgtgggtctaaaaccttatgcagtctgccatctgctgagtgttcatggtcctgctggatcaaggaaagctaatccagaatcgacaaaagtgaaagtaagaaggttttaccgacctgatgacatttcatcaacaaaagcctactcatcagacatccgagaggtttgccttttttccatcatctgcatcattggcaatactgtgatttcacctaaacctatcttttttggcctttggtatttgattgttgtgtactttgtgatttgatccaggtgtactacagtgaagatataataagtgtacctgtggtgatgatagagggaaaatgtgaggttcgactgaaggatgaccttccaaattcagatcttccagcggtggttgaacatgtcttttgttgtgaatatttatatgatcctgctaatggagctctcaaacaggtcagctactgccaaatttttcttcagaatccctagttatctgcattgtttccactgggagatgtctttgtattattgaccgagcttgtcttgcatgatctttaaccagctaccgcccaatgttagacttgtgacactgacaaggaaggtacctgcttcaaaaaagaacaaaggaaagcaaatttgtgacattgagctaggtggttcagacaaaccaaaggatgggcaatcagagaactgtcttgcaacacttgacatttttgctggttgtggaggtttatctgaaggattgcagcgatcaggtatgctttgctcatgtagatgttgcttcataggaacattttgactccagttaccttctgaccattggattgtacaggattgtcacttactaaatgggctattgaatatgaagaacctgctggggatgcatttggtgaaaaccatccagaagctgcagtatttgtcgaaaactgcaatgtgattctgaagtacgccatttttgtttaccctctttgatatgcttatcatgtatatgtaaattgtatcttcagcacgtatctctatacgatcatgcagggcaattatggacaagtgtggtgattctgatgattgcatctccacttctgaggctgctgaacgagcagctaaactttctgaggacaagattaagaatctgcccgtgcctggcgaagtagaattcataaatggtggccctccgtgtcaggtcagttgctatgtggcttttgcctgtataccagggagctcctaacaacacattcgacattgcaagccaattgcttgaccttttgacctatccttttttagggtttttctgggatgaacagattcaatcaaagtccctggagcaaagtccagtgcgagatgatcttagcattcctgtcatttgcggagtatttccgtcctagattctttctcttagaaaatgttaggaactttgtctcgttcaacaaaggacagaccttcagattgacactggcatcactcctggagatgggataccaggtgcttgacacttcctcttcacttgtgcttgtgctatagcatttccatttctgtatacattctaaccttgtttacatgttcttaggtccgatttggaattttagaggcaggggcttatggtgttgcgcagtccaggaaaagggcattcatttgggccgctgcacctggagagactcttccagagtggcctgaaccaatgcacgtctttgctagccctgagctgaaaataactctacctgatggcaagttctacgccgctgtcaagagcaccgctgcaggagcccctttccgctcaattacagttcgagatacaattggggatctaccagctgtggaaaatggcgccggcaaaccaacaattcaggtataccctacatatcgcactagcttcactcgccaagttctcctgttcttaagctgccgctttatgtcagttgaataaactttgtatgatgtgctacagtacggaagcggtcctgtgtcttggttccagaagaagattagaagcgacatggcttcactgaatgaccacatatctaaagagatgaatgagctgaacctcataagatgcaagcacattccaaagcgcccaggttgcgactggcatgacctgccagatgaaaaggtactaacatttggccctctaattaacttctcctgcctcctgttttatttttaaactctgtaaacaccaattactgttcattgactgtgcaagtacaggtgaagctgtccacagggcagatggtggacttgatcccttggtgcttgcccaacacagccaaaaggcacaatcagtggaaaggactgtacggtaggttggactgggagggcaatttccccacttctgtaacggatcctcagccaatggggaaggtcggcatgtgcttccatcctgagcaggacaggatcattactgtccgtgaatgtgctcgatcccaggtacacataccaattttcacaccccatacattcactgctgcaacaggttaatgatgcttaactaatcatcaagtcattgactaacccaaacaaacaaattttcaggaagttttatccttcaaagtaaatttagtactacattttgtctcaatcagcactgtagcagtagatttagttctttaaccataaatcaatggatatattgtcatctctcttttcggcagaactgctttgtccattccttcttgaacctgttcaaacatgcattcattctaccgagatgccattattgcatctgcaactttgttgccctttttctgaatcttctgatctgtttctgaatcttctgatctgttcctacatgacactgtcaccattgtatgcacgcagggcttccccgatagctaccgtttcgctggcaacatccagaacaagcacaggcagatcgggaatgccgtgccaccgccccttgcctatgccctcgggaggaagctcaagcaagccatcgacgccaagcgttgagtggcttttaacttcactgcatcgccctcattttttggtcggtccaaataggtttaactaagcattacagttttctatattttgtgagcaattggactcctaaaattaattctgggatggttacatggattaccttttgtatatctaacttgctggtaggactctgataccatcaagatattggttcatagaactatagaagttcagaagagaatcatagcactgggggggggggggatagaaagcttttgtaaacagtacaactcttattaatatgactgcaatatgatgaggattagcataatcagaattaattctcgttttccagagttgtgtattggcaaactggcaatatcagcttttgtgctaggcaaacatgtccctgcttcaaggtcagttgccacttgataatatacagctttcttacacagctaattttttcaaaataaatccttttcttgacctgttggtttattcatatgaacattcgatgtattgcattttgatcttgatgttatgttcagttcacaacttgatttttctttctttctttttattttgagaagggaaggatggatggcttacagttaggcaggctgacaattttcctccaaagcaacttgaaatcatcataatcagcccaaaaaattcacccaaatgagcatactacatcaaacaaatgtaaaactcccttgaaaaatgaaaacgaaaattctatacacaacattgcaagctacagaaatccaagaacacaagcacaagatcagaatcacatcaagaatcctcttagaagaagaaaaaaaaacaccttcgtctcatctcatttcagtgtgttgatgcttcttcatcttgggagcgcgtagccgccataggagctccccatgaaggacgatccgtcgtacgcgtccctctcgtcgaggtacacgttcatccggaacgcggcgtgcgcgccgatggcggcggcggcgaggacgagcgagacgagcaggttgaggccggcgcgggagagcgcgacggcgaggacggtggcgacggagagggcggcgagcacgacgcggtcgtcgacctcgcggcccatgcaggcgagcggcggctcgccgtcgccgcggccgaagtagaggccgagccaggcggcgaaaagcgcgaggaaggcgagcatggagaccgggcggtagacgaggccgaggaagacgagcacgagcgccggagcgcgtagttggcgcggaagtaggctaggtttcgccgcgcccgcgccctcgcctccccgcagctctccgggcgcgagaacgccgtcgcgtcgagcacctccctccacgccctcggcctccccgccgcggcgcccgccaccgaccttgcccgcgagaagaacgccaccccggccttcgccgccgtcgcgggcgacggcgagggcgccgacgtcgccgtctacccgtccccgcccaccaccacctcctcgcgcttcaggggaggcgccgccgccgccgccgccggcgggacggtgccgtagcgcgaccatgaggcggtggaggcggccatggcgaaggcgaaccctaggctgcgatcggagtggatctaggaggccgcggattctagctggaggagacgaggaggggaaatgatttggaagctgtttttttttctttgaataaagaactaaagatccaaattgcaattggggatttgcgagttggagggggtttatttatttaaggagtagctcgatcggcatcaagtgggaaagtggcttgttgttgttgtatcgtcggcagatgaaatcgggcggaattaatgtgtgcttcaagtgcgatggaccgtgaatgtgtctatcaagaggacatatggcgtgttagcgttgagcatctactcatgtcacatgcaacaccatgtctcttagaaagccgggtttcaaaattctatattttcttaaagttaataaaaaccttattgatctcaatcaattatattaaggtgataaaattactccgagaacactttctatctctgcatagctaaaatgcacataaccaaaacatacacccacacaacaaaagaaagagatcatatggagtattaaggatcataaaaaattatgtatttaaaaagtgttcaataaatcggtcaattcttttaataaaaaaattaacatagtaacattacttttttaattatgtcggtttttgtcgtgaaatcacttaggagctataattgttcggtggtcgcgttcacatcttgtgaaagattcgtgtctctcaaattctagttaaagtttactcatataaatttcatatagaacaatttaattttccataggaacaggaaaaaccgtagcatacgaaatagtactaggaccttgtctgtttttcgtcgagttgttgtcaagcctatatcatcacagtgcatttgctaacgaggatctgaacactcattccatacacaccgaatatccaaggcatcactcttagtacacaccacgaaatgcctcaaaaattatccacaggaatcctattttctccaggcaatataaacagttaaacacgttgtggcattttatatttttttcagcacagtttgtttgcttgacagcgccaatcatgtccggccatggcaccctaatgttgggtgattccggacaagagagaaacgtccaccaccactaccattttggattttgtacacttgcacgttgaactgatcttcatctttcccgtgtcccaaccgatgtaccaacacacatccatccatccagatctctgcagatcagattggacagcagcaacagaagaagggatcgaggcacgcttttcgcagcctcatcacgccgcgaaatgggcgaggatgacacacacaccatgtgcgtgccggccccgtcacccaaacgccgtccaaagagatgtagaaagacggccccgagcccacgatgctatagtaatactttgaccatttgtttaatagatgacgctgttgattttttctcatatgtttgaccatttatcttatttaaaaattttacgtaattataatttattttgttatgagttgttttatcactcatagtactttaagtgtgatttatatcttttacatttacataaaatttttgaataagatgaatggtcaaacatgtgaaaaaaagtcaacggcgtcatctattaaaaaatggagggagtactgctcctttcgtccaaaaatataatactccatctgttctaaattaatgatctctttaagatttatcacaatagagtaatacttgttccctcaatcacttttaattcaaaaatttctcttttctaccctcaatcatcctctcacatccaaccacacataatttaacaaaggacggtataatttctttcttaaaccttaatccatactaaacactttagaacgacatctaacatggaacgaggtagtacttatttttctcatcaaaactaaggagtaattaacccatctaccatgtaacaaaagcaatgaacggtagtattgtatacacatgtatcatgtatgtaatcaataagtagtagtaaaataacttcttgggttccaatcaacaatttaatttagcacataaaaattacaaatatatcttaaacttttgaaaaaaccaagaaataaaatagatattgtacttttggatagagagattaacaaaccatgcaaaacgtgccgagatcgcttgtcattttttttggttcaaaaggctgcctcgacttgttcgccgctgatacttcaaattttggggtatttatcgtgattttctaatctcaattacaagctcacacgtctagccatacatagtgatatacttaatactccctccgtaggaacatataagtactcatagagattaaggatgaaaagaaaaaaaatacgatgtctcttttaaaactatagggtttgggaaagttgggcgatgattgatggtaagattatttagtaaaaaaataaaatagaaggtaggtggtaggtgaagtaatacctataaatatttgtattcgccgttaaatattaaaacctctaaaatgtcaaaatgcttatatttaaaatcagggtagtctaacaagaaaatgtcgtctagtaggccagccgaaaaccctaggtgtttctcaaattgagacacattccaagttaacatatgagcttcactattcgaatcctgaacttgatactattcgaatcctgaacttgatgacaaaaatcaacaaaccctagagaatttgaccttacattaatctactggacttcttcaaattgttaaccacttcaagacaatcagaaacaaccttacgccgtcggaatccagagtctaaagccgacgaaattgcctcattgcaagccaaatcaggattcagtgaacttatttgcatgaaagccaaatttgggcctttttgcttgcctgcgttttattgggctccaaattttctacagcacatctccaagcctctcaggccttttctggccaacgctcaaatctcggcctaatctctaaaagatgggccgtaatttcggccttccaaaacgacctcgaagtttattgaacagaaagttgaaagttaaggtccgttcagattgtagccaaaataaacctagcaagatggtaatattatcaaaattttgacatgatttcttatttatttagcaaatttagcaacaaactaaacgtagatatttttttgataactttgctaaaaaaatggtatggttgaaaatgacgtcaaagtgaacagatccttattttaattgaactattcgtactaagataagctgtattgttcaacaaattaatgggagacctacactttgattgattgttattgtatcctacaacgtgtaagtgctctatgttttttttcctccactacctggggtatatttatgggttcaaattatgccatgtattcaatcatatcatcagttaaaaggaggttggcttcgataaaaaaaatggagaatttcatatggaattgtttgtgactgacactggtggagatgacggctggaatcgaacagcaagccgatgatatagtatttccaccaaacaaaaacaaatgaaatttctgttgacttccaaaatgttgatccattcatctgccagtgagctggcaaaaaaaatacagccaaagcgacttattcaattcagtttttatttctcccaaaaataatgccttactgaattttagtgtctaagacttgcagtcataatcctataaataaaacagctataatggtttttaaaggaaaatgtttatgagctcatcaacttctttcaagtccctgtacttgataatgagcataaaatacttgaaactgcagaaaagtttagttccatgtccacacttcagtttcaatgttaacaaaaaaaaatataaaagcaaagtcaaatagcatccagaccgtccatcctaccgacggctgtgatcacttgatcaggagcagtctcgttgactttgctaaaattttattccaatggtgttcctcctctcactcccagatggaattctatactccccgaattacttcctgcacaagtgaaggacccaatgagatttcatttgccatcatataatggtagtattctcctcctcctctataaaatctcaccaagatcttattcataaactttttcctacgccaccatttcttgcaatcttgcagcttttcatctcttgttcctcctagattttcatagagaaatctgtttcatccaatcttacaaagctccttttttttttcttttttcattttcttggtcaaatttgttcttcatctttgatcaattcagttactatttactacctatgatctgctcatttctgctagaattcattgatttctcagctgaaaaacactcactgttccattgcaacaccaagggtgcttgaattttactcggttttcgccatggatggggtggaggaggcgaacatggcggcggtggagagctcgaagaagctcgtggccatcctgtccaagtccggcgacccgttccggctgatggcggccgtcgcggagaccgacgaggcggtgtcaaggttcggcaaggtggtcaccatcctcagcaacagggtcggccatgcgagggcgaggcttggcaagaggaggagctcgccgccggttgatccgggctgcctcatggaccacccgttggcggcggcggcgagctctcctgctcccagcaatggccgcctccatttcagtagtagtgctgctactgcgtcgccgtctccggcaacggcggcggcggcttcctccgccgcgaacgtcacgccggcggtggttgaccggagcttgtttcttgagacgacgctcttggatttgaacagtcgcggcgctcctgctccagctgcatccatggcggcggctgccaagaacagctcgaagcttgcacctgcacccatggtgaacagctcctcctccgcaaatcacatccagttccagcagccgatgaagagctttcagttcgagcagacgccgatcagcgacaagttccacatcgagatgccgagaggcgtcggcggcggcggagggaaggaggtgatcagcttcagcttcgacaactcggtgtgcacctcgtcggcggcgacctccttcttcacctccatcagcagccagctcatcagcatgtccgacgccgccaccaactccgccgcggctgcggcggcgccgacgaccaagaagccgtcgtcgtgcgccaggaaggccaccgccgacgacgacgccggcggcaaatgccattgcccaaagaagaagtccgtgtcaatctcgccaccgtttctcggccatttctgccatgatcttgaccgtgttcttgcttccgatttcttcgcaggaaacccagggagaagaaggtggtcaccgtgccggcgatcagcgacaaggtcgccgatataccttcggacaattattcttggagaaaatatggtcagaaaccaatcaaaggctctcctcatccaaggtagtaaatctcactactaagaacaattaatcatctcaaaattcagtcatagcttcataatactcgttcatctcagttactgctactgatcaacttctttgcaattccaattactatgatcagtttcaacttaagacaagaataaccatctcattatcatctttaaaagacaatagctaatgatcaacttatctgtcatgcctattaatacggccacttccaactgatctgcaatctgtaccctgtactctgcttaatcatgatcaaatgttcagatgaaaaaaattagacaaatttgatgagattgattgtgtttgggtttgatgcaggggatactacaggtgcagcagcaagaaggattgcccggcgaggaagcacgtcgagaggtgtcgcagcgacccggcgatgctgctcgtcacctacgagaacgaacacaaccacgcgcagccgctcgatctctccgtagtgcagcaagccaccgctaatccccagacctgatgatccttagcttaatcaccatccgtgtatctatcagcatcactgcaaatgcaaatgcaaatgcaaatataggattctggaaatctgaacttgtccatgaacagctacttggtaatatcaaatttgtgactagcttgttatgtttgatcatgtacgagtagtagctctaaaaacgtataaatgcggacgctcatataaaagtgcacactcacaattatgaacacacatacatatatacagattaacgaagccaccaaatacgtctatcatgtttaagtcttaacagtttctaccacatcaaaaccagctgagttacgctcagttcgcactcactgatttctctttctggaagttgcaacgcacaattcgtcaattcctagtgtgtctctttccgtctgatgtgtagatgtcaagcatgagtgtggttcgaggggaatgaacagatctaaactgctgaatcattgcaaattctagatgcaaacatcaatgattagtgtggctaattgcatttcgtttctgagagatcaacgtgcggttaagcgcgtttcttgggcccttattgtactctgccaccaaccgattcatgtgatctgtttgttactgatgagtcacgataacactgacacttcggtgttttgagaaatgtgtttttctgccgattcctagagaaaacgaaccgtttctcgtcaaattcttgcaaattttatttgaaacttaacccttaaccgaattataaatgtagatagctggatactatcgcattctgaataatacaacggtgctgggtggttgcatggcaagcattggatagccttaatctaatttgcccaatagacttctatatttttttcaatacaggttatacagcatatagattataaaaaaaaacacaagtgaatcacattgcagccgcaaaccggccctaaatagctagattaatatccaaatcaagatactaaacacttgctcatgctaaattccaaccctagatcaactaggttcatcatgtgaggtgatctacctggagctgcttatgacacccacaagagaaactagctggaaacattgacaaaatccaatttaattccatccaggcatggtgttttcacagatgaaacatatatattcagttaaacaaaaagcagatgacagagatgctaatctgtctcgatcagtctctgacaaaaccacatgaagggaaatcaaatcaacaaagtcattaaggcattaaatgcacctcccacaaagagcgccgataattagtggtgctaagcatgtgcacccgtgcaacttagcttatcaattggcaggactgatcgagctggccaaacaattatttcggctaggattaagcttaattatattttagttgtttgtttaactggaactcgtgcgtgctcatgtgattgattttctgcgagctcaaatctcttccagggtgaacaaatctaaatctagccttgttaaataggagtacttatatatcagacaagttcagagctaatgcgacgtccatatgggcttcgaaatatgattagttgatgtgttccttaatgttctttatttagctcagttgctttaccctcgactttttatgccttgattaccttgatgagaagcatatgggcttcgaaatatgattagttgatgtgttctgtgcttaatgttctttatttagcttagttgctttaccctcaacattttatgccttgattaccttgatgagaactgctcagatatgaacttgctcaggatataaactgtgcctatatacggtatagcaacaatcatggcctttggacaatttgaaatgggccttcatattatgcttacacccaagtttcagcatgttttccagtgtatcagtgcaagaattgagtgttcttgataaatttttgcaacccttaggcctacagtacgttgcagttgcagatccgagagcgaacaagcacgatcttcaggacaagctaataagggcatgtttttcacagctcaagaacaatcttcaggacaagctactaagggcatggttggcacagtttcacagaaaaggagtaaaggaagtgctctcagaaaatgaattggcatagctctagctccagcctcacctgtcctgaagctggaacccaaccaaaagaaacggtttcagctccaccaaaaaaaaagggttaagtagactggggtgctctagattcagagagctccacaactgcactccaaacacaacttcaagattaaacttaagagttgaaatcctaccaaccaagccctcaagtaaattctatccaccagaatcattggttcatgccataggtaggttaacacctcatcatcagggatgacagaacactggttcagttcaacggatgataattgcaatagaaataacatgtttggatataacttcaaaatatctggggaaataacatcagattaaccaaggttcaaaaagtggctgctcggtggacacgctattaataaagtactttggagttccttgttcgacagctcaagctacatactggaagcgcaaacagctgcagatgatctctcacttgagagggataaaccgtgaggagtgggtagcaccaataccaggcctaccgtgcttgactggcttgtacgagatggagaactctgcgaggtagtggccaatcatctcaggcttgatctcaacctggttgaaggtcttgccgttgtagacaccgacgatgcttccgatcatctcaggcacaatgatcatgttcctgaggtgggtcctcacaggctctggcttctcaccagcaggtgcatcctttttctgtttgcaagaattttacaagagaacagaagattagcaacctactagttaagtttgcgtgcaaagcgaacataaagacaagatgattgtctgaaaaatggcataaaagaaccagtaaaggcagagaggattggaggaaacaaaaaaaaaagaatgcactaatagaactcaatataccccacactcatacaagcttcacccagatactttgctgaaccagccagagagtaaaaagaccagagttagctaaattttttaatctaccagcaagaaccacattctagcaaaaatatccacaaaagcaacagttcttatatagactttatacatcacacctacataactcactacaaagtaacttccagcttcatagaaacctagtctgaagacagtaccttcaaaattactgccctgatagaataacgacacgccaactaacatttttcagaaccaaaagggtaaaaagactaactaagctagcaagcatggaaatgtgagacccaaatagcaaggaaacagtaataaatactccctccgttccatattactttttggattgaaatttgacagtttatagaaacatgttttccacaacaccaaactagtttcatcaagtccaccatttcccaaaacatgtctatagtatatttgctttgttttgggaatattgctaattttttctacaaacccaacacatcctgtaatatatagaacaaagggagtacaccgcgacaaataacctaaaaccccatgatttggtggtattaataattcactaagaaaatatcagaaaccagactttgtggagtgcaggaaaaaaataaagcagacaagccagaacaattaatgtgaaaacaatacgtaacacaaaaatactgcgttcctccaactgacaaactaaaaacaaaaaaaatacccacagcataacctataataaaactgagacactaaaaattgtggcaaaactactgccaacatgttaagttgccacaaacaagctctgggtagatttaaagcactggaatgaaccatgttataggtttcaacatttccagtgcaaatacacaaaacaaattaatgtcagcgcattaacagaaagtgaataataaatatatacaaatcatatatcaaacatgtaaccaaaaaaagtgttgttctgcatcagttattcattgctaaatgctaaaagcaagtccagaggcatacattatggtaaataacaattccaacctctaaagactgcatcaaatcagccttacatttccaaaggcaaatttgcattgaattgtaaaacctaaatgccgacccaccacagcattcttttgagcgagtgcagtattaaaacaggcagttagtagcactacggtacgaaatctaaagagacgcacaatcaagttacagatccccaaaatataaaaatagcaagataaatacttaacacataagatctgtatcgattccacattttaacaaactttccatcaactcagaacaaatgactgatgagtatatcaacactcaccgccttgcggagcttcttgatgagcgccatgggcttcctcttcaggcccctctggaacctatcgaaaccaaaaggcacacaacacatcagatcaaagccacccaaccacaaacaattgcaagcattccagcgacgattcaaccttctgcgggcgcgcgcggggaagagctggacgaggtcgtcggtggacatgtcgaggagcgcgtcgaggtccacgccgcggtagctgtacttgcggaacgtcctcttcttcggcgctccggccgcggccacctccgcctcgacctcgacatccgcctaccaccaccacccaaaaaaaaaaaaaacaccaccacgcgcggcgtcaggcatcacgagcgaacgcgccgacacgcggctagggttgcgggagaggcggcgactcaccattgttgaaggggttggggagagctggagctcgaggcgaggggtcggaggcgcgagctgcttggatgaggaggaggagacggcggcggcggcggttagggtttgggggaagagctctcggaagcttatatagtggttggtggtgcgcgtcaagggctgtttgagtgggctaggcccacgtgttccggcccggcctggcctggcccatttcgacgctgtaacgaggccttccgctgcaagcctgcagactcgggcccagagtgaacgctgccgctcgtggtcagcggcgttgtgttgacattttgcttttctatttgaaaaaagaagacgaattgcatggtttgctttgtgcactggacggttgcgtcagctagattccgtactttaaaatactgtgtaaatggatggattaacatccaatccggttacttgcagaaaagaaagttgcgaccctggtttcacaataccagcagattcaatctcttgactatggtatgtatgcaaaatagtatattatggataagtggatttttatatgaaacagtgcagtccaggtagaattcatgtgtagaccatcgttccaaatctggcatggatgtgaatggcgtggaaatggatgctaggttcctcttaccatttttggcgtggtaaccacgagataaaccgtggttttaaaaattgaaaagattaccgtgcatggtaaccgcgataactgcgcggttttgtaaaccctgtttaggtctcaaattcagcatcgcttcctaaccgttgccagcacctccaacaagccctatgtccgctcctcgtcttgctcattaaaagagcgtcgggtctgactttaggttggatccttcctctccagttgccactagcacagccaccaagcttgtcattgtcgtactagctagagccacctcccaatccacatggttcgatttaggcctataaaccgacgatttagcagccactgcccctagggtcattgccactaccatgccgaaaagcaccgccacaatagtcatcaccctcaccgtcacacagtcagatatggatgaaaagtttccactagtagccactgctcctagggccatcacctgtaccaccaccatcattgtccacaccaacacgccgtaaagacaatactgtcccatcatcactcagtcaaatctaggtgtagaacccccattggtagtcattgtccctaggctcaccactatcagggagccacacaaaaccgcgcgattaccatgcacggtaaccttttcagtttttaaaaccacggtatctctcggggttaccgcgcggtttcgcgataaccaccttgccgtgggggtccaataaccacgccaaaaacggtaagggaaccctagggccaacactgatgagcatgttgctatgtcgagacaaccttgttatcgtccatgtacccttgcaacctaatctgggcactgctctgtccactcctcagtgccgagaagcctaccaacgcaaccacttgcgccgccatgcgactagatctaggcacgaagacccaaaattcgacaaccaccacctcaggctccactgagacatccaccaagaagcctagccaacattgttcttaccgttgtacggacgcacgacaactggtttaaacggcggccgcactaccagaaaactaattttcccaagcggccaaaactaattttcgcaggcagaaggaaggtccgcctgcaacacaacgtcgattttcgcagtcggggcaacggtccgcctgcgaaaatgcaaaaaaacgaacaaaaaaaatcgccgcacgcggctcgccgccgccgccacgcctcgccctcctccccggccggatctgagaggggaggggaggggagt

SEQ ID NO: 8163 - DNA, 74098 bp, Oryza sativa
cccgcgcgcgttgtcactgccgacaccaccgccccacgccgtcttcgccgccgtcacccccgccggcctcccccctcccttctccggccatatctgggagggagggggcgaggggagccgccgccgccggccgcgccttgccgtccccgccgcgccgccgcatgcagtcgccgtccccgctgcgccaccgttccctccgcaccgctagagaggagaggagaggagagtgagggagagggatctgagggagagaggtgagggagaggataagtgagggagagaatgagacttagaaaaaaactactccagcctagtctattaatattgctcctcattttcacaggcggaccatataaggtgcgcctgcgaaaatcattttcgtaggcgccgcttaagtggtccgcgtgcgaaaatagattttcgtaggcggacagcgaacatcaccccaatttatatttttgtaggcggtcatttgtcttcaaaaatcagatccgactgcgaaaataagacccccaacgttagggaaaatgttttttctagtagtgccggtgaggcggaaggcgttggagatggtaaactataacaaatgaaagtgcttctgtttatagcagaaagtgcagtcggtattattaccccaaaacgcgattaatttactttgtggtaacaaaaaaagagagaagaatttactcgatcggtccttttccaagtctatcgcgtgatcgactgtaaacaacaaatccacaatcacatccaatccaaggctgtagaagtaagaaatgtaggccgtagaaacgcagcaaccaacacggctaagatacatacatgatacacatgtggccatgggtagagcaggctagcaagcagttctatgaaccaacccgacatgcacggcagcaaaccgagcaagacgcagctagtggttctccctgcgaaagcggcactggtttttgctatcagatgcatcgcagttgtgcaaacaagtcaccgtttcatcagttgcgtcatgtcagaaaagaaaacaagtttatcccatcataactaggtataacaaatctaaccttttttttaacaaaggtacaatctatcattaacaggctataacactctctttgtttagactaacaagccagtttatgagcccgccgctgagcgctcgaggtagccaagcctgccaccgttggccagtgagagagaggagaggactggaggtgagagagagatagaaagaagataaggatgatacttgaaaattttttaaacattgaaatggaataaggaggtaagttcgacttctgggtgggtccttaagagattcgtctgcgaaaatagactcattttctatacgggtacgctgagaggttcgtctaaaaaatcgatttttacatacgggtctcttaaaaagccatatgcgataatagatgtcgatctttatatacgtgactaattataatctacatgccatctaaaggggtctcgtccagtaaaccgtttccgtagtacgtcgaatctaaatggaagaaacaaccctcacaaataacaagaggtagttgacagatttctcaactattaggaggtagccgttcactattacacgattgattttcctggacgcccactctttttgtttccatgcggtccgtaagtggaaccgcatggaaaaatagggaaccggcgctggggtatcggccgcatgggaaaattgattttcccgtgcaggcgtcctatcccaaccgcacgggatattcctccctcctttccctcccatccacttcaaatttttcatatctcctcctttttcccttttattctctctcaaccactctcacctaaccaggtccgtaccttatctcttgtcaatcggctcccacctctctctctctaccttatctcttctcaaccttttttcaacccctgaaccggtcggcttcccctcctcctccccctcccctgggagaggcggcagctaggcgaggcggtggccgggcgcggcggcggcctgggcgaggcggccaagccgaggtggcggctgggcgaggcggcggccgggcacagcggcggcctggggctccttgacgctcccaccccgctcgtcgctaactacgttctccaccaacctgcggccaccaccaccaccagacgttccaccgactcggtggcgtctttcctgtccggcatggccacgctcggtgccaagctggtcacggtggtcgaggaggaaggcgaagcggaggaggacgacggcgacttggccggcgacgctgcagcggccgggcgcggcggggagcagcgaggcgctggtgcccaggcgatttttccttttttttttggttccgtgcaggcggtataacacaaccgcacgggataatcgattatcccgtgcggtcggtccacccgcgcgcgaaaatactgattttcgtagacagccggctgcagcgggccggacaaccgcacgaaaaaaatcaaaatgctcgtatgaaaaaatcttatctgtagtagtggttgttcttcgtcgcatgctaaataatggtattatatatgttaaatcaaattataaccgagtctctgtccctttgttcttcgtcaacaacgtctaataatgatcaacgaagacgatatggaagtggcggatccagcatgggggcgacggggtctcgagcccccactactggcgtgaagactacgagagaccccacgaagaccccactaaaattttttaccatatgtagataaaaggagggactgtaattttatctagtttgttcagactccactgctatttatttctggatccgtcacttcatatggtggagactagcaggaggaaaaaaaatctcatgcggccatgccagatgctctgtacatgcatgacatacatacataacccgagagagataaaggtgtagtagttctcttttgcgcacagccactcaacttccaccggtgatacggggtggggcaaaattgatcgaaaccaaaagaacgaaccgaaaagatttaagtctaaaaaaataggtcccgactaatcaaattttatttggtcatcatccttcatcctcggaaagattgagtctaaaaagttaggtctcgactaatcgaattttatttggtcatcatcctcggttaaccaaacaaaatttctcggtatctgccattgcctaccatccagagtgtcctggttgatttagcgattgatttctattagagatgggctgcttctgcctgtcggctgccgtacgtcccgacgcccgacggtctgaccgcgacgagtcaccgacgattacatccatggattcatgcaatttatacatgtactctagtctagtccagtccagccctgggatataaatccagtgcataactgcttgttttagctgtgattcgtgtgaatctttgtatcctaaaactgtcatatgcaactaatttggtcacaaccgagaccgaattgattgatctcgattattttgtaatgtaatttggtcttcagttttggataatcgaaatttcctaaaagacgaaagaccaaccccaagatgatgctatcagctatccattgtcagtagcagatccaggaacttttctaagcctgagaagcatgacgacggataacaagtatatgcaaagattatccacatatgcaatgtttatatatagaacacacacgagagaagatgtgctcgcaattgatgccactgttactgcatgatgtcgaaccatccgttgaatgaaccaaaatgggcctcattaggcacaacgcgtccagactcgatcatctgccaagctaatgccagcttgtgcgctagcttgttttcctgtgaaacccatggatttgcctatagcatcaccggtggagcaaagcaaaagctccatagctatccggtgctgttgggccctaattctacccttgtccactaccacgacacaagtttatcgatttatcccatgaaaaacacaacacatcgaggcctagaggttggcgatgggtgggcgacgggaaaggcaggcgacgccagtaatggagtggcggaggaagaggagtgaagtcttttatccactcatatggatgtccaccatgggccgggttagatgtcacgcgaatgcactaagattggtgcgtacacatatactccctctgtactcataaaggaagtcgtttaggacaatgtttaagtcaaaccttgggaatataaatcatgaataactctcaagttgttgagtttgaaaatgtaaaaattatatgaatagatttgttttgaaaaatactttcataaaagtatacatatatcacttttcaataaatatttttatagaaacaagaaattaaagttgtgttttggagaccgtgtcgctgtcctaaatgacttcctttatgagtatggagggagtactccacacgaggaagatgccatgcactcggcggtcgtgggtgctagccccgatcctcagagtcctctacttgttttattttagataatgaattttcattaatccggtctctatatccatgaagaatatactcggccaaaaaaataataatacaagtgcacttagactcataccttaacaagaggagaacacacaactaagagaaaaaattacaaccctggcaaacacatgtttccagacatacttttatgaaacggccaaatttgacgagtgaaagtcatctagacgctgctgcctctagtgcatcttcgttgtgaacagttggtaccatcttcatctgtttcgggtgagctgatgccatgcgccaccggatagcccatctttatctgtcgtcatccaatcagaactagcctgacgagacgcgagtcgacgggatacactttcgctttattagattgctaggtctccgctgcccatagggccgtcactgtcgtaaggatcctcttctgcctcccagactcccagcccgccaccacccctagggccgccacctctgctagagtccacatatttttgtcgaaatctcagtcctccaccactgtcgctgaggataacctcttccaccaggaatcccatgcctccgccgcccttagggttgccaccgctaatgggatccacctctgcctcttcctccccaagaaccttgtgccaacgcacaggccaccgccaccgccgccaaggagatcctttccgcctgtcttggggaggtccccactgcctgtgggactacctccgcctaaaccaccttctccatgccgaggattggccgtcaaagctcaggccgctgccgtcctccgccacccctgccatcggtcgaaggggcgccgctgccgactcctcgctagtcgccgctacccgtcgccctcccaccacttccgctgtcgtcaccaacaaccacagccaagcgtaggcttggtcgcctccgccgtccatgctctccttcgcaccgctctaaccaagcagcaacgaccaggacgagaaggcacatatccaagtgagggaacgccagatctggcctcatcagctcgtgtcgcgcctcgccgactgccacaatgcctgtatctttcagaaggaattttaccatcattgatacctcctagtacctgccagtacactatgtatctgaaccatccgtttgatttgatctaacggttcataaagaacggtaccaggaggtactgcctagtgagaaacgaaggttggttcaagtactaactgtgaaagggcagctatgtaattggagtaagaacttatctctcccatccctctctgttctctcttccctaccgaccaaacagcccgtggtggctctcgttgaggtcatggccgatggaaggggccatctatacgagaagaggatgatggtgtccaagtcgtctgatgttgcaaggggcttcatgtcacctcccgctagagatccaagtgccatgatgtcctctttatctcttccacctgatccatctcacccgcctgcaaatggaggccaagcaataagttgccctagtgagctcccttacatgcaacgagctactacccccatagtatccacagttatctgaatccgaatgtagcaacaaccatgctaaaaaacgatgattcggcagatatctctttcttgtaataacgctatagtagtctcttttacttgatataatataatcagctctgttgcgcaaaaaggaatatgagaatttaccgcctccttaaaatttttataaatctattgtaaaccacatatccaaaatcacatccaagattgtagtaccaagcgataacgacataacatatataggccacataaatacataatataagcaataacatgagtcactaacatgtaggcccattaaatatatggtccatatcggcagctcaaaattagaggttcgcactgtagaaaatctgttcacggacacgtgtcgaaagttagaggattgtaccgtagaaaatccgtttacggacacgtgtcaagtgtcgaccacaacatatgtacagtcatcgtgccattggtagcaacgctagcagcagtcctatgaacacgacatggaccggtagcaaaccgagcaaacggtgtagtactacatatatgtcgttctccctgccaaaagcaacacgtagtcacattgctgcagttgccctaatgccgcgatcagatgcaatgcaaaccagcccccgaaaaaaaaagttacaaaccaaagtatatcccagataggagtacgtcgcaagctgaatggacatttacatttctgggtaacatagaatacagatagcttaatcatcatgttcgttcgatgtcgctggaccctgttactgaaagcggcctcttccaaaaaaaaaaaaaaagaactttcgatcgaagcgtgcagcttcaattgctcattttgctcgacgagaagagaaaaaaaatggagattggaacgatgtattatgagtatccgcgaccacgagcgctgcgacatgcttcgaaatggcccctttgacatcgcgtgtgcaggagccttttacgtgcagatggggttcaccaagtgtgtagtaattaatttcggtactgaattccgaatccataaggaagaatttaaagaaactaaccctcacaaggaacagcaatatagtattcagatagattttccagcaaggagccagcagcagctcgtcaattacaggctaaattatggctttattatgctgcatctttaactaattaccaagtgcctctctgtacttttgctcttcgtcatcgtctaataatgaccaacaggagcagaaaaaaggagagaaatatcccatgctctgtagatgatgcatatataaacctgagagataataataaaggagtagttcttcttttgctcacagccactcgccttcactgcaggtgatgctatcggctatatcccactgtcacggttgcaaaaactttcctgcgacgaaaacacgaccttttccggtttaaagatgcgaattttctcgctcagattggtgataatttaactttctcgtcgcaaaacgagattgttaatttgcgcgtgcagtagcatcagtttgagctgatttggccgtaattgcagccgaattttgggcatatttgtatcacatattttaggacatacatgtttgtgtgtgcagttcagttgctgctgtttgggcgatggatttgagatgctaaaaatgggtttaagttcgggagaaacacgacgaagtgagggtgcccaggtagaaaagctagggtggtttggaacgcggtcaacctcatgtttagtgctgtcctcgctagcagccaattcatatcccgtgcagtacaaaactaaattcacaattcgaaataattcatccttgaattccatcatatcagcgagtgaaattcatatttagcaccatggcgatagtcagatggccaaccataggtttcgtgaattaaaccacagcatatcatacgggtgagctgatggtacacctgtattgccctaataccatcttgctgtatatctgttcatcgatcttgatccaaatatgatttaaccaactcgaatctgcagatcaagataaggtttatttggttttgaaaacgccaagaaatgagtctatccatatgcgtgtccagttcttggtcgcccagacccacgatgaaccgagaccatgcagctaaccgatcctgggttcggtagacaaacaagtttcgaacaggtttgagttttttctgaacttgatgtccatctttgacacgttggaaacatcggtttgatttcattttgaagcaaaagtttacaattcgttagacgttctatgtgttggaattccaatttgaccagctcatgccaacacataagaggagtactgcaccttgtgcctactttgacctcttcctgcgcaaatcgattcgtcaggacagtaacgaaatctctcaaaaagttcaaaccaactcgtaattccatcacgaatccgacgcagaattcaaactgcggtgagaaaccgacggataaatatgagcaaaatttggatacatgaagaacaggcaaactcgtatcacctggtaggcagctatgctttccccaacggcagcaacgagcttttgattactcccgtgcagattaatccggtttccgacgtgctaatgcaaatgcagctgcagggtcgccgccgagatgaccggagccaccggcggaggccatttctccggcgagacggccggcggccgcgccgccgcgggggccaaacccggggcgaactcgcacaccggcggcgagagtgctccgagggtgtgtcagttgcgccgcgttcaatccggccgtagaccatcgaaacggcggcggatcggcgaggttccaggctcgccggattcccctgctagcctgctacatcttgaccccggctagccgggatgttcgccggagcaccaccgctcgccggccggaaatcccctccaaactcacacaaatccgccgcccagaccagtccggctttgccgatcaatatctcccagaatacccaaccaaatcgaacaaatttacactcgtttgaaagccatgctccgtgcctacaatctggaaaaaaacccattcaaattggtcgatccaattcggagaaaatcgggtgcaaatccggaggagaagcacacttctggatgggtggggatgaggccgggcggccaatccaacttgaggggggcagcaatccgtggcacgggatgaggggtgcacacgaccgttggatgggttcggatcgggcggctgagattcaatgtggggcgcgtggggtggcgatccgtggggaggccgtttcggccaatcagagcgcggcgttggcgtctccccgtcatcgcgaggcatcccactatataaccaccgattcctccgccccgacctcctcacccacccaccggcgagcagctgctccgacaagcgctctctctctctctcaactccggcgaggctcacgcgcgctccgaagcttcggatagcggcagtagtcagtgcattgatggcgaccgacgtggcagcgactgagcccgaggtggcggcggaggaggctgcggccgccgcgcctgagaccacggccaccgccggggattccaagccggcgaaggaggccaaggccaagaaggccgccgcgccgaggaaggcacgctccaccgccacccacccgccgtacgccgaggtaagctttgattcgttgctgctgtttgctgtgtgttctgtggctggatctgacgtggtggttggtcggtgctcgtgcagatgatctcggaggcgatcgcgacgctgaaggagaggaccgggtcgagccagtacgcgatcggcaagttcctcgaggacaagcacaaggaccacctgccatccaacttccgcaagcagctgctcgtccagatcaagaagctcgtcgccgccggcaagctgaccaaggtcaagaactcctacaagttgccgccgacgcgcgcgccggccgcggccaagcccaaggcgaagcccgccgccgccgcaaagccgaagccgaagccgaaggccgcagctaagcccaaggcggctgccaagccgaaggccaaggctccagccaagtccaaggccgccgcgaagcctaaggcggctgccaagccagccgcgaagccgaaggcggcggctaagcccaagtctccggctaagccagccgccaagcccaaggctgcccccaaggctaaagccaagccggccgcgaagccgaaagccaaggcggctcccaagccgaaggcggcagccgtgacgaagacgaaggcgacctcggctcccgcccggaggccggcgaaggcggcgaagacgtcagccaaggacacgcccagcaagaaggcggcgccggcggccaagaagcccgccgccgcggcgaagaaggcgcccgccaagaaggccgcgccggcgaagaaggcggccgctccggcgaggaaggtgcccgcccggaaggcgaagaagtagagctctctctccggcgagcgagcaatctagggcttcatggttgttttcttagctgtttttttttctcttctctttgttgttagttgcgaggaggggtcaggggtactagcttgtaaatttgatatcgcggcgggggtacactggtcatttcgtacccaggtggtggtgcgcgacgatgatgacgacgacgacgagacagtttgtttttagggcaatgtatttctgagtagattggtggagtttttattgtggtaacaatcttgtgatatttgtcgaaatcactttagctaagtaattaattatgcagtaattttacttactgtattggcttgaccacaccctgtattcctctgaattttcagatctggaaattgaaatgaaatataggatttgtgacttggcgtgtgatttgggttcaaaacaagcatgttattgcaccgatcgtacgctgttccaaatttcaggtcgcgtgtggtaccgaactattgttcactttatgagctgtaaaaaaataaattcggtcttaaatctggatgtatctgttgtcaaatttgaatattcaatcaatgcaagtatccaaactgatattaggccccactaatttcgcttatccatttggtttatgggccttcctagtgttatcgggctttgaaacttcaaaaggcccgggcaaatttgaaacttcgagaagagagagagacgcttgtgggctgggctgcctgacaggtagcatacgtggccagccgtttcgttggacacgtggcagtctcgtcctaacggacacacgtggatgccatggacgccgcgggaggccgcctcgatttttgaaaaattgtccggaaatgtaggggtcggaaagtaagattcgctgtacataaccgccagtgtccagtgacctggaactatttggatgcgcgctccgtttggtttgaatttttttttttcacttttgaccctcttccgggcttctgctactttctctgtcctttgctttctctcttgcaagttgtgaaacttgcaattgcaatgctgctctctgtgaccttctctgctactctctcccgctgtctggcttggcctaggaggatcaacggtgtggccttttggctggcacacagaaacttgcttgttccgttaaccaaaacaagccgtttgcgtgcgtgttcgttcaatcccatgttggcattcacaggcttgtttgtttcatagcgatttttaggctatgcctcccgacacggaaaacaaaacacacgattgtagcgagattaattaagtattagccaaaaatacttaaaaaatatattaatatgatttttttaaagtaactttcatataaaaaaacttttgcaaaaaatacaccgtctagcggtttgaaaaacgtatgcgcagaaaacgcgggaagtgggttaggaaagatgggataataacagagccttatacctgtttattttcgttttgttttttttttttgcaaatggtaaggatgtggactagtaagtgatatttttttggcatttattaattatttttgcatggttagattttttttctctctccctaccacactcctgccgtacctgtatatttcatgtgactgcatctttcgtagcagtaacctttttgttatctcatgccagtagccagtgtatatctacatgactaatgaaaatattgtaggtgtaatgtgaatactcaatggctgtaagcagggtttcatttaccgccggggccgcggttaccgcgccccggcggtaagcacggttaccgcacggtaaccgcggtaaccgtgacaaaccgcgacaaaccgtacaaaatttatcaaaaattcaaattatttttcaaatttatttgaatttgacgcggttaccgcggtttaccccttaccgtacccccgcggtaaacgcggtaaccgcggtaaccgcgcggtttaccgcggtaaatgcaaccctggctgtaagcctgtaacgcctaacgaccaaggcaatctaaatctaaagaaaaggttcagaacaaatggcccagtccagaccatccattggcaaagccatctttacacatcatctcccagcccaccaagcaactggcccgttaggccgtcacctctgtccaggcctccaacccaaccacaggcctagcagtagccagatcaggtttgtttgacagaacttcaactctaaatttaacttgaaaagctggtttagagtggagtcgtggagcagttaaaacacaacttcattatttttgtgagatcactctctagctccgcttccaatcagtgatgctgaaactattggttgagctaactacaagagaggtagagctgaagctagagctctgctaaattgaccctttattaatcctagtagtcactagtcaacggaagaaaaatgcttagccaatggctaatactcccttagtgacagcacgttacatatcgaaagcacttttggtatccttaattttgcggctaattcggtcggcgtgaaaggcctacggcggcgcctaatgccagacacacgtacgcgtgctgacatatagagtacatgataattaaactattaatatgatattaaaccactcttcgtttggaaatctcaaatcctgctttatgagacttcatctgtaagctctacaagatgatctcgaaacctgatttacttggagaaagataaagcgctaattggatttggtatcaagatatcatgatacagatgcattagctacccttttgcttacatgcatgaagggctgcctttcgtgctaatcaaagaagatacaccatcatctaaggtttttattatctctcttaagatgattatgttagacaacactactgtagaaaaatcattatatactaatacttctatcacatacgtcttttagtcagtgacacatgcgactaaagtaaattagctaggcttatatgttagtgacttaaagacttaaagttatatagtgacttaagtcaaaggattcttgtcagttttttctactactctgtaataatgtatcctgatggagattatttttgcagctctcattttatagcagtgcaggattgaatccttttgttaattagtaggcactcactgatcactaatcgtcactgctatatgtgtactactaatgtaggagtacatcggttagttgttggtgattagaatttagaagtagagcactctaccaaacacgtcgtggacccaaccaaacagcggcattaaaatgcttgatcactctggaaaaaccggccaatcgagaggtgagctgctgtgaggccaacggttgaccagccgaattgtcaggtagaagcatccgatgttagagctaagggtgtggtgtgacaggtcgcctccacattgtctccccagctatgaggttttggatcttctatgccaattattgcaaaggttcattgtatcagtgctgctatcactcacctaaattttatgtattagccttgacagtatgtagataacatgttgaatggtaaatatgagggatcaaattgacactatatatttgaatagcattctgggtgtgttcggctgcaagtttctaacagctgctgaactgcatgcgtgtatgcggctgcggcgcacagccaaattgcactagccacagctgcaactgcagccgaaaaatggctgccgaacacaccctctatagtttgctagccatgtctcctgcatttagacaattagccgtataacaaaataaccaattcataagagccgtatttgtatgatagaaatttcttgaattcgccttttggtgacatcgagttcatcaaaagaaattcaacacaaaccaaacaaaatatcagatcgaatagggtagcttcattttctcgaaatgcaaaatactatattatatatgtattagcataaattaaaaatgtccaacgatgaacatttctctgcgataaaaacatgtgaatgttgcagagcataacctgtgcttttttgctggcacaaagaggagaggagcccttgatgccaacgcctcatttaagcaaaagacaatcttgatcccggaccaatcaaatcatcaagccaagaaaaatggttgatgctcagcctaacttgtcaactggtttttcagagagagaacatggatggatagtggatttcttattgattgttgatcccacgtgaatagatagtagaggaaaggtaccaaagagaaaggtaggtttaaacacatctgtgatgtggtatttcttagcgttggtaatctaaaataagtgtaattttacaccgttcatacccaacgtttgattgttcgtcttatttaatttttttttacgattagtatttttattagtattagatgataaaacatgaatagtaatatatgcgtgactaatttcttttaattttttttataaatttttgaaataagacagacgatcaaacattggacacggatacctacagctgcacttattttagaacggaggtagcatgtactctagagtagtactataattttttgagctatagtactgtggctgtgtttagatcaaagttaactttggatccaaacttctaactttttctatcatattaatatctcatacacacaattttttagtcacgtcataccaatttcaaccaaaacttccaactctagaagcaactaaccacagcctgtattagtttttcttacattttttcagctgataaattttgattttgaacggcaccgaacgcagcaaatggcatatgaatctgtgaccgtgagctgggttccaccacttacacgtgggccctcccccctcgcccacgcacacggcacacctggggactctgaagaaactctcggcccctaccctctcgcacgagggagccacgcacattttcacacttcactctctctctctctctctctctcgtgcgccgcgccgcgccgcgcggcgagggtggtggtgggtgagcggcgagccgagccgggccacgggcggcgccgcgggaggcgtcccggcgagcggaggggaggggggcatccgagcgctgggggaggtagctcagcgggaacgggaacggggcgatcccccccggcgttctcctccccggtctctcctgtagctagctagctagccatggcggcgaatggcgagggtggcggcgacccggcggcgcggaggcggtgggatctgacgaacaagggtgccgagagcatgtaatggcagtggcaccagctgcatttcggtttgtttgtttattatttttttttttttttgggggggggggggggtttggctcgtggtgtggcgatgttcatggagcaatgttggtggcggagttcatcttccagctgggctgctggatctgctcgatttgtgcttggtttatgcgagtttttggtgatttcagatgggttttttccccttggtctacacggggcagctagggtttcgttacctggagaagatagattggccttagatactgttgttgttgttgttgttgctggtataaatctcaatacggtagggtgggagacggatttctgtaagaaatgagcttttccggaggcaaacgaaagagggatttcaatattaactagtggaataaaaaaaaattccctgttggggaggaaggatggggtagatttataggcatatcatgcattattgtcaaggtcattgcagtgaatttatgtgtgaactcgtattttaatgactcaacctttcttcttcttgagcatgctgaaccattcaaggattactgtgagaaatttctgatggatatgactttgaactttcctgcccaatttcatatgtactgtgtcacatccctgatacatttttaattgcagctgctgattctaagattttgagacattgcctgactcttagtgggcttgctgttaggattgtgctggttgactttgtgtggagatatcttatgatctgctgatgcacaattgtgatatggccattttttatgcaaagctttcgacttttgtttagattctttgttatccgtattagctatacttttatttttccagggtaatttagttttaagtgttcaaatcggaagcactgaggctgagagaaatgctgactagtttatgtacttacatacctaaaaagccttctgtgtatgtgcaatattagataatctgtgtgggcatcaacttttgtactatttaggttacaagccttatttttgcaggaatgcactaaatgctcctgttctgtagttattgtttctgcatgacctgagtactttagtgtttctatatattgtgtagttgcttgcatgctatttgtggtgaataacttatgaggttgtacttttgttataattgtggttaatgtactttaatccttgcagtccaatggtgaaagaggctgtggaaatgtccacagacgaagaatcagacggtgtcgttatatgtccaccagatggcaacaatgatgatcgagaggaagccattagtagtaataatcatgataattgccaggaaggcgaagtcacttgtgttaaagacccggttatagacagtgaaacccaggaagacaagtgtgtgaaccaagattcagttaagttgatagatcaagagaagtctggtccacccaaatcaccatctaaacctggcatttctgggtcagataggtccaaacgtactgttcctcaaccatttgccctttcttctcaaagaaaatctcatggaggaaatagtaaggcggctcatccatctggcaatggagaaaattctggtgataagagcaactcctctccagcaagtttgacaaagaaggtatgactattgtcatatatacagtattatccatatatcatgatgctaccaatatcatttgactcttgttctggtttttattattgcttaccattttatgtttctttttattttttgtattctcaccctaaatcatatcatgtatcttagtactgcctaggttgtctcactgagtatatcatgttcaaggctctaagctgcctttagatatcaaatttattagattgatgagccccattatatgttgaaggtttgttttgcaagtaaacatcgtaagcttgttctgtgaagtgtgcctaaacctatttggtggcatacctgtcttcttagtaccagactaccagttgatgtatctatttgcctgaaaatgttatgttgtaagcctaccagagatagctggttctgttgacacaactgataattattgcagactgcaccgattactcccaagaagattgcacagcctgatcatatgcttcaccatcaagaggaggactcctgctctgtgacttcttcgtatccttcttctatctaataaaaatacaccgtgtttctattttttttgggttgtactgtgatgatgttttctgcctttatttcttgtgaagatgtttctaaaatattgcatgagaaaattcatttcacataatgatcagatatttggttttcaattctagagtgatgactggaaaaaaaatcgatgttaaaaatgattagttctgttaaccttaattggttttcagttgatttgatattattctttgtagtgaaaacattgccaaggtgatgttctttctactcattgtttgaaactattgtatacaatttggcccctttttttttcctgagctgtgtaaagaaccacaacttcaacaagagctggcaaaaccaaggcaactgttggtgttgccccttcatttgtatgtgctgatcgtgctgacaagagaaaggaggtgaatatgtagtttgattgcattatttcaagatggcctcttaaatgtgtttgttatttacaaatagcgatggcattttcttttctctaaaaatagctggtgctcatagtgattgctgtttcttcagttctacacaaaattagaagagaaacacaaggccttggaagctgagaagaatgaggccgaggccccggaaaaaggtatgaatttccttgtgggggagaattgaattgtaggatacttaagttttgtttggtctgtgctattttactgggtctgttaaacatggttttaattcggtaatagctaaatttactctacgcttctgtgattctccttaattaatgcttatgaaatatttgtctcaacattcttcgcccagattcagccattatctctttttttttcatataatatattttggttcttagatatatcatggagagaggagtaatacaacgcctaagatttatgtgctaggcagaacatttgaatatgatactttttgttgcccaaatctttctataagatgttcatgttgatggacaactcctggcaactatttatttaccaatttacctcaacattcatgttcatttttttttgtgtaggaagagcaagaaacagccttaaaacaactaagaaagtccttagtcatcagggcaaagcccatgccaagcttctaccaagaaggacctcctccaaaggctgaacttaagaaggtagttctgaatttctgatgttttgtgtttcttttggaaacatgtacttgtgattgtcagtcttggcaatgtggagatatattgctaacttctaggaggagattgttggttcactggaatgagaggagtccttaatttacttattttcactgaacaacatatttgccattttgcccaaaatgccaaaactagttagatgtacagtgataacacaagaaagctacatttgagaaagcttttccttctttacaaggaatatatacaaatctatattatttcttgcatcatgtatcttaagcacagttttaatttccataattgatgattctactggtgggcaatatgacattcacttgtctttgttctttgaaggtccctccaactcgtgctaaatcaccaaagtttacaaggaggaggagctgcagtgatgcaccgccgacgccagaggcagcaaataccaccgcagcatctagtcgatcacatcgtcacagcattgcgaaccctaaagatgctaacagagtacaatgctcaccaaaaaatggcgtcgctgccaaaactagagctgtcaaacctgtgagctgaaggccctctggagattctagatcagccaagtgttgcgaatgtcgctgtacaaacctaactttagccgtctctcggtttcatggcattttgcatttgatttatacttcctgtcaccaaaagaaggccacagtgccgaggccggtgtgcttgcagctgaaccctttcatttcttttcttcttttcgcgttgctgtgtaagaactctgttgctgggaccatgtactgtgttccttgttgtaaatggtcgagggtttctgtcagaactcagaaggaagacactctgcccttttaaagcccttgatgaaccgttgcaatgttttgcttgatatttacctgggtttgcagatcctctagcattctagatccctgtcaaaattctatgctcccatcctgtgaagcgtttggttcatggtgtaattatcatttgccctaaatcaaatttaacaaggtgggggtcatttcattacacagctgacggctcatcgtctgcaacatttgagagatgaacgaatgaattttctgagtattgccgtatcggatagacagattttaccatgaggtggagtgatttaatttaatttaaccaatagctagtcgttattggcatcatttttgatgaaaattttatgacaattttcttgtctagataatgctcaggagtcgctgacacatcgatcggaggccgcttaagaggataatctaatctgacgaagttataataaccaaatcgggcccacgcgccagcgtcaagagtgcaaagttttacctgtgttgggtccggccggtgtgctggacatttcagccactactgtcaccaaacctggctactggggtacttaactgtccatgatcaccatatttttcccccaaagaatataatcatgccaactttagctctccttgcaaaatgtaaatctaccgacatgtttcattttaaatttgatcgttacctgtttgaactgcatgaattttcagttgaaatggaccaatatcaatatttccagggttgatattgttaaaggggagatgaagtataactgacgcaaggcatacattgtttgcagctaaacagccttttctgcttgctatttaattcataaaacaaaggaaatgataaagaaaataaaactagatgcgaaatatgacctctttttagttggaaactgtgaaagctatctgtttcagattgaaaagaaaagatcaacattaacatgtctcttcttttattcccttcaatcttctgttctcttccagcctgtaatgacgagttctgagaggctccccatctcgaattcatgctccatttgacaactctttctatgccctttttattttttttttgataaagaatgtagttattgatgcaaagtaaatttcttattttatgatttgtctattggtacctttggtagttgacgagtagtgctgcaaggacaaggaaaaggggagatctgaggagcagtttcttctttcctcattcctctctcctaccctagaacaagaaatgatccttgatcccttctaaaattcagacgcaggtatgctagatgagtcattttatttctcttcctttagtcaccgaggcaattggagaattcttgtttagtttgatttgctttacatttccgactagattttgttctgtgaacatgggaggcttgggctatgcaatgggttcctcatgtgggttttttgtgctaatttttgtagatgattttgaaagttaaaattgtccgcattcttgctatcttgcctgcttactggaagttggtcataattcgtccgtaattttggaccgttcagagttgtaagttgtggaaatagtacaagataatttactgaaattttactttgggaaatttgatattgaggaaattctcttgttctgctgcacagctgcaaccctaattcttgctaaaacccttgaccctgattctctctacaaaatggtagtttactgggatatatcaatctttagccgaactttttagtgatataacctcatactttgctgctctcatgcaaaatattatctttcaggaaatataaattcagtgacaaattttcatccaaaattgacattaatggctccaagaactagtactgttataacctggagatatcagcagctctttgttgtactatcttcagtaatcctggaatgggttttgatgcttcttctgctttttgaggggctactatcctatctcgttacgacattcgcaagcctttgcaagctccaccctccatgcccaatgtgcacaaggctagatcatgtctttggcatggcgcaaccaggcttctaccgtgaccttatgtgcaattctcacaaggcagaagcatcatcatgggcattctgccacattcaccaaaagcttgtagatgtccacagcatgtgtgagtcctgccttctttcatttgccaccaacaagaagtcgaaccttgcgacataccggtccctggcggggaagctcggtgtcggcatcggcaatgaaggtttcaggcctagcttcagtttggacaattcatctgaagcatcagttatcaaggaagatattactaatattttgtgttcatgttgctcaagcccattgaaagtgaaatcatatccttctatggttcttcagaacatagctagtgccattgacactgaggtgaatactagacatgtctcaagagatcagcttattgaggagatcagtcttgtcaggtatagtgagctgaagacttctgactctgaatcagagccctggcaacatggtggtgttgctagcttgctggatgatgcagttgataatttgaaggaagattttactttgagccatccaaaaacaaaatttgcaggtgttattcctacagatgacattgcacaggatcaagtggctaagaactctgacttgatacaactccagaatggtggttctgacagtaagaattctcaagtttcagcagagttgtaccacttcagagctgatggcaatgcagatcttcagtcaactgacttttccagcaaaactgttcagcatcctaccgaagattcagacacaacaggtttgcactatcctctccaaatgttaaaaaaaaaaacattgttggattaactattcacttgcttagagtattgacactggtttttcttttcttaagtagataaatctgaagatgatgtttggcacaatgctcttgattccatcagtgaattatcagtgactgataagcctgccgaaaccagtaccgcggagaatgaaccgaaagctgaatttaccgatagaactgcaatgaaggattctttcaaagctcatgaagatctgcagttactgttgtcacaagtttctccaaatgatgccatcaatatccctggtgtacaagagcaagccatactgaacaatatcactagagcactctctcttgacaggaattattcaggtagtatttctgagagcatggccattgatgaagctgaagaacattgtacagttgatcaactgaagaagcaaatcgaattggaccggaagtcgataagtcttctctggaaagagctagaagaagagaggaatgcttcagccattgccacaaaccaaaccatgtccatgatcaccaggctacaagaagagaaagcagcaatgcagatggaaaccttgcagtatcagaggatgatggaagagcaaagccagtacgaccgtgaggatcttcagaagatggctgccatggtgcaagagctcgaagccgagatcgaaggctacaagaccaagctgagagaccaatcgctcgttaacgagatacgcgacgcgatgcgcatttcacgttcagaggaatgtgagactagcatgtcaagaacagctcgatcgctctcattgttcgaagacgagaaggcgtatatatcaaaacacctgaagaaactaagacagaatctccaccaattctcaaacaacggcaagttcatcgacccgaaaaagattgacgacaaagaagacacatttgatgtcacaaacagtgaggatgtataccaagatgctgatgaagattcagaaatgaccaattcagagaattcagagatgaccaatgtgataagaaatggtcgcaacttcaggtacttatctaatggtacagagggattgacaaatggtaaagatgatcctgagggtcagtactatgcaatggtcagtgagaatgacttggttaattttgaagatgagatctctgaactcactgcaaagctgaaggcactggaagaagatcgtagcttcctagagcacagcataaactcgctgagaaatggccaagaaggcaaggagctgatccatggcatcgcttgcagcctcagagagctccggaagatggggatcacttggaaggattgtgattagctgaagcttcatcagaggatacacgtttgacagaggtaatgcagattcagttaggtagaagttcacaagtactgatctatataaattcatggcacattatacaatgattgttccttaattgatttctttatctctctcatgattgacatggatcacttatcatctcaatggcctcttattatttatctgttagcttatcagtcgcacagacaaaatttaaaatttcaaacttaatttatttacagttgattttcgagtctttcgtcgtagtctatttttcacctctgacttttaaacaactaacatcatgaatatagaagttttacacataaattatttttagttgattcttcttttttttacaatttatcagctgtagcttgaccgatcacttatcatctctaattgacagttgaccacgtggctgcaggatgtaaactgtaaagagtgatggattaagctgctgactgtatatgtgctaatgtgcatgtgcacacggcggttgctgtcatgtcatgcggtggtggtaggttttgggccgttgcaagtgcgccgtgctcttcgcgtggagtgttccttgtacaaatgcagtgtggattttttgagtgctcagaattgaccaatatgcatacacaccttttctcagtgcttgcttaatttgcagttttgcacatctttcatgtatttctttttatacttttaagtgggattgtcagcttgtctgtatatattgtcaaacaatccagcatttcatctcgacaagtcgacgacaggttgagtcaatcaggccaaaatgtcaaagaatcgactgcaaaaatttgctcatgcattgcatcgttaaacctttttcttttgtgattgtaccgatgacgcatacgcacacacaccactaacacacgctcaaagagacggaggcgaagacattatacatgccagttgtttcctgggtcctgtttttatttttctttcttggggctttttgcccttcgacagtataatgttgttttgaaaccgactcgatttggttggctttcttttctcgttcttggttggatgaggtgcttccctggctgctgcgacattgtaatgtcgttgtaacatttttaccgtattttttcctctaaattttattgaaattggtcggccaacctttggttggcccggtagaaaaaaaacgactcgactttctctcttaatacaattcggttggtcgattttcggctgaccgggcataccatcttgtcgaaacttaattttggcatgcagctaaggtagccggctagccgcaccggtcggtttcagcgcgtgtgacacgcagattcaggctacagatcgaagagctctgaagtctctgaatctgacactcacgctgaccagattaaccgaaagagagcaatgtgttaggcgagttgcatgatccaatcgatcgatccaattctacctgataaacaagcggccacgcgtacgtaacgtacatctctctttctctcaggtggactccaaatctatctccaattggcctagcttccaaagtgcgtgcatagcttaccgtttctctgaaaactcttgccgacaacgtcttctcttccagcttcaatcccactgacaatcacacacacgacaatgcacgcacgcgcacaacgatgagagagaaattagagagatggatagagagagagagagagagagattgacacgtgagaaaaggaaaggaatgagaattcaccacgcattacattagtttccttgctgtttcttctcgctctgaagaagaagaagaagatttgctgaattagtcgcatcctgtggagtgttcgtccagcatccaagggaatgatcggctgctagcgatagtcaaaccacgatccaattacgtctctctcatttccaaatgaggcacgctcgatcgtgcattcatgtgcccgtacacctgcgtgcgtgtatatatatacacgcacaagaactgaagaacacaacaaaaaaggcactgcaaatcttgttcagataacagcaagtatatattcagattgttcatagttcatttattgttcataattcagataacagcaagtatatatatacagatacagatagttcatagtcgattgatcgatcgaccatgaggcatgttactttcttcgcggcggttcttgttgccatcttcctcacctccggtggcgggaggatgagcagcacggcggcgcggccgacggcggtgggcggcgccggcgcgccgccggccgccgtggcggtggagctggccggcaccggcaccggcaccaacgcgtcgtcgcagccgtcgaactgcacctacggcaacaacgtcggcggccagtgccctcccactcccggcgctggccattagcaagagcagtgcacgtcgctgccatcaaatcgtgcagctgagctgcgtaattacgattagatattgtattaatcttgtgaatttttttttcatccgatcatgtagtattaatctttcctgtagcttgaaggtgattgcatgatcaattgagtctgtaattctgttggtttggttgtatttttttttaacttttttaggtaaaaagtcgggtgaattgatcacctgtttaatatactgtaattatctgttgcatggttaaacagcagtaattgcttcgtgcaagttcatttcgccggtttggattaaatgattaattacttcgaccaagatcaattcgctttaaatgattaattagatcaaagatcaagatatcacgattcacaaggccgagcccatggagagattcagctgggccatgggcttttttggtccatatggtgacagcttttgcgtcccttaatttgcagctcgctctgtcgaataatttcaacgtagttgtctgttactctgctagtctgcttaactgcagtatcagtttactttactacttgtcgtttatactataattttgctaattacagtgtcaccttatcttgtttggtaacaattcgtcagtcaagaatggcaagtactcctatttgtgaacggactgagtcataggaaatgaagcagactatcttttttttaacagattcatcaggtttcagtcgtgagaatctgtcagctagtttctgttgtgaaatatgaaatgtagaggacacatatatagtatttcttttcttgtactgctcattgcgtacatgtgcagctaacaactcagccgttcagaggagaggatggataaacaattcgtgcatatatacccaacaaaccattgctttactaaagcttaattataaacattaagcattagttgcgaacctgttttgatcatagcaatcatttgcgttttgatcatagcaatcatttgctcgaacagaagtagttagagcatctctaacaggctctccaaatctgactctccaaatatttatttggccatctctccatctaatttgacaactcaaactcttttttactccaacagcctccccatctatcatctccattacaagtttatgacaaatgggacccatatgtcagcctcaactacccttcttccatactgattctttttccccacctatactacatttcctttcttccttccgtactactgccccttccccgcaccctctacctcggtgcggcgacggcgacggcgacggcgacgacgacttgcgtgcgcgcaaggcgcgggcgggcgaggcgacggcgactcgcgtgcgcgtgaggcgatggcgaacggcagcgacgcctcgtgggagcccaaggcgacggcgggcacgtgaggcgggcccgcgaacaacagcgaacgtcgagcggagatggcaccgagccggcgggatgcatcacgcggatccgctcctcaccggcctcccttgccgtcgggccctctcccccgcaaacgatggcgatggtggcggcggcaaatggcaacgacgacggcggccccgggaggcataggcagaggcagcggaggccgccgctgccccagaatccaccccgccagcaaaatatgcacgaggtaggaggccgcgcggcggaggtcgccccctcctcccgaatccacgccgtgctgcccgaatcccccctccccccgagtcgaggtcgggtggaaccggaggcctccagacgacggcaatggatggcgacggtgcagacgacggcggcggcggctggcgatggagaccttggcagcaatggaagatggtgtcctcgatgacgatggtggcgtcggtgcttctcacactgactaggggcatgggaacagagaaaagggcaaatgagtgtctgacagcatggggcccacggttggtaacctggtttggccagccgtggaggatggccaaatttggctagttgggaagccagcttggccagccaaatggcttgccattcgtttagcaaggctgttggagtgtatattttcatcaaaatagctaaattttagcttggagagtctattagagagtctgttggagatgctcttactacttactactggctagtactccgtattacatatgccaagagagaatcgttcatcagcaggcgaggaaacacaatgcatgaagagtgtttgtgcttgtgaactatatgcttttttttcgggaatacgcaaaaggtttgcgcactttttatattaagagaaatgaaatttatacaaatggcaaacaaagaagagagatagggaaaaaagggggaaagggaaaaaaagacttaagcctactctcgctaatacaatgtgacgactgaacgaccaaacacgctaactagggagcactggtgacaggggattggactataagctttgatgagttagtttttgtttgagatgttgtttgtttttaattcgactagagccatgtgagaatactctacctccaagagaacacgagattttgtttccatgcatgcatggacaccattaacatccacacaacagcttattacataattcaatcatattaagttagacacgggagcgaagaagaattacgcattcgattgattcgaatcactagttgttcatggaatcagaaaacaagaccgacgaacagctgaacatcgatcatgcatgtttcttgcagaatattacaagaatgcaagagcacatgaatcaatcaaatatcccgaaactgatcgaaactactcgaattgatcacaaaatcaactcgatcgcacaaagaatttgatccgctacgtactactacaaactaatcttgctcttcttgcgattttcgcggctgcgctacgccgcgcgctcgacgccgtagaggatgaagcccgcgccgtcgaacgccaccctggccgccgccgccgcctgctgcttcgtgctcgcgcacggcgacgcggccgcgccggtagacgagccggcattgtcggcgccgaacgaggaggagcgagaagacgaggcggtggcagcggaggcgctcctcttgtcgccggacgcggcggtcgtcgccgtcgccgtcggcgggggcttgtagtacatgcgcgccgtctgggggcagtgcgagtaggccctgacggcgaccctcgcggtcatgcccagcaggtccccgtacgccgcgtacttccccatcgccatggatggagctcgacgcgatcctcctcctcctcctccggcaagaacaagaacaaagaaccagagcaagatcggctccaagaaccgcggacaagcggatgatcccctctctctctctctctctctctctctctctcgcgatcaagctagcgatcgaattggaaggattcctgtgtcgcgagctcggattctcctccttggcaatggatgtgtagggtttgggggatcggtgtatttgtagccggtggggagttcgattcggagtccgattcggacaaggatgatcttgctcttaccagccgcggcgcgtggacgccacgggaattttcccgggtgtcatgggcaaaaatctgggaataatgtccgattcgaggcccattatccagctcggcccacgaagacacgaggcccattcgatctctcgtcttccccctacaaggcccaccaaagtccatcaaagtccacgcctcgctcggcttgggctcgctatcgcgttgagtcgagtctgagccaccgccggaggagaggaggggggccgagcggcggaggcgcgcaagggtttgggagccgccgccggcgaccttggccggagcgcaaaagactgaggaggcgtggtcggggcttgcctgctgccggcggccggcgaccggcgaccaacggccaggacaggtctaaaattttactgcctcacttgaatatttcgattactgaatctgcagagaggaagcgtattattccctctttttagctggatcgagtgggttaaagcaattacgatagtaaaaaagagaggagggttaggatgcagtttttaggggatcgaatacactgtggaacagaatgctgcattttgctctatctgtttattactagtacttgttgaaggatggaattgtaggttttcccctttataaattggatagaggacttatgcggattaccatatgttgaattattgtgcaagattttttttgttaattgttcaaaaccattgaaatattgggtgcctctaatagtggaggatagatcattctgttacaggcaggtcttctgtaggcttaggtttgggggtcctctactttgttctgggcttgtggctgtgtagtaatgctagttgctaggtgcctgaccatatgcttatcaccttagaagaaaagctgcttcaattctaaattctaacaaggtaattagtggtaaatcatacttattccattcaaagggctgtgaccttttgaagtcactcggtctgagatgaaaacccagagaaatattatgaatgaatcctgacctgttctgagaacaacatcagcctttgttttgggatgtacttaagaggaaagcaaatttttggcctttagatttaattctgttctatcatctatctgatgacaaatcaacttagtatgattttcttttatttgcagctgtcctcaaatccatccctacattccaccaatgtatttaagctgttgaccacttgcacttgcacttgctctctgcctaaaatttgatgtataggctttatataagatggtatattgataataaactactgtttactaatcaactactaggctcctagcatgctttgatgtgtatttgccggcacccctatcaacatgcttgtgacacttttatttaatgttaacccgtttctcttttccaacagcttgtgcttatactgtcctgatggaaaccgacagaagccagcctgctccaattgacccaagaagagctcgctttccttgttgtatagtatggacaccattaccgttaatctcatggttgatcccctttatcggtcacattggcatctgcagagaagatggtgtaattttggattttgctgggcccaattttgtatcagttgataacttcgcgtttggagcagttgcacgatatattcaagtaaacagtgatgaggttagtacttagtattatgtggttaatatcactctcattgccgcctcctagtgacaccttatcaacatgtaatgtataattattgaatactttaatcatgtatagcactcaccaaacattaatctcttgtaatctgcagtgctataagcttcttgaacctgaaggagcatcaacatgggatgacgcgctgaggaaaggcgtgcaggagttccagcacaggggctacagcctgttcacctgcaactgccactccttcgtcgtgaacaatctgaaccgtctgttctactccggccatgacaaatggaatgtggtcagcctcgctgctgtgatgttcttacggggtcgctgggtgagcacagcgtcggtggtgaagacttttttcccatttgcactggtgatcaccatcggcactctccttggcggcgcgacattcctgatcggcttgcttgctttcgctgcggtgatgactggctggttccttgtgggcacctactgcatcaagagccttgtagagttgtagctggagtagtatattggattgtacttggttttgggtctccttgtgatcaaagggtgcatacttctaatttttatagttgcttgtaaggtttatttttgactggagagatctatgaactggaatataatttgtagcttgatgaactggtcatcgatccagacggttaattcttgactggagagacctatgaactgcagtagaatttgtggtttgatgaactgctcatcaatccagatggttgcggcatgaattgcgttttgttccatgctcaggaagtcagtacgaaatggtgtttgtcttcaattgcattaactatgtttacaagtctattacccatgctcctctacaatggagtatatttcgcaagcagcagatcaaattctatactgactcgtcttttcgcttatacttatacttatacttatacttatcagctaaaattttaattttcaactttaaaattggagttgattttaggaattttttttatcgtagtttattttctagtctttgtttttatatcattaggaacacgtatataaaagttttattcccatattattttttatttgcaaatatgccgtttcgcttacatgcttataatcagccaaacaatggcgcccgtagaatcggaaacttttcaatgcttcatttgcaggaaacacttcagttctaacctattttcgtaggggacggttcaattcctgcaatatttggaaaaaaaatatcgagccatttaaaaccataactatcaaattatgcctatcaaatcaacctatgaactccctttttggcttttgcttgaagggccgctttatattggtgttagaacatgcctgattgttttggtttgaagtcaaatcattgacagtatcgatgttcaatttgatgctttctatgttgtacttgaaatttagctctaaattgaccttaaaccaaatacaactctatcctaccaagaactcgataataccaaaacttatctagattttaacacggccaacattttagtagggtattacaacaaagctgaaaatccagatatcctccactgagtcacagttccactctcagcctgtccttatccaagaaccatctagaagctctcgcgccgaccgtaacaaatggacggccaggatgaactccaccccagccgatccaacggctgaggacgcgccaagccaccgatccagtgggctcccgtcgcggcgcgtccgatccgaccggtggccgtgttcgcgtccgaggaaaccagaaaaggaagagagtgaaagcaggcggaggaggagaaaaagggaggaggaggagaggagcgcgtgaagcatttcggctcaaaggggaaataaaaaggggaagattttttttgcatctcatcctctcgctctcgccgtctctcgccgctcccccccctttccaggctccaatcccgccgccgcgtaggatggccaagacgcggcagccgcagaagcgggtgctggagtcgttcaccatcaaggggcccgacggggtcatcaagcgtgaggacccctttcttgatccttttatctatttatctaggtttttgttgttttgggggaaattttggtgcgtgtataggttagcttggcttcgattatagatcttaaatctaggtttttggtggtagaatctatactttcatccaaaggtaccaaatagtgttagcggagtggtagcggattgatatcggggtagcggcgagattgcgggcggtatcgcggacgctacattcctatagcggttttgatatcggtatagcggattgattgcgggtggtatcgcggacgctacattcctatagcggtattaatatcgctatagtggatagattgcgggtggtatcgcagacgctacattcctatagaggtattgatatcggtatagcggatagattgcgggggacatcatggatgctacattcctatatagtggtattgatattggtatagatggaagttctatctcaagtttgaacctataaaatgttagatcttctttagttttaggacaacctgcaaaaagaagtctatgtgctgattaggacggtagctctgtgtacagggccggttctatattttcgaaggtcctaggcaaactctgtgctacgggccctaaggatttttttacttgtaaccatgtattctctaaaataacatgattaataatacgtagttgaaaattgtaatttggtattttattctcgataaatagtgttgatagtataatgggcttagttttaaaaaacatagtacaatagacaactaaaagaaacccgtgcaaaaacgaagtagtataaatagctcaaataggataaaataaataacaaaaagaacaaaacaaaaccgaaacataattttaggaataaatagatgcaaatgaaaattgagaagatcagaagaagtgaaaaccttatccgagtcacgatgagacaatcgggcaaggcatgggccatgggcgtcgggcgtgagagcatccggctggctgctgccacgatgttgccggactctagatcgtgaagtcacggtcgtgctgtggcgccgtcacctgtcggccatcgcgatcaggagagaaaacgctgaggatctagaacgaagtaatgaaccgacgcgtcacggtttcgcccttgatcgatggtttgggctcgatcctcgattgcgtgcgtggcgtgcctccctccctgccaatcgacgtggcaacgacatcactgcaattgggctaaccggctaactaggtcatcctgggatgctgatggactatgatggtgatgggccctctaccggcctgggccctaggcggtcgcacaacctgcctaggcccagagcctgccttgtctgtgtatcacaaagcttagatttttgtgtttaactatacttgtttacgttattgatttgcgtgatcagacacatttcttgataaccttgttctacctatttgcttatgtaacatctgattgtatggaagaattaagttgatggaggtagtcttgattatgtataagcttccacgtagcaatggtgtactcctggttataaatccaagtttcttgttgggttaaccaagttagcattttggtttggagtgagatgaagactgaagttatttatttccctgcaaaatttaaattttaaatacaaaaaagttcttgcaagttaaaatttatggtggaattcaagcaaggtaatcaatatcgagatgctaggtaggatcgttttttattcgtagtatcatagtattgggatactaccatactatcaagatactatcagattttagaaagtacatattttatataaatatataatatgttgtataaactaaagcatataatattggttttgataaatttaattggtttttatgtaaacttgagcatatttattcacattattttaaataatattttgtaggatcgtagaatcaagatactacctaagatttcgtagcatcgtggaaatgaatagtaagatcgaaatactatgaaaattaggatactggtgggatcggtatcgtttcggcttggtaggatcgtagtatctaagatactaggatatggatcggaatactgacaaccttgctgtgaagtaccgacagttaattctgcaaaatcaactcagcattcaacttcattcgatattaagcacactcatcttggctacttgttatcttatataactattggtatttttttttgtcgaaaggcacttcttgtacttttatgtaattgctttgattcagtatgaacagtttctagtgttgtcaggaatgttttccaatattagcaaattaatgtaatttgtgaggtacaacaattattaggaaataatattggcatagtcttttagtgattatgttgtatgtctgttccagctggggatactgtgctaatgatggcacctgactcatcaaagaaaccatatgtggcaagggttgaggaaattgaggcaacaggacctcaagcctctcaagtgaagatcaaggtgcggtggtactaccgcccagaagagtccattggtggccggcggccattccatggttcgaaggaagtatttctttctgaccactatgattcgcagagtgctgacaccatagagggcaagtgttatgtccacacctttcgagattacaccaagcttcgatctgtcagcgctgaggacttcttttgccgctttgagtacaaatctgccacaggcagctttgtgcctgaccgtatagctgtgtaagaatccaaaccttcaaattcgttagacatgattccgtacttattactactagtatattctagcatcattagaaagaactattgacactcaggatatttcagcaaactgttcatctgttgtgatcttgttgactgctatatggtttatggctttctttagaaagttaacatatgattttcttctgaatttttcctagctttgatagttttcagattgtctccctctatccaatgctaatgtctgggatctttctaccaccttgttgctctgattacaccattcacaatttcttgaaatatgttgccctgtcgattcttatcctagcagtcccattggggtcacagtctgtcttgaaaccgttattttctgcagttctgctagattattcagtgctgttcattagcgcctgtttgaattgggagaatgcagttacaagatctacctattcagattgcacatatcatatatttgctctcacgtattggtaggcaatcaatcggcgtagtggttgaaggcttgggcatttctttacccttttaaatgagtgaagttttcaacctgtagtgacaaacttgacatacctctcctgtttgctagtatgacacatgctcaattcttcaattgcaaaaataatttatttgatctgttgttgattgacataacaggttttgcaaatgtgagatgccatacaatcctgataaccttatgatccaatgtgaggattgctctgactggtgagatacagctgacgcattcaactagtttctgtatttttgaatgttaccaaacctgagaaaatctttacattaactgcaatcagtaaagctaggtgtatgtcttgctagaaacctgtttcttattagtagtgaagaagctaagcttcacatgtgcaaaccatatattctacagaaaaacctataaggatttctgcaggctagaatagctccactaaagtcaatacttgtggaacattagaaaaaagaacagtattgctcctcacaagtataatggtccattgtggacagtatggcgcatgctgtaattcatttatggctgttttatgtcaagtatgtgtacggactacagaagtaatggaactcataaagtcaaagtgaaatgaacaaaaggaaaactgaggaactatatccaatatacacctgagaaacctcttgagtttacacttagcaatttcatagtatcttgttgaagttctaaaatattttcctgcaggtttcatccttcctgtgttgaaataaccatcaaagaagcgaagaaactagagcatttttactgtaaaagctgtattgctgaaaatggaaaggatctacaaaagtccaatggtgctactgtgcaatctgaagaaaaggtaaactgagtaatctgatgaaaactttggcgcgtcaccaacagtactgatgaatatctatagttctgatcatctaattctaattgaagttgaaccagagggcgccttacatatatgatgtatgtcaggaggttgcagtgaacataacccatgtcagatgtttaaaatttgcacaaaattgacaatgccactgaagtggatcaattcatatcatacaattttacaaatgcaatcttcctcatttctgccaatgtttgctcatccatatgctcctgcttgcatcaggtgcagtccaaacgacggcggaggtgatgccatggagacagaatctcaatacctccaaagtggatgtaacaattctgtggggagcaaagcctcatcactcctctagatcttctctcttctcttcctgtgcaaggctgcttgcagccagtgaccagtgtactgtgtacatatttaccagtgttttctttttgcatcgtttgcatggtcgtcgtagcgtcgtcgcatgtactagcttggagtcagtcagtcagttagctcgagcaaagggatcaaactccctcttggtcataaactcataagcgatgatgatagatgaaactgggcactacctaccgtggttgtgttgttgtccatcaataataccttgacgacttgctacctgcctctctgttcgtcgtctccatgttcgttcttttttttccctttcttttttactttgagaggttcatcagttcatgttcgttctgtttcctggttttgatatttgaaaagttgtatttgaaagaaaaaattgacccgaaaaaggtctccaatgttaggtaaatgggcgattaccagctcttcttgcccctactttgatgtgtaatattgattttgcccctgtttttttagggttttcgtttttacccctacttttttaaatgaatcaaccgtttgcccctattatgttaattcttgttaacggtgttaaaatgtggggggtaaaaggacaaatatacccttagacatttttccgtacttttggcataatcaaaatataaatctattgatgccatactatagcagtaatttaattgtccaaatttgtgaaagtgtgccaaaatttgggtcaaatttgaaagtggtacaaaaataccggaaaatatctaagggtatacttgtctttttacctcacatttaacactgctagcaagattatcggaataggggcaaacgtttgttttgtttaaaaaaataggggcaaaaacgaaaaccctaaaaaacataggcaaaatcaatattgaacattgaaataggggcaaaaacgaaattgcctcaaaattctagggatacacgaaggccaaaaattctaaatttacattagatatctgttttgaatggcgattaaggtcctgttcttttctccgatgaagatttagattttcgtggcacgctttttaaactgctaaacggtgcgtttcgtgcgaaaactttctatatgaaaattgctctaaaatatcatattaatctatttttcaagtttgtaataatgaaaactcaatcaatcatacgtgaataccacctcattttatgtaaaaaaacttaatcttaatcttcaggagaaaagattaccacctaagggatgcggttcgatcaagattcaagagcaagacatgaaatgaggaagccgatatagacttaccccaaacacaaattgcgcgctccacggcctatattcggcccaacctgctgccgggcccgccgctctcttcatgctgggccgagccgacaggccaactccacggcccattaggccgacgtcctcctcgcagccacgcgctacgcctccgcggcttatcgtctcctccaccgggcacaccgccgcgccaccgccagtgagccagcgacgccaccgcgccgcgcgccatgccgctcctcctccacccgcgcttcccctcctcccacgccgcggcctgcgcccaccgcgccgccgccgcccaccgcgacgcgcggcccgcgcttcgcctccccgagctacacgcgacgaggcggaggcggaacaacgtcgcgtgccgcgcgaccagggccagggaggcgccgccgcagcagcagaatacggcggcggcgctgtccaaggaggcgcacaagtacttcgaccacgccgtggtcaccgtccgcgcgggcgacggcggccacggcgccgtcctcgccatgccggcctccccctcgacggacgcccccaaatccccccgccgcaggtcggacaagggcaagaggagcggcgtgaagaaggtgtcgtacaagaggaactacgacgggtcggtggcgctgccgatgggcggccacggcggcgatgtggtggtgtacgccgacgaggcggaggagacgctgctccggttccacgagaaggcccgatactgcgccaagaggggaggcaacgtgggcgccaccggaaccctgagctcgcggatgcacaatggcttcgccggggagacgctcaggatacccgtgcctgtaggtttgtagattttggtggtgttggaaatgcatagcattttgctctgtgatggtaaagtcttcttcggttaatatctgccgcatcgaatttgcaggtactgttgtgaagcgcaagaaaggcgctgttcttgctgatttggctcatcccggtgatgaagttattgttgctaggggtggacaaggcggggtgagttgctagttgttcaccatcgttatgcttattcaagaggagggctgaattcgtagttcaaattcccaaattttttgctgtgcttagcgaacatttctatcgattgatgtctttaatcttttgagttgcgtttataatttggagatggcacaagtcagaaccatgctaagatctttcaatggtgcttaataagctttcgctaccatgctaagatttttcaatgtttatttctacacaaaggtgtaaactgggcggtagccatcccatatgaacattttgagatgtactagtttcaattctagtaaactccccacaaaaaaaaaaatctagtaaactgccaaaacatctgctgaattctatatcaaatattataacttgatttttgccagtcgttaataaatatagttggtacttgacagaactgtatctgacctcgagcagttctttagaaacttcattgttctattagggcagttaactgaagcatggtaatcatgatgattcattggcgtacataacttagttgactgatcttataaattgttacttcctacaactaaagtacacctactacttttacaaatatttatgcactgaatgatactgtcatgactttacagtcgggctttatttttgcagataagcttgatcgatgtgcctgagtacagaaggaggaaagccatggttttatcacctaatatcatgcgtgatgttagtgacagggtaatttgttaccttatgatacaccgggatttgaattgatggtagctttaatgttgtttcaccgatagcctgttttagttggatcgttaaagtttttgtgaaggattagctggagcaaatagtttcatgtttctgttaatgtagtttccacatagatacttgtataatgggtctatcagagaaaatagtgcaatttgcaagctagttgacttgattgtgttcagtttcttggctccttgcacactgcagctacttgcattcttgattcttgcgatggcattaagctatgttcaagtttgtcaaaacttccacgacatatactagtgaatgaatgatagtgagaagacattaatagattctcaagcactaacgccaacaatcatgtgcagattatttaacagtactgaactgctggtatccatcgctctgtgattgtatcagcatgatggtttttgataatccaaaggatttcaaacgattacatgcatttgaattccatagctttcattttcttttttcatcatattttttattcgctctgtccttttcttgttgtgtaggtgttaattcatggtcagcctggtgaggaagtaagcttggagttaatcttaagggtggttgcagacgttggtcttgtggtatgtgtgtctctattctatatttctcatggttttggtcttgcttcacagttttgggaacaagaaagtgttcagatcattcctagtagtttatatatcgtacacaagaatcttgctcaaaataatgtaccatacataagaaaatttcaagatattggaagaatttggtttggaaaggtctacgttgtgattatcatacatgggtttagatgctttacattcctttttttaggctttatttatgctatttcattgcagtcgccattgtttgcatgatgtcttacatgcattttcagggacttccaaatgctggaaagtcaacacttctatcagcaataacacttgcaagaccagacattgctgattatccattcactacattaatgccaaatcttggtcgtcttggtggagatcctgctctaggggcgttgcagttttcctcagaggcaacattggcagacttgccaggtctcattgagggtgctcatctgggcaaggtgctcttttacttttatgcactttgcttatttcatacaaaatgtttctttgcaatagccatgttgcttcccctcattattttctttggcatcatcacttgacttaatattacattgcagggtcttggtcgcaatttcttgagacatttaaggagaactagagtaatcgtccatgttgttgatgctgctgctgatgaccctgtggatgattataagattgttagagaagtaagaagttccttcattcataatagctcttttgttttttttttttttgaacagtcgtgcacactatgccagagaagtttgatagtcctttatattagttgggtagaatcttatcagccatttgtatatgggtagttagtcagtataattgaatatttgtctatgttttgtttctcaagtcaagatgtgtgttgaatggtgaatgtctatttacaggaactcaggatgtataacccccaatatctggagagaccttacgttgtggttctgaataagattgatcttcctaaggtattgtaccttaagcctgtggttttctatttctactataatcccttgatgaaaattttgcctcttggcatgctcggttttcatactgtttacgctttgctttttatcccacttgtaggcccaagacaggctatcttcactggcttttgagatatcctcaataggctgtgaagaatgtgatggtaacaatacaagcgaagacagtttaaacggaaatacaggcgaacataatacctcatcagagactaaagttgaaggtggtgaaaaggaacttcgggactatccaagacctcaagctgttgttggtgcaagtgtactgtatgtctcttcagttgaccaaactacatgcatgttctttttactcgaaaaccgttttacatccctcacatgatcttactatcattccctttgaactcacggtcgtggttctgcaggaagcacatcggaatcgatgagatgctaaaggagattagggcagccctgagaaaatgttttgatcacaggttacctgagccatgaatggaagtcagccagcataccagaggctagtacgaagaccatagacaagttctcaagtagcagagacagatcgagctcggctcttgcaaggacaacagggttcccttggtttgcagcaatttcgacggttgatgaagcatgaaaatgaccatcagaaagtgtgatgatatgggagtttatcagtatgagaagatgctattcgttaaaaaaaattattcgttcaaaaatgtatgagaagatggtacgaaatgccagtcagcagacgcgtgtgaataggaaaggatagttctgtgtgttgttagacccttttgtgtacgatccaattggcacgtaatgaagcaagcagctttgatgcatatactccatcgccttttctctgcttgaatctgcttcatactctctgttctctcatgtctgaagtctgaacttactgctgcctacggagaattccgttatctgtttgttggcttataagccgaaaccgagcttcgcccccacgccccgcgctggtgaacaactgaacatgagattggttgagaaggtggggagaatgagggggagggaggaagaagacaggggcaatttggtcctataatattaagagaatacaatgaaggggtatgtagtggcatatcttcaatatttgtgaaattataatggcataattacaaataagtgaatagtaatattatattttaaaaccataaaatttataattgcatggattcaattaacccaatacaatacgacttcgtttccgactaacacgaacggccacgttattcatagcgatcgatcgattgatcgaggagtttgaggggggaataacggggaggagcatcgatctcgatcgccggcgaccatggcggcggcgcttgttcgctctttggcgagcaggagtaggatcggcacccggcgctctcacccagctacagcctaagccggcggccaccgtcatctcgccaaggttgcttagccatggcgggctcctccgccgggaagccctgccgccgccgctctcgccgtatcgcttcttctcttccggcggtttcgagtcacctcgcacggtatgccttcttctcgttgatatatctcccaattgatcgagataagtcgatgctttatacgtttggattattttctgttcctccaaaaaaatataatgtgtctaccaatctgcgattctgagcttcttcccccaaaatcagattccttgctaatcataaataaaactatgaacttttcttaactaatatgtgtggttgaatatgttcaagtcttcttctctacgacatacaattcattatagtgcccgtgcataagacattcacattgttatcagaagtaggctattttggtaaaacaagatatgttaaagattggccttttatagggtatttgatatttccgttatgttactatggtgcgtgcgttcgttcgttttttgttgcatgacctcgacatgaacttaaattccccacgaccacacacacacacacattaaataatgctttttttttcgaaaatacgcaaaaagattgtgcacctttgtattaagagaaataaaacttacagagagcaaaacaatggaaagaacaaaccgaaagccagaacataaggtgggaaataaaaaagaaaaacatggaaagcttaagcctattctcgtgaaaacagaaggaatgacctagcaacctagagaactaagctagcagcgcctgcgaccaaggtcgggcaaacttccagaggacagtttcctgcgccattgccgcaaccactttgggccacgttcgattgcattgattgaacacctgattgttcatctccttctaaatgtacaaagccccaagggtcacaatcgtgtcgaagccacggcgctgttccttttggactttgaagtggctagagcattattttgatggcatattatctgtccaacccagttcaaatgaagtcttgtcacagcaatctaccaggaaatagtttttttttaaaaaaaatcagccaagaaatgagaatacccagaagtgtagccttgttctttgttcaagggaaactgcttgttcataacccataattcaagtgattcttcttgtatgttcagggtccctcgccttctagtacagaacctggtacggacacagagtcttgtaccaataagcaagggccagtggctgctgaagagaataataaaaaatgttgtccaagaaagcaagcttcaatggcacttgggacggaaattgaagagaggaagaaggagcttctcaagctaatgttgcagatgaagaatattccacattgtgatgagtgttttccgaataaggaggagcagtggattcgttttcttcaaggatcgcaagctagcgagcaacaacggcagccagcgtaagtgggcagtacatttcgaacatagtaaatttgttccatgccatcacatagtagtaacgcaagcagagtgcagttcgaaaagtgctccctccattttaaaatgtatgacgccgttgacttttcgtacacgtttgatcattcatcaataaaatataattttaacttatatttttacatattcatactaaatttttgaataaaacgaatgatcaaacgttgtgggaaaaatcaacggcgtcatacattttgaaatgaggtagtatcattgattgtttatcttcctggtggcattttgcaacttcttgacagttgcggtaaccattagaaaatagtgttagtttgtattacttgctgatctaacatactaatccatcatttttataatttctgacatgtaggtttggaaaatctgtggatgtcttggtgatcgtattatatgtcttgaatatcggattcatgctcagggactaagattcttttgaggcaatattgcagcaagtgtaatagttaagcgttttatattcccctcatttgaacaccggtcctgtggttattttccagtcatcactctcaacaaatgtaaattctttcatgcatgaattctcctctcttgaagggtctcttgctggaacaagaacccctctctctcttttttatgtgtcctgatctggacatacatacatacatatatacatacatacatacatatatatatatatacatatatatacatatatatatacatatatatacatatatacacacatatatatatacatatatatacacacatatatatgtatatatacatatatatatacatatatatacacacatatatatgtatatatatatatatacacacatatatatatacatatatacacacatatatatgtacatatacacacacatatacatatatacatatacatacatacatacacatatatacatatacatacatacacacacatatatacatatatatacatatacacacacacacacacacacatatatatatatatatatatatatatatatatatatatatatatatatatatatatatatatatatatatatatgcttatttcagcaaccgtctcacatgaagaaaaatatattttcatttggtgtataagaaagctgtcagccatgggggtgttacatttttggattgtgtgaattctggcatgacatcacttcactgggaatatgttgtgcctcaggaaaagtatcatgtgatatactagttgctttggtatatcggttctgtatatattagatgaagtgtataaggtaagcatttcctcttgttataaatactagcaacatgcgtgcaacgggttatatattactagattgctgcgaggaatcagtataaaacttatgtttgcaaatttgatgataagagatttaaaaggcactgggtacatataaaaatgctagctataacttaagtcaaaatagaaatacatgtgcattgcacaatgctctaataatattagatgagaaaattaaattgcaatactttgcaaggagggggatgcatgtcccaatgccattgacttcaatactcgtgttgtgttcctgagggagggcagcttgattaggagaaaacatccatggtactttttcaaagaataactgatggaaactcatccggcaatatcaaaacccaaaatcagggtaaattgtattttttatatgaaatcaaaattaaattgttggaataaagagaaacggtgaggcgcctgtaatgacttcgtcaaactcaaggatttgtcggcccagtcttcgaagatcactgctacaaacagcattatcccgtgcggtcaaaataaatttcctgtgcggaagatttgtccgtctataccaaaacatctggaaaaatcaatatttttgtgtgcgggcagcccaaccgcacgggataatcattttcctgtgcggtcgggttaattgggctgcacgggataatcgattatcccgtgcggtcaaattatattgcccgcacggaactaaaaaaaacccaaaaataaaaaaagcgaaaatcgccacgggcgccgccgctgcgaccagccacggccgcccggtcgcctcgaccagccactgccggccagcacgcatgcacgcggagccggcggcgccgtctcgtcgtcgtcgtcgtggcgcccgccgccgtccgagcggccaagtcattttggtcgtagaaatcaaaacaagtaacaactgcagtagtactagttatagccatagaaacaatctctaggaaaatcagccgagtgagatcaaagcaagaagagagcaagaactcaagcactggctatatcgacatggagaaattagtaccgcaacaacctcaactaccagaacattagcaatagcagccaccaccagcggtttggctggggattcaactcaagcttgagagaaatcgtcaagagactggaagccagtaattcaacatcacaaccacaccactttgctgtcgtagcagctatggagaaaaaagagagtaggagatgcttgagatccagcgcgtgcacgcggagtcggcggcgccgcctcgtcgtcgtcgtcgcgccgcctgccgagagccgcgtggggccccgccgccatccgcgcccgccgcgcgtgcacgcggagccggcggcgccgcctcctcctcgttgtcgtcgtcatcgcgcccttgatgggaaaaaaattctgtgcagacaggctgcaaaccccgcaccgtgcatacccgattcagattggcgacgcgtggacgagcgagtaatccgacggcgcgcccgcacggctccatccgcaccaggagaaggcccagctcggctcgctcgcgtcgactcccacaaccagaactagaagcgcatggactggctctgcggctcactcgcgtcattttctttccgctgcggcgatccccgcttccctttccgccgccgccgcgatctccttccccatctcgcctccatctgtcgggattgcctctccttggcgccattggcttagcccataatcccctccgttcaacaactgatgcggccacttctctcgcctgctaccgccgtcgcggcctccctcctgggccctggccacgagcgccgtcggtgacggcggcgacggctgggttggctaaggcgagcacgagccgtgttcccctcctcgttcctcctgaccacgggcatcggacgcctttggtgtaggccgcagcggctggattggcgagagcgagcagaagccaaaaggcagtggaagaactaggatctgcaacgcgccgccggaagtcaatgcaagtggagcaccattcaagcaatgaagaaaaaacctggaagtgacatgtattttgtaattttttagttgttacgtctgatcctttgcccgtgtctttctgtctttcatcaaaatgctagggtgctggttggtttttctatagtttaaccagattagttcattagcctttgctaaaagtgatgcgatttatcgctcacactgagtaggctgttggtaagaatattacaaactgagtcacaggcttccatagcagcagtgctaaattagggatattcagatggtttactgcattctgacaaaaattattatgcaaagcatctgctgctcatgcagctggttccaggtctagacccccagcaaaggcttacgactgggtataccaaaatctagaatgtgatggatcaatgtgtaaacaagattgtggtttgtctgtctggttcctttcaaaaatgaaaactggaaaattgtgtaatctgaatcttgaatgtcaaatctggaggccaatcgttctcaaacaacatatagctgatcataagtgtaacacactgcaaatggaagtaaaacatagtactgtaacatagtaaaagagtatagttgagtaacatagtaaatggaataaaatcgaaatccattccaacttgaggaatgatcaaagcttgtttagctttatcattgacctgttgtgcaacttcatcatgcatgatcatagtcatcccctcgaagttctgtgcaatctataacatatatatggtcacagatcaaccaatatgaagaaatatgactatcaaataactaggcgagcatacatgtgttttctgcttctcatcggctccacaatccccggcgactacgtcgtccgcatgcacaggtgagagaaacggctgtctggccatgtcgttcactaaggcgggtgaagaaagcaccggaatcctggcggctgcggtgcgcatggcggcgatccgatctggcgaaggaagacgaagccagaaaaagatttcgcttttgctggagccgagtccgcgtacggcatccctgccgcctcgaagcgaagccggctgatcgttcgagcaggagccgactcgagcgagccgagatgggccttttcctggtgcggatggagccgtgcagacgcgccgtcagatcagtctctcgtccacgcgtcaccaatctggatcgggtatgcacggtgcggggtttgcagccggtctgcacatctaccaggtaccaccaataaaagcctaaagattgagaaattagtagctattttgcaagatcctcccatggcctgacagcttgttgtttgttttttgaaaaaacccttgttttttcttcgaaatataatgcaaaggatgaaaattccctttataaggatactattgtaaaagtaaagtacatgggtgtttctaaaatactctcttcgtcccatagaaaaccaatctataataggatgcgacgtttactagaacaatggatttgggcagagacatgtttagattcattgtacaagaaaacgtcgcatcctatcctattgatttttattgggacggagggaatatcttgcactcaccccatagccatcaatcccctcaccctgactcacaccgtggcggtgcctctcggttatgttaccttgatactttatgacattttctaagaaacatgaatatagaaaattaaataagtgcaaaaatagtgggtctaatgcattaccactcaagcatccatcaatcaaaatacatcgcatctaacaagatatggcacttgtagtcttgtaccaagaaaattacaaaggggaacaacttttagataagcctggattggaaggagagtagagcagaagaacaaaaaaagtactaggcagtaggtacaatagcagactataagccagctataaacacatttctaggagataaaataggagagagatgagcaacgggctacaaatttatagccagctgtagcacggactccaaaatacatgtgtgtataacaggtgagaccatatacatgtgtatataacaggtgagaccatatattaattatgtagtatatatatttataggtaactattatataaattagctattaagttgactataaataatttgaagccaacaattgactatactattaaacttgctcttagtcccatctctataacattagatgaaagtccaacggtcaatatcagtttctacagtgaaatgtgctaccgtacaccatacgacctgtcgtacataaggttactgtttctaccgcaaaataactatcgctaaagactcaagacactgttgtaacagtgcctttctgctgttacagcagaggacctggttgccgaggataccgtcccccgtgcggcgtgcgcgaccaagccgccatggccgagctctgacactcggcgcgtcgaggcgataggcgtacggtttgacaattcagggcctgagcttgcatagttgcattgcatcctctgctccgatggaagaagctacaaatgccggcccgagaatatccctacgattaattccgtcgcgctctccgcccgcacgcgcggcgtggcgcggcgcggcgcggcggcgtctcctacaaatggcgagcgcccgacggagaagagagctgaggcttatcgagtccgaggcttctgagcctgcttgttgccgccgctactggctgccgatctgctgcagttgggggggtctcccatggcggcggaggtcgggattggaagggcgacctgcgcggcgtgggcgcggcggcggggcgggggcggcccggcacgcctcctcgtcgtgtacggccgcgcctccacggcatcgtccccgccgcgcatcgacctccacgcgttcgacgccggcgcctccgccgtcgccgccgaccccctggtgagcgctccccgtccgtcctcccgcacgcgcgcgctccggcggcgttgtctgctcttcgcgtacgttcggtctgagcttgagtcgcggcgttgcgtttgtgctcgcgggttttcgcaggtgagcttcgtgatgggacacgaggaagacgacgccccgcgcgcgatcgccgtgcacccgagcggcgacgagttcgtctgcgccaccgcgaaagggtgcaggtgagttctgaatcgctcccgctaactcagacactcattctgatcagcttgatttgcactaacttttgtcagagtttatacttgctgttgctgataaaaagctcatgtttcatactcccaaatcacttgaaattcagatatacctgtcagcgttgttagatcatcagccaactactgttgtaggttattcaagctggtgactgaagaatccagtgttcaccttatttcaaaggatgctccaactctgcaatcaattggacctcagaaatgtctgtcattcagtacagatggtgcgaagtttgctgttggtggtgaggtaccgtgttatccaatctgtttattatgcacttcgctctttgtcagtagaatcataacttcagattctgcagtcacaagtttggcttcttaattcttatacaaggtttcctgataccattttttctggcaactacaggatgggcatcttagaatatttcattggccagatctgaatttgcttctgggtgaaccaaaagctcataaatctttcagagacatggacattaggtgagaaaaagcagaagcattgcctattcttttgacaaacataagcataaatcgacagaatcctccttgacattgtccataaactgaattagtcatatcaatatcattcaatatgttgcattgcacaagtaacaaggtagttttaaatataggctctgcctaagagttactttcttgggtgtaaggataattactgcccaacgtttttaacataactttatttcacaaaataaagtcattttggcagatttggatctttatattgttcctccttcttgcagcttagactccgagttgttagtctcaacatccactgatggttctgcaagaatatggaatatagatgagggagcgccgcttgtcaatttgagtagatcttcggtatcgtatgataaattactgcacttttctattttggtagttgaaactgagtcatttatttgactctcttgtttatatttgttcccccctttacaggatgagaagattgagtgctgctgcttttctagggatggaaataaacctttcctgttctgcacacttgtgaaaggtaatatattccataactctcaataggatgttaatatgtgcaccaccagccactttaatcaaatccttattgcttgaataggtcataacgttgtgactgtggttttggacataagtaattggaagaggatcgggtacaagaggcttttggaaaagcatatctccacactttcagtaagcttggatggaaagtatctcgcattgtaagttcattgtttctgcctcttactgtcacatgccatacactcatcctgactatagcaatactgttatgtagcatttgagagcctttttatggtgttatggactggtcataatagggtagtttccatttctcgcatttctcaccactcaatcactcatccatattgatgtatacttctttagctgacttctccttttgacaaatttatgcatgttcttagagagaatttacagaatacttgcacatcattatatttatgcatgttctgacaaagctgtggctgatgacatttgtttagtctcatatttctggaaaattacaaaaaaaatgtatatagtagtggggagggtaccagaagtgtgttcaattgactgaagaacttgttagctggccacctcataattaatcattatatgttattgttactctcttggggagttagatattgaaagaaacctagatacctgttttgttttgataaaaataaaaggaacatatacacttgctattctacttcaccttcaaatttgacacgtgtctgaaatcctaaatctgttgctgtatgtgcattagttcataatcttcttttcgtacatattttatatttttggatgtattttcaccctttgttattagaggaagccatgatagtgatttctgcgttgtggatgttaaaaagatggaagttttgcacttgagcaagaaggttcatcttggctctccaatttcatcaattgaattttgtcctacagaaaggtaattataaccattggtctttgttggaagaagtagtgagacaaaccgaaaatctctagcagtaaaatagttggcttcactaagcatccaagcacttagtaatggtctctggttgtaccaatgttgaaatttttagcagtaaattgtcttcactagtaatttgttcagtgctagaattcttgaagatactctgaagatccagcattaaggtattagattgcccacatgccttctcaacatgttaaaaaatggatcacacaacacgatggtaggtagataagcgagctatggtatcagcattatgcatggctaatttgcatatacatgggggcaggatggagcaagatttgtcctccaccagttcaccttgcccctgaaatttaaaaggaaattgtggattggttttactctgcatttctgcagtctgcactgcaattgcagatccatatgtgaatgaagatttgtcacatcaactctgttcataagcaaacatacggatgcttaatgttgttttctgaaattactgtacattttggatggcaatgctgcagatttttgaagtactgctggatagttacagtagcaattgtctgcttgtattgcagggttgtaatctccacttctcataaatggggagcagaggtaacgaaacttgatgttcctactgattggaaaggtacacgtttctgtcaatggattgagttttgtcctctgtaagtatttaccaatatgtttttttttcccctgcagtgtggcaaatgtggttagtactctcgtgtctgtttgtcacgtcggccatcctattctatgcgttcttcaaacacgtggtccatttggaaccctaaagaacagaatctggaggagaaaaatcataagtttctgacgatcagaaattcagaatccattgtaacaccagcatggctaacagcgatagctccattgtcatgatgagcgcttgctctatttgccactattcatttctgatgactatttgccattattcctttctaatgactgttcacctgttccaatttccaacccttaatccctgaaaatattgtcatcagagctttgtgcctgaatttatttcacaattttttatcgctcgataagtcaatacataacagaactgtctctttcatgacgatgaatgactgaatgtatctccgaccacaataaatcaaaggcgtttggtctttatcactgtgtccatttcgactgatactgacaacaactatgactcctgtactggatctgataagctgttaacgttccaaaatttgttgtcctctttatttccaagacccaacaaatttgtttatgtggactctagagcatgctttgcaatctgattctgggatatctgacgttgtcggcacatcatttacaggtcatctgacactgtgaggtgtgaacaattttctgcagtcccgcagccagggagagcccatgtttggtcacaacattgtcacacagggataagaatgaaacagagatctgcttttgactggtaaactctgcttctgtgattggttagactaaacctatcctgtactaacagtttcttctttcttcgtgtggacagtgccgacgagcatctgcacgcgtgcgtggactagcagtccagactcaggagacttgttgcagctgtgccgcatgcttccatttcctactgttcaacttgtgagctgtgagacttttggggcctgttccattgctctcaaggtatctttcatctcctgaatagcattcttgaatcgcatgcggctgaatgctgatgctgatgctccatgggattcacaaaatgcacaatagtggagttgacatgagatcctactgccattactgtagtttactgcattttctgctcatgagtgaatgacaggcatcacatccttttcccttttagggggtgtttagatatgtaaagttttggtgtcacatcgggtattatatagggtgtcgcatgggtgttcgagcactaataaaaaaactaattacagaatccgtcagtaaaccgcgagacgaatttattaagcctaattaatccgtcattagcaaatgtttactgtagcaccacattgtcaaatcatggagcaattaggcttaaatgattctcataaattagtcgcaatctgtacaattagttattttttagcctatatttaatatttcatgcaagtgttcaaacgttcgatgtgacaaggtgaaaaattttagggtggaatctaaacaaagcctaatgctactacttcatggattgtgtccacccttcatcaattactgtactccaagtaatccaagtacagaaacaggagctgcacagcacttccaaaatgtgtgacttgctaaaagcctaaattgccactgcaagctagagacagatgctagatgacaatctagaagagagataagtgcaagagcctgtcattttcagttgaggtgtctccgtgtctgatgtgagggcaagtacaaaggcagagaccggtatggtctctacgttaattagaggctatcatgttacaatagttaagacaatatggtctctaaccattaatgtattaaaatactttcttactagtcatctttcttttattagactcaatgcaacaaaaaattttctaataaatgctaagagtcgattctatgccattgtcatgcgtagcaaccatctttctctttccttctttctctctcttccacgtcacaaaatatgtttgtatgacaataaagagagaccgctaataaaaaccattgtacatgtcctgatctgttaggttttgcaattggtcaagtttatagcatatttatcagtcctagattttatagataatgacgatatcagagtggaaggtgaaaagggaaaacgcagtggaaaagttccatacttctggtagcactttccacatacaaaaaggagaggattcctctcttctttcgttccctcgtgctgctgctatgcctatatctcttctcatgtacccttcatattatcttccatttgcattaagttattatcttcaaatgattacttcacaactttctttgcaagcgtgaagatttgcatcaaactgatctcctacatctatattgcactgatttgatctaccactgacagaaaagttgtttttgtgcctttatggttgtgtacattcgttttgttcacttgtcagatagcactcagatattaaatgtgaagtaaagacgccaacaacttacatacacaattatacattggataatgtaagagttattagaagaccatagcatgtgttgcatgtgcttaagccgctatgattagcaaagtttggcaaggttttatttgctattgcaaaaaaaatgaaaaaggtagtagatttgtggggctgtgaaagctatatccaatatgcatgtaccagtacgactccacgttttcatgaaactgatatgcatctttttgtttttttttcttcgatggaaactgacatgcatcatgtcgatcgatttcaagaagggaaaaggaactaatctaaacagtttttaaacacgccgaattcgacgcttctggctttggtggcagtcgttttctccattatgatgaacatctaaatagctgtactttatgtgcacattttcaatcttatttcagttatagccattgcatatgattgctctcaagtgcaaatttgtagatacatatggaataatggatagttagagatattaattaaggagaagtccattcattcgccgtgggcgtgtcaatgtgtccttgtcatttccgatcatgcatgtttcgagatctgactttgcaagttgaggctggtcgtgatcacctaacgtcggggtgccaaggaaataaattacaggtaactgcctatacatcatgtgatagattttttaacctcctatcacgcagatttcttacactttagatgaacatctaacggatgacattaatatacacaaacaaaatacaaaacaccaaacaaacgggccatgtggataatctgaagctcacgtgggctcaaatgggctcaagtagatttcagacttacatcgtaaatatactaacattgagtttgaggagaaagagattgagaagatacgcaaaacaaggtaagccattagcgtatgattaattgagtgttaactattttaaatttaaaaaattgattaatatgatttttttaaagcaacttttctataaaaatttttttacaaaaaacacaccgtttagtagtttgggaaacgtgtgagcggaaaatgaaacaaactcactctctttctccagctgccgaacgcagccaaaattacatatgtaattatagtgtaattacgatgtaattagtacgtgtgggattataaacaaattagcattggaaaacacggctcaaatcaataatgatggagtcggcaagaatgctacacgaatcttgacactatccaacgtacataaatctgcaagatatgggactcaaaaatctgtcgccagacagatagcaattccgaaaaagatatacgactttctagtttattgcatagaaaaaaaatcaattatgctcattctaactgaaatgtcatgcatatctcccccatgatttttttgggcaaatcaatattgtgccacccttttgaagataattgttgtctaacaaaaaatatatgtattgctatatatattgataaagatctttgaagatcagcatgtgtattccagattcctatctagaagccatttttcaaacttgtaaacatagaagaatgacttgtactcgaaaaggttattcgtttatttctccaactatctgtatatacacacaaatacgtatcactttccagcactttagactttttttccctagcatatgagcccgatcgatcatgaaatatctgttggcattgtggcattgatgtgcaccgcatttagggatacacgtaattactatccgtcaacaatatagttaatgatggatcagtcgagcctatgcaacgaacagcttaactagctaaagctagcacagtaatcttttttttaaaagcagatcaagtaattgacccggctttttaaagaaagaccagaggtaaatatagcacaatgatctttcatagaagaatccggttccctagtgtgattgtaacttaagcaataagcactctagaataaaaaaaaccagaagggtaaggatgaaaacgatgatggaaagcgccatcattttggtactatagaattagtttcttaaattttaagtgaattacactttaggctagttattttttcctaagttacatggtggaccaattattgtcttatgttttcacttttgactgaattccttaccatttgttgcacattggatcatattggacattgttggtatctctttgccaccatggctagccggtgagggatcaccagtccacagcaaaggacttgagcgtgttcactgcctcatcaactcttagcctaagattcacgacaccacttctttctagtgctactactttctccgtcccataatataaggattttgtagtattacgatgcatgacaggactcaggagcttgccaatatgagggcatggatgatatagtcagcacaatgtgagaagaggatcgccaatccagagagacgagagaagctttgtgtgccatgtggggaagactagttttggatgaatcaggttaagtaaaaaggctattataggcactaacacgtggggttactagtctaaagtgcaaagtatttcttataaaataagtctactccattcatcctaaaataattggggcaattttatttctgcccctactttagtgtccaatattgattctaccatactttttagggttttcgtttttgtccctacttttttgaaccgaacaatatttttgcctctgttttgcatggagaagttaacggtgttaaattcttggcaaaaggacatttataccctctcatatctctattcattaattgtgtttttgcccccattttatgcatggctttggaaatttaaattcttggcaaaaggatatttaaatgacccacattgactaacataacaacttgcacagattctgaatttgatggaatttctacaaaatttcagcatcattttgacaaattgaacaaaactttgacaaaatttcaacgacatctcagcaaccttgccctctcggccttcacatccaagccacctgtaggtcgccgcctggccgacgcccaacgcctcctggccggcgcccgctgccgcctagccccctcctcgccgccgcctgtcactctccctgccgccacataccgcgcgcctcctgctcgccggcgggaggggctacggcattgcgcctggccgccgctcgctcggcgtcgacgcccgctcgccaccacctacccctctcctgccaccgagccctctccccatcgcctagaactatccccgtcgccgcctatcgcgcagcctcctactcgccggtgggaggggttgcggcgttgcgcctggccgatgacccgctcgccgccgcctgcaccgctcggatggccggatgggtttcagccgttgttatattcgagaggagagaagaatatgtgggttagatattttccaggggtaaaaaggtaaatcacaaaatcaaaaactattttttcttttatttctctatttctttactgctataaacccggtcccacaaacttccatctaaaccaggggtaaacgcctctttcggttcaaaaaaaaagaagtgagggtaaaaacgaaaaccctagaaagtagggtagaatcaatattggacactaaagtgggggcagaaacgaaattgtcccaaaataattttatctatgatagaatatgatatattctagaacaacaaacaaattttatccaaattcgttgttctgaaataggtcgcattatattctagatttagctattttgggacggaaggagtagtctaaagtgaaaacatatgtcaatgtctagttcaatgtgcaacttgggtaattaatggcctcatcttttcgcttaagcttatacttatcagctaaagttttgaattttcaaccttaaatttggggttgattttagggttttttttaattgaagtttacttttcagcctttgcttttaaatcactaagaacatgtatataaaagttttattcgcaaattatttttcgtttgtaaatatgtcatttcgctgaataagcgaaacgatgggccgtaaatctagtctaaagtgcaatttattttaattttttagtggtgtattgcaatcttcaaatatagttaattccctactgaccgagaatctttttgataggtgctttcgtttcggtctgttttcagtcctacgaaataccaagatcctttctcgataccgtatcaaattactgtagcagggtgttttaggtggtactggtaggtggttggcctgacttgtatgtgcaagagttggctctgaatgctgtcgattgtgttactgtaaagactaactcaaattcataggacagaggtgagatgtggatgctcaaatgtgcaaagaagagcatgaataattctgatggaatctcacaagttttggaatctgcaatacgggtttaatctactcatgttttgaaaaaaaaaatgtgcacaacttcatgggtgctaataccaagcagggtttggcgtcgtttgaatcaaagaaatgcaaacatttcgctgtctccaactcgatctgtatgcgctgtccttagcacgcacgttgttgttcttccaatgtgcccggtcactaaaaaacacagagaatattgtagagtgtactgtgtagctgtgaagatccagtatgatcccgtgacatacatagtgcaattgtttaaaattattctgatgatactaactgataaacttgacctagtaggatacagagagatcatgcatagacttggttaatgatgctagtgagtagtgacatgataattaagccgagacatgtacacatgtatgctagtgtgatcgaagtgtgcactcaaggctaagtagaatactggaatcaactaacctattgctacctcctccgtaggatcgatgcaaacatgatattatatatgcaagttgccttagaagtcaatatgttagggcgccttcggataataatcatctgtgattgcagcttgattgataattagtagggtggcatcagagccatttgatgtaggcaatggacggcccagatcaagctagccagcaaaggagtcagtccagtcaaatagtcaatccaagctgaggtgtaggctagcaagcatggttgaatgcgacgagctaggtcaatcaccgttgcttcaaacaatcacagggcacccggaatccgttgactcgctcacagtggcagtcaacacaggagagagaacgattcagtgtttgctagtgccttggcaacgcagatgattcggacacaaatttaatctgagatataaatccgaattgtgattttgtgcacttgtgcttctaatgtatatttttttttcatatagaagttatcatattatcatataaaagttctcaagtaaaagttttgttaaaaacgagaatattaggtaataacctaatatcaaataattagaaggggtgagacttcgaatccatatcgtatagcccaccatcttgtaaagctagccgaaaaacccttggatgtttcttggtgaaagcttaatgtacataaacaacaatccatacttcggtcggtatagaattgaagtggcatttggaaaacacccatccatttgtgatcttcattagaagaaaagacagtattaaaaaagtccaactcaataatatattcccttcgtttcaaaatgtttgacaccgttgactttttagcacatgtttgaccgttcgtcttattcaaaaaaatttatgaaatatgtaaaactatacgtgtacatgaaagtatatttaacaatgaatcaaatgatatgaaaagaataaataattacttaaattttttgaataagacgaatggttaaacacgtactaaaaagttaacggtgtcaaacattttgaaacggagggaatatatttttatcactgcaacatgtatagtaacaacaaataaattggcacaaaggatactagtgtgaacgtagtagacaagtttttctaacaaaagttatttttgtttatttcaccaagccgccaacatgtatagccgttgtattgtacatgtgaaaatcttcactaagcaagcagtctaagatgcgatgaccaaagatgatcatttctatacaccttgtctacttgttacgccgtccttaacaacaccaaattgtcgcaaatcacggtagattttatttaaaatcattgtcttctactatttgttacgaaagtgcatggttggctccctccccggctactcggcctccaaggttgtaaattagaacatggaaagagacggccatggcagtttcataacgagaagagatacccttgtactttcttattgcttaattaattcacacccttcaccttaattaatcatgccacatggtcttaactataagactatccatatgatcacagtgcgcatctgtggtttattattatctctcccaaggtgtctcagttggaccttcctaatcacatgtatctttgtttattaagtacgtaccaatcacaactatctcaattaatgcttgcatagcactatcagaaagaagctattaattgtgtggcatcaaaacctgaaaatagttgacaactaaccaacatggcaacatgtaagtactgaagctgccgtctaattaattaatttccctcgagtgattgagcatcatcaactcatctatgtcatggtgctacatcacgttgactagctagctatccaagagattggcacttttaccacttatcaaactatcagaatctctttcttctatatctgatactccccccgtgccataatataaaaaattttaaggggatgtgcacatcctattattatgaatttgaactggggttcatcacatcttttcaaaatctcttatattatagaacgaaataagtactatcttgttctgatttttttttctatgacatattctgatttttattttgttctatccatggtaaaatatgggcattctgctattttttttaaagtatctcaccagctgtgagactgtttcacactgtcactgacaaaccggtcccaccgtctagaagagcagaagctccagcggcaaactgccagaactgtagagatcaacaacagcacgccatatatggtcagcagagatcgctttccatcgccattgtggatggtcgtcggtacactcccaagtcaaagtcgcaacaacaattaaagaattaatcacaccatcatctcgactgaaaaaaaaaagatggacactaatattctgcaacatacgcggcctctatgatgccgcatggagccaaccgtttactatacaaacaagcagtcccctttcatgaaaactatagcgattgcgatttgcagagagaccattttctcatctattttcaaacactcttgctttcaaaatttcgttttggaacttttgataccgtccaactcccattaggcgttgcgtttgtatctcatcatccttatctgagaaaaagtagtcaccgtgtcagagtgaaaaaaaaaagactaaataagccaaaaaaaaaactttcattttttttaacggatcttcacctcacgctaatacggttggttgctactgcatcaccatctacagatgtaaaccatcttcatagtgcatccaaaatatcgaatatagttgaaaggttatccatgtcagagtaaaaccaaacttgaggcaaacgagtcaaaaaagaatttaaaatttcgcgcacgtttggatctccacatagcgctagcaccgtttggatgcatatccagaatttccggaatgcatatccaacatagtgggaggtggctggagccacatttaagcagctcaagacaatatttccccctttttttcccgttgaaaaaagaaaaaaaaaacactttcccccctctttttttcccctcctccgtgttgccaacttgccatccacccgttgctcgccgcagccgcccgcgcgctctataaaaacgcgcgcgcgcgccgcgctctcgccaccggacaagccaagcgcgcggcgcgtccacacacatttgcatagccacagccaagaagcgacgcgatggtgacggcggagtcgggcgtcgccggcggcggccgtggcgcggcggcgctgctgcgggaggtggcgacggcgcggttcgcgcggcaggtggtgctggggcggtggttcatggtgttcgcgtgcctgctgatcctgtcggcgtcgggggcgacgtacatcttcgggatctactccaaggtgctcaagtcgtcgctgggctacgaccagcggacgctgaacacgctctccttcttcaaggacctcggcgccaacgtcggcgtcatctccggcctcatcaacgaggtgacgccgccgtgggtggtgctcgccatgggcgccgccatgaacctcgcgggctacctcatgatctacctcgccatcgacggccgcacggcgcggccccccgtgtggctcatgtgcatctacatctgcgtcggcgccaactcgcagtcgttcgccaacaccggcgcgctcgtcacctgcgtcaagaacttcccggagagccggggcatcgtgctcggcttgctcaaggggttcgtcggcctcagcggcgccatcttcacgcagctctacgtcgccatctatggcgacgacgccaagtcgctggtgctgctcatcgcgtggctccccgccgccatctccatcctgttcgtccacaccgtccgcatcatgccgtacctccccagccgccgccgccgcgccgacggcgagctcgaggcctccgccgccaccagcaacgacgccttcttctgcttcctctacatctccatcgcgctcgccacctacctgctcaccatgatcgtggtgcagaaccagaccaacttctcgcacaccgcctacgtcgtgtcggccaccgcgctcctcctcgtcctcttcctcccgctcgtcgtcgtcatcaagcaggagtaccagatcaagaaggagctcgacgactccctccgtgagccccccacggtgaccatcgaaaagccagccgccgccgccatgcaaatgtcagcgatcaccaccaagcccaaaaccgagacaccgtcgtcgtcgtctccggcgccggcgccgccgtcttgctgcctcggttcttgcctgaagcacatgttcaacccgccagcgcagggggaggactacaccatcctgcaggcgctggtgagcgtggacatgctggtgctgttcctcgccaccatttgcggcgtcggcggcacgctgacggcgatcgacaacatggggcagatcgggcagtcgctggggtacccggcgaagagcatcaagacgttcatctcgctcatcagcatctggaactacgcgggccgcgtcacctcgggcttcgcgtcggagatgttcctcgcccgctacaggttcccgcgaccgctgatgctcacggcggtgctcctcctcgcctgcgtcggccacctcctcatcgcgttcggcgtcgcgcagtctctctacgccgcctccgtcatcatcggcttctgcttcggggcgcagtggccgctcctcttcgccatcatctccgaggtgttcggcctcaagtactactccacgctctacaacttcggctccgtggcgagccccgtcggcgcctacgtcctcaacgtccgcgtcgccggctacctctacgacgtcgaggcggccaggcagcacggcggctcgctcgccggcggcgacaagacctgcctcggcgtgcagtgcttcaggaaggccttcctcatcatcaccgccgccaccgtcgccggcgcgctcatctccctcgtgctcgtctggaggacaaggaacttctacaagggggacatctacgccaagttccgcgagaacaccgccaccgacgaagctaccaccaacggtaactccgccgatacagcggcggaaaaaaggtcaaccttagtcaatgacgaggacagtaaaaaggggtagtaatgtagtttactgatataaagattactacaccaaaagacaagagcttgttacttcttattagcagaaaagtcaaaaaatggtaggcttgctgctaatataagtttccagatatctgtaaaaaattttggggctaaaaagaaagaatctactactagtggagtaaacaagattaggcagcagctctgtgcttgtacccattacaagcaacagtaagctgcaagctagagtaaaatactgtcactgtaagaagttgggtgattaaggccctgtttagatgggactaaaagttttaagtccctatcacatcggatgtttgaaaattaattataaatattaaacgtagactattaataaaacccatccataatcttggactaatttgcgagacgaatctaatgagcctaattaatccatgattagcctatgtgatgctacagtaaacattctctaattatagattaattaggcttaaaaaatttgtctcatgaattagcttttatttatgtaattagttttgtaagtagtctatatttaatactctaaattagtgtctaaagacagggactaaagttaagtcactggatctaaacaccacctaactgatgaaacattggcttctgcctctgctcaagatgggcttaattatgctgtaattaattaccttggcaaaggccggtttgaccattaaaatggatgagacggatgaagcgatggatgaatgccggccacagcctgggctagtgacggtgatgtctaaacatgaggtggagctttttttggctgctgctgaatcactccatcatatgcaaacgtttgtttctttgcatcatgcataagctttgaattttgatgagaaccaggagagatgctcacggcatattagcatcacttgttgtttctttgcgtttcaattcttggcttgatccccatatctacggcgcatatgacgtgcagttcttaccatctgaaaactgaaagctatgttaacttaaccccattggatcccgagaaaattgcaatttgggactgcaaacatagggacactccgagtggatgataattgggcccatctgtgtttatgaaatgtgggtccagtgtcattatagcaaaagttaatgtttgcagtgttataattgcaaatcccccgaatcggatccagaggggaaatattgcagttcagaagagtacagaatgacaacattgactgattgacactagaaatacatagatttggtcatttaggagttcacaagagtacagaaaacggtcatatatatgcttcaaattttataaacctcctggctcctgattctcataccatatgctaaacttcatataatgctgtctctcgtccaaatttgattttgcaaactatagggtagatgattgcagaaaaccactccatcaaggttcagttacttcaaatttactagccctattagctaaagaaaacctgaaacaaaaacatactactccaatttaagcatgttggagaagcccaagaataagcctattttgcctccgtctcctcttgtccctggacgaatcacatcactcaagccctcaaccacaacttcaataacaggtgaatttgacttcttcagtggttttggaagcggtttctgttgacgtggtaagttaacttggttaaaatgtgctgacgtggtagactggtcatcaaagtaattaaaaatagaagtgggtcccacatgtaagtgataaggataaaaataaaaataaggtgtgagccacttgtcaaccccacttctctctctcggcgaaatgcagcacccaaaattacggcccatatagatgggtcggtttgtgtcttcccaaataagcccacatacaggccctgtatacctggatgggcctacattgaagcccatctaaacgaggcatcgggccggaatcttaccggttttgggcccttatgaatattggcgtgtcgcgacgccccacgactcatcggcggcttccctcccatcgccgacatgcctaggaaggagcgcgacagcgagagcagccgccgccggcggcggcggcggcagcgcagccggtcgccgtccgactcggaggaagcctccgactccagcggctcgccgcggcggagccggagccggaaccgccgcaagagccgccggagggacaccccttcgtccagcgacgcgagcgattcccaggcgtcggactccgggtcggactccggcggccgggtccggaggaggagcggaagccggaagaagggggaggtcaccgaagagcagatcgtggagtacatggctaagaaggcgcagaagaaggtattggggcggtggaggttcgggttttccgtttggttggctccattgttgcggctagggttttgatttctaactaacttgttgatggtggtggtggctgtgcaggcagagaaggtagcgaagaagatgaaggcgaatgctgtgtcggggtactccaatgactcgaacccctttggcgatcccaacctgaccgagaagtacgcgaattcgtccccctctcctgccacattattcgttccattagtggtgttgcttagctaagtagaaatttgggctgaaatttgtttgaactgtgtcacggatgacataaacaggaggccaaaagttacacttcccttgtttgtttgatgccctaaaattgtgtgcagattgatgattactgtcatttatttacattagtaaggcttgagcttacttattgatcacttcattttgacacctacagccaccaaggatacatatatcttgtatagaaaaaaaaaagaaaatgctcttggttacttgtgtggcccaataaaaaaaaactctaaatgtggtttgtctaagccaactggtaattgtatttggggaagacgtcaagttggttcgttagatataggtagtatttatcagttgcaacattaacacagctaacaacttacaagtaaaatcgaggctataatgtttgtctaactaggtagtgtactggacaaatgtatgaaggattgaattgatagcttagtgaactactgattgagatcatctgactacggtagatgtcttctgacttgtttattcatttgttgcactctctagaatgagttatgaacatttatgagaaatctttctctcaactgtgagaaatctcgtagagcattattttgcatactgttatcagtagacagttttgcagtcaagatttctaatgtttaacaatgttatcatgtgatatgaccatatggaaatgttgttggctgcacttcagatcctaattttatccctacttgttgcgtttgcactgattgcttactttgactgttcaaaagtaatactctcaaccttgtattggtgcagatttgtttggcgaaagaagattgagcgtgatgtatctcaagggcaaaaggtggacatttctgttaaaggtgaaaagaagaaacagagagaaagaatggtacttcttttttccttttattatcctgaacttcaaatcttatgataggagtaccactggcatgctttctgaacttggagatgactcttcattgaaattaacaaaaataaaggactcaaaggacatttactcaatactacttgctttcattttaggataataaaacaatattatctcgtgttaccttgccagattataattatattgttatcatcttatgcaagtgtccaaatacataataacacgttggggtgagaatacctatagtttcacccaaaacaatagtgagaaacaacagattatgtactaaacatttgcatcagtgcccaatgccttgccccaaagaactacagcctaaaatgtggatgcatgtaaatttacacatgagtagagattatatggatctgtttcttgcaagaatgccattggctggttctttgcagaagcagttttatatttgatgttatctttcaagatagagtaatatgtcactagcctgcaactttactattttattcttaatataggctgaaatagagaaggttaagaaaagaagggaggaaagagcgatcgaaaaggcacagcatgaggaggaaatggtctgtatatatctctctggttaccattaatcttctctttgtttcaagtaacacttttttgtggaactaaatgtctataattgtatttcttaggcattgttagccagagaaagagcacgcgctgagtttcaggattgggagaagaaagaggaagaggttcatattttacaacatggcaaatatcatttggtctcatgctgaattaagccggacttcttttatgtaacaatttttgtcttctattgcagtttcattttgatcaaagcaaagttagatctgagatcaggttacgcgaggggcgcacaaaacctattgatgttctcctgaagaatctcaatttctcagaagaatttgatgttgagttaaacgagccctacttggtattcaaggtaaattgaacttctcttacccacttgattatagttaaccaaagagccgctatatggatgcacctatcgagaagttactttgtatgtatctggttctcacatatgatgttcactcaatcattagctgatgttggtgccaggctttctttcatactatcaaacaaatgcaataaatttcagatatacatcattaacattctggattctcttctgaaagaatggctccctataaccaactgtttatccttctataatctccagcttcatccgccttaagcgttacccttttagaacgtgcaggaatactgtgtccttgtattcaaagtaaaaggttcaatgtttcaatatatcctaagataccttacatcttagaaatagccttaaacattctaacgattcatcattaactacattctaattagagaggtggaaacatgtatctctcaatgggtttgaaatttaatcactccatctgttcttactttacaactagcccagatctgaaagagttcccttttccttttaacacttaaacatatgtgatgtgctaaatgcagggattaacggtgaaggaaatggaagagctgcgcgatgacattaagatgcatcttgatctggacagggaaagccaaataaatgtcaaatactgggaggtgtgtctttgtctcaacattcattataatattaccctttacttgaataatcatatgaattcatatgactgatgtgtatgttgcataatgtatattcctgttgattgaggttagtaccaaatggcatatagtccaaaacagtaatgctaaatttttgagattttgataattatgttttgttggatcgatctttggcaaaaatattgtgccgtagtatgtcagaacatattttttagcttgttgtatatatggtttgcctataggccgtaggttttcacaaaaaaaaaactaaatcaagttattcctaatatgacagtaggaactaataatttctgtgatttcatgttgctctcttgatctaattagcaaggatgctcagggctgttgaccaattgtccactctttatttcaaattcatcaggcactcatggtggtatgtgactgggagctaggtgaggctcggaaaagagatgccttggatcgggctagggtgcgtggtgaggaaccacctcctgatgttcttgcggaagagaggggcttacatgcaagtattgagggtgatgtaaaggatcttttggagggtaagacttccacagaactagaagagatgcaaagtcaaattgagtcccaaatgcgctctggaacagcaaaagttgttgaatactgggaggccattctgaaacgccttcatatttacaaagcaaaggtatgccatgcttgcagacactaaaagacactcttcttttcttcttgtagcaaatgtgattccatccatatcacactatcttggttgtttcatttgcattacacaaataaaatgtgttctggtatcttgatttgaccttagttcttgcatcataatcagatcctggtttggattcttatatgaacttgtgaaactgctttgcctaactttctgaatttgcagtttatatggttgcccggtttaaatagtgtataataggtgaaagcttacctttttctgcattgcaggcttgcctgagggaaatccatgcttcgatcttacggaagcatctacatcgtctggagcatcctgattccattgagcaggataaggaatctgaggatgaaatcgatgctaaagagaaggatgcaacacatattgacgatgatgatgatgatgatgatgaaggtttagttttatttctgtatttccagtcactcaaatactcccttccatgctgtaactctagcgactatgagttcttatacctactttatgtgtagatgataagcgatattcgcctgaacctatagcggagcaaacagagagtcatttggatgaagaagacggatccttttctcctgagctaatgcatggcaatgaagatgaagatgcaattgatcctgaggaggacaaggcagaactggtagtgtcctcactcctgctacacttagcttttaatactgcctccgtttcaggttataagactttctagtattgtccacattcatatagatgttaatgaatctgggcacacatatatgtctagattcatcaatatatatatataaatgtgggcaatgctagaaagtcttataatatgaaacggaggaagtaaatgctaagaaaatagtggtagtttttatgtagtgaagtgaactgcaattgttttacaaattggcagacttactatttattagacactatattgtgcaaaaagatgaacaagccagtacaattgtttaggtatcatatagatcttttcttaaggcaccaactggattcccattgacccattcatgtttaccctgagaaaggccttttagtttcatcgtgtaccatagtacacttacggtcatttgtcagtgtaaggtgttattattggcttatatattggagtttacatacatgaaatttttatctcaattcaggattacatcattaggtacattcgtgagttgattgcagattttaaatgttggcaattcatagaatattcctatgcactttgaattaatgtccaggatcgaaaacgtgaagctgtagttatggagcatcaaaagaaagttcagcaggccatcgcagtgaagacaagagtacccgatgagatggagatgaaagcaatgaaagcaatgggagctatggaggaaggagatgctgtgttt

SEQ ID NO: 8164 - DNA, 30328 bp, Oryza sativa
aattgcggaataaattttacctttccaatagcattgctgaactttgcaaaagcttcaacttgcaagaattctggcaatacctgtacaattcatgattgtcaatagtatacgcaaattttaccatgatgaagtggtttagtgagtgcttacttcaggacttgcggcagcatagcttgataacctgtccatgagttgagacagcacggttttgatatcaacatttggctgccacaaaatagtaatgagtgagtaacaatcgcagtgaaaattggacagaaaattacatcccgattcttatatatcaaaatatacactgagttgtattaatttattctacggttgtggatttttgtgttaaatgcagcttaaactacagatcatgacagaacaaaatgtactacatgtacatgataaagccttttgcaaaattatgtgtcaagttcactagtcgcattttacaacaaagtagcaagtgaacaactgacacggtcaaagaccctatgtaaagctactagcatgcgcagattaaaagtgaatctgactcgcttgagttgattccctgattgagttgtattttgagacagatggagtagttaatagaacatcaggcagtgcaaatcaaattgatcaagcagacaaagacataaggatgacttggtagttaactcatttggttgacacaatcaactaaatatgtcacattataatcatccacatcagtgtttaatttctaacatgcaacgatatgcagagaacaatcaagttaaaataacataaacatgccaacctgtagttgcggaaatgcgctcaacaatgtttccaatgtctgtaaatggtattcgtctggaaagacttgtattatgcagtccatcaggtagaattgtgcaagttcatccttacaattaaccacctgccaatatatttcttcttcagcttccagtagaatcatggatcattttataatttgtcaacaaatctaattgcagacctgttctaatatccttggaaggacagtttctttgtacatgtcaaggtcaacaccctcaatctggcttagaacgtgaaggtttttgcctacctagaaaaaagaaagaacagtagcaatgtcattgaaatgacaccaaagaacatgtagtgtagggaatacatgtaattgatgattaccaaatcacgcagttcatttctttcttttccccgcttctccttctctcgaacagggccctgcaaaccataatcatcaaggccggtttaagttattatctggttagataatcttgagcttcctagaggtgacatctgtgataaaagcttgtattcatgaacagcatgggaaacaatgtatgcatgcgcagaaacctaaggcggtaaatgcatggtaggggaaagtatcgcagcacttgtactcagacttcagcttgaaaagaaaaaaaaaagcttcaagttgcaagctgaatcaaacctgatgttgcattcggacccagagtttgttcatttctatgaaattctgaagaacaaactcaactgcgacgttaatgctgtcagcatccctgtgtgatgaaagttgcaaaaggcaggtataaagaaacaattaggtactgtaaaagagaagaacataaatgtgaagtagcatatactttcaggacaaaacacttttgcgctctgcatgtcctaactcccagatataataaagtgaattgaacttcatgttgcctctagtgtactgatacatgatcaagcagcgctactggcaaagtggcaatagttaagacttccaatatacagttggtcctaaataaggattggtaaattatatatgagatagatagagcagcgatgacaaataaatgaattaatgcacaggaagtcacagaatcaatgcctacaccatagcatgcacgattcaaaacgaagagcaagggaactacgtacttaacattaatttgtctatcagttccctttcatttggattttgtgattacagcctgttcaaaaggtactatatgaatgccaaattaatgttgtagaataagacaacattttacatacatatgaaacattagtttatcttcagttactgaacatttaaacagcatggcatggagtgcattacccttcatactcggaaccaatatctggcagtttgtctcggcttatctgagataggtagcttcttaggaaaagcccacgaagaggatgttggatgcctcgacacatttcaacaaggtctttaagaacgtctttcgcaggagcctcttttgatttaatgtacacagatcctactgtgcagaggagatagctaggacatgaacaacaccaaatcaggttcataccataacagttcttcagcaatttcaaatgagtcaaaatcacatcccattgtacatgcaagcatgattaaccgttggcctcacattcaggtgtgacaagtgtattcaagttggtcacagtaaaatcaccagggatcagtgttctaaagtcagtgctaggcaccgggtagtcatcgtgattaggcattagatggtgcatttaggtggctaacctaccttgggtggtgttttgttgctattttagtgttatattgtctgaatttaagtaatatacttactaatttcttgggtttgactagttggtttgacctaggcgccagcccttccaactctctagcaccttcttgaaccatgtcggcaattgaatgatatggcttatataatgtctactggtatgagcactgatagtcaagcaataagactaattaagttcagttgtaccaagtaaatatacagtagttcaaacttcaaactagtcttttcaacaaagttaaagttactcgaaagttaaactatcgaagtaccaagttctgccattgatctagtagctacaagttattactagatcgtatagagttgtaatgatctacaggactgcaatacccaccacaaattcggctccagaaacctcacagagcaagtaaaacagagctaacagcacataattacacaaagttaacagctgtttatgcctgacaaggggtgcattagtcttacagtctgggcagtacgttgccagcatgctgcacaagctcatacaaatcaacaacggagcagctgccacgacgggtctcctccctgaagaacatctccagcttccgcatctcatcaaacgccctcatatctgcagcaaaatcaataaacccccatcaaatcccagctgaaaccacagccaaaattgggcgcactgaggaatcctgacacataagaaacactcacatagatcataatacttgtgcggcgagagccgcgaggtccgcagctcggagagcatctgcgccgagtacttgagcgcatccttgaggttgttcgaatcctgcgcacgaattgccgatcggggcagatgataagcgagagggggcagtcacagaccgagggagctagggtttggcgggccttacgagggcgcggtgcatgtagaaggcgttctgctggacgccggcgatgccctcggcgagccaccgctcctcgtcgtcggcgccgccatccggcagcatcctgaccgccgccgtggccgccgtcttcgctggctgcgggggtggatctggtcggcctctggtggctcgggttggggttggggttggatctcgcctctcgcgcgtgggcttgtcccctctcgggtttggatcggggcgagtgtttgtgttcttcgagtgtttttttatgatcggttttttcctcttttttttctgttttccgaagtggttcgatgattcgatctggatcagatgagttgacggccgaactgggtctggggtgggctgacttgtcggtaaaggccctgttagtttcaaaaactttttcccaaaatatcacatcgaatctttggacacatgtataaagtattaaatatagatacattaaaaaactaattacacaattaggggggaaatcgtgagacgaatcttttgagcctaattagtccatgattagctataagtgctatagtaactcacatcgtctcgcggtttccaggcgagttatgcaataggcttttcattcgtgtctgaaaactcgttccgacatccggtcaaacgtccgatgtgacactcaaaaatttttcttttcacgaactaaacaggcccaaaaacgaatttaggcctctttagttcccaaataaaatttttcacgctgtcacatcgaaatgtttggacatatgcatggactattaaatatagagaaaaaccaattatataattcgctgggaaattgcgagacgaatcttttaagcctaatgacgccatgatttgacaatgtggtgctacattaaacatttgctaatgacggattaattaggcttgataaattcgtctcagattcctagcggaatctgtaatttattttgttattagactacgtttaatactttaaatgtatgtctgtatatccgatgtgatatgcaggggcaaaaatttttgccaactaaacaggcccttactatctaagtgggtttaaaaatatgaatttactccatctgaaacctgctctattttttttcttctaaaaaagttagctatagccttttatctctactattataaaagttgaagatgtttttatcaatactttggtacgtcctccgtgtatgagtcggtttttaagttcgtttacttttggaaattcaaatatgtatttgagtcgagttttaagtttgttcgcttttggaaatacaggaggagtcgtataagaaatatctttttagaaaaacttgcatgttaacttagatttatcggactcctaattgtagcttatgattttctacaaaataatatatccaagcgatgatcgaactcctaattgcagttcatgattttctagaaaataatatatcaaagcaaattctcacagtaaatttcaccttaactagaccgtataacaataataaaattaaaatagccttcacccgttgcaacgataggcaatttttctagtaacaccaaaacttaatacgatcctttagccgatgagagatttattcttaagagacggagttcaaaaataatttaataacttttttttatctttagaaagttttgtctaatattcaatcaggactagtatttttttcttttatttctataaaacttgtatggtattcgattaggactagtctcaacccgagagtataaatatatacacccagattacacccggagtctttgtaatctatctccacatatcaatacaattgcttttggcccatcgtcacggactagtctcaacccaagagtataaatatgtacacccagattacaccccgagagtataaatatgtacacccagattacaccccgagagtataaatatgtacacccagattacacccggagtctttgtaatctatttccacatatcaatgcaattgctttcggcgcatcgtcacctttattccgacgggactagtatcaacccgatgagttcttagttttaagtttgggttgtatcggttaaattcgatctccggcaagaaaataaattctgtcatgcaaggaagtaaattcatcatcttcgcttgtatcagcgtagttaaaagcccagaactttctcggttaagtccaatattctatagttttgcctatcagagaagacaaaactagtcatttaatacaaattatgcctaactcatctttgaactgaaccagtagtaggggcaagacactgggataacacatcagaataccatcaatgattttgtcacacgatttcattctcatttcttaacaatctcgagtgctaaaatacaccgccatctggagtagtcccaaagggaccatccaagagaattcatgcgtgaaatcgcgttgttgagagaattcatgcgtgaaatcgcgctgttgagacatcacgcatgactacgtagtagtagataaataaccacaggacgagtgttcaaataacggaatatatagaacacctaattattacacttagtgcccatacggatcttattacatcagtgcatcggaaaaaaaaatcttactccatcaatagtatgtctgagacagtccagacaagtaacatggccatcgaggaaatcacgagcttcatagttatatcaaacctaaatgtgagaaaatatatatataagaattaatatggttagttaacaagtactagtaaagattaatggataggattcaagtaatatatgctaagggttatcgcaatcatcgacaagttgcaaaataccactgcgaaatagaatttagcaatggtatctatgaatatgattgcggtaatactttgtattgtcccacttacaatgggtcctctcgcttgatagcttccgattctttaagattctttatcaacgagagtagcttaagcttctcttcatcttgcattctaaacagctcctctccctcctcagtttgccttggtgctcttgaagattcttgcttaggcgagggactctgggcaataaaaaaatatatttgaattaaggtacaacttacaagcaagcagtttcttttttacttttatgagaacaagtaatttcccacgaataaggatcatactccgtgctagcaataagaatcgtaagaagagctcctgtctaattatgtcaagataacacaggaaaacaagatggctagatagacaagaaaatgaactgattatcataatttaacctatcgtgagtacagatgggagcactaattttggttaatctaaaaaagaatcatttatttagatccagtaagagagagaagcatttaccgtgccacgtgactcggaaacactggaagagaagaaacgatacggggtgagcggcggcggcggcggcggcgtcaggtgtttccggcggagaaggccgccatggctaagcaaccttggcgggataaccgtggccgccggctggggctgaatcttgggtagagcgcggaggcccatcctactcttgctcgccagagaccgaagagccgctgccgccatggtcgctggcgaaatcgatctcctctgtctatcgatccctaatcccccctttgtacttctgtgttaaccggaataagactatgagacatcttagagttggacttggacttgggagtcttggacacgaacatgtgggctgtggctgaggccttcacctcaccgtacaaaggaatataagttcactttgactcccagtaactgaatcggattcatatccctctccctctctctttctctccccttcggccttctgcaagaggcagtcagtagtgacggcgggagggtgggcaccggagcggcggcggcggcttgggtggggaatcttggattgctccgcctagaaatttccccagcaaaaatcaaagcaacagagtcaaaatcgaagcagtacaagcaaacagatgaagcagagaagggtcacgtcctcacgtcggtgagccctggaattgaagagcaagcaaatcaaggcagaaggaggcacaccttgagctcaacgttgaggacacagcagagcagatggcagatcgtagaggcgcatctggttgtcgcaacttggttcatggacccctcgacctggaacccagcacaatcaagcaaagcaagccaaaatcagagcgttggccctcgccgcacgccgcaggagagagagagggaggggggaggggctctgccgctcgctgccgtctccgcttgcccaccgccgctctggcccttgccgccgctcgccgccgtcttcgcttgcccgcgccgctccggccctcgtcgcacgccgcgggagaaagagagggaggggctccaccgctcgccgccatctccggttgcccacgccgctctggccctcgccgccacctgcgggagaagggaccggagggagggggagagagataagagagagacggcgccacaatatgcgaatgacattggggtcccacacatattttttttatccacctaggcgtcacggcaacgccatgtgaaacgaagaccaggtcaataacaccagtaaacgccacatcagcgaaaccattctccaaaatcaccaatggagtcaaattgcatcggtattaatatttggggatcgagatatctgatattgtggttgagggatatgaatcaaatttgatcagggagttaaagtgaacttagggcctgttcactttgatgccattttcaaccttacaaaattttggtaaagttatcaaaaaagtggctacatttagtttgctgccaaattttggtaactatataagaaatcctgccaaaattttggtaagttgccaaaattgtggtaaggtttttttggcatcaaagtgaacaggcccttagactgtgttcggatgtctgagttcccaactctaacagtgtgcacggaaaacggagcggtctattagcgcgtgattaattaagtattagctatttttttcaaaaatagatcaatatgattttttaagcaacttacctatagaaactttttataaaaaatgcatcgtttaacagtttgaaaagcgtgcgcgcgaaaaacgagaggagagtgttgggaacttggagttttaacacaaccttattccgccgtacaaaagtggagagggagagaaagaaggtacgcagtagcagctcgcttcctcccctctggttgatcttctacccttcggtcggccgaatcagcaagcgggaaggctggggcttgctcgatcccaaagccctagcctcctcgtcggcagatgcaaaggtttctgggtggattcgtcggcggcgatgcgcgtgaggaggcagtgaggtggatggtggaggcgggggatagatgagcggatgtgggggattgagactctgatgagcagaactgaggtgtggcaacgggcaatcggatccagaacaaaacgggtccaaacccaaatcaagttgcgggcccgataatagttgcacgaatcatggagcgatctacttcctccgtttcacaatgtaagtcattctagcattttacacattcatattgattttagtgaatctagataaatatatatgtctagattcattaatatcaatataaatatgggaaatgctagaataacttacattgtgaaacggagggagtagtggttaggaattcagctgaaaaaacaaaaaaaaatcagcaaggtgttacgtagcaaatccttaaaatttttattaataaattacttttcgtttgcaaatatgttaagccaaacgattgggtccacgaagcgtacattttttcctccccaacatactaggaaggagctttggtttggttcggtttgttattaggaaggagatatttttattattatatatacttccgtcattccatattgaaaaaaaaaaagagggagcgatgatgtggacacactgacatactccattgttaacgaccaaatccctcctcttcccatctctcctcctcctctcttctcccttactcggttactctctctcattcttctttgggcaggccggcccacgggcacgaggcgggagaaagggagggcggccggccggcgatggccgacgcgggagaaggcgagacgatggctcctcctaccgcgggcgcgaggcgggagagagggagggtggccggtggcggccgatgctggggcgacggcggccggtgatggccgacgcgggagaaggggagacgatgggtcctcctaccgcgggcgcgaggcgggagagagggagggcggccggtggcggcgccggccgacgctgggccggcgatggcggccgacgctggggcgaacttcgcaagcagacgcacggccccacacaggcacgactcctcccttgtcgcgaacttcgcaagcagacgcaggcactagcgagcggcagcggcgagtgagcccttgttggcctgttctgctgcccccatcctctgcaacctgcagcttttcttgagcggcacttgtttaagggagtgtttgggaactagggactaaatttaggcctctcataaaaatataaatccctaccataaagacttattcttttataagagggactaaaatttagccccactttagtccctctaaccaaacaccgcctcaatattgtttatgcatcgggtgtcatgtgctaaaacaagctagactgctgttgtgcttctgcaaacaaggaatcgcccaacagtagcaagaaagaatggttggagatgctttgctactgggtttccttccgacactgtagcggagctcaataatgtcagggatttgagctgatgagctttatctctgccctgaatgtttccttttgcagctatggttttggacttttggtgttactgacgtgaacatgttaaatgtatgtttgtggcttggtgaacctgcttaatggctgctataaaaccgttttgttcttttcatttggtgttactgatatgaagctaactgtaactgagtatgatgtacaaatacaagctagcagcctagcaaagcttgatcgatagcaatggcggcgaaggcgatcgactgcccgccagcgccgaggccgacgccggcgtcgacgcccagcaccgggttgtcgtcgtgcccacgcgacgcgctgaagctgcgtgtgtgcgccaacgtgcttggcctcgtcaaggccaaggtcggcgcggtggcgccgtacgagccctgctgctcgctgctcgacggcctcgtcgacctcgacgccgtcgtctgcctctgcacccggccctgcctcctcctccgcgcccagcaccgcggcgcccgcccgcgctgggccgcttcgccgccggcggcgactcagcgccgtcgacgccattcgagaccggccgccgccctcgccttctcccgcgtcacagccgccgccgccgccgcctcctcctctcccgcctcgccccgacagcctcttcccagccgccagccggctttgcccagagaagataagagaagagaagagtgagagagagaaagaggaggaagggagaggaggggagagagagagaggaggtgatgatgtggcatcctgacacatggggtcatgtgttctacgctgacttagctgtcacgcaggataaaaccgggtcaaaaccaccgaataagatattatgatcggttttgattagttaagtgacatcggatatttggttttgctgtttggggatgaatttgtaactcgatgataagttgagggatcttctgtgtactttttccttccatatcattatctaagcaaatagtgtatagagataaaaaaaaacaattaaatcttagtcgttctgaaataatcctcgtcggtccatactgcatgatgatcggagtgccaatggagtcgcgaatgaacgatgtcgtgatagaggaaactacatgccacggacaggtaggactccatcgtttaggttatcgagggaataagcgtaatgacatatttataactagaaaataatttactcttccatatacaccttctatacacctacacctaggtgtatgtattccatttattagtggatgatccattagcattaaattagccatgaaaaagaataaaattattaatttccaaatcaccgcatgcatatggcctagctgcccagcggatttggtgcaaatttgaacaagggcgttggcatgcatttgctttcaaatttgataacgtaccatagttatacccgtttttttgacaaattgacccttttggaaaacttatttcgaaactaacccctgccaaaaacttcaaccaaaaataggccgtcgcctcagcgccaaacacattggcgctgacgttggccgtgtcagcgccaacgggactggcgctgacattgtgccaccgtggcggccgggccgatccccagctgacgtggcagctacctcagcgccaaccggactggcgctgaggtgggacttggccgcaacccccaaggcctagaccagcaaggcttctggatggcttgcgggcttggacctcagcgccagccataatggcgctgaccgtgggacactcagcgccagcccacaaggcccagaccagcaagcctgctggatggcttgcgggctgggacctcagcgccagccataatggcgctgaccgtgggacactcagcgccaggtgggccttggccgtttcgagccttctggatggcttgcgggctgggacctcagcgccatccataatggcgctgactgtgggaaactcagcgccagcccacctggcgttgaggttggacttggccgtttcggccgtggcccagctcagcaagccttctggatggctgggctgggacctcagcgccaggtgcactggcgctgagtttggacatgtcagcgccatttagcatggcgctgacgtcccagccctgctaaactttagcaaaactttgcacacaacataggcaaacatcaaatcacagaaatttacaggcagtaatatatccagagaaccatacaaaacatacatccatccatcaatcccaacatcattccatacatccatagaatccatcaatacatccatgtcggtgacatgggaccgggagtatcatgactagaggcttgaggcagacacaatcgcccacgtggcctggcaccctcgggggacgtcgggcccgagggtgatgtgtgcgcccacctcttggtctccccgagggggggtcggaccactccttcctcgcccccgagggccgaggcgccccgacccctcgcgtttctactccacgtgtatgagttaggtgagcacagcggggctcacctaaccgcatttattgcgccgcggctaagcgtgtcacgccacacgaagtgcagtgcagtgcactcgattatccggtctgtgaccagtcacagaccggtcaaatcgcgggttaggtggcgacaggcggtctgacgcacgcttcgccccgtcccgtcaagacgagagcttctaggcactcgtccccggctggagctagcgtgttacatcccagagatgacacgttagccccgatcaatatatgccaggcttcatcctaaccattacaagcaagatgttgtttgaagaagggcgaacatgcatgttgctaagccaacgcgtggtggacaagaatgaccgatttgtgactggtctgacactgctcatgtcgtcagcacacggccaccttcccacgatgtgcctgtctcaggcagaagtggaggtaggtgtgtgccgtcccgtcaggaggatgttcggaggacgaccgtgcaaatctccgtccatttatgaagagaagaaaagtccagtttggaaagggaaaggggcatgtggtatccccttgaaatataaaaggaggacctggcccatagagaagggggatgatctttttctagattgagaacctagaacgagggttggatcttttacagattcgggacctagaacaagggagaggttggctcacactttgtaactccttcatacacaaatccaccaaaacacaggagtagggtattacgcttctcagcggcccgaacctgtatacatcgttcgtgtttcgtgctctttcgatagctggcaatctttccacatacagagagagcttgggatcatcaccctgagcccccggccgaaccggcaaaggggggcccgtgcggtctcccggtgaggagccccgcgctccgtcaatccatatatgaagtccatatatataagaaataaaaacatcccatcgatcctcgtctatacatccagtcgagtccatacatccagtccatacatccatcgaaccatgcatcaagtccatccatctatccatccatccattgaaccatgcactcacctcctcctacctctagtgcgaggacgaggcacgtcgggggtgtacctccagtcctgcgaaggagcccgccggcgtcgtggtcgagacgggccgggctgcgagatatccggctgtgacgactctggtgcgtcctctagctgcgagggaccgagctcatccgcctcctcttctctgtcctcatccccttcttcctcctcatctccttcctccgcctctttgtcttgctcgccctcctcgtcacccacctccccttcttcatccccctcttggtgggcatgagcatgttcgaccacatcagtcgacctgcagccgagccttgctgccaacttccgacatcgctgccgtagtctctgcataaaaaataatccatgttaagttatcgcttttggaagaaaacaccgtagtttcatctctttccaacgattacctgtagggcgttgcggagggtgccgccctctccttcggagccaggagccgtgcctagcaccactcccgcgtcgttgacggtccgcaagagctctcgagcctgtaggattgaaatgaagtaagtcacaacatatatggcattgaaatgaaataatatacaacattaatgctagaaactaaccactctgtcgcgaacaggtcccgtctcgaccgtggtacctagacgggtacgagtatcgtactcgttctgctcctcaacatcctcggggtcatccgctatgtcggctagtgtccaagccggacgtaggacaagacaagacggtaggtcctgtggagccacgccaagtacaactcgaactccgtcccgttgtgctgaccctggtctggtactccattctcctcgaacttctcccattgcgtgatatgatcctgatggtagtaagcccaatcagtcaccttcttgttcttccgacggtccaccctgcacgtatgcaaaatgtccaactcaaatatgtagtaaatgttgaagtgactgattgggcaagcaaaataaattgttaagtgaaattactaacttgtgtaggtcgatactcgtggagaaacggtgcgggattgtttgaagcctcccgaattgccgcatcacgcggtggcacatctggaactccactgcatagaagcagatcagtgggcaccgtagggtcttcaacgcatcctctatatggcacatgggattcagttctagctcgagcacttcctgtgcctgatatggcatccacaccacctgcagcaacaaaaataaaacacattgaagcacatttagtactatatagtaagaaaccatcttcatgtgtgatagaaccccgaatagcttacatgttctggctgtaggtagtccatctcgtttgtgtagtggtagtacgccaaattcctgcggcctactactggagatgggaccgattcccacaggtgagctacagtgggacatcggtctgcatcctggtgcggccaagcctgatgggtcctccacatgggccgaccaactggaagcctcatccacatccaaacctgcgtcacatacgttagcttccaacatgttagcaagaaattgaaatgttatgaaacataacatgcgtgaacttacctgtagcaaccaaacacagcctgctaggttcgcgtccccgccttgccttcggcaagcatcacagagttgccggtacaaccaggctagggcagccgacccccagctgaaggtacccgcctcgtcccagtccgcgagcaacggcagccacatccaagaagccatgtctccaccagagtcagggaacagaatactgccgaagatgtacagcacgtacgccctgcagtatcgctgtactgtagcctcgtctgcctcagcgggacactgaccgaagttggctcgcaaccaactcaaaggaacccctgatgtcttcgtctgcctctgaccatcaggtgccactggaggctccagaccaaggtactcctcgaccctctccctccagttcccgacgctgtgtcacctgtaaccggaaattaaatggaatcattagtaattgcaaaaaaattaacaaatgaatacgaagactcgttagtaattccctgacgctgtgtcacctgtgaccgcctgaccccggataggaagacccaggatcatggcgacgtcctccagagtgaccgtcagctccccgcacggtaggtggaaggtgtgtgtctctggacgccaccggtccactagggccgtcagagcagcggcgttgtacagaggcaccggtcgctgcgccatggtcacgaacgccaagagcttcgcccgccgtaggtacgggacgtaccggtcgtcgaacagtatgtgcgccgtgtgacctctgactcgaagggtcttcaagcgctgcatcaatagacaaacataataacataaagttagcgacaatatatcatatacaagggttgtggaaaatacatcatgcaactaggaactttaattttgggattgagcaagaaaactgaaaagaagatctgtgtgtttacatgctctgctttgaggctcctgaactttgatttgagatatctctatgatggatgatctatctgtacaaactaaaatcaaagaagaaaaaataaattcgatcataaaaaaaatggaatattgttgatgctaacctctccgctggcaatctgtggggcccggtgcttctcctcgtagaaatcctccaaccccggaaagtgctccatcctgcaaatgaaaatggaatcattagtaattgaaaaaatattaaatggaaaaatcacaatgagaacggaaaggaggacaacagaaagtaaacattgaagcaacaatatgaacttagcaaatgaatgtcatccaatcccacctgtgtgctaccctcaccacctccccccgtcctacggcgctttttcggtcgatccttagacttgtctcgcttcgggcacctagttttcttatggcctagttcgtggcatagcgagcatctattttgcatgaccggctctgaatttgtattgttcggcttttgtgaccgtcggttggctgagcctttgtatgctttgtccatatcgttcttgaaccttcttgtccttcttcttcctcgtgtgttgttctttaacgacaagtcgggcacgaagaactctccatcataacttggccactgcgatggatctaggtaaggttcaaacctaggggagtacgagtcctgcacagccttattggaagcttcataacacattcggggggccacctccacatccaaacctcgcaacttacaaacggttatcatgtgggagcatggcaagtgatggagctgagggaactgacaactacatgtgttatctctcgcaaccacgacgtagtgacgtccaccccattgaaccccagccgccgtgactccgccttgctcgctgacctcatatcttcatcgaagggaaatcaaaacatgctgctctttgccccaaggttcgtctttgctgctcctccaacatgtccttaacttttgtgggccacttctttccacacaggatatctacagttgcctctttgtgtctatcgacaaaccaactattgcacttcgaaaatgtgtatgccacaatagctgtaaccggcagtttccgaatgcctctcaatacattattgaaactctcggccatattactagtcatgatgctatgacgacgcccgttggtatcaaatgctcttgcccatttgaccttaagtggcatatggtcttctagccacttctttggcctctctccgaccacacccatgaggcgttttatctcatctaggaacaatgctttctcatctatttgacatatgcgctcaagatctttcatctgatcagtcgtagctccagctgtgtagaagttagcacagaagtgcctcatgcaccacctgtggtgaatggttaggtgatgaggcatgatgtggatgatggagttcaaaatgccagggtgtctatcagaaattatacacacttctctattaggaccgatcaacttgtttctcaacatgttgatgaaccactcccagttggatgtattctccttctctaccagagcaaacgccaagggaacaagatgtaacccggcgtcgacccctattgccgtgagcaatgtaccttggtatttaccggttaagaaagtgccatcaattgctagcaccggcctcaagtgcttgaatgcttctatggactggccaaatatccaatatgcacgtccaaatactcgcctctgtactccatccaccatcctggacttctcgggatgagcctcaacacggaaatgcatggtagggttctttgctttgatggcacgcatcagtgtaggcaagcgaacatacgcctcgtcccaatctccccaaatgaccttcatagcaacttgcttagcacgccatgctttgccatacgtaggccaatagtgccatatttgctcaactgcctcgacaatcgctgctggagataaagttggttcagctcgcacaaatgcctgtaacctgtttccaataaaccttgaagtaagttgcaaatgcttgccggttacttccgcactacagcatgtgtggtcttcgcccaccctagtcacccgccacctatctcctccactcttccttgcattaatctgccatttgcaatggcgatcgagacaagccacagtatactttactgacgcgttagattccttcacatggtacggccggtggacacggatagaataactctgtagccatattttcagatcatccatcgatcgaaactccaaccccttccttggttcatcacacattggttcgaaggcaccgtcatattgtggatccccatcagcaattgctagcccagatctggtaagatcctcgaattgtgttatttccgggtttctacccaccagtttcgcaaacacagtcctttcatgctctgacatcttacgcactggacgatcatcatcggagtcggaagcggactcatccaattcatcctctgtatcatactccaaccagcctgggttcaatccactgcgtatcatagcctcctcacactcctctcgggtatagaatttcagcctagccaactcccttaggcccatacttacattcttagcattcgcttcttcctcaggcaactccacatcatctcctacctcccgaccatcctcaacatctccttcctctcttaccggcacattctcctccacattaacttcctcccttaacggcacattgtcctctgcatgtacttcttcccttaacggcacattctcctctgcatgtacttcctcccttaccgggtcattctcttccctgacctccacatccgccatatcatttactccctcgcccccctccacgtcttcctcaatcaattcttccttcctactacacctctccgacagttcgtgacagctaatgggtgattctatgagtggactttcattaaggtctataagttctttcttccctatcctaccatctttcttccatgcaaacacctcaagagatttgaaatgtgaccccaatactatatctatatatgtttgccattcgatctctccattcaagtctaacataaatttatgtgacatgacaccgccgcccacatcgtatctcccttgcataccaaccgactcatcattccaatccaattcatgcttgatgcgagacattaactcctcaaaggtaggcttcgcaaaaaacactaattgtctaactgtcattccctcaaattggcttccatgtgtactttcatctaccacacaaccaccataatgaagccggaccaatctatccatctacaatttttaacccatgcataaacattaattacttgaaaataatatgtaattaccattgcaataccaatacttcaaaagctaacaacatgtctaatttttccaataaataagtacattactcaaatactacacattattgataaaaaaaaactctactcctacaaattacctacccttcaccacacatcaacccctttcaaaccctctcaatcaccacaaatccatcccacatcctaggccatcaccacacatccatctcccatcaaaccctagtgcatcaccaaacatccatcccaaatatattttgtcaaatgtatcaataacaaccaaatggataaagatatgccacctccacatttcatccccacccatattatccatctaataatccatccttagccaactattatcaaaccacgtctacaaccaaaacaatgcaaaatatccaataaaactttggggaacttagggtttatagaggggtttaccttctcttccgatcccaaactcaatgccgcacaaatcaccttcgattagagaggtttttgggggagattgggcgaggagaacgtggtggcgaccgaaccctaggcgggcggctggggaaaaaacggaggaagaactggctggggcggcctcggccgggctctaagtagccaaggtcagcgccaacttacttggcgctgaggttgggcacctcagcgccgaagcggttggcgctgaggtagctgccacgtcagctaggggatcggcccggccgccacggtggcacaatgtcagcgccagtcccgttggcgctgacacggccaacctcagcgccaatgcgcttggcgctgagccgacggcctagttttggttgaagtttttggcaggggttagtttcaaattaagtttttgaaaagggtcaatttgtcaaaaaaacggtagttatactctcttttctagtaagcaacagtatatactgttttttaggccagtatatacactctttgtagtgatgagcagtaatatatatatactagtttttttttgtgtattagcagtacatggtaaggattaccttatatttttgttgtagcagtgtatacttatttttgttagcagtcgtatatacttacttcagaattaactagtatatatactgattatttctttttttaatggtacgtgcagtatatactgttagaacgactgaatgagtagtatatactgatttttcttggaatgagtatatcctgatttttttggaacgagtgagtatatactgaattttttttgggaatgattagagaaatccgattataaacattgtagtatatacttttccccacttagtagtagtagtataaactttactcgttttacttaattagagcagcacatactaattttcttttggttcagtatatactgatttattctccgaaagagtatgtactggtttctttcccaaagtatatatatgaatgtacatatgtactgctttctgcatactctagtagcaatgtagtatatatagtatgttcacatactcttataagtatatactgtttactgtttattggaacagtatgtactgttttgttaccagtatatgctacttattcctttgaacagtaactgttttcttgaattttctggccagtatatactacattagtattgacggagcatatactagtgttttcttaatttggtcagtatatgctgctatacttttgttcggtcactatatactgcatctcatcgctaaaggagataatactgctttcttgtttgctcagtatctgcatatactactctttttttcttcagtatatatatgatgcatatactgcttaaataagtatatacactatttcttagatttagtagtatgtaccactattacttagataaaccatatatagcttttcatgtgtgcagtattatatgctttttcacgagaaaaatttagaagtatgatacaaaattcatctacaaatacaaaaaacaagaggtatatatgagctcatgctcacatgattcaaaatcaactagtcgatcgaaaaataaagaaaaaagaaataagaggtagatatatatattgctaaaaaattcagaatctattcagttctctgggaggttggaacaaatgccttaggtgtcgcctctgatttttggcagatcgatattagctctgaacctgaaatcaaataaccataggacatggtgcagtacgcgtttctaccgggcgttgcggccgtgattcattgactagacaccatcgtcgatcgaggatccgtgtgagcagctgccatcgttggacggtttgcctccaggttacggccggaagcccggaaacctctgccatgattgatacggttcttgtacgcctggctcactgcaaaagggggaaaggatagcagagatttagaagcgatcatgaatcagaatatctggaatcagaatatatatctagcagtcaaacttcaaggattggtaccaacaatgaggaggacgatcggccgatgaaccaccacgccgtcgtcgccggattgccagtagccaccgcgcctcgcgtcgtggccgaatcgccgatggatcgtgccggcgttgcggccgaatcgccgatggatcgcgccatggccgcacgccgccgcgtctgtatcgcgagagatatgtgtcactttagtgagaaaaaaatcggcgatggttagttaaattatccctgaataattatggattaaatcttattcaaaatattaacgggccagtgcagctatacccgttagggggaggttcgatcgggtagatcgctggttgaatggatggacggtagatgggagcaggtgtacttactcccagattcattttctctcactctctctctctctctctatatatatatatatatatatatatatatatatatatatatatatatgttcatgtgtgtgtatgatgaaaactccaatattaactctaaatttaaagttaaaaatttaaattttggcttatacgtgttagtacaagccaaaaagataaggctagtaagcacaccataatctacacagagatctcgtccgtgtcgtcaacggtttgttacttgagctgtaataaataaatatattctacgggagacttttatgtgcttggaatatatgagatccgttgatcacttctatgtgcgtccgaatgactcacacaactgacatcaatgaaaattaatctttgagaaaaaaaagatcaaaacagtaattatttgtaggtttaaatgtttaatccctgtaaattggcgcacctatatactccgactgcagatctaatagaaaatcatatactccctccatatcatattataaaagtctttttgacttttgttcctagtcaaaattatttagatttgactaaatttataaaaaaatttagcaacatctacaataccaaattagttttattaaatataatattgaatatattttgatagtatgtttgtttcgtattgaaaatgttgctatatgtttctctaaattttaagttttaagttttaaccaaatttagagaaacatatagcaacattttcaacattttcgaacttaaaaaaagtttaactgaaagaaaaaattaaagtgacacatggtatgaaaccgagggagtacattctaattaagttcgaaagaggggaaaaaaaactcattgtcgacatattgaagaaaaaaaaagcagctgaaatatcgtttttgacaaatataaatgcagcagcagtagatgcaaatagcaaaagtatacggatgtactgaataagaagatgaattgagctgggaaaattgatgagtatagccactcgtaaaaatccttccttacatgcagatcgtgtaccccatcgatctaaatccctttatgaccacacacaaactgtcatagaaactaaccaaacaacgagatttgacaaccaccaaggcaccaagtgaccagacaatctgctccgagtgacgatcatcgttttctcagttcgagtgataatccagagtctgcggagaagagtaagatcaagcttcaataagcactccagcaagaaaattaagaaccagaacaaaagtttaacacaatgatctaccagtatgaagatctatttgaaatagaatggctatagagcttcaatcatattaaatcgaatgcatgtatattaagctattaaccaacaaaatggtggcataaaaagacaaggaactactttttcccatcctatctagtacttccatagtagctgttgcaatggactcataaacaaaatcaccatatttaacagaataatatggacttcttaccgcccgtacctatttgccatcgattctggacctcatgagggcctccagcaatgttaggcagtaatactccgaccacacatcaggacgagccttgcatttctggaatgcaaccactgaatctgccctaaattgagcagacttagcaagctctgaggcgatctccttctgcatcgcgttggctgctgcttcaatctccagctttacttcagcacgaaacttgatcatatcctgcttgaggttagtctccatcttcttcatcttgtaatgaagagcaaggtggagagtcaagcaagcaagtcctaggagcataacatactttttcctgttccaaaaaatccagtcacatgaactatctacgactaaagttcaaaaggaagaagggggaaagagttgcggacttacataggtgggatgtcctggaacttcgtcttccagcctttgaaagctgcatggagaaccaaagccatatcctgcatttaacagaacattaatgcgcataaacagacctttgtggaaaaataaagcatgtagagcttttcttttaccttgagaatccccatgtcctcgaaggagtttgtaaagaaggcccttcgatatccccttggcgcagacgtagagaaactacagattccagccccaatcgcctaccacggtagaaaataaaagcattttagatgcatgcgggatgcacggccctcagcttgaagaggcagagaaagaagagataattaccctagcattgctgagactagagcatatgtttccggcaaccttcttggtaatagtgtcttcgacctaaaaacacagcagttagaaagagttaacattaggagaagaggagacaaaaggacaagttgcggcacccccagctagttcaaaagcaataatgtgttaccatagtcatcagcagaagcttatgcggattaatacatatggtcttttccttcatgagagagtgatagtactgcaaaaaaaaaaaaaacataacagtgcaatgtcatgaatacagacaactattctttcaaacctcacaagacagtgaaaaaccagatttactggatgagttgaaatccctaaaaccaccaccaccaacacattgacgattttgggggatttcaacctaatctatgagagaggagccaaaaaggaagccaaatttcatttctggatcaaggtaaatggtttcaagcaagtaatacaggaagcatggaacaaggctgtacaaactgatcatccagtaaacaagatgctcaacagcactgcaaaggccctgagaatttgaagcacaacacaatttggccaactacaagcttcggttcatatagaggctagctaggccttgcacaacaaacaagattgctgagtcctgaagaaaaggtatatatacaggaaatatttaaaagccaggaccctagtactagtagcagtgcccagggcaatgaaaaagcaatcaacaagaatttcatggctcaaacaggggacgcaaacacatagattttccacacaagagctacagccaggcctaggaagaaccacataaagcacaatgggagacagtattagtatacacatggcaagacacagcaagacaagtcaaaaagctattgacgatcactttcaacagattttggggagaaggtttacagatcatgcacaataaacgatcactttcaatagattttggggagaaggtttacagatcatgcacaataaataagttgggacctgattcacatgagatgagcagactccaaacaacagacaacaaacatggatgaggttttcggcgatattgtgacaatgtgaccaaacaatcaaatgatttcatattaggttctcaccctcgtggatccaggaagaaggaagcggtggaacatggcaaagttcaaaggcggagaagggcagaacagctgcacaaacaagagaaactcgtaaagtgagagaaaccgagatggggaagacggatcgagacatgcaacgcgagatccggcgccacgcgtgcacctcggaacccctcctcttcccggctgtcgcgatcaccttcacaaacacaagaggaggaacagaataagtgagaagagaccgagacgggggcggcggtcgtgatcagcttcacaaacacaagaggaggaacaaaataagtgagagagaccgagacggggagagataataaacctcggagcccgcagccatcttgagcaccttcttcgccgccgccgccgccgccttcgccatggtgagctctcacgacggaatcgaggccttggacttgggagagagagacgaagtgtggacttgggcgagagagagagacgaagtggaggggtgtttggtgatgcggattaaaccccagttctacttgagtcacccgaacccaagtacccaacccaaccccatcgcggcgtctggattttttttacttttaggtcccttttgaaaacctattttataaataaaccttttaaaaaacttatcctaagaatgttacccttttcgcggcccaacgggaagggtcaattcttgaaataagtattttagggatctatttgaaaaataatttttcagaaaggtctaaaatgtaaaaaaatccggtctcctcgcctctctttccaacccactcactctccttcttcctcctctaaaccctaaaaccacacggttcctgctccctcacccatcggaagcggcggcggcggcggtggtgggcatgggcgccttggcggcggcgacgtcgtcggcgatctggctcgtcgaggacgacatcctcctcaagaacgccgtcgaggtagacgatccccccctcccctctctcgccccggtcccttacaattcggggcggctcgaagtctgttcgtctcgccgcgtcgcttaggttaggcttcgattggagagttcgggcttcgttcttaagttgtttatggcggaggtcgacggagccatttttctttctttaaattttttgtcatgatagtcaggtcgtcagggtttaacactttaaccctcggccttgcgaaattgctcagctgttagtccgtatctaatttgggtggttattccctgtgcggagtcctgaacaccgttgtactgaatcgctttgttggggaatcaaaatcttgaagcagcatagggatttgttttcatagcagttcagtggctctgctatcatctagccaagaatttaatgtggcgcgtgtgcaaccgggtcaggtttgcaggacacacaccaccgggtgcaatttctattgaccccacacagagaccagtcgcttgacattttgcttgggagaaatttgcatactcagtgtctgcaggtagatcctatgtggtggaggaaataataatgagtgttatattcctctgcaagagtttttgaccgttttatttgaatttattttcaataaataaagcaaattgtttaggtcttgtatgcacctaccatggtgtgattgatctatagtttttgtacaagactgccctgattaatctatttaatcccatgcgttggtacctgtaattatatgaacacattccatatagtgccatgccaaattctgtgattaactagctttgcaactcaagacaatgaatactgttttatcttacatggcaacttgaccttgtaatcatagtaagtgggcttatcatattaacattattatgcctatctatgaagtatgcgagatatttagtactccaatcctgagttagtcatgttgaatactagggatttgttcaggaaaatttgatctgaagttagttaatctccagtctgcagggtcaggcaaaccttatctgtgagacattcttcatataagttttaagtgtctagctgcatattcgttctgaattctgatgttgtgaatggttccccatctcttcctaactgattgttatgatacttgtagactggtgcctcattggaggccttggcaaaaggagccgtatgtttctcccgtaaattcactcttaaagaaatacaggatcgttggaattctctgctatatgacccagagatctcaacacaagcttctgctcgtatggttgagtatgagaatgatctttccacttccaatcctctgaaggctaaagttatcaacgcaaagcaaaaggatttgtcattccagaaacggaaaatagatagtgtgaagaatcaatattatgcgatgagaaagagagtccgcaatgaaccatgtagtactgtcgaccttggttttcttattgacccttgttcatgtacaatgaatggcgggcagtgtgtatgtggaggcctagataaacattcacaaggtcaccatgtggttcataatacagaaccaggggtaagtacaatgaactgctttgggcaacaggatggaagttacaatggtggacaaactatgtttgttggaatgaatggacattctttccctgcaaagcatgctgagactgatagcatggttaaaggtggagatattgctaatagtgtcccgtatggctattctgatgtaagtcaaatatatgagcaagatgcatacacgcgaaaggaccctgatactaatgaagggaacaatgtttctttaaagggtataacagattttcagggttccatgcagttccagaatctgggctctagcaatcaatgtggcagcaaagtaacagaatcaaagacaatagtgattgctgatcactgtggagttgaacatgtccatttccctgtgaacagcagttcaagaatgcaagaacctggctcactccaggtgattggccaaccagagggttctcaaacaccagttggttcaatctggactgaggttgacgaaagaggcacatttactcttgacgatgataagaaaataaagacagacaacagtgaccctctagcattgcaaccaaatttagatggtgggatttgtgcagctggtttagatcatgcagccataacagaaggtgatttcatggattttccctatttcagcaacagtgaagatttagatctcctgaatggtgaaaactttttgaatattccacatgagacaaatcaggaggatttagatgatcctgatcatgtgaaaaatctgttgcatcctgatgaggccaacatttgctatgatcagacagatcctgatcatgtgaagcataatgtagatgtttctgggataatctcggttcctacttcattggaagtgccttatcctggtcggtttgttgaatgtgtgttgaacacagaagatcctgaaattccttgcaatgacgatgttatttttcctggcgagtctcctctacaatgctctgctactgattttggccagaactctgagcacaatacctgtttggtttcccctgcaactagccctgcatcaaatgtcgaacattccaatgtgagtgacaaagccctaataaagagggaagatatgacaaatactgaaccttcttcacaaccaatgaatctcagcccacccacctcagaacaaaaagaaggttcaacagcacctagtaaaggctgtgtcccactaggagctgaaccatcagaaggtccttcaactgctggtacactcgtgcattgtcacgttgacactaatgatgcaaactcatgtgcgtcaaatttaccctctatcagtgctgctgtatttgctgaaggatcaccttgccatttagaacagcagaataactttgatgactcactgagttttcctttgcccaattcagttgaagtgcccgatcacatgaattacaactcacatgataatcaaccagaattagaagatggggctcctctacagaactgcattccaccacatgaattgccagatttgggtcttcaagaccccattacaactgttcctgtatcaaatcaagtagaagaatgctctgacaatgaaaatgatgttccaaactactatgatctagaagctttggtatgtcccttagcttagctacttaaaagaattgattgttcttctgatttatccctttttgttattcattgcagatacttgatcaagatttaatcccatgggttcaggactctgagcagcatccaggaggtaaatatctccttttatcaaatcagtgtgaaaatttttttggtataagactctaccaacacatgcaaatatttgatattaaagatgtgtgttttaagcttagcatgagtaacgtactaatattatgatagagttgtggaaggaagtactgtgctcaattgttagcgcccttatcacgataatactatgtgtgaaactgaaatattgaccactttattggaataatttacagtcgagtggtagtgcttagtgttagcctcgaaggagactgaccatgataagagtatggagtatgaaatgttgattggctgtgaggcttaaggggtatatattctattcagaatagctgaatgcccgtgctttgctatggataaaatatatttttcatgaagtgtgctacccattgtttgctataggaaatattcatcttattttaattttatatgttgctatccattttgatttgattgtttttaatgttaagaagctcaaggagtgatttgcaaaatttacaatgcgagtacttga

SEQ ID NO: 8165 - DNA, 2993 bp, Oryza sativa
ctccttgttcaaccccttcaagaaatgaatgactcttcgcctctgcagccatttatttccaatcacaatgtcatcctcatgtttcaatagtaggggatcatagtgatcaagatctgcccataactgttgcagctcgctagcgtactcttggactgttctcccctcttgcttcaaattctccactttgttctgagcctcaaccatcatcattacatttccctctcctgaatacatgttgctcagcgtcttccatacaactgcagcattctggatagcttctatcatcctgccaatagaaggagccaccaaggtcatcaaccaagataccacagtggaatttgtagtattccacgtcctccatgcttggctctccttatcagaaggttcttcacaactctctagtaaaaaatgatccaccccttttgctctcaacatcagttgggctctcctacaccaactcaaataatttttgctcccctccaacctcaactcatttggcatcaattctagtttcacttcagacactccagccgcattcctaggacctatcatgcccatcttcagcaaatcctctagcaaacctttcatatcacctttagtaacaagcaatgaagtatccacaacctcctttccctccccagaagacatttttttcttcccttagcttcttctttaccacattaacagagatacaacaaggaccagacttcaatcccccatggcagatcaaatattagccaaatcaactaataggagcaacaacactactcctcggtttctcaccaaaacagaacagcagcaatagcactacttctcagttttcagcacagcagcaagtactcagtttcttccccaaatcagcacagcagcagcaaatacagcagcaacagcaagccaagcgcccacttcaccttctcaagtagcagcagcaccaacacctcagcagcagcagcaacaacctgctcctctgccacacgccgtcaccagctagccctccgcacgcgtcgtcgccgttggtgctccctgccatcgacaccgtcgcttcctcactccacgtcccgccttagcagcgctgccatcctgcgccggcacagcgcctcttcctgccacggccaccaaccgtctccgccgcgtgcggccacgctggcctcgcgcgtgtgtcgtcgcgccgcgccaacctcgcctcggcccgcgccgcgccgctgcgacctcgccagctagggttcaacctccccagtcgccggcgacccgctctgataccatattgttcaatttggggaatttttctagggtttgcctactcagctcaccccttcctcatctattctattagtataacactttacagataggtccttggtacaatacatatttacaccaacaatttctgtctcctccattagttgggaatgaatagtctacacacgtcactgtttagtagcgcaacatatcagctaatagtgggagtagctggcagattcaccaattttatggcctcacatatcagttggtaggtggtggcagattcaccctcactagattcaccattatacttaatatatttgtctagtttgaaaactgcttgtgaagcttttgcaatcataaaagtttaatctacttcggcatttaatgattcttttagccacacaccatcaggtgattttagcttcctgacatgtaatagtttcttgcttgtttgcaggtggtcagtaaacggggccctacagtcaccaagatttctggaatgactatcctggataatgatgcggttaatgctgtatctgtgctactaacaactgcggttacagcttatgcgtgcattcgcatcttttgaagatctttttactcaagtttcttccaaacacccaattccattcaaaggtgtcaaggcatggccccaagacaatgaaatgatggattaggcattttggctgcttgatgagaaagattcaattcactcaacgttgttcactactccaagaaaaacattgtttggttggttggtgctaccgcaagctgaaaagtgtcagttgtctaagcatatacagttaccctacttaatgtgaaagtgataagctggatagtcctgactcctgaaccctattttctgctgagctaaggattgtggactttcgtcgtgtggatgatggctgttgttatttctgtactgacctaaggatttgttgacttagctgtgtgagtttttccatacaaagctgtttgggacaaaggaaagctgctgctgatttcctttggaaatggtgcaaatcctccattttaatgagaaataaagcatccagtgtctatgtgtctctcctacgtttttcttctggtccaaacaacccaaattttagcagtcctgtgttttatcactttacagtatatcatactcccgtgtttttacctatgtgttctgtattcctttcttccaaacagccttaagtttttctacccactatcagcagtgttttggtccatgagagctcaggaattaatctggctacagtacaaaaagagctttattactgaagagtaaattccctattatacccttgaaaacccactcaatccttctcataccttgaaatttacccaatccctcctatacccccaaattttaatttgatctcttcaatttgatctcaaatttcgggggtatagaagagatcgggtaaaattttagggtatagaaaaggtcgggtaaatttccgaaaccgcgacttaagccaccaccattcacatgcatcaccgatgcaaagtcccaagccagtgccagtggttacgtcagcggcgtgttcaatgtctccattgatgttattgttgtcattggtgggtgtctccggttcccacatcagaaacaaccttctacatacatctccttatgaggcgcacccttggctatgctgcccaattgtgctgaggcagtaggtcttcgatccttctgtgcgacggccagccagataatgttgtcatgaccgcgagcttagggggtt

SEQ ID NO: 8166 - DNA, 866 bp, Oryza sativa
gattttgcaccttttccaaaagaaaatcagcagcagcttttctttgtccaaaacaacttttgtatgaaaaactcacacagttaagtcaacaaatccttaggtcagtacagaaataacaacagccatcatccacacgacgaaagtccacaatccttagctcagcagaaaatagggttcaggagtcaggactatccagcttatcactttcacattaagtagggtaactgtatatgcttagacaactgacacttttcagcttgcggtagcaccaaccaaccaaacaatgtttttcttggagtagtgaacaacgttgagtgaattgaatctttctcatcaagcagccaaaatgcctaatccatcatttcattgtcttggggccatgccttgacacctttgaatggaattgggtgtttggaagaaacttgagtaaaaagatcttcaaaagatgcgaatgcacgcataagctgtaaccgcagttgttagtagcacagatacagcattaaccgcatcattatccaggatagtcattccagaaatcttggtgactgtagggccccgtttactgaccacctgcaaacaagcaagaaactattacatgtcaggaagctaaaatcacctgatggtgtgtggctaaaagaatcattaaatgccgaagtagattaaacttttatgattgcaaaagcttcacaagcagttttcaaactagacaaatatattaagtataatggtgaatctagtgagggtgaatctgccaccacctaccaactgatatgtgaggccataaaattggtgaatctgccagctactcccactattagctgatatgttgcgctactaaacagtgacgtgtgtagactattcattcc

SEQ ID NO: 8167 - DNA, 4615 bp, Oryza sativa
ctgcactggtgggagctgcactacgacaaatggccctatccctccgtacgcacgcatatatatgcttcccatttgatcaattcaaccacatttttctgcaccaaactcgatcttatgaaaatgcgtgaacttctcgggtgtacatgtgtgtatgagcaggaggtggagaagatgacgctggcgcagacgacggggctggaccagaagcagatcagcaactggttcatcaaccagaggaagcggcactggaagccgacgccggtggcaggcatgaccttcccgacagtggaagctgccggaggcggcttccgacactccggccacgacggcggccttgcggcggcggcggcggcggcggcgctgccgctgtacatgggcagctggccgttcgttgtggacggcatgtaccggctcgggtcttgaagcctctggggatcgcatgatgttcccatgatcagcctgtgggacggtgaaatggaaaaactggtgaatcttcatcacgatctttcctctcatttttttttcttttttcctttttgtgtgtgataaaagctcagatgtaccacgtactactgtctgcttcttcgcaaatggatatgtaattgaaagctttaattctaaacatggcactccttctgttttgtattataagtcgttttgatttttttcattaaactttgttaggtttaactaatttagtaaaaaatatagtaataattttaacacaaaacaaatgcatcatcaaaaattttcaatatttacatataattaaattaatttaatgttatagttgttgctaaattctcatataaacttaattaaacttaaagaaaaatggctaactagattaaattagtatataatataaaatagaggtagtatattattcttgggcaagctagctctaacatctaatggtgggttccggccatccgagcttaactgcaatacaaggtttcacacgctgtccttgaatgaactcgtcgtgtcctaccgatcggccatcaacagtgagtgcgttctctgatccatctccttggaacagcacctttgtagggtagaatccaacttatcaacaactgcacgcatcctctgtaccataataagttcattttttatatccatttcacacatacaaataaaaaaaagaatacttccactttgttaaatcgcgatttaattatttcatctctttatacatttctaacatatttattttctacattcataaactcggatataatgactagttagaaatgaatctaatttagaaataaagaaaataaaactaaacttgttttgcattgccgcgcgcacaatgctcatgcagtggcagctcctccagctgctatggatttattactgtctgtctagatttgcactgttagggaatttctcatccagttgttggttagagagtaattgccccaaaatcaagttgccaagttgccgctcccccacccccaagtagcagctcgtacgtgcagatgacgacacgacatggatactgtctctgagagcaggtataatagcaagctataagccagttataaccacatatcgagaagaagagagaagagagaagaaagcgggttatagatttttaagccgactgtaatgcggactccaagacgttacatgtatgagaggtgggaccgaatattaataatgtagtatatttttatagttaactattgtatgaatggactattacattagctataattgttttggagccaacgggttggctatactattaaacttgctcttatgaaggcggcaggctgcgtgcacttttgaactgtttgaaaaaggcccgcactcctgtctataaaaaaataacagacctggtactaaaatgtgtcccatcttaataatataaatataaattcgtagtattaaaatatatcgtatcgtgtacttatatttgtcttttatttacataatgagcggtgacttatttaaattttttatatttgtggtacaacttatatatttttttaaaaaaataccttgaatttaaccaagtgttgatgtaaaaacacgaggcctgggagatctgcttaactctagtgcaggtccaaaagcttgcctttaggttcgtaagcgtgccagttgatcctgcaatcaacaagaaataaagacaaagaaaccacggttaaatctataaacgatagctgatcggctaattgccgataatatatcatttatctttgagccgatgtcatatgtgaatcgatcggtagtcatgaataagtaataaagaattaaatctactcgatcggctgtagatattaacaatatataatccttatgtcaatatgtacttaaatcaagtgattgggatagatcggtcgccatgccgagacagtataaatcacttagatcaaaatatatattaacaactggattatatatgttcatagcatagccgatcagatagatctagcatgtatcggctaatactccgataccactctaaattaagatattaaagcaagtaaaatacgtcaaacagaagcttaacatatttaattacgacaagatcttaatataaatggcagatttaacatgttaatcaatcatgtaacgtaaaagtagttaaatcaggtaagatcggctgaaaccccaatactactctaatcggcaactagaaagcaggctagagaataatattctaagcccgatttagtagatcaaacttaactgatgcagcactaaatatgaaaaaaaaaacaatatctaggcaatcaagccgctggatgtttcatagagtggtggatatcctatataatctaagccaacattgctatttaacctaatcggctgccttctaacaatagatgttagccggttgtaggttaaataacaatattgtcgtggattatatagaatatatgataactcggcgaattacatagataagattagagtatcataaagatggaagcactaatcctgagaacgcaagccgccataacaagttttacctctagttgaagatcgaaaccgatgcagctcaacccgaacccgaaagcaagaactcgtcgaaacaaaatgaaagtaaaaaggtggcgatgcgccgagattgtattgaacatgtgttagtttgattacatgggactcggggtctatttatacccgagattacaaaatatgcccatatcggacacgactcttatctctaacaaactctaagataccataagtttttacggcagacttttgcccaaacatatctctaagaaaattacataaaatatcctaattaatagatacaattgtcttctcaggactctatccatgcacggcaatcctcatgaagctcgttaacccaacctgacaatgtataccgtgtcacattgttagattcaacttaatcggctaaccttgtccgacttgaactctgctgattaaggtcgcagccgattcggactcagccgattcttactctgtttccgaaacaatcttggacttggattccgcttcaatctaatctctatctttgatactcgaattaccaaatttagtcgttaacaccaagttagaagaaaattggttaaatttgcataataatacattaataaatgagatttttttaaaaaaatattcacacatgtgtatgtagacacacacagctggatttttttttcggtggtcccggaatctctagatccgtgataatgaggacttcatctgagagtgtcttggacgacaaccatgctggagctgcagcatttactgccgtagagagccattggccattgccaaaacggccaccagccctgatgaaatgaaaggctatcagttgtccatcgcaggagaaattaatacggtgcgacctggctgtgagagcaagtttaatagtatagcccattactagctctaatttatctatagctaatctaatagtttatttatataataattgtttattatactattaatatatggtcccacctgtcatacacacatggcgtcttaaagtccgtactgtagctggctacagatctgtagcacactactcttttctctcatcttttatcttattaaatatgtttatagctgactaatagtctgctattgtacctgctctgagacagccgtgcaggaggagctgcagcattggtagtagtttggtaatacttccttcattataaaataaagaaatttactccggtccaacaaaaagtatttcgaggtattgttatctcacggtatcaaatcgtttctgaccattggatctagctaggcatgataggtattgttagatccaacaatcggaaacgatttgataccatgatgtactggtatctcgagatagtttttgttggaccaaagcaaatccctaaaaataaaataagtttatttttcattacatataaatttgtgaaagtaaatacattgagagtacataaaaagataaataattacaataaatacattgagtagtatatgataaagtaagagtattaaaagtcttttggtttatattaattattaagatgtatgagatgtgaaaaaatgaacttatttgaaacaaatgaagtactatgtatgtagttctccctccgtcccaagttataatgcgtcttttttttagaaaaatcaaaat

SEQ ID NO: 8168 - DNA, 4980 bp, Oryza sativa
caactttgttattgatgactttttcagttgaaatcatttagtaattataaatgttgtttgaaattgtcataattttaaattcaaattcaaactgttcaaacgaagtcatatataaaaatgaccaaaataaaagatgaagatcttaataagttatacaactttgtagttgacaacttttccatttgaaatcatttactacccgaaaaattatttgaatttcttatattttaaaattcaagttttatatagtttaatcaaactcggatggagaaatgaccaaaataaaattggtagatctcaatgagttatacaactttgttttcgacaactttttcacatgagttcatttagtataataaaattcgattcgaagttttaatattttaaaactaatttttttccctcctcatccttccaaattttttcatctcctcttctccctcccctcctatcctgatattttaccttttaattttccccatccttatcctattcctatctctcctctcagcctctcactctttcctcctctcctctctctctctccgacagcgaggcacggagcgggagcggcggctgctgcgcggcgcggcgcgtggcagcggcgggctcggcaccggcggcggcggccttcctcgacctcccatccggcgcgacagcggcaggctcggcaacggcggtggcctcccttcaccaacctcccatgcgcggtgctcccttcctcgacgtacggcagcgggcacggcgacgacgacggcgggcacggtgacgacgacgacggatctggacggcgggcatgcagcggtcacggcgacggcggcggcggcggcggatgtggacggcagcggcgccctttgctctcctctccaccgagcgtcgccgccaaccctagatccgcctgcagctcctccgctcctccacccaccaccgccgtatcttccctcatctggccatccactccggtgatgtcgagcgcgtggtgtcgcaagaacgttgcctcgtttggtgagaggggatagtgcagcgagccgcctccaatcccttctgtcccactgctactcgctgtcgcagagaggagatttgtccgaccgggtttcatgttaagctgtggctttatttcccaccatcctcagtcccatcctatttctctttcttgttcgagcaatcgaatctgatttaaggatctgattttctcttgctaattttcaggagtcaaccgtctatttgctgtcccgtgcaccaacacgaacattgacccgatttcattctgacacagtagtagtaagtatcacgaattgtgcattttattctaaaatgtactagatttatatagcgtttgtcacacattgactagaatggatctgtttagttaatttgtctgctgtgctgctgattttaaaagtttagtgtatagagttaataaaaacgtgtgtgagctgatagtttgcaggagtgataaaattcccatgtgagcaactttgttgtttttatatcagtgcagtgtttagtaggaggaaatgaattaaaggacaattcaggggttgggttggttgggtcagtgaagaaatcagcaaaactgcagtccacaagatacaatgaattatgcttacaaggtgtttgtgttaatgactgcaagttgacacttcacagcatgtcctttgcattttaactacaaaaggtcgtgttctatgcatgctaactcgtgctcatcactagttgatagatttgtgcagttatttttccctgattattatgttatctcactatatgatgcaaaaatttaaagctcatgttatctcatgatgtgatatgctctttatacaatctcttagtagttctccaaagtgcctcaccaatttgtgactgacattttttcccaataaaatgctatgctgactatcgcattatatatctcatttttgaaacacaatagtatgagtacttgcttttgattttgtatcgtagtcattcactcaatatgtatgctgccttgttgtaaaaacagggtagtatgaattaaatactgaagcctagaaattcactcccatagtacaactgtaaatttgtaactgattgaattgcagtaattgctttggtactaataggtagtgtaaattggtattggtaactgactgaaacaatactcacttctcatatcctgtccatgacatctactgttcatgctggctgtttatcttttcatgtgcagattctagtattccactcgggtgtttcctgcaataagctgagtaagtaattttagacttcagtgagcagctgtagattaatttatcattatcacattctaatagtttattaataggattcatgtcgataaacaagtttacatttccttgcctttctatcatttgaaattgtttttagttaaagtaaacggtatgcccatggaactttatcttgtgctagattatttttctttcagcactgctcagtaagctttcatatttaccaattatcggaaacatctgtcaaatctagaatttcatatccattctgtttctaccaatcgcacagtggttttacacatgtgttgctatcttgtctccttaccagtatctaacaattgcaaggatctacactcaagtattaactcaaggcgacaaacagcagccacccatcatcttgactgattcgatattgaattattgatctatggaagaatttgttgctttggtctgctgatagatatattaagatgaaatatatgtagctgcttcatctgttgagatgtcacatgactgtctgaatttgtagattaggcaagctagcttgtcttaaagctttgatatttctttaattaacatgtgtatgttgaaacctaaatttatttggtgaattatgtagtttcaccttatatggatgtgagctgtggtgtatgtagcatgtgtttcttttctgatgaaataagtgacaataaaaaagaaattaaatggaaatcagaaataaaaaagaattatatccactgtacaaacccagtaacgattgcttcccgtgtgtttattttactatatcacacggtaacacactggagcataccgagagttttagtcagagcacggtaacacacttgatgatactccctccgtcccataatataagggattttgagtttttggttgtaatgtttgaccacttgtcttatttaaatttttttgaaattattatttattttatttgtgacttactttattatctacagtactttaaacacaacttttcgttttttatatttgcaaaaaaaaaaaatgaataagacgagtagtcaaacgttgtaagcaaaaactcaaaatcccttatattgtgggacggagggagcaccgagttttttttttgcacccgggaacctactgttcatttgacggtgaactccgttacgttaaaatttgccacgtggtagggataggtgttcccgtgagtttcaggacacccggtatggtcactagtgttaccgtgcgctttttgcatacccccacgggaactgagcacggcaaagtggtgaagccgccgtgtgttcgttaccgtgtggtggcacacggtaactctgttcccgggcgtttttggcttgttaccgtgtgtttttgacacacggcagcttcccagcctctttgtaagatatcgaaactaattattggatgaaataggatggtttccttcaggaaacagccccaatacttttgagtctttagaatccaatctgttgttatactatactccatcttttgtgtcgacctactatatatatctatcctatagctagctaatgagaattaattaagtttcagaaggaggtgtcaaattaaaagtgatagaaatgataagctgtcttaatttgcatttgaatgcttgtgtgcgacgcaaacacgtctctgcaggccatcgctagctattcgatcgcatgcacgcatcgatcctgcatgccgtatattgatgtacatattgatgcacatatatacatgcatgcagatcgaataatcgatggagaattctagatgacaagaataaaaatcaacggtgcaagaaactgaatcatgtatcagaaattagatgtaatcacaaagtcattgttcagaaattatgattccgtagtacaaatccttatacaagtatcggaaagtgcaagtgatctgaacttacccttctttaattgacttgtgaagaatgaacagcaccaagcagagcagccgacagagaagtggacagcacgagccaggtcacgtcgccgccggggtacccgcgtcacgtggaggatctccgccgcccgggtcgtctttgggcgaggaggatagtcgcctcctcgtcgcgggtaggatagccgtagccgggatcgtctcgccactgcgtagggttggctcgtcaccgcgtaaaatcgggcggcgtggcggctgaggaggaggaggaggagacaactgcggcatcagagggagagaggggaagagatccacggcggtgatggcgtcaggggagagaggagaaggtggcggcgacgattagggtttgctcggagagaggttgggggaaggaggggcgacaggtgggagactgggagtcgagtcgggagtcgtgagccgagagggagagcgattgggggaaggagaacgcgtctggaggaaaagcggcgtatactgaggtggaaggtggagacgatcatgagtgttagatctcagcgagataatctggaccgttccatgatgaatgaaggaatgaaagatgagtgaaaccatttgttgaactataaagtagatatagaggaggtatagtgttgctcatgagttggcgcaacctgccctgagaacgaaacaatgtgtggtttggcgattccaagcttctctgtgtgtatctgagctcctacctggcgaatgtaatctttctgaggagtaatatattttcccttttcctcgcgaaaaaagtcacatgaaagcattttaaaatattaggccgtgtttagtttgtgtgcaattt

SEQ ID NO: 8169 - DNA, 1824 bp, Oryza sativa
acatgtgggtcctgagtattttattattttttcggctcgaattgccacataagcgccacgtcaatgccacgtcagatgaagaccgagttaaattagccacgtaggcgccacgtcagccaaaactgccctcaaaaccgccgagggacctaatctgcactggttttgatagttgagggactcgttgtgtctagttttccgggttgagggatgaaaattggattcgttgacaagttaagggacctcaaatgaacatattcctttagcgggcgatgaaccgaacggatgccgttccccttcctgcgggagactgagctgtctgaggttgaaaaacgaacatttccactgtctctataaggatgaagctatgaacacaaatacctatcttaaacaatgaaacttaaaaaataacctgtcttggattgaacaatgatgctatgaacacaacatagaaaacaacctatcttgaactgaacgatgtagctatgagcacaaaatagaagaaaaaaaaagagagagaaattgctttcgttgagagtcgaactcaagacctcccgcttactaaacgggtgctctaccaaactgagctacgaaagctctttgttgcttgtctttcgtagctcaaaatctctgagtttctttcgagtttatttacttctcttgattgtatagacgtcaattgcttaatgtgtgctacgcacaagcatcttggttgctcatttgcttcagagctcaattgcttcatgcttgtcaacaacaggttgaagcttgaggcatgaagcagttgagttctatcccatttccataagagaatgatagagaagatgcttatgaaatgggaaatgatagagcagtatccatgttggaatgaatttacgcagagaagaataaatacagaagcatcggtcctgcattgtctagatgcaagcaatttactaacaaaaggtgcattctgaaccacaatattttgttcaaaatgccatactgagtcgacaacagtacaatgatatcgaaaaaaacatggtaatgcacctttaccctggcacaaaataacaaatgatggaccaaggtacaaaagcatggtaccaggtatttaggttatgatacaaagtttgcttatttatcagctagttgagtaaaacagggaaatgctgaatccttatcatgagtaacaaaaatcaacggtaaagactctcggactccaagtttgcagcaatctcagtctcccaacgatcgccgttctcaagcaatttttccttgtcgtatagcagttcctgtcattgcagaaaaaagatgcatgtatgatatcccagcaatatgtcaaaaagaatctgcagcagaatcaagtgttttacctcatgggtttcagtagcaaactcaaagttaggaccctcaacgatggcatcaacaggacaagcttcttggcagaagccacaatagatgcatttggtcatatcaatatcatatctgcaaaaaggagttcatcacaacagagcttaacagcagatgaagaggcagtaaatcatttttcaataattcacacggatcaaagaaagccagccacgggattaccttgtagttctacgactaccgtcttcacgttcttctgcctcaattgtgattgcctgagctgggcatatctggtcatttgtaatgccaagtgagcaaaagagattggtttacagaacgcataaaacgcaacaataactacccttaatcagcatgagaatcatcaagccttcaagttaaacatgcattgctttacataagtaaagctgattaccttaagctttacaagttgactcctctaacattccaaacaaacca

SEQ ID NO: 8170 - DNA, 7717 bp, Oryza sativa
ggtcgtgatttttgccgtacctgcgaaggcgtcgtttcccttggaacgcagagagagccagagatcgacagagccgagtactgctattgtatagttgtatgcattcatgtatagccccagggagcaagtatcccagatccacgtgatcgcgttctaagattatacgtcttgtattgcttgtctttgtgttactagtactacaaaaaagtacgtatctacttttcccttgcgattttgctagatctttgtcaacagattttcacccccaatatttgtcgtttttctatccgtaggatttgcgccatgattcgtgcatttccctgtgtggatgagaccgtgtggcctgtgagcagatggcctgggagtcaatgtgggccaatccatgttaaattttggattccgcgctattatgtccgtaaccgttggttgtttcctcgctctctttctttattctcgctctttctctacatctctttctcctctttcttttctcttctcgttttctccgtcgagagagagagctcgccggcgagagagagcacgagcagctccccggcgggagagagagagcgcgcgcgctcgctaggggagacaactcgagagagagtgttttttgagtttcttccctgatttgctggcatcattagcttgtgttttggttttttcaatgtcaatagggctaggtttagaagattcgggtcaatacatgacgattttttttgctcccaacgtatggatctgattcagaatcacttgttttagttttggaatccgtttaggttttggattccctaagtttttagttatagtttgattcagttcagtctagggtgttttgttactagtccattgtttgcaaacgaccagattcgatggtgttctatgtttttttttctaatccacgagggtttttgtatttttggttcgatttttcttcaggggtgttcatgttgggggttggattcaggggtatttgatggagttaaaggtttaattcgaggtggatttaggggttttttctaatcacccagatagttgatcattttttggatccctgcatgaattttcttcagggagggggtcagattcatgagttgattatttttgctttgatttatgtgtgatttgaatatagtagggaagcatcattgcaactttatctgaatgttgcatttcactttcagtgattagttgactgatctgttaactccttgcatgagtctgaatttttctgcatgtaaagcatttcgtttcagagatgatttatctgtcaactccctgcatatatctgaattcttatgcatctgaagaatttcgttttacatatgcatgctaactgaaccccaagtatgttttgtgttgccttctgcagcatatgaatcatttcgtttcagagatgtacggtttgatttcccagtatgctgagttgcttggttaaattaaacccaaacccctacatgcgttctgctttcttcagattgtattctactgtactatttgctttataaaattcctgtacatgttctgaacttttcagtgctgatctaaatgagttagcagcaagccaatacctgaacttggtccctgttgctttgagaaattatgggctattggttgcatctgctctttcttctcttctgaacttttgttcattgtcaatcgctcgtaaatcgtaaatctgtttgaattggcgctatttctgaacttgggaacataattggcactatttctgaattgggaacaggggatagcacgctcgtaaatctatttgaattgtcagtattttttgaatcttggagcaggctattgcacagtttcagtcgacatgagctttttaaaatctcatacttcagcaaactgaaaaataatttggagggtttcagtctaatgttgatctaatgcatttcaatggtagcaaaaccaaggtcacttgggtgcctggaggtattcacatgcctgaaatatctgtatgattttttttcttctttattctgaatgacccatcgtcccatcccaatattgttcccatgttaattatgtgtggagcttgttagtcagttaactcatttgctgtgaaatttaatcgggaggctcaacaacaacaccctgtctggtccattcccttctggtccattcccttctgcatcagctaacttgtcacatcttgttgtcgagtgattttaatatatgtgcacagaagtttgagatatgtgcaaattatgtacaaaatttaatatatgggcaaatttgtacacaactagagatatgactgtttggaccacaatgctctgtttttttttatcctaggctctaatctaattgttgtgctttgttaaacaccactgtctgaagatgattttcacttgaggaaaatcttcagtccattgtgacaaagtgactccttttctgaagaaattctttattttttgaagaaattcaagcatgcttgcagttttagcccagttacagtctatatgtattgtagttacatatgtaacttttgttatttctcactgtaactaactatagatatatagtccttgaaaatttatcaacgctacaatctctaatttgttgtatataattttatgctagattatattatctgccaagatcattttatggtgcataatgctaggtgagcatgataactgacctttcaatgttttcttgcttcttatttctctggacaaaattttgtcactttcatatctctccgattgcatatcccctgatttttcagactgtaacccatcagaccctgcatgtttatattatttgtaacataatttagaacttgttataataggggaaaatatttaatgctgctgcatgagtactgaatttttttgaagaaattcaagcatgaaagctgttatagcctagttacagttcagatgtaatgtagttacatatgtaacttttcttatttctcactgtaactgactatagatagataggtctttagatttttcaaagccgccatctctaatatatgtgctagattaaattgtctgtcaaggtcaaatatggaccataatgctaggttatcatgattatgacctttagttgtcttcttgcttcttttttcatcagacgaaattaatgttatctctttcagatctctctgattatgtatccactgttacttgagatcgaattgtaacagaacctgcatagataggttatttgtaatataatttagataatgtatattagacaaaatttttttgaagaaattcaagcatgattgtagttacatcccagttacagtcaatatgtactgtagttacatatgtaacttctgttacttctcactgtaactggagatagatagtttttcaaaaaaaaaaaaatcatgctttcatgtatacaaaattgtgctagattttatgactgacaagatcaaatttggtgcataatgctatctgtccattgttctcaccttcaagtgtcttcttgcttattaatttttctgagaaaattttgtcactttgacatctatttgactctgtattcacttttgcttgagcttctaatctatcaggcgttgcatgtttcaatcatttgtagtacaatttagaacaagtcataatagtaaaaaaatgttaatgctgttgcatgagtactgaattttttgaagaaattcaagcatgattgtagttaaagcccagttacagtcaatatgtactgtagttacatatgtaatttctgttatttctcactgtaactggatatagatatatagttctttaaaaatttatcatgctactatctctaatttgttgtatataaatttttgctagatgacattttctgacaagataaaaaatggtccataatgctaggtgagaatgattctcacctttaactgtcttcttgcttctcatttcttcagacacaattttgcttctcatttcatatccatctgattgtgtatctcctgatttttgagattgcaatatacgtgaccctacatgattaggttatttgtaatataatttagaacattttgtcataggcaaaaaaaaagttagtgcatgagtactgaattttttttaaaaaaaaatcaaaggatgattccagttataacccagttactgttcaaatgtactgtagttacatctgtaacttttgttatttctcactgtaactgaccgtagataaatagttctttatatatttgtaacataatttagagcttgttatactaggggaaagtgttttaatgttgctgcatgaatactgaatttttaaagaaatttaagaatgattccatttacaacccagttatagttagatgtacagtagttacatctgtaacttttgttatttctcactgtaactgactatagatagataactctttatatatttgtaacataatttagagtttgttataattggggaaatgttttaatgtcgcagtataagtactgaattttttaagaaatttaagaatgattccatttacagcccagttacagtttagatgtactgtagttatatatgtaacttttgttatttgtaactgtaactgactatagattgatagtttttgttacgagtttttctgaaaaagttacatacttttaactacttgatctaaagaaatttcctattccaagcacttttctccaaaagaaattcactattccaagtgcttttctccaatatttttacagaactgagttgtttttgtttgatttaaaagatgactggcagaatatggtgaagtcaatggggaaaggtaaaggtggattttgtgctaggtaatttgttacctggaagattatgtcttgttgatttcaacttcttgacctcaatgttcttggtaagaatttgcttcttcttctttttctcgttctcctcactgtctatggcgtgctcgatttgttttgctcgatctaggggatttgtgcgaactggtgtggtctccctgtgttattttgtttttttctaacctttattggatgtgaagttgatcattatgggccatgatgtattttgcagttatggcctgtataattttttgtattgttctatgggctagaattcgagcccatgtagttttgtgatctgactagtcagagaaaaaaatatgtagcattttttgtgtcctttggatcttaatctaacggtaggaaaaaatctgggtgattttgacccaaggatttgtcgacaaagacatagctagttcctttcccttgtagtattactccattattaaaaaaaaatggaaatacatggataacgagcgagtgcttcggtttcgtacatgatgggctctgtatgagatttggacattgcggaggggacaaagaaattggtcagggcatcaggcccagaaaagttagatgggctcaactataggccactctaaactaaaagtcaggtgggcttggcacagatttttccttttcgttttatgcttgcttggttgttctacgactaataacaattaacacgaaaatgccaggcgtcaaatgcccgatgggcccgagaaaaatcgggcgccgcgcagcccgcgccaggcgtctccaccacgtgcgtccagttgcaacagtcttccggatataacggaaacaccatattaagcgaatccgttttattttttttccaccaataatattgcaataatcttgtttaactggtccttatacaacaacaatccctcgtatcccttatcataattgtactattgaaacatacatccacttgtttttgaccacgatcatgaagaaaccgcattggagaagagtggatctatcccaccctaacaccgtctcgccatccctcaacatttactttgtgctgttgtccatagagagggtatgcaattttcaaaagttttatggtcatattttaggagttcaagttcgtagactatttataaatggattgagaccctatttatatgggaataaaatttttaaatccctatcacatcggatatttagacactaattataaacattaaacgtagactattaataaaacctattcataatcttagactaattcgcgagacgaatctatttagcctaattaatacacgattaacttatgtgatgctacagtaaacattctctaattatagattaactaggcttaaaaaatttgtctcgcaaattagttttcatttatgtaattagttttgtaagtagtctatatttaatactctaaattagtgtctaaatacagagactaaagttaagtctctggatccaaacaccagactggagcctagtactacctccatattttaatgtatgacgtcgttgactttttatctaacgtttgaccattcgtcttaatcaaaaaatttatacaactatcatttattttattgtgactcgattcatcattaaatgttctttaagcatgatataaatacgttcatatttatacgaaaaatttgaataaaacaagtggttaaacgttggtcgaaaaatcaacggcgttatatattaaaatacatagggagtatcagataaccatgctcagacagaaaccatgtgttggagcacccaatgtttcgcggtcgttatgggattctcattatctgcagatgatccctgtcctcgcggtcgtactagtcctcaaacaacaactttgcaccgtactgctgcgttcggtagtacgagtgtacgaacaatatcgacatcaaaccgttgccactcccacacgtatcgcttggccgcacgaacgcgtacacaagcctaacgcaacacgcccatgtgtgtaactgtaccacactgtttagactggtccatgggccagccaatgccatccccacgaacgaaaaatagtttttgaccggtccggaacgtcctttttagcctgccgtgtcacgtcttaaagctcttaattatccgatcacgagaagggaatacaaaaacacacacaaacacgcataatatgaacgagcagtattgcgaccgtgacgcgcaggatggaattccaggtaaaactacaaggtaggagtcgcagattgcaagcttgactcgaccactccggtcactggcctagctgtagctagcttgctgacgctcacgtctagtagtactggtcggctgctggccgagaggggcactgctgccgacgtgacatacgaagcttcttttatcgatgatatatataggtagaccgtccctcttatttaataaattaataaaaaaataaaaaaattagtcacatgaaatattattcatattttatcatctaataacaacaaaaatactaatcataaaaaaattttctaataagacgaacggtcaaacattgaacataaacaatacaaaactacacttattttagaacgatagtactgctactcctcgtcctgaaataaataaactgatataaaataagatactccctccatttcaaaatgtttgacaccgttgactttttagcacatgtttgaccgttcgtcttattcaaaaatttttatgaaatatgtaaaattatatgcctacataaaaatatatttaacaatgaatcaaatgataggaaaagaattaataattacttaaattttttgaataagacgagcggtcaaacatatgctaaaaagtcaacggcgtcaaacatttcgaaacggagagagtatattttactagtagtattataaatctgaataatttgatttattttgggttaaaaggaatacatgtttaggttcgtgcacccatgtttagtcgtaaactagctg

SEQ ID NO: 8171 - DNA, 4653 bp, Oryza sativa
ggcggttgattgggaaggctaccattccggtggatctcaagggcgccgaggcgaaggccgcggtggtgcatagcggctggatctgtgttgggaagaagagcggcggcaagggcggctccgcggcggcggagctcagcctcaccgtgcgcgcggagcccgatccgaggttcgtgttcgagttcgacggcgagccggagtgcagcccgcaggtgctgcaggtgaggggaagcatgaagcagccgatgttcacctgcaagttcgggtgccgcagcaaaagcgacttgcggagatcggtggttcagacggagcgggacgccgccgccgccgccgggaaggagcggaaggggtggtcggtgacggtgcacgacctgtcggggtcccccgtggcgctggcgtcgatggtgacgccgttcgtggcgtcgccggggacggaccgggtgagccgctccaacccgggcgcgtggctcatcctccgccccgccggcgacgggtcgtgggagccatggggccgcctcgagtgctggcgagagcgcggcggcgcgggcgcctccaacagcctcggctaccgcttcgacctcctcctcccgggcgtcgaccacgccgtccccttggcggagtcctccatcgccgcttccaagggcggcaagttcgccatcgacctcacctcgatgcagccccagagccggggcggcacgccggggtgcagcccgcggggcagcggcgacttcagccagtggccgctcgccagctacagctaccgcggcttcgtgatgtcctcctccgtccagggcgaggggcggtgcagcaagcccacggtggaggtcggcgtcccgcacgtcggctgcgccgaggacgcggccgcgttcgtggcgctcgccgccgcggtcgacctcagcatggacgcgtgcaggctgttctcccacaagctcaggaaggagctctcccacctgcgctccgacgtgctcaggtgaccaccgctcgccgccggtgagcttcccgcggctcacgagcaaaattgtacataagtagttgagactcttttgacacgagatgttctttagttggttcgttggtgtgttagtgttagtagtggtagttcagttttggtgatcagttggttgagttttagatagatctctctctctctcttttatcccctgcgagtgtgcttgtgttcttttggattggctactttacttcaagccaatctcggtaacttcctttcagatgtctataattgggagaaatttgtgaccatatgaacctgtttcttccagaactagaaaatcgaaagctcttgcggttccgattctgatcgtgacatggaatcgacgagctcctccccatatgttacacaaacccaaaagcttcattttagagttcgtttcaggtgacaccgtacggccttcgacattgcttttgcaaagcggcatgagcgggggagtacgccttccctcccaaaataagtcgattaaaattcatttatatatcttatttattttttttataattagtatttttattattgttagatgataaattttatgtatgaattatttttaatttttttataatttttttaaaaaataaaattaacggtcaaatatagtaaacagaaacaagtactccagtcaggggtagatcatcggctcaaccgctcccgctgaagcagtggatcggtcaagcaagctgcggcaaaaagagaagagaaaaagaaaaggaaaaagtttcctttgccctgatgagttgagtgagaacatgaaggagcaggcagcagctggatgtcagtggtggtggagtggagtacgggcgatccgtctcgctgccgctggcagtagtggctctgctgctgctgctgctgctgctacgagtggtgccagtgtggaccgtggcgtaggagtagtactagtgctacgagtggtggatggtttgttgggattggcgactagggccatgcacatttcccgttggttgtctgctgccatggagctgtggctgggtccggctccggtggggaaaaaaggaatccaacgcaaccacctcccctgtgcccacaccaccagcacagctacagctctctcctttttcttcatcatgttttctcactaatttttcctagtatttgaacacacgctggcgcgcagtatgcatttcgcagccggtgtggctttctgatccgttaattaagccggttgcccatgcttgtctcggatcgctcatcgtccctccatgcgagacgtccggtgattgctaatctagagctggatggacagctacggccagatggatggatatggggtctcgtccagtccagcgtggtgctgttgtgttcgatttgatcgattgatcgcggagaaaacgatgcgtgcggcggacaaggcggcgggcgatgcgcgggctgaaatggctgccacgacgactgagcgcgagaaattagtaagaaaatttgttcaaacaggtgttctcattatctgaaaaaacaaacaggtgttctcatccgcttcagaaacacatccaaatcatgccagctcaagctttcctggctgtgatttgtactgtacaattgtcaattgtagctaacgaatgaggaaagcttgtgtgtattagctagacaagtagacaggtatccatgaggaaaaagaaaaggcagcagacgattagaggatttcccacagagattggtctactagagtttacaagtaaatcacatgttagtaactaacaagacctggctcgttagttttccatccgcactgttctttttcaactaaatggatgagcaaattaacgagactcgcttttcaaatttctaaacaatattatttttataaaaactttatggacatgattattttaagaaataaattcatttttttaaaccaaagccatgctaagttgaagttatattaagaaaaatagaaagtatttacaatatcaccaaagaaagtgaaagagagaaacaagggaaactagggaagaaaacataaaagaaacacacactaaatgaaacctaagcggatattctcgtgatgttttttttctccacacatgctctatagcttgatttcattttgtattttggcgaatagttgcgacatgattttctcttgattttggaacaccttcatgtttcgttcacaccatattttccataccaccaataagtggattgacttgagtgctttagccttgtatttttcctccttgagatgttcttctgatccaccatttcaacaatacttcattttcatcatgtgggtggtctatttcgctgcagttcagtctactcatgaccctatctcagatctgacacacaaaagtgtcaatctttaaaaagatgttaggcggtttctaggtttctgtagcatagttgacagaaacagttgtttggtcattgtctgatctgtagcatgtccgttgtccgaatcctattctgcagtagacgttcaactttagttaaatcatttttaactttatattagttataattcattcgtttgtgaccttcaataaacgttcgcgcgtttcatattgcagcgtcggatcacccgtggctttcgatcgagcctggctagctagctagcaatgttaatttgctcttaattggcacacacacataaatgcttaatttgcaagttgcatggttcctaaaactcgtatagacactactagaaaaactcttttcccagtcggccgaatcatattttcacagacggacaagccatccgcctgcacctcaacgcctgcaaaaatagttgattttcgcaggcgcgcgccaggtccgcctgcgaaaatagcttcgagcgctaaaaaaaaattgggcagtcacccctgtttctggcggtagcttcccgttctcaatccagttcacaccccttccccatccaatccattcaattcatccagttcatccaaaaaaaaacaccgaatcaatttatccacagttcattcaaaatcactgaatcaattctaaaagaaagcgaaataaaaacattcaacaaatcacggcggctgcccagctttggtccgccaccgccgaacagcgggggcccgcggtggtctgcgccgccgccgcacggccacggaccgctgtcgtcaacgcgggcggctgggaaccgccgccgccgcctcaactgccctcgccgccgtggccgtgccgccgcctcgaccctcctcactgccaccacccgccgccgtgctccccccgcccccctctggccagatccgacggccaccgctctccccccgccccctccggccagatctgggagggaggcgccgggagcgcgccgccgccgccctccgccgtcgggaggggaggggagaggagaggtgaggtggggataggaggagaggtgaatgagagaggtgaagggataagcttaccggccgtgagtggtgaaggtgtggagacttagaaaaaatctcctcctatcccaagtctatttatattcaagtctattttcgcaggcggaccatttaagcggcgcctgtgaaaatcaatttcaccttgattttcgtaggtggacatcaaatttcacttcgatttatatttttgtaggcggtcatttagctctaagggtcatgtccgcctgtaaaaataagactcccacgttggaaaaaatgctttttctagtagtaatctagcctata

SEQ ID NO: 8172 - DNA, 4540 bp, Oryza sativa
ctctgactagaaatggctggtactggttcctattgtcttgatgttttatcctgcactggcagatccaggcacaaatcgtatgaatgaagcagatcaacaagcacctgcaaagctgaaattgcagttatttccaatcaatgaagccacacgaaaggcattggaaaaggtaaatatgcctgtttgttgccaccaagctgcaatatgaaattatgaatcatgtgtttcctgcagcagctgtgttagcacaacagctattactgatttactattggctcggacactcaaatcactgtggttgataaaatttctcaggataaatgggactaatggaatgtggagtgcaaataaccttactagcactatttaccttatgaattttcgatggtgtttgagatattgatagtcctatcttttttcaacaggatgaacataatccacatctggaactcacagttagcgctaggaaaaaaatatcttctgtactagaacatcttaaccgcaagtggggcagctcaaacattgcgtctggagagcttttgctttttccatattgtgctcaccgagaagatttagctacctatcagagatggaccacaagagatacagttgtggtggctgatgtttttctttctgtgaatagcccgcctgtttttcgattaaggtatggatgaattcctgggtaacaaactataatattgtgataagaccatttgttgaaagccgtaacaagtgctaactgttgtcgccaataaggtatggttggttttcccttgctgagcttgaaggaggaagtggaatatcttcaactcattttaagaattgcatgatgcctgaagacatccatgccaaatctccctcagacgcttgtgtgcagaaggatggtacttttctcaatagttgtgctcctgaggaacacctttgtaattcaaaagatcggccggcattatttcttgctatgacatttagtacaggcaagagcgctaaggggcaagagcagcacagtgattttcccgccttatggtttagcaggcagaagcaagaaaaagattccacaaaccaagttttagaggtccaacttcagttccatccatatttttgtcaagtgaacattaatctgctatcttctaattgcttctgttatacttcaggctaatctggggatggattgtgctataatatctgaaggagagtgggcagatacccttactgatatcagtgttggatacttactaacagaagcatccataggtactaatacagattgtccagggacagctattgccaaaaacacattgtttcttgagaatccctgcagctatgattcatttgatgctgctgttgctcttcacgcttctcgtcataaaacagtagagcagccagcccttgcatcccattcgaccatctggggtgctgaagaaacctgtgatgagttcagttttaacttggcagcatctaggaagcaagaaagttcaaacacttcagctagcagctgtcctggtagtgatagtggtgttcttcctttcacctcacaagggttttcaggctttcttcaggtttgtttccatctcttggtctcttgtagaataaaacgactttttatacatcaatgttgttaatctatgatttatttcatgtttgcaggacttagcaggagcaaaggttgctgataatccttgtatggatgatgccaaagatatggaggcactttgtgccaattctccacctcgaagtaaaagtgattctgggttaaaggatcaatctctagctgacttatattgggtactagacagatatcctatccctgcctgttttagtttctagtataatctatcaacacagatcataacttactatgtcttctctttggataggctgattcacttggaccactggacttagagataccatccgtgagataccaagctgaggacttactcttaggagacagtcagaatagttggaatcgcatgatggtgaatagcctggatgcgtttcgaaacctgtcattcttcatggcagataagaatgactcaatcccatccatcatgtagaactgtgaattctgggcgccgttcattgctctcgtcgcttgctatattggctagtgaagtactaccaaggatgcatctcgctgtagaggagggtttgcattgtccaagtgaagctgtttgtgggaaatccaacagctgcggacttgctgttctttgcagtcaagagggacgcattctgctgtgtaagatatatagtaagagctgtactaagatgttacatgtatgtcgtgtaaattgtggtgtccctgtacaaaaagctcacacaatctcttggttacagtaaagcttctgatgactgccgtgtatacaggtatgcttctgatcaattgccctgaactgttctcagttttgctttgatatctgaagtttatcggcatactgtgttgtttatgatagtatgcgagcagcgtttgtttcttcaaggcgacgccagaattttctgatgggtttggttaggctggaaacctgaccagtacatgcgagatcgctcagttgggcttctcccaattaattttgggccatacccataggtaatcttgtgcttctcccttcggccagattcctcaatgttcgctgaatatgtaacagcgattcaaggacatactcagacataaactcaggccctaatcacaacctatataacaagctacatcaagtaagaagtgtagaataattggctcataaggactcgtcaacagatgcaacttcccaaatcgggtaaaggtgtaatctgatcgtcgtagaagtaggaacaatggcaccagagataatatcgttattcgtaaagtaaagaactaagattcacaaataccatcaatatctattggagaggcagcgaatcgtccattttgtttccctttttttctctctctcgcctctctatttcctccaccatgaagaacacctgacatgtgcatgccatcagcaatgccaaaccagtacgtcaatttgataccatgaattcgtgccttcatggccacatcgacgacgacatcgagcaaagcatggtgattggtgagcgtagcacgacagtacgtacgagggccctgatgccgacaccatgcatgcccttgcgggcaagcaatcagattgcagttgccgctaaattaaagaggattttcaatggtagcagcagcagcagcagcagaagagcacgcaactgcagccgtccgtcgtgcggttcatggtggctacaagttagagagagagagagagagtagagagatttaactggggcaaatgagtgacccaaggcatggggatctcatgttgcacgccgagccatccttcccagcactcgctcgtactatgtgtagttgacgaggagagctatagatcggcacacgcgaaattcgtgcgttggtccactaagaaaaatctgatcgcactctacatttctcaaagcgtttcgatcacattggacggagccaaaatcatccccactgcctggttagacccaaccgcacttaatttgaccgacagaacgaaattgatttattacggtttgttctgttcaatgagaaaaaaaaaacccctcaatttgaaaagctaaaatttctgacaagatcaagatgtgaagtttaacacctcaccaaattttggtatagttttatgattaaaaatttgttgaatttttatatgttattccctccgttctaaaatataaaaacctataaccggatgaaacattttcgtctgtccagattcgtaatagtaggaaatgttctattcggtcgtaggttcttatattttgatttagtcttgtttagtttattgtcttatcaagaattgactatactaacatttggggcttgttcaaattgatgtcattttaaattataatatttttttaagtaaagttatcaaatatatgcatccatttagtttattacgaaactctagtaattaaataagaaatcatgctaaaacttgataatattattaaattgtctaaatttaatatgatttattttggttataatctgaacctgataacgttagtttcggcaacagatcgaacaaagctcttttaatacctactagatgagcatcgtgtattcgcgtccatatgtgccgtgtcatcaggacggataacgcacacgcatgcacgccatgttaccccgaacggatcacaggaggcgtcgtgtcaaccatagcaagggcccccgtcaccactgtagcagcacacgacgctcatcgatcccgggaagcttctccgtcgaatccaccccggttggttggatcggatcggaggagagccgcacgcgcagggccgcacggctggatgcagatgggaatcatgggatccgtcgcagcgagcgctgtggatgatgagctgcatgggcgccggcttggctggcacagcagcagcagcagcagccagcgcacgcgagattgaatgcgcgacgcgacgcgacccgaccatccatcggccatccaatcgcggcgcggagatttctcactaccgatgactcgggtaactcgtacta

SEQ ID NO: 8173 - DNA, 1036 bp, Oryza sativa
tttgacataaacttcctcctgtataaaaccatttagaaaagcacttttcacatccatttgatacaatttaaaaccttttgaagcagcaaaagccaacaaaagtctaattgcctcaattctagcaataagagcaaaagtttcatcaaaatccaaaccctcaacttgagtaaaaccttgagcaacaagtctagctttatttctcacaatcaaaccatcctcattttgtttatttttgaaaacccacttggttccaataatattatgtccagaaggtggttcaactaaagtccaaactttgtttctctcaaaattttcaagttcttcatgcatggcgttaatccacgattcatcagttaatgcatgtgacacatctttgggttcaaaagaagcaacacatgcagaattttcacaaacatcgtgagtcgttaccttagaccttgtagtccactcacctatattaccaatgatttgttccggcggatgtcgtcgttgaaagtgcaaaggagcagcgacttctgaagttgagccacgttctgtatcagtattggtcgaagttgtaatctccggaggaccatctcgatcagcatcaacaataccggaacccgacgaacctggccggtctgaccgctcctcctgtggcggtctgaccggaggtgtgccggcggtctgaccggcctggcgcccggtctgaccggccgagccgacttcgttgttgtagtcgtcgtcgctctcgtcttcaaaactacgaccatcctccccctgaacctgtgacagtgtacctgaaatatcgggtctagtacctggactagtctcatcaaaaaaaactttgcaagtctcaacgattttgttagtctccaaaataagtacaagataaccacaagtgtgtgcggggtaaccaagaaacaatccatcggtagaatgtgcctcaaacttatccaaatttctagatttcaagataaagcacttgcaaccaaaaacacgcaaatgtgaaactttgggttgatgtccaaatcgaagttcataagaagtttttcca

SEQ ID NO: 8174 - DNA, 14088 bp, Oryza sativa
  unsure (1)..(14088): unsure at all n locations
agcagtgctaatagcctcagcccaaaattttctaggagttttatattcatccaacatcgttctagccatctcaaccaaaacacgagttttcctttcaacaacaccgttttgttgaggaacacgaggagaagaaaattcatgttcaagacctctttcattgcaaaattgttcaaaagaagcatttttaaactcaccaccattatcacttcgaattcttttcaaagaaccaggaaattcaagctccaatcgaagaaacaaaccacaaaagtgttggaaagcttcgtccttagttgccataaagaaaacccaagaatattgagaaaaatcatcaacaataaccaacacataccactttcctccaacagatttcactctagccggaccaacagtgtccatgtgtaatagctgtcccggtgcatccgtcatcacagaaacaataggatcatgtgaagaagcaaccatcttagcatgacgacacggtgtacaaaacaaatcaagatctttcttaagtttaggcaaaccacgaacaagatccaaaccacttaacctagtgagatgatcaaaaccaacatgtccaagtctacgatgccaaaacatcacatctttatcaaacttagcaaccaaacatgttatcacaggtgaaacaggattttcaaaatcagttttaaacactcttccatagtgagaaatattcaacacagcatcaccacaagaatcaaaaactttacttccagttttcttaaagtgaacctcaaatttttttttgactgaagtgaacctcaaaattttcatcaacaatttgtgaaaccgaaagcaaactgtactttaagtcctcaaccaaagctacattcttcaattcaaaattttgaattacctaaaccaaacctgtagcgagaacagcacttgtagaagcatcaccaaaaataattgattcagtcttggatgcctttttgagtgaggagaaccaattttattacctgtcatgtgccgcgaacaaccggaatccacgatccacacgttcttcttccttggcaccaaagcctacacacaagcagaagtcgaagcctcagtactggggttagatgataataaaaatttaggaatccagtactgagacacatgaccagaagatccaataggcatatatccacgtgcaaaaatcaattttagaattttcagaaaaattcctccgaggccggtctgaccgggggccggtctgaccgcctctgtaccgccggtctgaccggtgcccggtctgaccgacgctctgtagccggtctgaccagtcgccggtctgaccgcgggacccactgcggtctgactggtttcctcgaggnnnnnnnnnnnnnnnnnnnnctttgattttgcaaaagcaatctctctctcctttttctgtttatgagctaatctgaaacaaaaactaacaatatgtccatctttgtcacaaaaagaacaagtatatttttcacgatgattagacacattggtagcattagaagatttagcaacacaagcaacaacaggagattttgcatgcacaacattggattttgaagaagatgcactcatagtagacatgataccagcagatttatacacagttttattagtatcaggtttaaccaaaatctcaccacttctagcaccaacacctaacacaacaggaggatgtctagaattatgagcataaggattaaaacctaaaccatggttatgtgtgctaacctttgattgatccaaaatcattttgaggttcttttacgacattttctaaatttgcacaaatttcacaatctaccatgacacctttgcttttacgacatttggggcaagaaagcacttcattgttttccacaacatcttctatgtactcaacatgacctaaagcatctttcaatttcaacttattcaaattacatgttgagcaatccaaaacatcatgaggttgttttaactttttagcagaaatcatgttaaacatcaaactagcatgaaaagcaatttgctatttttgcaacaactttttagttaaaaacaactcatccaaagtgcgtgtgtgcaaagcaaaactacaagcaagagaagatctatttctcaaatcatgtgcagcattaacatctctaatttttgaaatctcattcattaaaacctcataatttgagcaatcatcatcattaggaataagagattttaatctagcaatttcagatttaagagatttaatgataaattcctgttttctatacatcttctcacacttcttattcttttcactcaaaatattattagcttcctcaaaagcacttacctcattatattcatactctgtgtcagattcaccacgcgccatgaagcaaacatcggagatgttctttcccttatcatcatctccactttcaccatctacatcacttagtggctcgaaggcggcgcaaacttcttgaaaagccttcctgagattctccagcttcctcccttgagatgaatccttcggcttgctgttgttggacttctcaccatctttgtctttgcctctcccaagcttaggacaatgcgaacgaagatgatcaattgaaccacattcaaagcaacgatttggaccacctcttttcctgttcctggcattattcatagctcgagcaattctgttagcaaccaaagccaaatcctcctcctcgatctgttcgagttgatcatcggatgtggcattaaaaacagcaagaaaagaaggcttagatgaagaagcatcaacatccaaagaagaagaagaagaaaccaaagcactcgaataagaatcaccttttcgagaaagaacattcatcttatgtgttttcaattttatataaagtgaatccaaagtcaaagtagtcatgttaacagactcctgaatagatgtaactttcatctcccaaatagacatgtcaagaccattcaaaaagtgacgagaaatctcagattgtggatagttagtatcataagaagaatcaacagatctaagatcactcaaaattttaataaacctagaaagatagtcatccaaagcttctccaggtttcatctcaaatttaatatactcctttttgaaaagatctcaatgaagttctttaatgttattagttccttgatgaaaattactcaaagcattccaaatctcatgagcagttcgaagatgagcaacacgatcataatccgaacgagaaatcccactcaaaagaatattgcgaactttgcaattttgttcaaactcagtttttaaagcaacaatattaatctctttaggaatcacataaggatgagaaacttttctccaaatatcatagtcttcagccataatataacattgcatcctactacaccaatgagaaaaatcccttccatcgaaaacatgaggcttagttgaaaacctagcgggagtagccatggcaaaaactctagatcgataaaaatccaaagaagaaaacaaggctctgataccacttgtaggatcgaatcacaagaactaagccaacaagagggggggtgaatggttggtatacccaaaaaccgaaaacttttagcggaaaataaaagttaccatcgaattcgacggaagtcggtctgaccgagattgatctgccggtctgactgaagcgtaaccgccggtctgaccggtgttgatcttccggttggaccgtcctggaatccctgccgtgcctgatgtcgctgccagtctgaccgccgcttgccgtcggtctgaccgccggcgagttgccggttagaccgccgaaaaccggtgaaacacaaatcgaagaacttttaaagtagatgacgactttattgattttatctgtgtttacaaagtgcaccaacaacactcctttcaaaaatttcgactaaactcgaaaccctaactcaaaactcaactcaattgctctctaaagctatacagggaagcctcacgctccccctctatttatacataagggtaggcagcctaaagccacgaaccaaactcatactaagagtcctaaacaccttaggaaaccctctagtacaagaaagaaactttacataaccaatcgaaccaaatttggactccttccaaattcgactacgcatcccatacacacacaatacctccatcgtatgccatatggaatctccatcaaccacgtgcatcaactctagcctaagtatcccgcatgatctctgaccaccacggacgtcgtcttatccccatgtcgactcctggtccatcaccgcaaatactctcctgagacatcgagtcacctacacatgaaataaacaaagaaaccatattccgagaccaagctatctctaacttgactcattagtagcaaataacagtattgcatacgtatagtatccatctagaagccataatcatgaaataatcacggatatccaaacaaacaactcgaaaccgaaaccgacatagcgtcggccggtcagaccgtgggctagccggtctgaccgcgcaatacacgccggtctgaccggctaccagcgcccggtctgaccggtcacatgaaataacaaatcctgcgagcacctgtgaaatccaatcatctccaaaaccgcttcgtgaataaattccaaatatcaaaatcaataatctccaatgcccaattattcatcacagaataataataaaaaacacctttgattttacatgggaaactataatggaggagaaggaggagcacgaccctgcttttaaaatactgtgatattccgacaaaaaaaaaggttgctgacatagtttgatccttttctcacctgtttctgttcctatactccagaggataatataaagtaaatatcacaatatctagcttatgttttcgggtttgtttcaaaaaaaacctatgcattgaagcaatccatttcatacaacatcgctccttgctttccattgcctgacatgggggagagacaggtcagtcactagcgctttgctatgagtaaattctctgtgtaccaatgaaaattcactcgatccctttcgtactcctgaaatttacctgatcccttctatacccctaaaattttaacttgattcctttatgtccctaccgttacattttccttcttttcactgtgacgtttggtggtgaatgtctgttatgctcttgatgattaatttaggtttgaatataagcttgaaaaaggttgaaatttttatttgagtgcacagtatatgcattttatgaaactaatgagagtaaataattagagcagaaaattttgacataaattttgaaaataaaacaaatataataaattaaaaaaaatatttgaaatattaatagggtaatgtttttttatcgggaacattcataaaaagtcatatatttgtatgaatgctactcatttttatgaatttttaaaataaaataaatacatattttttatttcattatctaaaataagttgtgtcatgatcaaggaatatttctccaaactgttttatagaaatttttctggtcgctgcatggctcctttggaagcagagtaatgatttatttttaacaatgtttctccctccctcccaaggtggaaatcaagtctcaagtaggagctaagtctaaatttaactagcagcccgtttggttggagggagtttttaatagggattgggagtttagagggatgagactattaagtgttttgtttggttgggagacatgagaattttggtgggatggggatggggaattgagaaaggaactccctcattttcaatacgtgggtaggggcaggtaattgggagggaattcctcatttactttgtctaagcaaatctcagccattcgtttttattaatgatctaatctccaactaaactccctatcaatttccatcacctctaccaaacaagatattgggattaaaaattaaattcccatcttaatctcatcatcaattcccttgtgtaaactcccaatccccttccctcgagttcccaaacaagccgtaggcttaaaaggcttaaagtacatttcagatcttttcttcaatcatggattgataacttgtaattcttttgtacagttttcctttttttatataaatgaaaattaccgtgggggcttcccccactgtttcctggtaaaaaaagaataagttgtcataaatagtgtatcgcacaacaaactcataattataatagtctaatgcataaacttttacatttttaataatgtaattcataagtttttatgttcatccaaagggtaaaatggacatatttatagaaattagatggtcaactaacggtcaactgacgggaggggcatggaagggttcaaaatcaaattttgtggtatacaaggaactaaacaaaattcagaggtataaaagggattagctaaaatttcaggggtatacaagggattttctctctcccacatacagtactatataaatacattttcatccctcctaggctcccacatataccaatacaaaattaaaataccttcacattattaaaattcaatataattattttttattttattatatttatcctctagctaacaaactccaataaatacgaccaaccggaggagctaaaaaacaaagttgttccaagatgaagggaatagtcgcttgagctacctcagcaccatttctctgaggtccggtttgagatgaagaattatttaatatattagagtaacttatgttttgaaagtttttgcacaaaagacatcatgccccattattttccgattaagacgaagattctaccacagttttagttagtatgctttccaatatgtgaaatgatgtttttcatacgaaagctttatatacagaagctgctctaaaatactaaataaatttactttccatgtttataaaagtcaattaatcgtgcaaagatgattttctcgtttaacatgttcttacttaatcatcatctttattagctgaatcttataaagataaaggttaaatacgggcacgtaacacgagaaagtcattagcatattgttaattaagtttagttattttaaacttaaaatgactttatttgacatttaaagcaacttctggatagtaaattttaacctgaaatacattgtttagtggtttaaaaggcatgctaacaaaaatctaagcaaattttgtatcttaataaaaaaaacaagacatcgttgctcatttcaacaacgacatactcccttcatcccaatagacatatcttagaataagatatgatatgttcttatgacaatacgacaatgaatccttcttgtttatatatcacatcatatcctgattatgtgttttttttaatggacggagtacgttgataatggagacattaatcacaaatcataattgattttttttaataatggaatagaacatctcagcctttgctcagaatagctacaaccaattattacaatcaagcactctagttcaaataaaaattgaaaacaccaaccaaaaataagaaataaccaatgtaagataaggattacacatttattgaagtctatttgtgaatctccatccataattggtaaaaagttacataaccgtcgtcttaagcttacgacatgcaacttttagaaactctccatcttcatcacacctttgtagttatgtccaaaaccgaagccaatatgttaccctgaaaattacctgcatatatgaaatagatggtgatttgtcaaaaaccatatcattcctactcaaccacagagcccagggctctgtatagtagaagctccaataagtataaatttgctctttttcttgtccacaccaaaagccaacgataaaaaaatataagatatgctactagaaaggtataaaccaaaagagtaatgaactgctctccatataaattttgcataatgacaatccataaaaatatattgaatagtcttatttttcatacagaaacaacatcttacactggctttccaattccgtcttgccagattgtctttagttaacacaacccctttaagcaagtaccacataaaaatcttaatcttaagcagcttcttaagcttccaaattatcttatttctctcaatatagccattattaattaaagctaggtacattgacctaaccgagaaccgtccattctgattataattccatctaaaacaattagaagagtgattcaactggatatgtacaatagaagcacacaaatcaagccaaaatataagattctgaccaactaaagctctcctaaaacaaacactaagcggaacagaacccataacattagcaattgaagaactttttcttcggacaatagcatataaagatggatacttatcttggccaagttacctaaccatttatcttccaaaatcttgtttttccccattgctcaaaatccaagaatccatatttaagaaagtactattgactttcatgagacctgcccaaaagtggaaatcaccttcaaccccattgtttggcttttctatggaataagtcaaatggcatatttgcaaacgaaaaatattttgtgacttttatatacgtgtccttagcgatgtaaaagcaaaggctgcaaaataaacttcgacgaaaaaacctcaaaaccagcttcaaatttaaggttgaaaattcaaattttggctgataagtataagcataagagaaaagatgagaccccttgtttcctatcaactttggttataaactgattataaagatattttctcttcaataaatcctgcaaaaacacttactcatttattaacttaaacaaccatttactcaaaagacatttattttgtatttccaaattatgaatcctcaaaccaccctgatctttgggcatgcaaatgatatcccatctagtaagtctgtactttttcttatgatcatccccttgccaaaagaaacgtgatctatataatcaattttttaaagaacccctttcggtatctcaaaaaagatatcataaatatagctaaacttgaaagtacagaattaatcaaaaccaatctacccccaactgacatatacatttatctttccaactattaagtttgttctcaattctttgtttaataaggccatgtttaattcccaaaacaaaaattttcacgctgtcacatcgaatatttagacacatgcttggagtattaaatgtaggaaaaaaatcaattacacagattgcatgtaaattgcgagaagaatcttttaaacctaattgcgccatgatttgataatgtggtgctacaataaacatttgctaatggcggattaattgggcttaataaattcgtttcgcagtttcttggcggaatctgtaattgttttgttattagactacatttaatacttgtgtgtccgtatatccaatatgacaactaaatccaaaaattttccccaactaaacaaggcctaactttccaatctttgttaccagcatagtaactgattatagggcctaagggcatccacaatgtgcatataaagtgggtaataaagaataaatactactactatcaggttgtatacattgtgggagtagtaagcaacaaataccaggtaatatgcttagggcatccataatgtagtacaaaaatagtccatagtgcataaactattccattcagccacctagtaaaattgtgcaactagtccatataaaagaaataacaaaaggtacccatataaaataaataatactccctccgtccaaaaaaaatgaatctaggactggatgtgacacattatagtacaacaaatttgaatagaggtatgttcagatttagggatagcaatggggcaggtcgagggcaggttgggctggaacgtccccgccccgacccccgaactctccacccagcctcggccccgagtggacatgcggggccaaatcagcccgcacccccggcccctccggggccccgctacccaaccgggcccccgcattgagtagcaactcaatccagtcatctgtgcaccgccgttgtccctctgcgcgccactgtactctgtgccatcgccgcgcctgtgtgcagccgctgtgtctgtgtctggaggggagaccgggagaggaggggaggggactatacagtgtctggaggggagaccgggagaggaggggaggggactgtacagaggccgaccgaaggggagggattgggatttggggagagcggcaaccaaagatacgggaatggggtctggggagagcggcaaccaaaggggaggggatggggagagcagcgagccggcgagatccgaactcgagagcgcttctgcttgtgatgttcggcgacttggggtggagagggagcgcgtctacggctgtgcggcggcttggggtggggaggggaggtctggttggggtagggttaaattttttttccttatatatgctgatttccatgggtttcttgggcctatgttcctataatgggccacattttaagaagtaatatacccccctcgggggcctacgggtcacccgcgggtggaatgttctccctgtcccctcacccgcaaaatgcggggccacagtcccgatggacccgcggggcagaaatgtcacccgcccccgtaggggcgggtccccacaggagacacggtcccgcgggggaaattgccatccctatgcagattcatagtactaggatgtgtcacatgcagtactaggttggttttttatgggacggagggagtattatctatctctactgctctctcttctcctaatgctacattgtatccgtatacattgtgaggattgctatagttaaagtttatttatgtggggtctcatctatatagaccacttttgcgatatacattggtgatgcccttactacctaaccataaggaataaacaaataatttctctcattcctctctcatggctagtggttgtgggacccaacttactacccactttttgttcttttaccattgtagctttaacaataactaatacccactgacgcagggcccacccttattcacaaagtaccccctccggtttcattttaattattgttttggacaagattatggtcaaacttttataattttgaccattaataactttaaaaatacttagtttaaagaaactagaacaacatactccatccgtactcgtaaaggaagtcgtttatgacaatatttaagtcaacccttgggaatataaatcatgaataactctcaaggtgttgagtttaaaaatgtaaaaattatatgaatagatttgtcttgaaaaatactttcataaaagtatacatatattatttttcaataaatatttttatagaaataagaagttaaagttgtgttttggagaccgtgtcgctgtccaaaacgacttcctttacgaatacgaagcgacttcctttacgaatatggagggagtatatagatcggtctttcaaaacactataataaaaataaacatgcatttatttattttatatattataatacaaaaataaggtcaaatatatatttttgtagaccgtatcatttttcagaatgttaattaaaatgagaccgtgtctttttccctccattccaaattgatctacatattttattggtacaccaagaccaagaaaagctattaactctctcatactatatttattctagcaacaaactcgatgcatgcatcattcctactatttcttagccaatagtaaatcaaaatattgcatgtgggttataaatacatgtgtgcatgcatgtatcaatatccatttacttcaatgcacaaataacgaatagacctaataaatgaatataaatatatagattatttagaaataaccttaaaatccaaaactacgtgtatatcaatttggaaaggagggagtaaaggagtaggaagtaataataggtgatgtcctcctagccaatgcagacatgatgcagtaaatattgagattcgctcatctgcctgcctgactgcctctgcctgcgtgccctcgcgacgctctcctcgcccgcccagaccccttgattcgctcgaattttctggtctgggaccaacttcacaccagcctttggtgcacgtcgcgcgagtgctcaccccgtgctctgcgtttcgcctcttcgtccccgtgcgtacgtgatcatcggcagcaaaacgtggggcggcggcagcaggcggcctagccgcctaggggcgcgccgagcgctgtcacggacggacgggacggaagacgggacgggctctcagatctcgcgaaccagtgcagtgtactccagtgcttactttttttactccctccgttattaagtataagtatagttttacactgttcatatttaatatatttaacgtttaactatttgtcttatttaaaaaaaatttattagtcatagttttattgttgttaaatgataaaatataaatagtactactttatatgtgacttttttaaaaaaaattataaaatttttaaataaaatagatagttaaatattggacacggatacctatgactgtatttattttaagataataattcgtctcctcgtaagatggctcagggctgcactgcacgagggagagaggacggacggaccgacggacagggcccggccgggattgcgctttgactgcctgccgggcggggctccaagagggagtggaccatctcgccgtcgtctcactttgctgtcactttgcgagggcggcgattccgacgccgatctcccagatccgctcctgtcgggggaaacgcccgcggatcaacgggctacccaccatggtggaaaaaccgaacctgggaggctgggactgatcagtgagctttcaccggttcactgcttggaccgccggttcatcggttggaccacgatttatggctaattattttttatcataattaacgctaaaactgctaaacagaatagttattcagtcctcgccaacaaatttttcttacacagttggttaggtggaaagtacaaggcatgcagctcatcaagtctgaggtttaactccccatttgctcaaggttttttttgcatatttgttttaatagttttaagacaattcaccagaaaaccagctggttcgatggttttttttcatatttgttttaatagttttaagacaattcaccagaaaaacagttgattcgatggttttttttcatatttgttttaatactattaagacaattcaacataaaaccagctggtttgatggtttttttttcatatttgttttaatagtattaaggccttgtttagttcggaaaaaaaattttaggtgtcatattagacgtttgaccggatgtcggaagaagttttcggacacgaatgaaaaaactaattttataactcgcatgtaaaccgcgagataaatttattaagcctaattaatccgtcattagcacatgtgggttactgtagcacttatggctaattatggactaattaggctcaaaggatccatcttgcgatttccatgcaaaccgtgtgattagtttttcattttatctatatttaatactccatgcatgtgtccaaagattcgatgtgatgttttagagaaaaactttttggtaactaaacaaggcctaagacaattcaggtcttttatgcaaaccaaaccgtgacatgcactggttccagttttttcatgtccaattttacaactattactaccataaactgtcagggttacggataagatatactcacccttggatatacgctataaatcgatatggtatatctgagcgtatacagacgttctctgtatgcgctaaggaaattcatcacggagtccacaaatggaaagattcctacctggataggactgggtcgtcactgtatcgtgtagggtccgatcactggtggagaaaccctttgtagtcccggttcgtaacccctctttagtcccggtttctaaaccgggagtaccaatctgggactaaagatcgctatctttagtcccgggtgaaataatcgggagtaaagatcgatctttagtcccggttggtaacaccaaccggtaacaccaaccgggactaaagatcgagctgaccttttttttttgcatggacctgttgctgcatgggttatctatctatatatatatat

SEQ ID NO: 8175 - DNA, 19782 bp, Oryza sativa
tttctccatggtgatttacatgaggaggtctacatggagatccctccaggatttgggaatagccagacagttggaaaagtatgtaaactcaagaaatccttgtatgggttgaagcagtctccacgtgcatggtttgataggttcaggcatgcagtgtgtgatatggggtattctcagtgtaatggagatcacactgtcttttacaaacatagggggacacacatcaccatcttggctgtgtatgttgatgatatagtgatcactggtgatgatgtagaagaaatcaggtgtctaaaggaaaggctgggaaaggcatttgaggtgaaggatcttggtcctcttcgctacttccttggaattgaaattgctcgttcatcaaaggggattgttctctctcagaggaagtatgttttggatctgttgacagatacaggaatgcttgggtgtcgtgcaagtactacgcctattgataggaatcaccaattgtgtgctcaatcaggtgatcccgttgataaggaagcataccaaagactggtgggacgcttgatctatctttgccatacaagacctgatatttcctatgcggttagtgttgtgagtaggtatatgcatgatcctcgaactggtcacttggatgttgttcataagattctcagatatctgaaagggactcctggaaagggattgtggtttaggaagaatgggcatctaaatgtggaaggatattgtgatgctgattgggcgagtagtatggatgatagaagatctacatcaggttattgtgtgtttgttggtggtaatcttgtttcttggcgaagtaagaagcaggcagtggtggctcggtctaccgcagaagcagaatacagagctatggctttgagcttcagtgagatgttgtggatgaggagcttgttgactgaattgcgagtgctaagaagtgacactgtgatgcttcattgtgacaataaatcagccatcagcattgcaaacaaccctgttcagcatgatcgcactaaacatgtggagattgataggttcttcattaaggagaagattgatagcggggtgcttaggttggagtatattaagtcatgtgaacaactagctgattgtctaacaaaggggttaggtcctagtgagattcaatcagtatgtaacaagatgggtatgattgatatcttttgctcatcttgagggggagtgttggtgtaaatatgtattgtaccaaggacctatctgtaaagtgttatgctaatagaatagatgaggaaggggtgagctgagtaggcaaaccctagaaaaattccccaaattgaacaatagaaataaaacatattcaacctgctccttgcaacacatgagtaagctagtatttcaaataaaataatttcactacaacggctcacaaatgagagagagctataagggtagaatatgaaaaattgtttttaatggggatacataagacatattaagacaaatttcacacagaaatttacaagtcctatgtaattttatacctcaatcatagaaacaaagttgtggatcaaatctttgagctataagtggaagtacctctaaaatgaaatcatgatctcacgatgtatggaaaagcatggctctgacatgcatttgattcaagtatgattcaaacctaaatgtcacagaaaacattaccttcttccgaacactgcagtatccactgaactggagtgtggcacccaacactgaatcaatcagactgccaagcaaaccagcagtagcagagatgggtattactagaagctgtcgaagagccacgtcaaatgagcactccacagtcaacagtccaacaaaaacaaaagtcagacctatgattaggccacctgctgtggcagcaagaaggccttgtaaggtcactccaccgtttgtacctttcctgacaggcttaaaaatgatgttgaattatcagatcacacagacagacatgttcgcacgatattaccatgcacatttcaaaaaacaggagcagtaaaatgacgcaatgcagtaggaaataacatcacgcctacaaaaggaacatttcccttataccaaactaccttggttctagtttccaattatgcctattgaatttatgggaattgggcattaacctcaacccattgaatatgttgttaatattccaaacttgcttgcctaatgtgatcaatatgtgatccataagttgcatgaacaacatgaaagcatttctagagcagtaagtgttagttgtacacttgtgtgatccaaaaaattggcaaagcaatttgttcaatactccctccatctacttttgatagtcatatttcatcttggcacatagaccaaggataagtaattctacttatcatctatttaaacatgctactagttattcctcgtaagcaagcgattcattaataatgttgttggattgaaatatgcctattaaaaataaaattttcagatttgaaaatatgactatcaaaagtagatggaggaagtacaaaatatgttatgtgacaagattttttgccacttcagataacctgattggtactcacaggccatggtgtgttgtatagtcaaatttgaggagaacaaatcatatgctgtgggttcctctccaagaaaataataataataataaacccattgtgcgtttggcttagaaaaagtttagaccagtggctaaaacctgaaagacaccaaatgtggtaggctggtggccaagcataaccttactacttctgcatgaagattgcagaaactagaaagataatcatgactgaaaggaacatctgacccaaaaaaggaacacataccttcagagtagtaataagacgtggctgttcatcactaagcacaccaagttcggatgaccaagtatctccattgcagcagcaatagtgaccaatgatgccaccaataataccagttataacctttgactcatgggagtccaggcattgatcttgtcctccggtcattgttgccaatatgatgaccaatatagtagctattaagctatttgctaggacttggatcctttaatgtaaaacgtgatggtaagatacaaaagtaaaatcaagttgacaaatcagcagctgttgtgttatatccaactataaatgttatgctgtccatacaataaatcactaatttaaatatttgataaggtccacacaattcactaacatcttcagagtataagttttgctcaaataaggtgatggttccaagaaagaatagaaccagttcaagaatagttctgaggaaagaaaataactaatcataatgtattttcatcaaatcaattaactgtaaggggggttattctttgatttatataatagctttacacttttcctatggcatgctgatgacagtattgaagtgtactcctaatttttaacactgacatcatatgatcgaaacttaatgaagctccattgagttctcaatcttataaactgtcttccaaacaggcattgacttgaacgttgatgcgcataatatataacaatcttttgcaactgtactaatagtctgtgggcaatgggcttattgaaaccaccacatagcaaaacattgcacaccaataccatttgcggcagtagctttatatttctatctagaataacgactacatgattatcagacactcagcagtcagcatcattagctgccaatttagacatactaattaatttagttggagatggcagattccgtggcttaccagttgcgctggccgccctccttgaagtcgtcctcgatgcggcgcttcctgtccgcgccgatcttggtcgccttggacgaggtgaagaagaaggccagcacgagcgcgccgtacctgtacccgcaggcgaggtggatcgccatgacgacgaacccggctgccccgccggagccgtccagcgagcggcggcggacggcgcgcgcggcgatgacggcggccagcgccgcgccgacggctgtccgggccgcgactgaggcggcggggatccccatcggctgcgctgcgcccgcccgcggcgggagtcaaaggcgccagcgattggggggtgaatcgaatttgtggtaggggcgccggattctgggagaccgggatgcgactgtaccagtagtagtccaagtgacgactagtaagtatgcagttcagcaaatctgaaccgtcggttatttcctccgctgatgacattgagcaacgttgacgtcttcttccctgccctgtctgtcgaattttttttatttttttagaatctttatgttttaattttattaatagaccattctaaaaatatcggtccttttagcgccagagtcgctggcgtggtctctctgatgctgccccctgccaccacggagatactaacatgcccacccccctatcccccgctcccgcgcccctcgggggctccctccactctccttaaattcacttgttgtgtgtttttgtttttgtttctgttgttttttgtttttcctgtagtaaaaaaatagtacattttttctcttattaaaaaattagggttccttgagtttgttttttacattcgagtgtccttccttcaaacagacataattttctcatatggactcggaattaagcaaattatatatatatatatatatatatggatatgtatagaaaaagttacattcgattctcaaccgccttaccagattaagcgaaattagaatctccaaattccacttgcaagattgtgttttcgaggcgagaagcttttctgtagaactttagaaaattctacctgtcacatatttcatccatttgagtttactttttacatggttggtttatgtgtgctcctaagtgtaaaaaaatatcaaaaaataaaaaaattgcacatctctcgtctacactagagaggagaggaaaaatggcgtggggggtgtggcgccagcctcattggcgcgctccccctgccacgtcagcaccgagccaccacagtggcaggaggacggcgccaaagtcgcaccccagaaaggctatttcttggataagtttttctaggggtatattgtgaaataaatttttcaaaaggaccaaattatgaaaaatccatagcagctagcgtggcaggccagcattgccacggcagctgcatgtgacatgacagagttatttggccacgccaggcgggttggcatagccaaaaggttcatttcttagaaatacttttagggatggtctattaataaaattagaacactaaaaggtaaatgagcttttcttaagtgcggttagcataaacatgcataaaggtacgcgcgaccaatcaaggagcgccacctggtagctgagtaaattatggggttaaattacctgaggggtattaaggccattaggagaccggcgtaaactctaatcgttagtttactctagtcgtgattccacaccggaggaacgtacgcgatgttagagttcgctggagaagacaaagataacctcgccagtgcttaagctaggtttacgcacgattccacattggttacgtcacaactaaaatatcgataaattgcctgcagactctccatgaagtgacatgcacgttatggaatggcattccagtcaccggaaaactaagaagcgagtggaaacttgaattacgtgctagttcttatggtttactctctatattgcgccgctactgtagatcacgtttaaagaaagccattgcatcggcacacgtacgtaaatagtggtacagatgatctgatgtagaagatcctagctaaaagcaagcgatcgtggttacatcctatttacgttggtctacaaatacaaaatacaaagtacatagccacataagatcgctagcactcctctttacgctgtgagaaagaaaaatttttacggtgggccaggcccacctacatttagcaggtaatcctctcaaccgtgtactgaataacgataggagtaaatcccaacgtcagtccattacgaagcccattttggcaataactgttttatataatagtcctttctgattccactattatgagccaaacgcagcatcggttttattgttagccccttattattatccaaaatattgaaaatgtgatatataatttataattttgtcaaggtcttgtcctcggttcaccaccaccctcggattgcggacgtaagcacatcgattctactcatatgttcgatgtgcttgtttatgtgcgcaatccatcgtgtgcgtaaaccatcatgtatgccttgaacgccaagcgtacagtgctttgcgagttgcgttaaagcctttaaaggtcctcattcttcggcagtcgtatgttgttgacaatgcactgaaaaaaaataatctagcgtaccaacggagatgtttgtgacgacaaataaaatcaagcaaataagatggacttacctcatctttgtatgcaatttagaatattagtattccctccatttcatattataactcgttttgattttttttcctagtcaaactttagtaagtttgatcaagtttataaaaaattatagtatttttaacacaaaacaaacacactttcaaaatttattaaatgctggatctcacgaaactaatttatatatgagcctcacggcccatgagtgactgcagcgcgtgccccatggcacttgtaccctcgagacatgttccacgaacaacttgaatccatctacatggtctacgcgtcgagtaggataagagattaggggattggtagtaatactcatttcgtttttacacacctcgtgaattaaaccactaatttccctacgtgcgaaaccttcgtagcttcgcagctttattgctagcccattcgacaggtccacatacacataacggattaggcttttccctaaaacaattatcacatctggattaaccattttacactagagtgatactatgtaaacgccaacctagagtagaccattcacaccttcatgcacgtcgcgaccatgcccctgtacgcataaacctttcgagcgtaggctcgatgtgtttacgtccagagatacccatgtaggcctataccatataggcacctaacctatcgaatttgaaccacagtccaaaatggacgtgtttacgtccgaaagacacaacgatatgtaggctctatctgtttagtattctttttataaacaaaagagaggaagtcaatttccaacgcatttgcgtgggtttcttacatactctctccatttcaggtcataagatattttgacttttatcaaagtcaaactgtttcaagtttaactaagtttatagacaaatatagttttatttataatattaaattagttttatcaaatcaataattgaatatatttttataataaatttgtcttgggttgaaaatgttgctatttttttctacaaacttggtcaaacttagtcaaaaacgtcttataacctgaaacagagggagtaatagtaaaagatgacatggcgcgacgatcggcacatccaacatccaaactacttaaccctcgaaatataactactagttcaactatactgtataaactacaatctacttgcattatttctgcttcttccttggtggcaggtatccagatgaaccgtcgtcatcatcgttccagtaggcattcttgtcgggtgatgcaagcggaggggccttctcgtcggtgttccagtcatcgtctttgtcttcctcatcaccggggtcgggcaaagagtaatcgtctacaactaaccccattaattccaaatttggggaatacccagcgttggtgttgaaatcaatggggactctgttgaaatcagcgacgatgcctcgatatgaaacatgggtaccattcctcctcgctagaagatgaatcagaggatgaggatgaagaactagacaaagaacacatggtggcggttgtggtttcttgtttggttgtagagtaaatgaatggaagatctaagtacatggtgacaacccccaggaaccgccgaagaagaagcgcccctcccaggcggaggcccaagccgacgagatcaagaggctgcagaatgagttgcgtgacgccacagatcgtgtggagattcgtgacggagccttacgccggatgatggaggaatccatccaaaaggccaggcaggtggtcctacggcttggcctcgacatcccgctcatacccaatgccgcaacgagcttcgcggatactgtcgggcactacgtgctcaaattttcacatctcgccgacgtgctgagtagattgccaccgtcgaagaggcgagagcggaagagggcgcagttcgtggccaagcgcatgttggtagcaagccgtgctcaccgctgctcgccgccaccgccatcgccactcctagaagaaagcgatgccacggcatgcggagaggtcgccgaagccgactgagttcgtagggtgtcagtacgtaggggttatgtggggacacccgataaagtcatggtgtcccacgaatacgtaactgcccaggatgttcagttactcatgaaatgatataaaagcataaacttcgattatacaatacttaagtcacttagttcacaacacaacataaatacaaaccattacatatatggcctataaagccttatttctaaaaacagataaactgctagactccacccacaggaactgccttagcgtaggatgacctagaaaccgtaatcgtcccactctaatgggtcaacaggatctccataagcatcttcctcctcatgatctgaacccatttatgagtacaaaaggtactcaacaagatatgcttatgataataaatacaataattgcaatataaaacatgcagtattgagagccggaaggtttaaaccctaaccttaacagttatttcatagagcctaccttaataaacatttgatataaacatcactattgaaaatttaatttaaacaataataacgagcataacatataaatgttacttataaataaattgaatagaacatcaagtaataaataagttaaccatattaatggccttttagtttaacttgtgcccataatctggaatcacccatagacacatatccattaaccgggagcacagcgtattcgaatactcaacgactctgcagcgtctgcccagctttacccacacgatacccacagctggccgggctgaaaagtaacaaggtgtaatattgctccttatatctctcccttctgcctagtaagttaaaagatgctcgggatgttgctcggagtgatccggtccgaggtgtgtaccaacctacctccgcatccacttaccattgttcgttactcgatgggcagcccagaacttcatggacccatagggtagttctgaactctcggggcccatcgagtccacatatataaatcatataaacatgaaccatgtccctttgcttcacacacttgaaagctaatggccagtacaccgaaaagcctgcagaagtttaatcaattggagcaatatacggccaggttcgacagatcgatcgtgtggatgggcgaaactatgtcattcttattgacacaagggggttgattattatatcaatttaaaataagaaataactatacatatatccatcacgaccataaacaggtccataaaaccaaacacataaactctatcatgtgtaccacccgctcacaagcggtgttaacaattttcagcatgtagccataaatagttccataagcatgctttcagatgcaataataataatatccatattaaatcaatagcatgtaaaataattaacagctcatttaggtgttcctcaaattttatcctaaacttgttagactctagggctcattaaggtgtccataatagcaacagaaagtataatgcaataatagcaatctaattaatttaaaagaattcgtgcagtttatcgtactccaaaggacgagtacgctaccaaaataactctctaactactgggattaaattgttcaagggagggtgcatgtcttacaaccttcgggctcgatgtagtcgtacaaaccgtctcctcctagcgcggagatttcactcgctccgtctaccggaccaacgtcaacgttttctatttacgcaacaatcatcaccacaataaataacagaaaaacaaagataaccaaaagaaaatagtatcacaaagtgcaacaatgggtgaaaaggatttaaagaaataattttagcgatttttggaatttcggtgaacggcgaaccctagggctaaaattagggcctcgacaacgggtgctcggattgcaatgaaactgatacggatggattcggaataattctaggagggtctcggattttgttttcgaggtcaaaaggatggtcaacttaataggaagagaaaaaggatttttccgatttatttttcaacaggaaaatcggatttttcttctcttctctcgctctgcacaggaaccggccggcaactccctagcgccggcggtggagatgaccggttttgggcaagggggcgccggtttcacgatctaggggtcgaggcgactccgttcccatggttggcaacggcgcaggcagcggcggcgaggctggcgacggcggccaggagctggaggcggcggcggccatggtggcggcgactccggcgatctccggtgcgggcgactggcctggtgagaatcagggaaggaagtggagcgcggtggtggcggcggctcggcctgtggcggccgggagcggcggcgcgccgtgcagccggcggcggccgaacagagcggcgacgccgggaggcggcgccggcggcactccggcgtcggatgggatggggaaagagagggtaaagggagtactatgcatggataatccgtttttaccttcaatttcagaggatttgcgatgtatgcgatggcgcaaatttagggtttcggggatttttcctccggtaatggcgatttgattcagcgggagtaggggcagatttaaggaggtgaaagaggttgaaattgcgcttcttttgcctccggtcttgagccttctagttgagagacgaaggagatacggaggcgagtagctggaggtgtcgcggcggcattcgttcgtcgttcgtcctcgtgcgagcgtgtgcgggcgtgtggcgcgcgcggggcggcacgagctcagcgcgaacatgcgcaagcgcggcgtgggattggcgcgaggcggcacaggctctggctcggcctggcttggcctagccgagtagagaagaagaaagaaaagaaaacgagagaaagggaaggagagggaagaagaacagagaaaggaaaaaaatatggaaaaagaaaattaaggtggaaatagagaaaaggaaaattttggggaaaattaaaatagataatatttgaattgatgtggaatttagatggtccgacattcaggatagatttaaatcggattcaaaggaattatttgagggatgatatgcactttgcaacaaaattaaacgagaaaagaacatcgaaaataaacatggaaaataatattttaaataaactattaactcgacggttatatttttagagaatcaaagcaaactaaatcggttttaaaaagttatcaaattttagggctgttacaggttaattatatttgcgatcgtaagatgcgatcgagtggataacgtcatctaggccagacggttcctctgcagtggtagcctctgggtctacggacgggcgagagattagagtgggtggtcaccgcatctcaatttaccgagcacgtacgtcttgcctctcacgcgtacaacgacactgtgagctagcgtaggatggatgtggcatcatcctcgatccgcgggcagcgatgggggtgaaccttgtaggcacttagcgatccccatgtatgcgtagagcgggcacgactcgcgaactagcatatcggccatcacgtatgtgtaaaccgtgttgtaggtagtacgctctatgtttttacgtccgaaatcccgatgtaggtgtaatgcacacacctcgggcatagtgctgttgtacgcgcgagaagtgcgtgaaggtttacgcgtacgcgcgtgaggatcgtgagttgcctacacatgtggttcacgcctgccagtggatcgtggacgtaaactaatctttcgtgcgcgtaaattaacctttcgagcgtagcatgaatgtcaggatgtgtttacacccgagatccacacgtgggcgtgtaccatatagggcaccttgagatggccgcgtaggcgtataagccttggaatttgaccttttgcagcgtaaactatcatcttgatagcgtagacagcaactggtagtgtatgggttgattccctgcttggcgtaacccttgtcgtcctcgacatataatccatattttttggtgtatgggttgattccctatttggcgtaatccaatttttcaatgttccaaggaggatgaatagtagttgtgatcctacgagagtaaccacatgatgatttacacaattacctttgagagattcaaacgtaattacctatcaatctatggggtatcaaataaagtatctaactatagttaataaatttgaaaaatgttaaggtgctatatggaatacaagtgtaagaacttgagcataattatgaaaacgtaagggttttagtagtaaaatagtatagctcagattggctattttcatatacttctgttgggccatccgctatgaattgcagtgaggcttttcagtcttttatttttaaaaaatacgatgtttacgaaccttggttgtggggatagcccataacataacattattttttaacagaacgtaatccatttatttagaccgggtctgctgtggctatgtactcgcaataagttgttgcgtaaacatgtaggaatttatgtaaacgaataaccatacacttatccggatcttctacgacgggtcatctaaactagcatattgaggtgtgtacaaaaaaactacatatataacttaacttgtattctacttctacaaacgctaaataaagcagcggcttggtaagaattaataaattctgtccatggcaggttcttctccattagcataaaccataactatattaacgtaaaccatgcgcaacgtctatcttttctggcgtgtcctacttctagcctggtaagaactaataaattccggccatggcaggtccttctccattagcgtaaaccataactgtattaacataaaccatgcgcaacatctatcttgtccggcgatggttgtgtttttgcggtgaccatatcgtccggcaggatatcctggtgtggtgctggttggagttgtttgcgtaaaccatcaggacatcatcgtaaaccatgcgcatgactgttaaaatgacgtggatacccttctgtagtgtttatgcacaatgcataaagcctttatgcggtgggaggggaaacaccctcacaggcgtcggatgtggacacgtggcgcaatgtccttagttgaccgcattgaagaatgtacgatgttaattatatattattattagaatttaaaacaattttaaaacttgcatatgttaattatatatgattttaagaatttaaaacaattttaaatctagcatatgttaattatatatcatccacataatttatttaaaattttaatctgttttaaatgttttgtcattaattttgtgattttatttcattttagtgcatcatttactattttattaaacctatatttaatgaaattaaatagacccggtgtaatgcattattatatctttagtcccggttgttaaccctagccagttcaaaaaagaatttggaaatagcgagacatttagtcccggttggtgagaacaacctggactaaatatcaaggggtatatataggcccgaggcggcggcgtcttctccaccaatacttagacgattttctgcttcgatctcggcctcatcggcttcatctctagggcatcctcgcatcgtcgccgccgacaccgccaccgccgccgtcgctacctccacctccggcggcactgccgcacgccgccgccgcttccacctccggcagtgccgccgccgccctcgccggtggcgccacgcaccactcccgctgccagtgccatcgccactgccgtcgccgccgcccatgccacctcgaacgaacgagaacgaacgtgttaacaaacaagaacgagaacgagaacgagaacgagaacgtttcgctaatgtgaatatacgttaacgaacgaacgagaacgatagaaaatgagtggaacgaacggtagaaacgatagaacgaacgaaaccaaacgagaacgatagaaaacgagtggaacgaacgtgaacaaacgatagaagcgatagaacgaacgttaacgaacaaacgagaacgatagaaaacgagtggaacgaatgtgaatgaacaatagaaacgatagaacgaacgttagcgaacgaacgagaccaaacaagaacgagaaaacgagtgaaacgaacgtgaacaaacgatagaaacgatagaacatacgttaatgaatgaacgagaacgatagaaaacgagtagaacgaacgtgaacgaacgatagaaacgatagaacgaacgagaccgaacgagaacgagaaaacgagtggaacgaacgatagaaacgataagacgtacgttaacgaacgaacgagaacaatagaaaacgagtagaacgaacgtgaatgaacgatataaacgataaaacgaacgttaacgaacgccaaaacgagacacctcgttaacgaacatagaaattacatttgtattaggataattgagactaatacatttgtttgcatttaagaaaatacgtggtccagcaccgaccgtcgtcatcgctcaagcttaagtggtagtaagccctcgaaggaaatactcaggcaagttatattaacagatttaatattgctttcaattgtaataatcatttatgtctggatacttaaggaaacgtaatacccaaatcttaatccattacatattctaaatatataaaccatcccctgtaaccagacgataaactagcgatgtgagtatatgtatatggtacccatagtatcacctgctatactcttttttactattctgtttgctatactcttttttactattctgtttgccgaacatgaatggtctggatcgtcgacatcacagcctttagctcccgaagtacgaaggtccattgcaatctgtcccggatcattttttgaagtttcgacacagctcggaaataatttaattttgaatgctttcagacaaattcaaaaattcaaatgttatgcaataaatttggtcaaaattcagtcagaatttgtcgaaaagcagttaaattttgtcaaaaaccatgataccgatggggttcaaaatttattggtcaaccataaacactggtgagaagccttgttgttaagcgtattatcaaatatattctcaaatatagtacccacagtagacgccagtgctttcacctctgcaaaaggtacgccaccaattctatctttctataaagttaaggcccactgcattctaaagcttaacatgtaaagatggcacatcatccactaacatttattagtacgtctcaaatctcatgcaagcatgctaatttattaagttttagagctttaaaatgtaagcatgttaattaaattatcatcccacataattcacgtttgtaaggcccactacattctaaagcttaacttgcaaatataccacatcattcactaacatttactacatctcaaatctcatgcaagcatgctaatttattaagttttagagctttaaaatgcaagcatgttaattaaattatcatcccacataatttacataatatttcaatatatatcttcgtcactttttataatatcctatatgcctatatagttcattctcacttaaattttagagctttaaaaaatccaagcatgttaaatcattattccacataattctcaaaatatttcaatatatctctccatcattttatataatatctatatacctatacaattcattctcacatagttaatgctatttctttcttctctcattaagccatatcacctcaattgtttttagccctcaaataattaatcaatggttggaattatctccctcattttcttctctcataaagtcacatcatattacttttaaatttggatcatcattctatatactatttaaattatggtaaaccatatcagcttatacaaacttctatcgtctagatattttacatattatttctatttcttattttcatacgaaactctcgcgacaacgcgcgggtttcacctagttttaaaactactactaccacatttttctctagttgtatgcttaggcaaaaatgcatctattatatagtaaaagtctattaaatatcctataaatgctctcaagccatcacatagcactcctccaatcgcccctacgcggctacgccgccacatggtatttaatcatctagccgtcgtttttcactaatatactgtggacccattattttctaccattagatttattcatccaaataaaaagggataaaaaagaagggcccgcatatcccacccatcccatccagtaagtatgcttgcgtacgtatgtgcacccctcatatttcctttctcttctattttcctttttagttagatggaaaaaaatattccccgcctgtccaataagtatgcatgtgtgtacttacccacatatttcttctcttgttttcctcttttagttacatagaaaaaatattttatgataacaaattttaaacaattatattatctaaatcatatagataatttttatttgcacacactattagattatttactataaaatttaaaatgaagatccaaattaactatattattgaagaaattccttattttagtcatatattctacgaactatagctcgctattgttcactaatccatgcattttaagaaaaaaatcataatatattttaaaccttccaattaataacataggtaggcaagtttcacaataacaaacctaaccaattaaaatacgctcacttcattatgttagatatagaaacaaccataatgtttaagctactttttttttaaatatttctatgccttttaaaccggtataaccattatttctaacagttaaatctatctttattaaaaaagtgtttattcatggtacatgacatttcaaaaatattattgtcctatgatacttcatagttatcgtatttctactaggttgcgtggagtctctcatccacactatataaaatgttcatagatagatcacctctcaaaatatatcaattatattaggctatataaacccatgtatttagtggagcttcatgtaccacccaatttatcttttaagagattatgataatatattatacaattaaaaacaccttatttttattttacacttaatttactttcgttgacattttttctaaagaaaataaatctatttctaaagaaaataaatctactttcttttcaaatgacaaagaagattataaataattgcttatagatattacttatatatatatatatatatgatataacataaagctaatgggataaaatattattaaacaattaattaatgctgacaaaggcaatttatgaagaaatcatgaacaatattctctggttaatacctcgcttttatcaatacgtacgcatgatggacgagctcctttctagttatattaatgtatccaaaaatgcattatattattatttggattttcttccagagattgatttcaagttttcggtaaataaaataaacaagtttggctactttttttatgtttactcccatgtttaagcacctaagaccgtcagataaccatttgtaataatatatgccgatggtagtaacgtttggtgaaacggcaagaatcgtaatgacaatgtttttacaccactcgagtttcaggcttaaatttgttttttttattaaaccaagccaggcatggtcatcggtcacatggaagtacagttcgtcaaacctatcaaagtttacagcaaatagtccaaaagacaggttagatgtcggtatgacaacaacccatcaagatcaatcagcacaatcagacaggtaacgaagaaatttggccatggcatcaagtccctattccgagcggaaagtacagattacattacacaaggatccattagacaagtggcatggctataaagtggaaaaataacacacaaaattgaggaaataaaacaaacaccttcaagccccaacagtcaaaacacaaactactccgtatgtagaatgtgcatgaaagcacaaattgacttaagcaggctattttttttctgaatgaaagcttcaagcgtaaagctagttccacacttgagttagctgcaataggaatcagttggttgtggtcatctgaaaaggatatacacaggttcatcagtgcatcactaagcaaactatcaagacttcaagagcaaacaaggattgaactccagcaatttcagagaacagcaaactagattcatcggcgaagtgataaatcgctttaaatacgcaaaggctacccatagaacaaactaataaagatatatacttgcagatgatgaaatagggagaactaggttgaacgtttcagccctaaaagcctcctaagttctgaagcatccagcattatcagattccagtagagcaggaaaccaaaagatctagagctgctgtgcaaagaagagccgaaagaggaaggataagcatggcgatagaagcaacttttttcccaacaaggaaaagggcactagatactggtgaccaagtatgtactgctaccacctaaattcctagtaccctccaccacacctgcaacaatattaatactactgctatctggcaacatacatcatcaccaccatgctcatacgcatggagcacaatcctgaaaaaaaagttattttttcttttaaaaaaagaaaaaaaaagcgctaagtcaagaagactcaagaggagaacgatggaaatccagaacagtaaagctgctcgagggtgacaaaagatgcagagctcccttcaatccaaagagggtccatgtagggttgatgcagctcctggggcatgcaagccataagcctatcccaacaacgagtactccatcattttcctatctacacacatactattagtataaattggagtagtttctttcagatctcgagctgaatgatgaacatggagtaggctaacgggatccatgacccagcagctcaatcgacccacagcaacacccctttttggaccgaaaggagctcaacgtccacaacactttccagcaacgacaagaacagctcaacataaccaaacgaataagaacaagaagccatggaagaaaaaacaagcttagcacaataggctaaccctaacgaaaagcatggaatctgcacacagatgattctgcgagaaaacgagagagaagaaagaagaagaagaaaaaccctcctacttcccccctcccatggcaccggctgcctactgccgtggatggagatgctactaggcgctggtccatgctttaaagaagaggagaagcgagagaaaaagagagagaagaggaagggggaaggggttggctcgaatcttcacaaggggttctctcgggaagcgagcagacgccagcccagccctggtctctctgactccgagcgcttcacatgcctttggctcggacgaggcggccatgcccaatgagtccatgaccaccaccaccacagcaccactccctcgacagatg

SEQ ID NO: 8176 - DNA, 20471 bp, Oryza sativa
ccccttaacgtcgctgctgccctcgtgtttctctatcaagtacgtacgcgtcattgtgggggtgtagggtcctcagtggcgtgcgccacagaggacacgcacgccgatgccatcgctgtcgtcctctaggcgggctaccgccgacaccttcattacacactggttggctagtgtagggagaaggtggctagtgcgttccacgaggcgcacgactgcctcttcctctgggtggacgtcgcaccggaccagatgcgctatgcagtggtacatatacgcaatggtgcacgtggacgacatgttgtggtgcaggttggtgggcgaggcgcacgccgtgttcaacgccggtcggggcagcctaccagagatgcacgagtacccgcttggctagcgtgatggtgctggagatggtgatgctgaggttgcggacatgctagagcgcacggtgcgcgacgtcaaggccaacacttacggctagcgtgcgctccatcaaggccaatacttatggctggctgttgtgcagcagcgcaggtggcgaagagcccaagacacgtcgactcccttaatgtaggtagatgcagttgcagtgttaattagtggtgtacggcgtaaaaggagatcaattttttgatgtgtttacaccttttttgacttgaaagttaaaatcaatcgtaactcccagccatcttttgaagtgttttccctgtactgcttattgcattgcaatgttgccacttctctttgtaacaggacataaatcttttttttttctgaaaaaaagaacggaagcctgccattagtgtaagagaaaatttcaagcaataatacagcacagaacatgataatattgtaaatttcttgattatccaactattagcacaggatggcctaatttcatagtatacgtcgtattatatcctgaacatcgatcgctattgacgaccatgttggtaatggtggataaccaaaccaaattgcacttccaccggtttactgtacccgtggtggttggataatgcagagtcacagggtgatctagaggttaattgtgttttttttatctccatctaagtaagaaaatttgaaacaaacggtctaatcttttcatttataattatacttatcagcgaaaattagaattttcaaccttaaatttggagtccatattaaggttttttcatcgaagtttatttttcagcctttgcttttagatcattacgaacacgtatataaaagttttatttgtaaatttttttcgtttgtaaatataccgtttggtttattcccggacccaataaaccatccgatggcctcctttgacgctctaaagtcatgtaatgaatatgtttttctcctacattcaagcgcgaaatgtttaaggagaaaagaaaattttgaaaatgtgtttgtttagatttattaaaaaaaagatgagtttgtttagatttattaaaaaaataaaaacatgagtttgtttagagttttgttaaatttctcaattgattcataattctttattagcatcaatagaaaatgagcttcaacttcaaattagtaaacgaaaagtttctgagttgggaaacgtctcttaatcggcttccagtaattacgggcgacttgagggggttagatgaaatttgtgtaagaaaacttgagggggaacaaattagggccctccttgcgatttcgaggttagggtcggggtcgatccgtcgcgggggaccatctctcggcatcgatcgatcgccgccggtgtcggcggcgaggggcggcgcggggatggcgagcggcaacagcggcgagccgagcacggcgccgcagccgaatcggtggtacgagctccggctgggctcctcctgccgcgacccctcccccaccgccaagttctgcacgctccgctgtacgccccccaaatccccttcctccttccctccctgatactcgtgaggcgcatatgcgtagcgcacgcggccggagcacaggttcctcttcgctggtaattctcgcgcccttcggtggtgcgatgggggggggggggatttggcgatagtatgcttttagtgatgcgtccgtgtccaattggagttctggaattcatcgagctggtggcaaagcactccctgtttagcggcgttggggtcgtgaacacggcatgatgctcttatttggacatgcgtgactcatcatcggtgcatatttgacatttgtgacttttcatcagccacaattggtgggattaccacatgtcagttgtctttgttcttctgaatatgtttcctttggttgatcaggtagcatttgctttatctctaaagtagtaaaattttggtttgttggagacagcaaaataattgttaggaagggttgaactcgcatatatatttttggggtctgtagcattgattccatggttccttggtttggtgaatcgggtgctcttggtattgtgatgcatagtttctgtgctctcttgctctccttttatatggccaacgattcactatctcataagcttttccctcttgatggttatgtgacatgtttcaatttttttttcattgggccaaaacaagtcattggtaataaaggaatcaaaattgatgctcccaaaactgattaaatagttaattttctctccctctcgtggtttgaaaaaggttaccacgatcatgtagggcatgcctgtcctgggtactcttcatgaatgaattagcataacaatttgctgaaatccaatgagtcaccacttcgttggttgctgtctagctttcccttccattttaagtccattattggattatgaagtttgaaataaccatttttcttttgcctgaaaactatttctacaaatatctctaatgtgttgatccttattcttttatattataaatacatatcaggctatgtcgtgttgaacccttttcttatatttgtgttgacagatgaatttaagccagcatcaattgataagactcaagctgggtctctgcagaagaccaaagataacagggttactgtggaattccacaacaatcagcctggcaagccaaaggtgacatttgaaggaagccaagaagagtacaaggataatgatggtgtcttgttttttgatggtgaaacctttcgtctggagcggttgcatcgggctgtcaagagattaaggcatgtccgagttccaggagagtcttcggcagccacttcggctactactggaatgggcgaatcacattcccctccattaccgaaagttggaaagtcaccggccatgagtaaacctgctgtacactcagttcctgtaagttctttcagcattttagatgccctagataaattttgatacattgttatataatttgttacgaccttaggtattggaggaaaaaaagtgataacgttgaataaccggtatgagacaatatatgatgcacactatttagactgacaaacacaaaacatttgccaagagatttttgttatctgggagactggaaccactcatatataggcccttcagtaatatttatcggtagcatattaaacaattcgggctttttggaatgttgtagaccatattacctgattgtcttcatgtagaaagtataaaacattatatatgtgccacaataaaatttcatgtttgtctaaattcaagcctagccagttcataagctcttttgaatctaacatctctcagacccgtaagcatccacaggattatgttatatttgtgatatggtaaagtgattaatatttgaatttcatagtatgttttaggttattagtatttaatggtttatgaaaacattagtctttgagcatctgattgaaaagtgaatattgttaatttttattcttcataatttatatttcagaaggccaaacattggatagtgagtagaaatttcctttacacaacttttatgccagaatacagtatggttagctctgactaccgatgaaagttttttttttttgccaaaatatggtagcaagttctgttccttttctttgaatatggaaatttgatggcttgatacaatggaccatattcaattatcctaattaacttcgtatcacatgacaattggactgggccagggattgttttcctatcatgttaatgcttttctttttatcaaagaaaactttatacagtccttgctaagttcctcgtttcagttcctggatccattaaccccaagcttttgtgacatagtatcattatccctgatggggattttgtcagggcccttgcctgttcaatgcaagtgttcggatgggagcttttgtaacatagtatcattatcatgcaactgtgccattgctactgaatatactgctatattttgggtatcaaagtgatttcagcttttagtgagctcaaagtagagatacaatctctgaacatttgatttgcatgagagatgcatccttgtcccaatctaaaatgtactttacatactttctaagacttggatataggctcataagtttgttatatttctcatatcattcccagtttactccagattatatatattgagactagattcctgaagaaagcatcctaaagtgttataagttcataaatagatttataagctgacaatgttattgatatgctgaccctgggccctgggggatattggccaacctctgtgatatcacgttgtacaattttagtggaattcttgaagtttaagaaactcttctatttaatcatcgtctgacttctgacctttgatcatcattttataggttgaggttgaacgcattgacattggtgaacctgaaaatccaggtaatgtgaccctttttttattgcaatgttgttcttaatcatgaggatcttttagtttcttaacttgctctgatactagagatgatgaatacattcgcgtaattgttgttaaaacaaaggcaaggcatttgccatgtaggttatacaccaaattctatgttcgggtcttgatgttgatgttgtagtttgcagttcttggaatggtccttgtaccatgatatcatcttgtcaaatttcatggtgctggaggaaagatatggcacaatgcaaaaacagtttaacctttctaattgccgttttgacctgttctgcaaaaaaaatatattagttcaccaaatacatgccattctacaactcagaggcgcatgtagtgatttccccctctgtaccatactgccaccattactacaatttgtagtatatttccacgatgaaaaagtagcatacagatcgaagcatacttgaacattgttctcctcgattatagaagcatgattaatacctaaaatatctaaaaatagaggtagtgatgaaaaagatgtttgcgttttctaaaagggttgttaaagattgtcaatgttgccaaattacgtgaaatgttttcttggataggatttatcgtttgttctcattttctagtttgccagttgcaggtctaagaaacaataacaggagcactacataccaacctgttaccacaaatccattttcattttcgcctgatccaaatgatcaagaggagaacctagacatacttggtgatgatgacaatggctcaccgaataacatgtcctctggacaaggagcttctgttcgtggttttgacatcaacataccaaaccagcttgacatagatgatgaaattgctgatgtagatgtcagtgatgaggctgatgagggactcaatgcagccgaggccctgcgagctcaagtcaatgcagaagggcagcaggatgagcaggaaacctctagctctagcgggagcagcagcagcagtagtagcagtggaagtgggagtggtagtggaagcagcagcagtgatagtgacggcagtgatggtgattcagccagctctgggggtgacgttgatatataagtttggtgtacagagttttcttgctgtgtatgccatggttcacaattttacaccagtatcaggaggtgtaagccttgaatgtttaactcatagttcacaggtaacaaaattaagtttcttctgttgtgatcttattctgctgtaatttgtttgttctcctcttggttagtctgctatgtttcttagatctagcctggagcatagcatttgtatgaaacctttgcatgatggattttcttcccaaatatgggatatattttctcttgttttgaagtacagaacggcatatattctgatatgtagacatacatagtgtgcaccatgttgtgggttagttgtttgatggaagtatctgcccactttttgtatcgtacttgctttgctttgcaaattaactcatggagctgttattttttgacaagtaatttatcatgatttggtaacacctactccctccatttcacaatgtaagactttctagcattaaccacatacatatagatgttaataaatctaaacacataatgaatgtgggcaatgctagaaagtcttacattgtgaaacggaggaaatattattctcagtcatgtttgtgcgcatgttttaaacccgcaagttattatagtagtaaattgaaaacttgtgaacctgtggcatgaacctgtagtgatttccccctctgtaccatactaccattacaccattactacaatttgtatatttccacgatggaaaaagtagcttgcagatcgaagcatacttaaatcttcgatttagaagcatgattaatacctaaaatatctaaatatggaggtagtgatgaaaaagatatttaagttttctaaaagggttaaagattttcaatgttgccaaattacgtgaaatgttttctttggtaggatttatcctttgttctaaaaggatcatcacgtccgtccggacctggcagcgaggggttttggtctatttgccactcttccgaatgccgtattctcaaataccattcttccaaataacttttaattttaccatcgaagagagaagatttcttgctcatttgccattttccagcccatcagaagccacatcaccaaatccgaggacgaaagggtccgttttgcccctctcaatgtctttcattctcgctccttgccttgtgcttgggctccagtgaggattgccacgctgataaaccccctggcccgcgagctccagccgtctccttcaccccgctcctctgtatgcgcaagaggagaggatagctagcggtggctttgccccgtgaggacgaggtcggtgatgggtgaggcaggagtgatcaacaccagcgggtaagtggagccctcgacgatgggtcgttggtggctctagtggaagaggatatcgtggccacgacgatcgtacccctcgacagcgagccgatggtggaggtatggcactcgcggatgcttactgcaaggccatgaccctcggccgcaccctcgacgtggagctcacgtggcttcgtctgcttgtacaccttcattgacagggagcacgccggaggagagggagatgatgaaggtgagtgaaggcaaagaagaaagaaaggaggagggcaaggcggccattttgtcctcgaatttggtgacatggcttctcatgggctgaaaaatggctcacgaacaagaaatcttctttctccgatagcaaaaagtcaaagttattctagagaatggcatttgagaatacgcccttcaggacaatggcaaatagtctaaaaccccaaccgagaatgtgagaagaagaggaagagaagtcggtggcactgtggagttgggagggaaggttgccaggggagatgtcagtaagggaagggaaaaagtagttgacatgtgggcacttatgccacgctgtatatgtcgttgcatggaagggtgacaagccttgagtaattgacctggttgactactctaggtgtccatgtgcgggcatgcaagtgagcacgtgacaccatatttgagcggcaatggtgcttgagccatcaacgtgagaagcgccaatgatgctgatcggagcgatgagacagagacgggagcgggagtgggagcgggacggacctacgattggcgttggtgagcttaagacgagcacacgtactattaaagcgagaggtgcatctaaagcgagcatgcacggggtgagcatgattgacacgagcgtgtgagtctgattgctgtggcatgctggtattttttacgatcacagataaatctgcaggtgtacggataccgctgtagtatttcacctagggttattcaaagggtatcgtatttatatttttgcagggaagatgatggtgtaaagataaagtttatacatcattaatcaagctataattaattcaccatagtgtaaacaggggttagaataataaggataattggatagtgtgacacacaccaatctaaaatgtgactcccacctttcagatgaacaagtaagaattagtgtaatccgctaaggttattggactgtaaccgtagtattgatcgactagcctaatcaagtgaatcatataaatgaagtatatcctaatcataaaacacaaaactaccaaagcagtatatgaactatgaacacaagaatataaagaaggtaattctattaattcaactatagttttacaagaacagtaaagtactaaagtcatactggaatctccgagaaaaccatagaaccgaagattactctaagcctatttccactaatattgtagagaatacaatgcagatagagaaaatttctccttgagtatgtgctgtgaagtaaggaactctcctctatttatagcttctaatgacagttgcttagatcggttttggtttgggaattaggcataaccgctatcaagagtgcgggaggaggcaccacgtggaagacggtggcgaggggtacacccctggtttggccgaaccagggactccaccattcactaccgaccttgtcctgaggctgacatgtgggcccttcgattggtgcacggttgattggacacattttaagtcggtttggcctgacttgggcccatcaatccatgtgctcttacgtgattcgctagaaatgtgtttctttgcatgttggctcatttctcctttattttggtgtataatctttgcatacatgttatttctctaagacaagtgaaattatattttttattattgccatacgtaaaaaatattagttctccatttatttattatgatagttgccgtcgacattgatacttaactatcgttaacagagcgcgcatagatgggcttagggcgagcgtggacgtacggttgcgtgtgcgtgagctcgaggcgagcatgaccaacagctagggtggccacgtataggcacgagaagactagcgtgagctcagtaatgccggcgttagagtcatagagtgcgtaagagcaagtttaatagtatagccaactactagcttcaattcatctatagctaatctaataaatagcttatttatacaatagttatatactacactattaatatctggtcctacctgtcatacacacactgcgtcttggagtccgtgctacagctggctacagatctatagcccgctgctcttctctctcatcatttatcttcttaaaatatgtttgcaactggcttatagccttctattgtatctgctctaatcctcaccaggtgggttgtcgacatggggctcctcgcctttccatgtagcgacaaaacggtgttacctttccaccggttgacatcggtatttttttttgcatcttttgtaaaataaaattaggttgtttcggtaaaactgaagaactatcaacaggggatggatgacttcgcagtctccatatccgtaggctccgtttgttattggcttatgttgctgctcctgcccgatcttgtactcaagcaagaagaactgtcaacaggggatggatgacttcgcggtctccatatccgtaggctccgtttgttattggcttatgttgctgctcctgcccgatcttgtactcaagcaagaagaactgtcaacaggggatggatgacttcgcggtctccatatccgtaggctccgtttgttattggcttatgttgctgctcctgcgcgatcttgtactcaattgagagcgaaattacaagtcagtaaaacgagtaacatcatatccccgccaactagctttctcgccctctctccctatctagccataactactgaaagcaacgtgatttgcctacttgctcgcgacgagaaatggtccaaacggggcctggctgcggctccatgaccatgagtccatgatcgtcgtcgtcaggcgcggtgcgcacgcggagagtccggagagcgctacgcgtcggacgtacgacgcgagacgaaaaatcggatgcctccgcaaccgtccgatccatgcacaggtacaccagccatccattatgcatgtatcaaatgaattttaaactattttttctctcaaaatatttatccaaatcatgatccgattgcaccattaaattcgttgcaattaaatctttaaaacaagaccacacatgaatataatccgatgaaattttttttagcttattattaaattatttttaaatgttgcacgctgttgcaccaagtattggaattgtttcactaagtagatcgaaaatgttttattggacgccgtttcgccttatatgaaaataatgtttcagcgaatagcgaaaggatgttttaactcactgcaacatttgattcatacatagtgaaacatcatgagtacattaggtgaaacatttttaaattaaaaaaaaatggatggtcaaatgttgcagttgaccaacaagtaaaacatcatgttatatatatggtgaaaaaaatcagcaactggaacatttaaatattttatgaaacatggtgaagatacacgttgaaacatgttgctgtcacacatgaaacaacaagtattaactgattgaaacacatgtttttcttttatcaaaatataatcaagcgatatcttgttgtaaagatttaattaaaacgaatacaatggtgtgatcggatcttagattgaataggtaatttaagagaaaaatcattttgaagcttgctaaaatacatgcatgtatgcatgcatgaggtggagagagagtagtagtaggtagtttcaggaattttgtgaaacacacttaagacacatattgaaacatatcactatcacatatgaaatattttgttttaacggtttgaaacatacgtttttcttttgacataatataatcatgtgatatcttgttgtaaagatttaattgcaacgaatacaacggtgcgatcggttcgtagatcagataagtaatttagaagagaaaatatttaaagagaggagaaaagaatgaaaagaaacaactagatatatgcatgcatgttacagtacgacagtaccaggctgctgatcaacagcattttcttgacgtcaacagagagaaataagaaattagcaagtaaggactgagctgaccgtaggcgtccaatgtttttcatctgatcggacgttcgaagagaagcattttcgggagagtcctgcccccaaccggattagaactagtagtctagtagggatgagaaagtaattaaaattcttgcttgttacttatctccgacttggttttgaccgaactattaatttgaaaattctaactgataaaaataataataataaaataaaaatagatacaggaagaattttactattctacgaaccgttaccaaaacttaccatattataccatacctgaatctattaacttattaataataaagtaatactcccttcatccaaaagtcttgagacctactccctcaaatccaaaatagaaggcttaaccacttctaacataaagacgaagaaaaaaatttgattatctcctcgcttgaatcacatctatccacgcaagaaatgtgattggggaacttgatggtagaagatttaaaatgaaccaaatttaaaggactaagaggtgatagttaacttatgcatccatgcacgccttatgatatatgaaaaaaaaaacagttgtgctttatattttgggatggagagagtatttcttctgtcaccaataccaagagtaattaacttacccaccacgtgaccaaaccaatgaactatatacgtgcatgcaactatgacttctaggtttcggaatttatcccacaaagattataaatatgtcttaggattttggaaaaaaaccaaaaaataaagtaggtttagacttttggagagagaatagaaaaagaaaccaccatgttcattcccacgatttagaaattaccacgttattagagaaaagtaaaataaacaaaacaaacaaacaaaaaagaatacgttaattggatgaaaataagaaggaaacaacaaatgaacaactattctttttgaaacgggacgtaccaataaaaaatatgcttatgaattgtcatcgtgtatgaaaccgataacaatctcaaacagccaaggattcttttcggaaatgtgatgtagcaataaatattcatgcatgcatggttagtgtaggaaacggacaacagttctcagcaacgaaaccgtgtgaggcacctaagcaatgtaaatatgtaacagaccaatcataattagattttcatgcatgaccttagcatccaagcatgtcagtatataattaaaagtaataggaaaagaagcatagtcttacaatctaagcattctcaattaatccaaagaaaataagaaaaataaaaattcacgattaagcgaagtgagcgtaactcagctggttaggttttttttttaaccagcccaccaggattcaaatcctagatttgacgctagcgctcgcatttacgactaattattctttcaatcgtaggcaacatacccatcaatattaaggcatccgcgacgacttcatcaatcacactatacgccagcttagtattccggatgtgtttataggggtagggtatgaatgtgtgcattcgtagaggtgagtgcgtcgaaaaccctatttgctgactagtcgcgtacacccccctccgccccccccccggcgcgcggtgcaaccatgcatatggcgcacatggagagggggcacggcgggagggcgcaggagagaggcatgtggaagttttttttttcgtttttacttttttttcctttccccccttatttttctaggttttcttctcttttttttatacggacgtttacaaagatgtatgtattttttacattaaaagtgtatacatataaaaaattatatacattaagaaataaatttgggaaaatgaaattaagattaaattaaaatttaaaaatatctaattttgatagaattaaaattaactaggcaattttgacgtgttagttaaaaattcttataattcacccgttgattgaagaaaagttaactttgttacccaatctacattgaaacaataccactaactgatgatattacatcctcgaatctattctaacgtgacgacgaatttcctagagtccaaactgtgaggaacatatgatataatataaactatcatgaatatatatgatacaatatgctatctttagttggtgaagaatgtcattagaaataataaaaggatgctactaaatactaattgtccctcaagataaagatggaggaaataagacaacaaatataccataaaattatatatcctataccgtttgctttatagattgcaattaccgtatttctatataccccatatctactaatatgtgtaagtgtaattactttatctcatatttcatacaaagaactactttttataatacggtagttatggtatctcatacaaaaccctaatttgacaatattttaaaggagagatagtttataatttttatatcgtaacttgaatggatttttcactataacgggattagtcatctctaacgggcttaaagcatcatctctttcgggcaggcccctgtcactaagcaaaggtcagtgatgtgacaaaatatctcaatcgggcatccggccgtcacggatgagacatctcaatcgggccaacacaaaagcctgtcacggatgactctcatctctaacgggcctagattatagcccatcacagatgaatataatccaaaaaaaaataaattttgtttttttgttagcctcgggcctttgccctcacttgtgtgccttcccagtcggtcacccatccgaacctcacttgtgtgccttcttggtaggtcacctatccgagaattgctctaggttaacctcatagttctttggaaattggctttcgagagagaaattgtaatttgttggtatgagtattctattaatcctattaagccctgggctaggatgtcacaccctagcatcctctattcatatacattcattcacataacacaaccacattcacataacatctattttgatcacatatttcaccagtaaatccgagttaattggatcaaatatatatttagcaagtattatcataagtaggaggcaaattagacttctaggaaaaaataaatttcgaattgaattttatgatactaaatgaactcatataaaaaagctataaaaaacaaagttgtataactcattgagatctaccatttttattttggtcatttctccatccgggtttgattgaactatataaaatttgtattttaaaatataagaaattcaaatattttttcaggtagtaaatgattttaaatagagaaatcatcaacaacaaagttgtataactcatcaagatctataacttttactttggtcttttttctatataacattttttgaacagtttaaatttgaatttaaaaatatgacaacttcaagcaatattttcaaatactaaatgatttcaactgaaaaagtcatcaacaacaaagttgtataactcatcaatatctataactattattttgttcatttatctatacaacatttttttttgaacagtttgaatttgaatttgaaaatatgacaacttcaaacaacattttcaaatactaaatgatttcaactgaaaaagtcatcaacaacaaagttgtataactcatcaagatctataacttttattttggtcatttcttcatccgacaaagtgatagtaacattgtttataaaattcacatatctctcatctagttttgtaaacaataaaacatatatgtaaattttgtgaacaatgttactagcactttatcggatgaagaaatgataaatataaaagttatagatcttggtgagttatacaactttgttgttgatgactttttttagttgaaatcatttagtatatgaaaatattgtttaaagttgtcatattttcaaattcaaattcaaactgttcaagaaaacgttatatagaaaaatgacaaaaattaaacttatagatcttgatgagttatgcaactttattgttgatgacttttttagttgaaatcatttagtatatgaaaatattgtttgaagttgtcatattttcaaattcaaattcaaactgttcaaaaaaaacgttatatagaaaaatggccaaaataaaagttataagttatagatcttgatgagttatacaactttattgttgatgacttttttagtttaaatcatttagtatttgaaaatattgttttgaagtgttatattttcaaattcaaattcaaactgctcaaaaaaaatgttatatagaaaaataaccaaaataaaaataaaagttgtaaatattggtatgttatacaactttgttgttgataatttttttcatttgaaataatttagtatttaaaaaattgtttgaagttgtcatattttcaaattcaaactcaaactattaaaaaaagttatataaaaaaataacctaagtaaaagttatctctaacgggcatcaacaaaaacccaacaccgatatgagtcatcggtgacgggctttaaagtccctcatctctgacgggctcggtatctaggcccgattgaggtatgcgaggtcatctcaatcgggcctaaatatttgcccgtcacatatgagtgttatcggtgacgggctatatgtatttgggcctagagtaagtatatctataacggtgcaaatttaagtccgattgagatgactttgttctgacggtccatatagtacacgcataattgaacccgtcacagatgatagaatctgtactagtgtttatgttcatattctgacgttagttaccttgtagtttcattttcagttttctaatatatatatagtatagtacttttggttctacgtctactgttttagtggtgttttcgagttatgcaatgggtgaagatatttttgaccgttttcattgtcagaaaactatgtatttatcatttatccatattctctaataaaccaaaacgatttattagaaaataaaaattaaaatttttattggtaaaattttatatatgtgttcgcttcgatattaaaaatcaacgctaacaaaaatatgtcaaaaatatctgaaaataaacatcaaaattaagtttgggaatttaaattttagttttactttgattttggctaattattatagggtaaccaattggactctagtacgcgcgacgcgtcgcaaatcggtgcttccgaagtttctgggcccgaatttagtagtcgtggtcggcggtcgcggacgcgcggtttgggcgaccgaccgaccgacggacgtgtcgcgtcgcgctggtaatggacccgcccggtggtttcgggactctgtacaggttaagtacgtgtgtcgctgctggtcgctgccgaccattacaggactgcgtgcttagtatggccagattaacttgccgagcctcactacacgtacgcacgatataattaggatttagggtcaacactctccaacagtctattactcctactaatttgctggacgcatttcatcagtgattagattataattgtacactgcacatcttacagggagagtagtgatcacgatctctcctcatctttcagtactgctgtgacacctgtttttatcttccgtatcatatgatattttaatgggtactttcctatttagcatgcaatatattttagagtaaatttcacaaaattacataattatagaactatagattaaactcggtgtatcaaaaaatatatttaaagtcaaaattatcatataactatacattaatgatgaaatgtaacaaaacattttagtaacaactataggtttagaaccaatttaattataaaactacattttatagctctaacataacaatggtgttaggatttaaactctaaaatatgtagttctgcgattagtttaatattaaatatatagtattgtgatacattgtcttagatttgtagttttgtgataaatttgatgttaaacatgtagtttatgataaacattttaaatctatagttctatgatagtttagtcaaaatatttgaagttttgggaaatttacactatcttttaagtattcgaagatctccagtcatgctagaaaaaatacattatatgtttttttggaaaagctacaactctaagaaaatttctcttgttccgttcattgtgaatgactatcacttaatataatttacttcatttttcttgcctttctttcttcgaattttctgggtttcaaccttttttcatcgttgaaatttctgaatgttctctcggggtttctttgtttcttgcatctcttcccaccgtccccccaaaccgaatgagtttttttgccaatttagtaccgtcatgtggccctgatatttaccggtcctccttcgctgccctaggtgcaaaagatgcatgcatggttagtgttgggatacgcataggctacgatagtataaattaaaattttctatcgcgtaaaccaggaatcatgcaagtattagatcatagatcgttaccactcgacgcgctacgcaacggaagaaggcgctaagaagtcgaaggaattctcgcgaagtagcgcgcgtcgatgtagaggaagtagtcgatcgcaccggctcgaccttctcctcatgcgttctcctcgctgtattcccacaccgatcagcactacaaaccagcggtgcctctactggtatccacacgtacagggacggaacgccacgcgcaaatatgctagcacccgcgcgcggctagggttttgctcggggaggggagtgacggctagggtttctcacgtgatgcaatacctccgccggtcacaccccttacaaatatataggatccattactcgggcctccaaggcccgtaggactcctattcggatctctatccgaattaagctcatattggatctccatccaatccccttattctagcctattaagcgtgcgatactgtaggttcatgtacactccgctgtaacccgaaaagtccttttcggtccacgcatcaacagcggcctctagcagaacatattgactcaccgggcatacataaagatcatatcggctgaatctctagtgtatacttgtatgaacccctttgcctcacaatatcgattaagctcaaggctagatatgtgccatactctaatagctcaatcattcactcgaacctgttgatagattatataacttgtgatatactcctcaatcacctttggcatgccatgcacttccataatttacaacatcgaggggtccagagatatctctccataggaggggcaaatcccatcttgattattcatatctcactacatatttcatagcatacccgaaaacaacttttataactacccaattacagagtagcgtttagcagtccctaagtaagctactacacatgttgggaaccatgataatatcaggtctaaggattcaacaccaacactaaatgagattactgatgacacaacacatatggctcttgcagtgtctcatgttgggtctattcatcaacatgttcaccaacatgtgtccacattattaatttggtatctctattccatgatccatgagacatgatcatcaattagtacatgtgctgatcatctaaacatatttgttccacatatgatatttgatcagggatcctttagaaatagcaacacacaacataaagagtctcatgaaagaatcacatattcattaaccaataatgagttatctatttcaagtaacaaagtcggataaatatgtaaacatagtatgtgatacaatcatctctatgattgcctctagggtatatcactaacagttagatggatggtgtacgaacaagtgcgtaacaactcaaccaattaggttgcagtgagacgtgccagctttaaaattatagatagattagcctgttatttgtgcacttctagctagtcattctaattcaacatttgtcaagattgcggttgtaagcaaaggatctctcccagatagaaacatgtagtggtcaaaagtacacatgcacaacaagacgacatattcaatcaacaaattatagaacaaagaatcagagagtgacagcaaatcaacaaaatcgatcagatcaggtctaaggaaaagaaaaacgaatgctgatatggcgctttgagatatcagtcatgtttagttgaagtcatggccctcgatccccctaacttagggcctgtttagatcgaatgtttgatatttgatatgtatagaatattaagtatgaaaaaaaactaattacagattacgtgtaaattatgagacgaatcttttaagcctaattgctctatgatttgataatgtggtgctacagtaaatatttattagtgatggattaattaggcttaataaattcgtctcgcagtttacaggcggaatctataatttattttgttattagtctacgtttaatactttaaatgtgtatcgatatatatctgatgtgacacagtgaaacttttcacccttgaattagcagacaagaagaaaacgtgttacatgtaaaatagcagcaataaaatgagtgacccacgcgcagactagatgtggtagagcaaattgcagtgtatcgaccattcaatagctcacaaccacacgccaataacctgttggataagtcataatacaacacgcaattaatgaattaatgatgagagttacttggagaataaatattgatttagatagcttttatcagtgtgaacaagttattacatactcccttcgtttctaaatatttgacaccgttaactttttagcacatgtttgagcgttcgtcttattaaaaaaactgtgaaatatgtaaaactatatgtatacatgaaagtatatttaataataaatcaaatgataggaaaagaattaataattactttttttaataagatgaatagttaaacatgtttaaaaaagtcaacggcgtcaaatatttagaaacggagggatagtaacctgcttatttaattactgaatttatataattaattatttgttttaaaaaatccatacaatgttacagatgatatgatactactcttccatccctaaatatcttttagctatgcatctcgatgagtgtgtgtctaatgtttagctt

SEQ ID NO: 8177 - DNA, 10445 bp, Oryza sativa
ctctccgagctcaagaacctgacgctgctcaacctgttccggaacaagctgcgtggtgacatccctgatttcgtcggcgacctgcccagcctcgaggtgctgcagctctgggagaacaacttcaccggcggcgtgccgcgccgcctcggccgcaatggccgcctccagctgctcgacctctcgtcgaacaggctcaccggcacgctgccgccggagctctgcgccggtggcaagatgcacacgctcatcgcgcttggcaacttcttgttcggcgccatcccggactcccttggtgaatgcaagtccttgagccgtgttcgtcttggggagaactacttgaacggctcaattccgaagggtctctttgagctgccgaagctgacgcaggttgagctgcaagataacctcctcacaggcaatttcccggccgtgtccggcgctgcggcgcctaatcttggggagatcagcctgtccaacaaccagctcactggtgcgctgccggcatcaattggaaacttttctggtgttcagaagctgcttcttgatcggaattcattctctggtgtcgttccacctgagattgggcgactgcagaaactctccaaggctgaccttagcagcaatgcgcttgagggaggtgtaccaccggagattgggaaatgccggttgctcacttacttggacttgagccggaacaacatctctgggaagatacctccggccatctctggaatgaggatactcaactatctcaacctgtcccggaaccatcttgatggagagatacctccatccattgcaacaatgcagagcttgaccgcggttgacttctcatataacaacttgtctgggcttgtgccaggaactggtcaattcagctacttcaatgccacatcttttgttggtaacccaggcttgtgtggaccgtacctcggaccatgccgccctggtgttgctggcaccgaccatggtggtcatggtcatggcgggctatccaatggtgtcaaactgctcattgtcctaggcttgttggcctgctccattgcatttgctgtcggggcgattctgaaggctcggtcgttgaagaaagccagtgaggcacgtgtgtggaaactcacagcattccagcgcctcgacttcacctgtgatgatgtgcttgactgcttgaaggaagaaaacgttatcggcaaaggtggtgctggaattgtgtacaagggggctatgcctaacggagatcatgttgctgtgaagcgtctcccagctatgggccgtggctcttcacatgatcatggtttttcagcagagatacagacacttgggagaattcggcaccgccatattgtgcgtttgctaggcttctgctcaaacaatgagactaatttgctggtttatgaatacatgcccaatggaagcctgggggagctgctccatggcaagaaaggcgggcaccttcactgggacacccggtacaagatcgccattgaagctgcaaaggggctctgctaccttcaccatgattgttcccctttgatacttcaccgtgatgtcaagtcaaacaatatccttcttgactcagactttgaagcacatgtggctgactttggccttgcaaagttcttgcaggacaccggtgcatctgagtgcatgtctgccattgctggctcttatggatacattgctccaggtaaaacatcatatctcatggtatttcagttcgttctgcagtgtattgatagtattgtatttagttgcaaagtaatatttcctctggtaaaagaaatgtaagagtaattcttgaattgctgtttttagttcctcgtgctccttcatgaattgtgttgcttaataatctgacatgtctttgttcacttcaaatggactgaaccttgttggattgtatttttgtggatgtccagaatatgcatacaccctcaaggtcgatgagaagagtgatgtctacagctttggtgttgtgcttcttgagctggttactggacggaagcctgttggggagtttggagatggcgttgacatcgtccaatgggtgaggatgatgaccgactcaaacaaggaacaagtgatgaaggtcctggacccaaggctctcaacagttccacttcatgaggtcatgcacgtcttctatgtcgctttgctctgcattgaggagcagagcgtgcagcgtccaacaatgcgggaggttgtacagatcctcagcgagcttccaaagctagctcccaggcaaggagaagtgctttcacacgctgtcgatggttttgcatccaatcctccagctccagttccttctgggtctgcagaagcactaactggtgatgcgaaagatcaacagcagcagcaaacaaattcagagtcaactacacctcctgatctcatcagcatatgagtaaccaagtctaaaattgctgtcaaccttttgttgcaaagttcgcaagcttcagtatcggaaacttatctaggtatggatttaggtcttggtaagtttttaggtgttctgtgctgtacatattccagtttggtgggttgtcctgttaccagtttgtttcctttggtgctgcaatgtaggattccgtagcgagtttcggtactttagagccttttatcatccatcttcaatgtaggcaatggctttctatccaatttagaatcaaaatctaagctttactgtggaaccaagtttcctttaaagcacttcctgagttcctggtcctgtgtaaacagttcaagttgggtcctttaaattgagaaacccatactagaatgccatcatggaaaagcacccttgcatggtgaacagatatgcactaaatcaagcaaagtcaaagtattctgctctttttattcttttggagctgaatgaaatcaaagaatcagagtgcttcttcctttgttctcttttgtgatgtgtatagaaagctggcacaagaatggttaacaaatgattacccttttgtggctgctttgcataacatgaagtgcactattgcaacatcagattatgtgggatcagcatatatgggggagagaagaactgtgctaaaaatccacgctttctaatgtccaaaaatttttgttagcctgtttggaacaaatatttactataatctttttgcatattgaaatctggagtagtgaaataaattctgttaggaaaatcgctcaaattccatttaaaaaaaatgcaaaatgaaatctggagattgacattcagagatcaagactctcccgagcatgactgccaagtgctggagatagtgctgcgtgaggtccatcacatgatgatgcctctctgctcccctactacaatcattcagcaccagtgcctaacctttttgaagtttctctcctgttcttgaatctagagacatttttgttgttaatccagagatataatatacctatcgaacaccacgaggtacttatattcgaatattggttcttctaaaccttttcttcttcaaatattggattgtcttgttccgaaatgaaaatcccgaaaaatcctcgcaaaagtcggtttgctcgtgaaggaatggacatggtcggctgtacctatagatttcattgtgcgattggtgataatgctaggaggcgaaaggaccatcagatcagatcagatcagatcagaaggagagtgcgacggtattgaattctgacgctgcactgctgccgtttattcggtgcagttcgatgcgtccaacagaatggtcacatcggcaacgagacgaaacagcaaatgttgcacacagtggcaacgccatgtattcacacatgcacaaatcctctagtaattactcctatcactcaagagtattaatgtattgttgctctcaactatctatttaagcaggtaaattcagtttatctgcatgtaatgtaaagtaaaagttcaggagcttacattctgtcaccagctattttgcaggaggaggtgcttctgtttctctatctgtatctgcaaaacaaaaaaaatagagattgtcagctgcgaggttaaggttgttttgcttcatcatggtaggagagaaaaacaaagaacagaaaggttccccaagaatttggtctcctttggagcaagcagcaatgctgtcattactgcaatcatgcaaagcaaacagttctccaactacagcttttggttttgtggctggctggtcgtcagagacgagcaccaatactgctaatgccagcctcagtgtctcactgatgagttactgttcaccacaccactatttaccacagtaataaacttagagtagtatgcttcagctaataaacaccccactgtgtgttgtacatttgcagagtatgttcatgcatgcaggcatgagccacaagtgtaccggtagtagaaagcatcaactcgagattcctctcatctggatccattgctggagcattttggacaagaatacaaggtcatgcaggatgcagcaaaggacttggctagctagctagcactgtagcctcatgtgcctaatgatccagccatttgtactgttttgaacaggcaaagtacacttagattctgaaactaagggaggtcactccaaatgatgctctgctaatggcactgaatccactgatcaattcccataatgtgaggcagaagcaagcctgtaattggggtggtggtccattgatgaacagagtacagagagagagagagagagagagagagagagaaagagagcttgctactgctcacatggtaggggactgggactttgagctgctgccattcttctttctctgaagaagatgtgcacttggccgaaacaagggcctacattggcactgctctagagaacagtgacagggcacgcaggagggaccatttgatgatcaatcgctcacgcatgttcttttgtttttcctttctttttttttgtttgattttcgtttcttgtctcgatcagtctctctcttctgttatgcagatgttggatcggaataataaggaacagttttgtgttcgcgtcgtgttaattgcaaggaaaatgattgctcatcatctgtggattcatggagagacaccataaaccctaggagtttcttggattcagaagtgaaaactcaaaaaggaaaaaagaaaaacgcggcaacgaaaaggacaggaaaggagaaagaaatcgaggggataatcaggagagagaaatttaccaagggaagcgcttggttttacccggattcccgagaattttcatggagagagcggcccagctccccacctccgcctccggcgccggcgccggatcgctcgccgccggcgaacctgctcgacggcagcggagagaaaaggcgagcagcagcgatcaccgttggatacaaaccgtgcggcccagatctaactgaaaaggatgtgctggctaatttactaataggaccctctattatgttgtatttccgtaaaatgcccgcttcagtttttaaaactagggtatacctcgcgcagtgataaccgcgaaattgtagggtgactgtaaccctattcaaaacggttcggtaaatcttggttggcactcgattttctcatgtcatcttgctgatctgcaacaacaggggcactgattgcttaaaatgccagcgaattttattttcccatggagaagttggtagagaagaaatgcagaggcatagttgggacacaaatgcgagttaatctaagaccggacacaagtgggacagggagaatcctatggaaatgatgatcacatcgatcagagattcagaggcgcactcacgcaccaccaaacccaacaactccctctattcacagaggacagaaaagggaaatgcagggaaaagctatagagggagagaagaatcctgcagcattttgcgtcagaaatgaagtcaactcatgctagttctccaaaaaggaaaacagtcagctcatgttttcttctcctccatcgatgtactctttgattggcccatctgatgttctgcaaaaacttcctcagaggcattctccttctgataagatactcacatgatgctcagctcaggtaacctgtctcaagcaaatcctgatactgaaattcagaaaggttatactgctctgttccgactgtttgtccaaaacctgataagagatggtctagaatttatgtgaaccttcatcagagtttggactctgtctccatgcggggcagaatcccttaatcaaataacttagacataggccccaattatatgaggccttgtgcaagcaacgcaggcacacaatcggcagcagtaaatgcaagtcaaactgttggaagcctggagcagagcaaaacaatgtgatctgctgaagagatcatcaaatccagattaggccacgacaccatgaaaataagcatgcaaaattgttcacaacaggatgttgtctagtataggatttttattccatgatcaggaaaaaaaggtttagtgcaactaaagggtaattagcatttcacggtcgttttacagaagtgattttacatgtatatgagcccggcgaaaattttacatgtatatgagcactatatataggacactctttacatgtatgcataactttgtcccttcatacacctcacttgttcatgaaatcgatgcccttctgaatgctctccatcagctctttctttgccatctccaagccagctctgtcgtgtcaaataagttaaaacacacattaagcacaccaattatttttggatggtatttgcaggcaactgcatttgaaagagaatatttagatacaactaatgtacctctcaaaatcattcaacggccccagagggagaaccttccccggctccagcacgacctaacctcacttttgttgcaaagaacggcaactcggtcacctagttgaaagaaaatgagaataatcataagatggtgttatcggttgataggaaggatgaatgtttggatggtgtaagcataccgcagatgcaacatatgaacattccacaacgccagcatcaccacgcattgctcgcaagcatgcatcaccaaattttgctgcagcaaaagcctgagatggttttctgtcagtatgcatttataactcggatactattcacaaagaataagcagccatataacctaccattgacaaagttgcagagcctgctcctgcctttgcctgaatcacaaacaaaaggaacattatatgtatgaccaaataattagaaacaccaaaactgaaaaaaagaatccccatagtttcagacatgtaatgacgtgtaactaaagtaatatgcaaataccgctatctactgttatcaacagctttcttcagtctccgttaagggcatccgttacatttgtagtgtaggagctgaaattttcttcctaaaaactcaaaaacgtttgctcatcaacacctagtaacttggcctactaaggctatggggaacgaaattatagttgaggcaatatttgacattaaataaatcacaaattcatagttatatttttttttctttctggaacctagacagagctagaaggtttgttaattgaaatcagacattttgaatcaacaggactagaacttggcatatagacattgcttctgaatataaataagaaatttgggctagattagacaactccacacaaataactacattatggtagctttatgcagatttttgtgtaaataagatgtgcacatatgcatgtactgtttgtagaaaatcaaacaaagagaatagttggggcaaaattaatcacgtgcatcaaggctaatttcagcacttcgaatatgcatgcattgtacctcaacaacttctgtgccaccattctgtatgcgtttagtcaaatagctgatttcatctggggtaaatgagcatggggggtggacctgcagagagacaggtcttggattagcaagttattatatttgcagaagttgaaatgcggataattagtgtttacatgcgctaatattgatggaataatacctgggagaggaggggtaatatagtcactccagcatgcccaccaacaactggaacattgacatcttttgggtcaattccaagtacttcagcctataagcagtagaaaaagaaaaattttatggtcaaagagcagtacacagtatttacatgtatcttaatgttatctaagagatgatatgaaaacaatttgttagaatgcataccacaaaggtgtttgcccttgctacatccagtgttgtaactccaaggagacgtttgggatcataagttccagctttcttgaaaacctctgctgcaatggggacggttgagttcactgggttgctgatcaagttcacaattgcatttggacagcacttggcaacgccttcacaaagtgagcgaacaatcccagcgtttttgttgaacaaatcatcccttgtcattcctggtttccttgggagaccagcagggataatgacaagatccattcctgtaagtgctgcctcaagctggttgggcccaaggaaaccacggacctacaagggaatttgggtacagttatttgttacatcagtatctatgcacagataaataactaatcagtaatccattcgataaataactaatcagtaatccattcgaactatctgaaaatagtggagtgcaattgtaagttgcaagtaaaaaattatcatttttttcacttctatcctttttagcttgcaggcaaatcttttctctttttttcctttttttataaatgaattaaaaatttcaataacaagaggtttacctacagtaccatttactgttgataatgattaaactgaaaaggaactaacataaggtggctttctttttcaacacaagataagatgttatcatagttttctatatatattttttggacttcactggaacaatagaaaaagcgagatctcattgttggcaagtcgtttggttaactacaaggcttgtttggcaacttgagggaaggggattgggagtttacacgagggaattgatggtgagattaagatgtgaatttgatttttcatcccagtctcttgtttggtagaggtggtggaaattgatagggagtttagttggagattagatcattaatgaaaacggatggctgagatttgtttaggcgaagtaaaggaggaattccctcccaattacctgcccctaaccaggtattgaaaaggagggagttcattcctcaattccccatcctcatcccaccaaaattcccatgtcccccaaccaaacaaaacagttaatagcctcatccctttaaactcccaatccctcctagaaactccctccaaccaaacagactgcaagggaaagaaactgaaaagtgatttcaggcatcaatcatcactgccgatgtgcagaccaggtgctagtacaatactaccacaataagctagcagtcgaacgggatggaatgagtaggttaccacggcggtggtgtccatgtggctgacatcggcggtgacaccgggcgtgttgacgacatcatagaggtggagcacagagacgagcgggttcaacttcatgagcagcgacagcggctgcccgatccctcccgccgcgcccagcacggccaccttgaaccccggcgcgccgcccttggccctgcatggcgccggcctcaccccctcctccatctgcacacacacacgcacagattggtcatcccctcacatcacgcaacgagagagcgagagatgaactgtttcgcggcgcacctgggggcgcggcgacgggctgaggtgggcggcgacgcgggcgatgcggtgggaggcggagtcgggctgcatggctggctggctggttggttgcggcggcggcggcggaggaggagagcagttggcgcgcgaggggggaggggggttttgatgggggagggggaaggcgttgcgttatcccgcgggggtgtggctcgaaggggtcgcggggatcgggaggcgggaaggcgagctcagcctcggcggctagctagctctcctcccatctccccgggaagctcatctcatctcgttgcgttctccgccactgcttctctctctctctctctctctcgtcgacgtccacgtcgccgtcgccgtcgttcctccggctgcggactgcggtgcgtcgccaccgtgttcggtttagcccattgggccgaaaagacgaagttgggccggaacgggattgtggcccacgtgcaggccatatttattgggccagaacgggattgtggatttctaactgaggtccaacttgtcaacgaatccgattttcgtctctcaacgtggcactgacgtgacgcttatgtggcaattcaattcgaaaaaataataaaaccagtgggacccacatgtcagtctcacatagaaaataataaaaaatgtgggacccacgtgggccccgcatgtcagtccaactcaccctcttctttttcctcctctctctccccatctcccctctcttcatctctcctct

SEQ ID NO: 8178 - DNA, 12818 bp, Oryza sativa
tcaaacatttcgaaacggagagagtatattttactagtagtattataaatctgaataatttgatttattttgggttaaaaggaatacatgtttaggttcgtgcacccatgtttagtcgtaaactagctgcactagtattttccagacactgttgtgttgggagtattccgtacaaaagtaggtgtttaatgaaatataactagaattgtaactggtgaagagttgattagagttgatgcctttggtgttgtgtcagcgtgcgcgtctcactctcacccctgtcggcatttggagtggccaatcatgcaagcgtccatgtacacaaacaatctcgacgacccaggtgaagacttggaccgggcagcggccttcacaacttggatcattcggcgacacggcgcatcaaaatcattcgtcgactgacagctatatgctcggacatactatatgcgcacacacaacaaacggaatttaccacaagtcgctcgagtggtgagtttggaattcttgctagatatagctagcttcagccggtaacgaaaataagtaatcgtttcttccattgctacttttccacgtgcagttgccaggttgtgaacttatcatgttgctctctcgagtcgccgtcgtagactgagtaagagtaacatatacactcgtgtgctagacattttgaacgattttcttagaacaggtggagcaaattactctttaaagaagatatataaagtgtcaagtaaaatgacagctatctataaaaccatacgaaataagtggagcaaattacataagtgtaaatgtttataacatttcgaagaaaataacctcgagcgaacacgatgacacgacgagcggcacgcttcctcttatcgtgtgtgtaaaactgatcgagacgccaccttcgtgagctttcctttccgaaaacgacacgagcctaaaaaaaggcgaagtgggatgcgagagaacattccgtatcgcgcactagtaaagagtgggtcccacagacaaggcgacctaaacgtgggccccacagaccccatggcccacgtgccagtgacgcagcggcacacgcggggggtgggaatccagtccggtcagactccaccatctgtcgtttagaacctcccagtggggcccacttgccagtgaagtgggagggcctcgcagtggggtccacttggcagtgaggaggagtggggggatggtggtctccacccgcgtccccccgcgggctccgcgtggtcaactcgccggaagccgaaataggcaggcaggaggccgcccaaaaaggcgaacaccttgcgcgcaccacgccaccacctccacctccacttcgctcgctcccgctctcgccatggccgccgcgcccgcgccatgaggtggccgccaccgccaccgccacgccactcctctcctctaccctgccgcgcggtgctgtttcctcgtccgtccccatgctcccgcgctgcctcgtcgccgtcgcggttctcctgctcgtcgcgtcccacgccgcgcggggggaggagcggcggcggctgctgctcgcgaggcaggacgtgctcgcgctccacggcctgcgcgggtcgatcggggtgcgggcggagtactggccggtgaagcgctatccctgcagctggactggcgtcgtgtgccgcgccgggcgcgtcgcggagctccgtctcaccgggctccgccgcacccgcgcgggtgcacggagccaggggttcaccgtcgacccgctgcgggagctcacggcgctcgaggttttcaacgcctcggggttcccgctccctggtcggatcccggcgtggtttggcaccggcctcccggcgtcgctggaagtcttggacctccgctccacctccgtcaatagcacgcttccagccgatcttggcatgtccgggaacctgacgacccttgacctcgccggtaatagcatctccggctcgattccggcgacattgttcctcatcaagggcctcaaatttctcgatctttctgacaacaatctcaccggggagctaccaaacgtgtctatctctgccggtgatggaaccggagttttcaacgcttccgggaattcgttgtacggtgccattggagatgtgcttgggcccctcaggaagagatttcgtcaggttgatttgtcgagaaattacttcactgaggtgattggaactggatttgggaacagctccgatggagcagtggacataaacatgaattgcttgtccggatcaagccagcgaagccagggggattgtgaagcattctacaagaggattggtgtttcattgccagagccaccaaatgcattgccatcaccaagcaagaaaggggtgaagtggaagtatgtacttgccggagtcctggcagccgcagcatttttggtggttcttttccttgtagcattagtgttctgcttgatgaagagtgggggacggcgaccgagaggaagagggttggagcagaatgaggaagggattcgttcggggcgcaggagtagcagcgttaatcctgtgatgctgtcatccatggcagcatcaccggcagcaaatggtgctgtgaaaggtctgcctaccattgtagatgagttcacctatgagcagttgcataatgttactgggggttttggggatgacaatcttgtcaagcatgggcactctggggccatttaccttggtgaactggagagtggcttcaatgttgttgtcaaaaaggttgatctgaagagcagtaataagaacttgggggaattgggcttccttgcaaagaattcccatgggaggattgttccattgctggggcatttggccacagatgaggaggaattgctggtctacaagtacatggcaaagggagacttgacttccgcattgcacaggaagtcagtggatgctgaggaggggctgcgctcgttggattggataacaaggctgaagattgccattggtgttgctgaggcattgtgcttcctgcacgatgagtgtagtccaccattggttcacaggtatgcctagtgatattattggcctgttagctaatttgctaatataatgtgcagctgattggtttatagttagtgaaaatattttaattgcaaaaagcatatgataactgtgctaagaaaagtttgaacattaacgccatcataaaaaagagcgcggaagttccacatgttatttagctcacatgaattgccaatttaatgaagaagctgcactgattatggcaagtgcgtgagtgaaagaaacaggacaatttaatatattaatttaaaactgtttctagttacacatttgatagtcttctacttagcctcttgtggccctattgcatcagttggcccactatttcttttctaagaagtatagctgaaaggggaaaacaatatgtgcgaagcttccctgacaaactgtttacttgtgaggacatgaaatcccacatttaaaatataatattatacggactatttcaccaagttgcattggatccatatcagcactaccaatactatctgactgtacttaattgatttttaatgattttcccccagacgaactgcttgcctttctgaacttttagaatgttgcttcttgttattcatgtgcatatggcttgttcacaacttctcatgtgcaatgtatcgtaggaaatcaggaaagtttcatgcaagtataagtactgtacagtatgtataattcattatatgattatacactgtctaactatgtgagaaactcatgtctctatcatgaaaaaaaattgctgcagttattttatggaaactttatcttttgaggtttagtgtcatcaatcattgtaggtaactcaatgcactaaatatcgatgtatttggtgctagtcatcttttattccagctgcatgacttagctgcttcatctttctatttcattttattttactctgcagttcttatttgatgcatgctgttcaagttcttggatgttttaattactttcaagccaatcttttttccccttatcttttcattataactgtagagatatccaggcaagcagtgtgcttcttgatgacaaatttgaagtgtgtcttggaagtttgagtgatgtatgcactcaacaaagtgagggaagcaggagtttcttctccaggatgttgagatcatcgaagtaagacttttatattttatcgtctcctcatttttatgcatgagtttagcatgggtacaactgttcttatgatcttaccaattgctctgaaaattgagtccatcatggcatattccttttaaaagaaacttgattttatgatcacctgaacggtgctaacttaagggtgcctttagcactaaaaagtactaagacaaaagcaataacttctttatgaagttaacactttaacctaagtttagttattgaactgaaggtaatgtactggattttgttaacaaaatatggcggcagtgttttttttttgggtttgagtatgtataaggggacacatattcatttgtaagtgtttctccttacatgaattcttgtcaaatgacttctaaaaaggaagttctcatcaagagttagtcttgtaaattaatggccagacccacacaaataaaagaagaaaccctaccacctgcagatcataaaatatggcaacccacttgttattttgttaacatggcaacatcacgtttgctatgaaactttagtctttgtttaaatctgtaaagaacatcggggccttgcttaaacactgatattcgtctctttcttgtggcaggtctcttgacaagaacgcatcaggtgtgtaaagcttctgcataacttttttatggatattttataatctctaccattatactatacagctatttgtgtaggaattctaatgcgcaaaataaagataacctaacattactgtatgtatctctcacctaacaggtccaccagctagctgctcgtatgatgtatactgctttggaaaggtgctactggagctaatcaccgggaattttggtgtgagcggctcaaatgacactggttcagaggagtggttggcaagaacactggattttattgacgcccatgacaaggagggtctttcaaacattgtagacccttcacttgtagtagatgaagaccacctagaagaggtatgggcagtctccattgttgcgaagacatgcctgaacccaaagccctccaggcgtccactggctcggtacatcctgaaagcattggagaacccgctgcgggtggtgagggaggaattacagtcgaattcatcactcacgagtacttcatctcgaagctcttggcattttgcttttcatggggactcgcgcaggagctcggagctcaggccaacattggggcagtcagccaggaagcagtcagtgaagtcacaaggaagtgacgaggatgaggacgaggaggaggattcattctccttcaagagggcttcaagggagattctccctgacccggtagagttggaaaaggatgcagttgtgtagaattcaccacagattagcaatacatgctactgagatttcatctcagtgtgtataattcatcctctgatgcgcatctcctgatgcctctaggtgaaaaaactgtgcatataggagttagacttgtttctctttttccttttcatttcagtgttgtgtaatctgtaactgagattttgagaataagtggagcacaagggtgcgcggtgcttgaaatgcaagcggccagaaattttcgtagacaaccattttgtcattctggactctggagtgtgaatcgaagcacaaattttatagtgtaagccaaaggatcagagagatgaatgaatcgatctgcgaaatgaaattatatgttgctgatccagtcactgccgcctgttacaagaacattcttcctgactattttctgggttttctgttctctgctgcttggaagaataagattgttgtctgtgttaaaaaaacacacaataatttagtttcatattactacagtagaaaacaataagttactcgcgaacggatattttagcactaaaagagaattaaagaaaaaagggggtcccaccgagatttgaactcgggttactggattcagagtccaatgtcctaaccgctagaccatggggccattttgaacacacggatttttaatctctatatatccatacttgcatctagtctagcatgggccccggcccatgatacgttcacctgaaagcccactcatgcgacgacttgtcaaagcccaacaagcgaagaagccgatgcttatagaggaagcccggctaccaccacgccaacgcgctcatttcgttcattctagggtttacaactcacgacctccgccgccgccgccatgggacactccaacgtgtggaactcgcaccccaagaactacggccccggatccagggtttggtaatcctctctactctactcgcgatcccccgcgccgtgttttcattcagttcggtgacgaaccataggagtatttcttctatctgtgtgcgtagcatcgggtcagatttgtcagattttgtggcgtgaattcgcatgttgctagattttatactgtagtagtttatctcttgcttccggtagaaaggttcgtgcgcccctttttcttggattgcttgacgagtgcttacggatttgtggtgtggatttgttgttgcagccgtgtttgcggcaacccgcatggcttgatccggaagtacgggctcatgtgctgcaggcagtgcttccgcagcaacgccaaggacattggcttcatcaaggtatactcttcatattttttttaggttgctagttgcttcctgtaatatgcaggctcaagttagcagttttactttttgatggtgaaattgtttggtgcaatagtgttgcatcccgtgtgcggtgttgtggtagttcctaacgacgtagcgataatgtcacaaactgtgccgcgttgttcctcttccacgttttatttcctgcttgacagcttgtgtattgtgttatccgttgtcgcctcatgttcccattctcattttgtcagttctgttctggtcgagctgatatgaataattacagatcataagatggccagttagaattggaattgatgcacacactgcttttgtttctgagattatcttttgcagatgccaatactataacaatattagttaattttgaaaacctgtcttatttgttatcttcaccacttatccaacatagtatgagtatgtgccatgtgccccatgtgagctcattagctatcacttgtagctgccttctaaatgtcaacacttcaaacgtattgcaaacatctctctgtagttcaacgaataataggaggatctattgctaatcaatagactacaactatcatctttcatatgggttcccttcttttatgtttttcctttttgatatgttgcttccaattaaagcagggtagtttccttttgttaaaaaaaagttgctaaccacaattcaaaggctacctcttgcttaaaatattaatgcacccgatttcatgctagaattgtggagatgttagaattttccacatcgtctcatcttattgttatggaatacttgaatgaatgtggttatttacttattttatcgtgcagatgtaatgcacccgattttatgccagaattgtgatgttagaattttctacattgttttatcttattgttctggaatacttgaatgaataagcggttatttagttatttttttgtgcagatgtttgtgttatctagctttttgctgttattttaatccctggacctctcaaagtgcatcttattcatttgcagtaccgttgaaagttgggagctcaagtggaatgggagcttagatcgggaaaatttttatggaagtgtaaaagccttgtcgagtattatcccttttgatacaattgtcgtcttatgatatgtaacagattattgatatttgaaagtgagttatggtctgatggacaatacatgttctggtattaattctcatattatcgagcatgttctagtgctgtaatagaagatgattatatgctatcttgagtagcaagcttcccttatttctgatgctggcactttgacccttaaccggtctcagcttgctttgatatcttatatgctttattattagattgttttgatagttcaggctgacaatttggccgggtacaataggcaacggccattcggccaacggtgcaaaaatgccaggtggcactgcacaaagatttcaactcgacatatgggacaatatggagatatttcacagctggatagagtatttcgtctaatcttactgtgttttctacaacaaacagtaaattgatgggtttagaggtgattttttaactttcgtgaaagtatagggtataaaatggaacctgcgaaggagcaacaaatcttcaattgagcgtctgaacctataaacaataaactaataagatatattagtataaagaataatattgatactataatttactctttttcccggactatataatgtactctacgatacatgtttttttagataaagtttattctacacgttgtccaaacaatattcttgtatttccattaatgccatggtagagtatcagacgagccgagctccaagcctcacatagcattgctcgagccgagctcgagcctaacaaccctcaagagttcaatactaggatagggcgataggctccagagccccgactcggctttgagcctattcaggttggctcgctcgagctcggctcgttcaccgccctttggtcccaaattcccctccgccgctcaccgccaccctctccatctcactagctccggcggcgagcatgccctagcttcgtctccatcgcaatcgcagcctcctcgagcaggtttggatccagaggcgacgccgccggcctccatcgcatcgcggttcgaatcgaaggtatttcattcttctttttctctagtagctcttcctccccctcgctcagcttggattgaacatccattcagaattcgattgttgtttgtttcaatccaattaatccatccagtttcctgtcgatttcatgcgtgatgcagtactaatcgaagcaatttgtttccaggatcaagaaaaattgggggttcagctgagctctatgccccaagtgaggcctgcctctgccgagaagccgactcggcaatgggcggcatggacacgccaagaggaacagagctttttcaatgcgctgcgcctggaaggaaaagtaagacgcatcgatgttatgatgctacgctgtttcttgcaatctgatcaatgtgtgcgctgatcgatagatgcaacaataacttttcctttgtgtcagaattttgagaagatcacgctccgtgtccagagcaaaaacaaggatcaggtacaccattttcggccaagaggtgtaagatgttcatatgatatttaacattctgtattgatacgttaggacgttgaagcagtggtagatacacattagatcataaatttagtatttttttatgatatttgtcgttctttatttaaccaattaggaaatttgaatgaaaggaagattcaagttaggctgtaaattttagttctacatgcaatgtgctaaataactttcactatgatgggatgccaattagaattgaataaatctattttgctttgagaaaaaaaaatcagaagtaactgtcatgggcaaatctcattttcaaccatggtcgttgttgttgcttgacatagcaccagcatcctgtagcatatacctacattcttgctgattttcgtggttcaactggagaaggctgcagggtggatggattacaacatccctccttttagattcccatccagattgtgtactttcacttggagccgatttatcttcctcacttgcaattgatccctcttctttactaaagctgatttcatctttttttcaagtttctattgatatacttgcagccgatctgttatgggaaactcaaacttcagaacatgatgttttttttttcgggaatacgccagaggcgaattttttccattaagagaaataaaggttatttacatttaaagaaagagcagcaggggacagggactggaaagcattacaaaatcaaaggcctaattctcgcagcacattttggctaccatgattctctcggaagagtagggcggggattgctgaattcgcttgacgccaaagcgttgcctcttgagccatttccctcgccacatctgtccatgccctaaaactttggttgaagactctggcattccgctccttccagatcgtccaagccacaagtgttgctaccgtatcgaaactccggcattgagacttgagactctcggattttcaaccggctgctacacagccactggttgaaagaagtttcgttcatcggtaggcactccgggtgacctattgctctcaatgccaaaacatgatgtttagaattggcactaagttttattcaggctttagatgtatctcgatattatccccctattttgtccatctttggccataaagcacactcctcagcagcttaccacctaagattctgcacctggaggctggaacatttagagaggaattttcctgcactgctcgttcctgatcatctaagcatgttctgttgactatgtgggcactggacatgcttaagtgatagctgccaataaatcagtacagttttctctctgatacatagacacttaattatctctcaatcctcacatagctagcataagtatgttcatcatatataaagttatagataatatttgcatcaattagagaaaacctgaatttcttctgttggactgaaaattcattgccttttattttttgcaatataggtcagacattattactatcgtcttgttcgacgcatgaagaaacttcttggtcctgagttctcacttgatgcaaaaaattcaaaggacactgttgctgctatgctccgctggtaacggaatgaatgtctgcatgcaaattaatctgattagatgtggtccctactgcttgatattatttatataacatgattgcaaagggtagtgtttggcctcaaaaatttgctgagctatcttcatgatatatatccttttcctagtaggctaggaacctaggactgtagtaggtacgtgatccttttaatttacagaggacacgtctataatttactgctataatgcctagtaggttagaactatggggccttcataccaatactgtatagacaccttaacatatttactgcttctgttttagattgtcagacctgtcccataaaatggtctctgaaattttggtggcatacttcgtggttcagaatattcttctgatgaaagatatattttttatttccatgcagattgcattctagtctatgcacaagaaagatactgtctgttgtttattgtcattgcttttgatttgatctgatgttgtttcttttacattgcatggaaaactctccgatactgaatttgttctatgcaggtggtctctgcttgaaaaatttagctgcagtgcatcaaaactgcatctgaagcctcggagattcaaaacattcgtagaagcattggtgcatgaccatttgttactttcccactcctttgtaactgtaaaaatgttcatttttgttttttttttctcatgtgatatatccaactttatagggaaatcaactgctaaaggacaggaataaaaccagaaaaaagtgtccacgaggggatgagtgcctttcttcttcatctccaattctgaacaggactgctggaaatgaatcttcctcagtaaaactcctacctgtggatgtctcaaatggtagcaaagtagcatcttcaaaaggggcagttttcaagaggggtgcagaaccaaattccaataacaagtcaggttcaactaaatgggacctctctgccacaattactgtgaaacagaaaaggagagcaggtgacactgctttttttttttttggtttcatgtggcacaccctttacttttttcattttatgcgatatgcagtctgtatgtcttagctaaatgtcgataatccaataaattttattatgtgagcttaaagtgtcgaattttccttacaatagttttgagagcagtggacttgtattttaggtggtggcattgcatctactgcatataaaaaatgggagagagatgccatggctggtgtttctttagtcgctgatgcagctgaagagcttgagcgcaacacagtgaatgttgatgcaaggacattatctccctcatcaaacaatgtttgtaccgttgatggtattctttcttatcactgctctctgactagaaatggctggtactggttcctattgtcttgatgttttatcctgcactggcagatccaggcacaaatcgtatgaatgaagcagatcaacaagcacctgcaaagctgaaattgcagttatttccaatcaatgaagccacacgaaaggcattggaaaaggtaaatatgcctgtttgttgccaccaagctgcaatatgaaattatgaatcatgtgtttcctgcagcagctgtgttagcacaacagctattactgatttactattggctcggacactcaaatcactgtggttgataaaatttctcaggataaatgggactaatggaatgtggagtgcaaataaccttactagcactatttaccttatgaattttcgatggtgtttgagatattgatagtcctatcttttttcaacaggatgaacataatccacatctggaactcacagttagcgctaggaaaaaaatatcttctgtactag

SEQ ID NO: 8179 - DNA, 22020 bp, Oryza sativa
gatactgcatccggccccaccgcccgtactccggcgggatctcaccggagaagaagttgccgccgaggtgcaggtggcggagcagcggcatctgcaccacctccatggggagcgggctggtgaggttgttgttgtagaggtcgagcacccggagcccccggaggcgcgcgagcgccgccgggaaggagccattgaacgcgttgttggagaggttgaggtaggtgaggaactggagccgccccaacgacgccgggatggggccggagaaggcattggcgccgacggacagccgcatgagcccgcggagcccggtcagctccgccggcagcgcgccggagaggttgagcccggacacgtcgaggccaaccaccgcgccgcgggagctgcacgtcacgcccgcccacgcgcagtgtgccgcggcggcggcggtggtgttcgtcctggtcccgttgccgccccacgacgccagcgcgccggtcgggtccgacatggcggccttcgccgccagcagcgcgtcggcgtcggcgtcggcgtccgccgccgcggcggcgacgccgacgaggaggaggagaaggcggagatgcattggggtttcttggcttcttggattggaagagaggagaggggagagctcacgctcgcggcgaggagaggagaggagagtggagacaagagagtgagagggagtgaggggaggagggaaggggaaaggtgggggtattttgcaagtttgctatggttttgagaacactacacacaaggccacaagggggattgtgtgtgatattggggtcataaaaaagatgtgatatttttcttgttttcttttggggtggggtgatgtgtggggtgtggttcttctttttgggggattgggttggttttataatgttatcttgggtcttggatggatagatatggccatatggcagtttgacaactttgacccatgattattctttgttttgttttctttatcataaatttagtatgtttttttattgaattaacctcatatttaggctgagtttcagatgttgtttggcttctacaaatactctattaccgtgatcatgttttttaaattgttaaatggtatattttttaaaaaataacttttatatgaaagtttatttagaaaattaaatgaactatttttaattactaagactcaattaatcatgtactagtgacttatctcgttttatgtatcgtcatttagctaactcagtttgggtttatttatctgttgttcgatggagcgagtataaattaatggtagaaaattttgtatacataaaaaatggtatgtgttctatatatgataaggaaacaaaactacttgaagttcattctaatgaccctgatttttgaagcatttggtgaaataggcggtgatcggttgtgctggctataattgtgcagcacagccgtagcaaagggaagggctgcagcagctgccatagctagtggctgcaacagataaccgagcacgctcgtagtttcttgataaatatttttttctaaaaaaaattggccgctctaacaatcttccaaaatagaatgcacctagttttaaatgcttaggtgcacaaattctacaattcctgcaaattgtttattgtggattcttactatccgaagcatgtcctacgatacatatatagctgccaagagatataataatttgataaaaaaaaactaaatatcacctctcaatcctttacttcaaaataaatcccaaagtaaattactgatttactgctagctaatataaaatgaaatatccatacctgaaggagaaaactttagaaaaccagttatttcatagttaaaggtataaaacaaaccactggtattatgatgtatggcaatataacctcaagttacatggtctcaatgtttcataaaacctcacttttattcaaatcttgataaattctagcatatatattaaaaattaaaagtaataaagaattaaactgtcaatcttaatcaacaacttaataattaaaaattacatataaattctatgttttagaattttaagtaaattcgatctcaaaatacataagggtagtattatgtaaaactttataaaaccatcatacctgaattatgtgtcatatatcataatacatatgatttctctaactttgaccataatacatgtaattttaatgaatgtactcactctggaaattacacgcaaaatcaggattcagatacaccgcgcatgcgcgcaccaaacggataccgatgaaaaagacggggtgacgaatgcaatgcgatggcagcatggaagtggcgcgagccagcaaaaacttcaaagaaaaagaggaggaaaaaaaaaaagcaaagcttcagagcaacggcgagacaccggcagccgagctgctttgcagaatgcggcatcaggcttccactttcgtagtagggcaagcagatcgacagcgacgcctgcacaaaaactgcagcaaccaaaaatcatcacccagcagcagcatagcacggtacaattgagggccggatcctaacctccggcgaatgccaattccatgaaatttcagtcgaatttgttgtttcaaatttaatttgtaaaaaaacagtcaaaatgtcccactgaatctgcttctgtcccgactcaaaattctaaatttttgttgttttcgatcggttttcgtctaaaatgctacctagtacagtactccctccgttcgaccgttccgcaatagttatagttctaaattgtttagcaaaaactatggtttaataaaaacgtctatagtgcctcctattaaatgatatggggtttggaatgagaggatagctgagggcagaatgaattaaattttgaattggatgtaattgatgtgacaaaagttactctaaagtgatagtaagtttttggtaacaaattttgaactctaaaacgataactgttttgagacggagggagtataatccaacttctttttttctgatttctatttttgccaaatcagatgcagcaaacaaacagtgcgtgataatggcactgacgcagagcagctcattgggcttcaagcccggacataaccatcattacgccgcaataatcacgctaaattccaacgcggaaacagcacaagcagatcactctccgtgcacggcaacaacaacaccagcagcaacactcccaagctgaagaagagcagcagtaataactgattagaggacaaaaacgtgcgagagattgatcattgatggccaccgtccaatccacaaaacaatatctcgccggtcgccggcgccggcgagatcggtcggctacggagtactgtagtagagtacagtacagccgctgctgctgcttcttcgcaagctgccggctgggccgcattcatcactcgccgcagaaaaagtcgcggccacggccggcgaatttacaggcttcaccaataattttgacccttcaggatggcacaacagtgtgtgattcagatactgctgtttcctactgcgagtacatgctgtgtatctgcttgtagtgtgtacttctccagctacggggatttcggaggattgttacgggctattactccatctgtcctaaaatatgttaacttagaactaaatatgttgtaacataatactccaacgaatatagataggaggttgtccagatttattatacttcgtattagatatatattttagaacaaagaaagtactaattagtactcaccctatcataaaatatagaaatctagtatcaaaacactagtactatgatctggagttctggacataccagtatgctcaattcaatactacatttttattttttaagacgaaagaaatacatgtactactataggttgcaggcttgcagctgtgcattgaccaactgacaatttacatttaagcggctgcattcagagcaaatttataatccgcaacgataatcttgattggaaatatggagtatgtttgtatttgttttgttcaggcggagtattgtattattataaggctgcatttccagcagctttataacttcaccaacaatgttgacctgcaggaggaaaaggagtaaaatcgcaatagtaccgtgagctgctgtccgcaattcatcaatttttttcagagccgcagttaattttgcaggccttggtgtacatatcggcgtttgcaagaactggccggagagcttgaccactgcaccctgaaaactaaaaagtccatcttttttttcttatctaaaagaatccatctttaccaaccgcaattacagtttttgttactgattttgattgcaatttcagaacttgatcaaagtgagggcccatgagagtaatttactcgttgctctttgtccagtttttcttttgcagattttttttcagaagtactccagtgctactactgctttactcgagcaggtaggcagagggcaggcagcgagcgtatcattgcttttctactgctggctttcgttctttctctgacaccgtggggcccattcctgcctggcactagatgagaggagaggagaggacagtcaaattctcgagcttgcccattccctcgcagcatcgcaatcgcagcggcagaaaccatctctccatttcctcgcgtaattccaagattgccagcttacttcgctgttctattcctcggggtgtgtttggataatgggttaagagagatgggattgggaaatggaaatgaatggatggataggatgaaatgaaatgagaagaatggatggctaaaattgaaacttaccttttgaggggtgggaaatcatatcccaaacccattatccaaacatggccttagagtttcgccattggcgatgactaggcggagaggagaccaagacccgcggtaaaaaaaaaaagcactccctttttattactgcacatatttactgtggtaacatccactgatccagagttaacaagaggatgctaatggctccttttgaacataggattttttataaaaaaaacaaaatgtgaaaaactatagaaatgattgtttggatggaatgaaaaaaaaaggtaagaattagatgagagaatagacataagagatttttttaaaaggttggacttcattttaaaactcctttaaaaccttcaaatccctatattgcgagccaatctgaaggaattttataggatttttgaatagctatgtttttaaatccaaatgctatgtttttaaatccaaatgaccatacagagtttctttttctatataattgaatccatttaaaatttcttcccaaaggtagcctaagaattggagtgatgcatagcttaatctgatgacgagggatgcgcgtatttcagtcgtcagtctaccaagtttctgcaactgcaacacagagaacaccaagaccaacaaccaccacttctgtagaataaccttttctgtctctcattttaatcaatggctaatgaactgtaagagcaggtacaatagcaggctattagccagctataaatatattttaataagataaacgatgagagagaagagtagcgggctacagatctgtagccagctgcagcatggactccaagacacactgtatgtatgacaggtggaaccatatattaatagtatagtaagcaactattgtatgaattagctattatatcggctatatatgaattggagctagtagtgggctatactgttagacttgctctaagcatagatgctaaacagttgatacgtgggcaactgggcactgcataaagaaattgaccaagtaaccacaaaggctgagcttcacagctcaaaagaaaagaaattaggaaaggctaggacctgcagagctcgtttgctgatcaaaagtgtacaccccttaatcaccggggattaataacttaaccccaatgatgacgatgttctattacagtattcccactgttattagatctataaagtttaagagtatttcactatggtgatgtaatcaatgtggtcttttagcctatcagctggttttcttttaaagttatcctttttatttggataagaaagtgttttatggtatagttcaggatgtaagacatttctattatctaaaacaattagatctttgaagtgtggacatgaacttgcctctatcgaacgcagattcagtgacattcccccatgacattctcggtgacattgtgtcactgacatatgggtcggtgacattgagtcactgacatataagtcccatatgtcagtcactcaatgtcaccgagaatgtcacgagggaatgtcaccgaatcccaatccctatctttaagctgcatgtgttgagttctgaagtctaaactccggaatgatatattgatatctttaatcaccttcagataatcaaatgaactcaaaatcaaaatgtttgtgcgtttttatgggcctctgctttagtaaaagaaaggtccagccaaggccctttaccccacacagccatgtgaaggagtgccttgagatcggtgaaaagaaacaagagaggagattcagagattctccctgctactgtagtaggcgaccatgggtgaaaaatggccccaaagcatgcagcctctaggtggtgagtggtcacctccatcaaaaacctccatggattcttctgatcttctcctcctcctcatatggtcccttgttaattatctcaatctccaagtgttaatcatgtggtactagtgcttacccccactgaacttgtgtttgaaacccattgaatgaactgaaggttggggttgataaatggtactaatgcttgagccaaagttttcaacgtagtaatgatcaattatgtccttgattagggtgtgcttgtgattgtgttgtttagagcctaggtggaagtaaacaaaagtgatggcgtattgttggcctagcaaaataaagtaaaaattgtgctttggtgtgagtgagggtcgccacttgcaagctccgagttgggtgcaatttgtcccccttgccaacccctagtacgcattcacactcatagagaaattaatggccaagcattctaattaatcagataaaagacatggtttatctgtggctaattacagtaatttccatcacattttcatgggacaaattgattaagtaaattactataaatttttagtagcacgatgcatatgcaatgaagccttggcaattgtgacaaagacgtggttccaaggaagccgcgctgttacgtacggtaggtgtctgaattctgcaatctgcagaatgcaggtggctgggctcccagaagaaaccctgtcgcatgcatcacacttatctcactgtctcaacgatagtggctcactaggacaggccaagacgactaacagctaattaaactgctaaaatgaacgtgacgcatgcggacagtgctatcaagcttctaatcatgtattcatgtactatcctaattgaagcctacttattgataatgcccatagtaaatttgatagtatcaataacattcttcatcgcagtatcacaatttggctccatattagactagaggccgggagtgatatcaagatggttatcttgatttcaataaaagcttgctttcttttttttaaaaaaaaaaaaaacttggctccgtgttaacagtaaaccgaagaattgacagggtagagggatccaaaacggccccaagttcttagcaattgtgcagtggtgcacacgaagttaacagggccttaacctgtcagtcattcagttaagaaggtagccagactgaacaagccccagctggctgtcattgtggatatggcatttggtgcagttgcaatgtgctcgccgtgctgcagctacagctgcagcgtagcattcatcaaccagactgagagagcatgaatgaattgagcatggcaatggccgggaccattgcttgtgggttaccttaccagcttacctgagctgacatgaatggtggtctccagagtaggtgaggtgagtgacgcccaggaggttattgaatgatccggaggagatggagatcctacctgcaacaactagcagcccatgcacaacacatgcctgtgcccatcggccatgtgtcctgttgatcaatccatttatcagtgtggcaagaacaattaacatgcacatgccttgcattccagaagagagcacaaagttgatgtgaacagtggtgagtgatgctgatatctgctgaagtagtactcattttgtttcatcagtgttttgagaccgatcttggaataattctgttgatttgatgggtgcaaaggggtacaatcacagcagatttacatgcttacagcattctgaaaaatcggattcatcctacagaaaagctactgtacaaaggagaagaaactcaagaaagactggagactaacagctactgtacagggtggagtgagccatcttggggttcatcatagaggcatcaagatcaaaatggccgtggcctcatggccgcagctttggctgatatcctaacatctaaactgaagcattttcatgaactcagggtaacattggtgttgggcctgttggcagaagatgtaggaacgggctccagtggcaaacgtccggcctgataatgtgcaatggaagagtgctgatgatgtccttccttcctcactgcctttcttctgtataccaggaatcctgcagattaagacaagttgcaatttcacttctgaaatattctgttgtttgagataacattgttctttttaccttaattggtgcgctagtaacacatttggaatgctatgcttatttaagttgatgttacttcctttttcattttaggttctcttactacatgaaaaaccatgtctacttgggaccacgtgcattacagatttccaatcattgtttttgtgtataagggaagactgtttacctttatttgtacaagcgaatctccattgcgagaatatgaggtggggtattccttactgcagggagttctctcgctttcagttccaggagaaaagttatacatttcttttggttttcccggggtagaaaagtatggcattgaccttccatttgtcttctgttttccatcaccatcaaaaggcgagcactcagacatcatgtagtaagaactgaggtgctcctgcctacatactgtaggcgtctcatgttgatttctgagataagacatggtgctgaaaccatgttggacaaagcaagcagacggggaataaggctgtgattgcgggctaggaaatgacatgaatggtgatagccttccatggggtgaaaaggaaggtggggtagtaacatcaggacttgacacaggcaaaggacagccttctatagttaagccttgcttcgcagctagtttagaaatctgtttctggtttagccctgttccataaataatgttccacagactccttagagattccctctggttatatattacttgatccctcatagccatctcaatttgaagctcggcattagtcatcccctaaaacacacattatccataagcagattgtggagtatcaactattatgaggaaaacatactaaaatgtggtggttactcacaagaagtctgtactgactgagaatgtggaggtaggttctgttgccattgttactggtggcttcctcgatcatatcttggagttgacgtttgcgactctcattcagttcaatatcctacatagtgtttgccatataagtttgttttgaggaaaccaaaaacaaaggacaatccgaatttatattacaaatacctttctgtagccagcaccagcttcatcattgtcgcgtatgttgtcaagaataacttgtctccgtgatgttaatgcttgcagaacagccgaatccttatctttcacctgaacacaaattcatcagagttctgtacactgcaaagaaaatttctgagatactattgtaacaacatatgtggtttagagagctgcaacagtctgcgatgccacaatacaattcttagttatgctatctcaaagatgacaaccagtatttcccttattgatgttgcactacaggtattaactagagttctgattggaagaggcttgtaagctgccagtgtgtaaaagagtagttttttgagttgtcaacaaactgaataggtgagtaatcaacctgttgtcttgcaattgcatcatcaagatgctggagctccattcgattgcgcttattggtttcttcaagttcaaacagtgctttctgcagattaatgcgttcttgaacattctcgccagtttcctggctcaagatatttagccaagatagctcattgtctgcagctttttcagtaggttttacacttaactgatgctccttctcagctaattccttcttcaactgagaaacctcaacctacaaagtcataatggaacatattttaatgtgatggagtgctgatagaattgtagaaagttcatttgtgttttttcagtaaggcaaacctggagattgtcaatcatccttttgtagtcttcaacatgggtgtcaagatgtccaatgtttttctgtacaggacaacaaacaacataagaactggttttttcacatttatgattcagaaccaattaaatattttgcatgggtgagaatagtgatgactacatagacacagcatcttgtaatttgttatgcagactaaaagaaatggccccttacatggacatgtgtttttatctcctttgcacgatcagcatacttgagtgtattggtggtgtgatgatactgatcatcagctggtgatatcgtagcaaccataacagtacgagagttaccagagagcccatccttcaggattcgtgttaatttgctgcagagtaccattgtcatataactaagatttttaaaacgatggattccagaatgatacacctgaaaatggaaatacctgtttcgatatggaacatatgcaagacctttcttgttttgcttgccaagggcattgatgcagttcgctagcgctagaagtgaacggttaatgttggctccatctctaagcttttgcccaaagttgtttgtttcagaggccctctcactgttataatataagcgttgctttatagcttactttcttagcagggtgaaatgagaaaaacaatccaaaaaggagtaggtattagtgtattacctgcccgcaaggtcaaccaacgcaagctttccacgaagaacctgactaccatattgtcctttttgttttcgcttcacagttatctccaggacagcatgtgaccttggatttaaaaaaaaaggataaatcttattaatagaatgtagtaaagatgtccagcactacgtcctacagcagctgtcttcgtagaaacaaaatctcagtgatacatcagattaagatattaagtatcctccttaaatagcagttcattaaacagatagaaatgcattgttttgctaagcaagatatcaacaaattcttcaaaagctgaatggccataacagcatctacttacagaaaggaaagaaggaaattcacaatatgtaattaccgtgaagaagttgagtttgcttctgtgctctctgtcttgcgccgactgttgcctatgttcaagagttcaagaatcttatctgctgagtgaacctaagcaaataaaagattgatcatcaaaatattcttatatgtagaggtgaatggaatgttgactaggcctatttttacgaatatgatgaggaatggcatgcaaacacagtagaccacttgctgttgttacaaagggcagaaattggttgtatgaactaatcattaaaagaaaaaagatgaataaatagctgaagaagtctgaaagggttggtatctacaagtatttcttccagaaaggacaaaaaaaaaaccatgcagataaattaaatagtgcaacttaaaaatcatctcttccttaattggctcaatgacgagaggatattatatgcacaaaagaggttacaagcattaggatggccaaaaaaatatgaagaaaacaaaacaaaaaatgccagaattgacactattactacaaggcatttgttttctaattatcacaaaaattaaacagattagaggaagctagaaaccttaatgcttcttaaaccagcaaccattataccatgcacaggatcttcacgaagctccaggtgacctgacgatttttcaagcaaatcatagataacctggaattcagaaagcacagagttttttcacgaaagtttatatgtagtatagagaatttaaggactaatagttaacttttttaagaaactatatattgcacattacctcattgtacacttcaagatatgaacatgagacctcaaacgtatctttactgtcatccttctttaccagatcaaagattgtgcgaaagctcagaaccataagaccaggatcactatgggttccaaccattgtataagttttcccactgcacaatcacaaataacagaatatttcacattatgcatatgaagcgtaatactaataagagccatttcagcttctagatcagtattgaagtatttgtaaaacttcattattaatggacacaatgatgagcgtggattcccataaaaaggaaaaatgaacttgcccaaatagtataatagcttcaccaaggaagctccgtaaagtggctaagtcatatttttcatattatgtcatgattaaaaaaaaactaaagaagcctttcttaccaaagttcaagtttactgaaaaggtaggatggtctcagtttgttttagcatttatttaagtttcacaaaacaagaatggcaatggactaaacataatcatgattttgtttacaattggcatgaggtgaactcagcagatatagtatatatcacatatcacaaattcacaatagttttaagttaggcatctcaaaggaaaaaaacataagaggaaatcaggcaaacataatgtggttgatttgaagaaacactttcatatcataccaactgagtgtagcaagtttttcaaatgtaaaccatatctaacaatagcagcaaatgagataattcagggttcagaaatttacggcagtatgtgtgatgatagcaatatgtgcagcaggcagtatgcttgcaaacaacaaaactatccagtgagcatgtaccttccagtagaaccataagcaaagactgtcgcattaaggccttgaactacaccagcaattgtagaagatatattcttatatacatcctgcacaagtaatgtaattgcattatcaaagcacgatcttaaaatgtgatagtggagtacaagagaacatggcatttgcccccagcagttaacaagcaagcaagctggtgcatacgtgtgcgcacacaacagattctcatcttgtaattctcatacattttttcagtaatggaaatatagatactgaaaagctcccaagatcaaaaacaaaatctatcaagacttacagttttaggcaactgcagttcaagaaaacatttgtacataactgcaaaccagttagcatataattgcaaactggttagcccaattatgtataagataattaaaatttatttacagagcatatgttcatttacatgtcttcattaatcagcccaacatggtccaatgatcacacaattatttatgttttgtacatcttgtctatatgaatgtgactgacagatgtcagatatagaacataaagcattttagcgccattgaattttttttcttgttttttttttaaaaaatagggatgtatttctatgaaaaagataattatttttgtagacctgttggactacaataataagataggctatatggtagaataagttgctaccatttgatagtcagttttcttgtttccggccaggatcttgctgactacaaaatttgcagatggattttgctttaaacaggctaataaattagtacacaagcaatttggcgctcctgcgctcagcgctctcatggttgtatggtccaccaaataaacacaagacatgtgcggtaactcactaccttacataattttcagaccttaatacaataggcacaagaggtcgtgtatatctaagatggccgtggtgtcgaatactgtaactgtgtcaggaagactggttttgacagggacccagagttgcaagtattaaaggttggagcaatgaagttaatgtataagcgtgcaaagcatgcttacagtgcaggttttcctaagaagatctaggttgtagagtttaatacaacaactaaactacagtccttttcccttaaccagacgtatgtatttgttaggtagactacctaacactagtaacagtacatactggattgctccagactgaacaatagtacaaatacttcgtgttggccttttgttggtaccaacagtattgtttcaactgtacaaagcacgagaacctcctaaatttagcagttaatgatccaaagaagtaggttggggtttggcctttaggggcatcatttcctaacatgctagttatgaacaattcaggaatttccaaactgtggtgcagttccaagcacttgctgtaatcagcatatgagcccatttggtaacagacaaagcagttccagtttagagcatcacaatctatctgagcctgcataccgcattggagcacccgggcgcatacacatgatcgaagctgtatcttctctccttggtcctgttttggatgagttcaaggtagtccttggacagatcagggtccagcacaacgacattctggggggcaaaaaacatacaggcaacacattacaatcacaatctggcagaattccaactgaacaactgcacaacaaattacgcattttactactaaactagagcctgcaccttatcatcaatgacttgtatgatatgccgcgaacgccgctgctcgctgtctgtcagtggcctgcacttcacagccacctgcagagagacacatgattacacatcgaagcaacagagcaagcagcatcatcccaacaaaaaatcaagaatcgcgagaaattactccattccatccgtttcatcgcagaaggatctataatctacctgtagcgtggccgtctgcttggaagccggagctcggatgctcggcattgccaggaaccttcgctcgagagctcccaccaaacaaaaaagatgcgggtactatctaccagaaaccaacgcaattgcgccgacgcttgatagccacgccacgcaaaggcgggaaaagggggcgaggcgcatacctaccacacaccaaaagtagcacaccgcggcggcggaaagaaagaaaaaaacacaaaagcttccacggaaaggcgccactgcaccggtgacgacttgcccgggcggccaccaaccgccgccgccaccgccgccgcccaagaaaccgcgaatgccggatcagaatgccacctgaatctccagaatccgcgcaactctctctccaagaacagacaggaaggtcggggcccccaatccacgttgctccctccacccaaattgccgggaagagggaagaacccgtcacggcccccgagacgagcagttggtgggcagcacgacacgacgaggagacgagaagattccggaggaggaggagattgggcgcgaggaggaggggagacgacgagtgggggaagtggaaggaagaacaagaagaagggtggaggtggtttaatggggtggtagaataattaattggcggcagctgtcgcgggggaagaagacgacacggaacagaagaggggtgtgtggggcccactcgcagggccgggcccaccctcaccaacggtccgtttcccttccctccctccggtacacgacgccgtacactacctccctcccatcccacacagcacacagctgcaccaaccatcatccaacatccatggcgcctctggaccatggtgataaactcctccatgcctttgccatggcgccatcctctgcctgctgccccctcacctgacattgacattggattctacacactgatcggtgaaaaatcccaaatccgtggattactcccaaaatgcaaggatcggatttaggagtggtatagaaaatcagcgtaccgttgtgccgcagccaacatcaacagtgtcataaacatctcaatgcaatggcaggctgcagcaaccatagccgcacccatttcatctgaacagctttataatatattgttttacaataaaaaaagaagcatccttaatcatggcatatgcatttttgatgtgttctttgtacggatagatgagtatggaaacacttcgatgcaatggttactgtttatttgtgcgaagaaaaatgattcttttttagacgaaaaaacatttctgtctggtggcaaacaacaatgacatgatgtttaattagtaccttttgattgccctgcctccttaataagccctacgttaaccggttgtgaaagcagcagtaacgtgtaatcaacggaggagtacgtatttaagtttaatgttgacgtacgttggtcacgttcataactgcatgctaaattaattcctccatcaaaatagccatcatctgggatctggaagttgctcccgtggacgcaatcttgcactcatacgcatgctgatgcctgaggagcatcttttttggggacaaatccaagattaaattttaatgtcaatttctcataaatatattcataataggtataaaatcaactttgtgggggaaagtattttaaattacgaatctattggattagttttaaaacaccgcttatactttgagtttgactaattttgtgggccaccgttggaaaatactaattttgtgggtaaattatctggaagtttcgctgtttaaaaacaaacccaataagagaacacttgatactttgatgattgggtaccctatttgaagatcgatcgaatagcaccgtccagtgtactgctagctacaacctcgaatgtttgattttgtatcttgtatttccgtgctaaatctaacctgcttctggatgcaccaaacaatcattgagatttggtccggatcacgaacactattcatcttgaattttgaaacgaacacgtcaacaaaatcattaaattgcttgcacaattattttttcttttttacaaatatcattttcttgcattagtggcatcctccgtgccgcacctaacatgggcacgactttctggtggaccgatagaactgttcactttctggagatgcagtgccactggccactgccaacccgccttctgaacttgaactaaaaaaattttgaaatgtacgtgaaataattaaaaacacccaactacaaaactgactcgtttgttgtgtttgtgctttcatgtcttcaaggcatcaacacaggcaaacaataatttgacacgaagttcagaagttgaatgcacgtggagccaacaacaaccaaatgaaagcaatgtatacctcggtgaagtttttgaaacgtgtgtgtgaacaaaataaaagccccaacaacgaaaacttctggtagttatgcttaagcctcagataccggaggcattcaaatgaaaattcaaaagtcaaatggccatggagccaaaacaattcatatatatgtgcacgcacggcttggatcatacttttcaaagtaatttggcacgcatgtcagcacgtagaacaccaattggatcatggagtgcaaccattccttttgagtatttttaaacacctgcgtattgtcaaccggattttccatttgtgaagtaaccaggcctcttttctaaatacttttagtttggatgattactttgtttgcagaacgaaggaacctttaaagcaaatagttttggactggttgcaaactttgtaatcttttagtgtttttcttgtaaccttgtacgtattttctctctataatgaaattacactactaggcaaagccctgatagttttctcagtcaaaaagaaataagtggaaagatcggaaaaggaatactaaccgaaaaagagtatagtaatagaagagcggatatatatgaaccatctccatggaataggcgacatgggtacatgtgggtccataagctgtggagctcacatgtcagccacttaaagtcagaggataataagttagaggatctgcttttcatgggataacaattaaaaaactactttcattttttttgaagagataaaaaaaaactactttcattttaaaaactactttcattttgatttgttagatttacttcttctttttagaaaatctcacactaaattagaaggtgcaacaaactacactgctaccctcattagttacgtcccaaccatctttctgatgcaagcatcaattttttcatgagcagtactagtatggctatatctattatctatgaatagattaaaaatgctttgaaatgtgagaacgatattttttctaaaaaataatgaatgctagaatgataaataaactggtacgaagaggatacaacattttcgtgtattaatgtttgtttttttctacaattgcatactccctccgtctgttccgtccatttcatattataggttttgactttatctaggtcatactatcaagtttatagataaaattagtaatatctacaacaccaaattagtttcattaaatttagtattaaatatattttaataatatgtttcttttgtattaaaattatagtatatttttctacgaacttaaaaaaatttaactagaagaaaaaaatgacttataatataaaacaaatagagtaaaacacgtgacatttaactatttgtcacttttaagatgtggcaattaagaacttgccactcgctgtgtatgacatgtgagtcctcacgtgtctataatatgttagtccggtggtaaatcctttatcacaacttgtaagagtagcaagtagttaattattccatagaagacggacacaccacacctaaaactgtgaggtggtacttgatactccgtgaacaattcgtgaacatatcgatttaaaatgtacaggagtggagtaaaatgtaagtttggcttgtttggcgcagctccgctcctatttttggtggagttctctctcacaaaataaactatagatgtggagctgggtttaggcaactccacaactacactcaggacccaactcttgaatctaaattttggagttggagctcttggcttactcctcactgactcactcctccgtttaagagcaaggctaatagtatagccagttgctgactaatagtccattgcttaagccgactactagtataatagattgtctgttggctgactacaccatataatcaaatagttaattataaccagtacatatcaatgtatatgatcaagagtgaattgcatccttgtagccatttgtgccagagcatatttagagaccatatcaaccaaaatatctgtagtacaaaaattgcaaggcactattactacatgacattaactcaaatattcccaaaaataaaacttaaataccatagattaatcgataataatctattagcgggcatgagagattagcgaggggaagagggaaagcggataataggggtggatttgtgtcaatcttaccggatttttgaggccggcaaaatagtgagatgtgattttttggggcggatttgtgttaatcttaccggatttttgaggccggcaaaatagtaagatgtgatttttttggggtggatttgtgtcgggaggggaagagatcttcgcgcgcgggaagggaagagatggcgcgcatgggagaagagatggcgcgtgggcacatctacatcacgcaggaggggcggagatcgagcgagcacggctgggcattggggcagagggaagggcattttgctcggtggggtggggaaggggatcggctacggtgtgggggtccacaaatcgtgtttttttattgctgagttgggctgcaatctagcagtagcgcatgggaaagagagctatcgccgggtgatagatttgtcgttcgttctcctctctcatcaattctctcctctccacatagaaatatgatgatgtggcataattttaaagttcgtctagtcagcttttttacctgctctaaaccctgccatggccaaagcctaccgagacggtgcacggctgcacacccttcaagatacgtgcactcactcgctccgattagaataccggaaacggatacccccgttaattgccgcaaacaagcacggctcgtgtcgcgttcatgcgcgcgcgcacggagacgaagcggcggaggccccagctagcgcatacctcaatcacggggaggccacgccacggcggcaaagttgccgacgacgcggtggttggagagagagacacactttggccgtttgccgccactcgccacggatccccgtttattttactcgccgaatcatcgccacgcaggcaaagagtagtaagttcatcattgggctaatcaaccacgaatcatggctcagcggaatctagcgagcaaagcagtgtcatatccttccctttctgctgcatttctttattttttcccgccccgatgggattaatattagctgctggtgtaaggtacggatgcctccgtttcttgtcgacgattgtcgattgcatctgttcctgcagtttctgcgacggtggcagccactgctaacagagggtgttcagggtgtcacatcggttattatatagggtatcatatacgttaataaactgtgagacgaatttattaagtctaattaatttattattagcacatatttactgtatcaccacatttgtcaaatcaagtagtaattaggtgtaaaaaaatcatctcacaaattattcacaatatgtgtaattagctattttttaattttatatttaatattttatgcatgtgttttagggtgacttctaaataggcccatagcatgatggattcctcctgcgatgagatggcagcacagtattagtagtactagtaccacacaccgcgcaatgccccgtgtgtgacgaggtgctgtgcccatgtcggtggcagtaatagtagcggtatgccggtacgaagtacgaactggccagctgggttctcacaattgttttgctcttttgctgaaacacagacatagtgcacggagggtagaattgagttcactccattagtgtctgcaggctacatgatcccaagaaatggccgtgccaagcctacaaatcgattcatcccgagtccccgaccatgtgactacgggagatgggctgcaggtgccggtgacgaatgagctcgtggcggcgcagggaacaggagcaggacaagatcttcctggacgcgtaaacaatggagcacttggagagaggggatcatgctacaagtactagcgagaagagatgccgcgtccaccgtctggcgaagatcgcgtctggattgctgccactggcagcatcacaaacccattatttttgctgccgtactacgtgcaggcaggcagcacggcgggcgatctcatctcgtgaggttggcgcaccgggtcgatcacccaccggcacaaattaaaccgactcgatccgcctcgtggcacggcaactaatcgaccgggtcgttccgttacctgttctagttgtaccagcccgcgaccgcgacggcgacggcgccccacgaccacgagcagttgggatcctctccaaaattccaagcttccaacgtcttggcccaatccaatccccagccacaggtcgcggtcaccgccaagctcaccacacgtactacgtcgcgccatccgcttcctccgcccgcacggcgcaagcgtgctacgccgctacgcgctgcgtacgcgtcgcagaggccgaacgcgatgtggaggagggcatttaactcgcggcgcacgggtttgtgtcctcgccgccgtggccgtgggcgtcggcggatattgagtgcggttcgaggcgagcgagaggaggcgtagcctcgaagcgagggcgaggcgaacgaccgaacgaactgtgtagtacgtgacgcgcggggcggcacgggtgggaggcaataaacggtgtgccggctgtacaccagtaggatcgcacaggatcatcgcgtcgtgca

SEQ ID NO: 8180 - DNA, 23557 bp, Oryza sativa
cggatgaagaaatgaccaactatataagagatgtatattttgtgaacaatcttacaaatcactttgtcggatgaagaaatgaccaaaatagaagttatagatcttgatgagttatacaactttgttattgatgactttttcagctgaaatcatttactgaaataataccggtaagaacacaataacatgatagagcatgattttagaaacatttaggaaaaagaatcatccaatttggagttcatatgagtgagatacattagtttcaaagttttcaaaaaaaattttgcaagcggctacttaagacgcccgtatggaaaaatcgatttttccatgcgggcacttaagtgagccgtatgcaaaaatgaggtcgtttttccatgcgggcgtcttaagcagccgtctgcgaaaaaggcgctcgatttttgcaaacgccactagttgtggtccgtttgcaaaaaatcatggggctcgtacagaaaaatcacttttgtagtagtgtgatcggttggccttgtatttctaaagccttgcctctattatcgagcttgtgacattgagtcaatctgcataatctgcgtacggtccttatagtccttacaccttttatcacagggtcccaaagtaagaaatagtatagaaatatgtcggaagtaatcagggcatttaacttttttccacttttaaggtgtgatcattaagaatttgccacccacaatctatgacatgtgggctctcatgtgcctatgacatatgggtctagcgacaaatctttaattaccgcttgtaaaagtggcaaatagttaaatatttggcatgaataaccaccagatgcaataatccctgagcttaatgaggcccggattcggttgtatgaatggaagggagagggaggggtagccatggtggttgagaaaggatcggagataattgggagaaagtgtgcctaattaattgtgtattattattgtaaacttgaaagatagctttttaaagtttttttataaaatagttttttaaaaaattgaccgtatgaattatatttacaaatatttatatttaaaaacccgccgtatgaattatgttcgaaatacaatgttcaaatgttttattacccttgaactgcattaattttttcaatagcaaccgacatgtggaccatctctgtactactttgtagcttctagcccttcccgagcgtctagcagaaaaataaacacgggaacttttaactccgttaggtgcgaacgaatttccacttctggccaatggaacatagcagaatatgagcacgtgcaccatggaggttaccgtgttcttacgcgctacacacggtaagtttaaagttaccgtgtgctaaacctagcacccggtattttttcctgggttaccgagttcatagtggtacactcggtaagttaccgtgtgtttacgggaaacacacggtaacactctgcagcacacgggagcttcacattctctagtagtgaaatcgatccaattttgtcggcacgtgtaaatggtgcatgtgcacgtatagcaaactgcaaacatggttgaattgctaatcttatatcttgtcaattaggtaagtatggacaaaaatctgtttgccagtggactgaaaatctatttttcaaattcacttctatttttcagtgcaaaatttatatttccagaccttcccttattttcttttcatcctatatcaatgaaagtaatatattttttctgtccgggggaaatttgatctcttaatcattcggcacttaatcttcttgcacagaccgtacaataattttttttgggttttgtggtatcacaaattaacaatataagtgatttactccatccaaattttgctgtttagtttggataaaaaaaacacgaattcctgttctccatggtttgttgatgttaaatgttcactcttctaagggtgatttttctacatgtgtatcgaacgatcgttattgtcccttgaaagggtaaatatatttggatcattcatgcatttatgtattcaggaccaatattattttcttaagatcatagatttagactgtatacatgggaaatggtagcgactattgaataaaaatgtgtcttggttccagtaactggataagattaacattaaaggtaacttgtctaagcaaccaatggccaaataactcatgaactcaccctttcttttcagaatccttctttgtgaataaatataactgtctcattatggtagtgcccgagttgtgtagttactgataaaaaacatccaaactgaatttggatgctgcatttaggatgtcatcggtatttcatttttttattctctcactgatttggtttcatttcatttgggtagatgttgtgttaaatttgttccaaataaatcacaaacacagactccatccggatcgtcctgctcaccgctctctccaaggtgagtactggaaaccttctctcttgtggcaatttcatttagttatgtatttcattcagctgatgaattatcctttgaccatggccattataaatgaaatataagctggattgcactatgtacatgatataacttatatgcttggacaaccatgtttctgatttatattttagggggggaccatgtttctgaaatttatcatctggaaaaaaatcccttacattgcttactgtacactaggacctttcacaaaaatactaatgtattttccaacctttataatgatttcctacaaaaatacctattgtatactgtatactaaaatttctgagtttaacattgcagtcttccgaattgatacaagactcagagatgatacactaagtgcggcaaaggtgagtcatgtgtggcaaatatatatatatatatatatatatatatatatatatatatatatatatatatatatatatatatatagtttttgctggcagatataactctcaccattgatcaccattgagcaaaacaccacattcataagtttaacagctatttatctaaatttaatttttcaaaaaaaagttttgtttaatggctgaaactgcacagtgctactatgatctttgaaccaaataaattgtctgagtttcctaccaacaaattgatttgttcacggatttaggtggtcacgggccataataaatcattgagaataggccatataacattcagttatgtcatcacacacattctgattttgacaaaattaggcaacatagaaatcaatgtatgcaagtatccagatacctaacaccattggctgcttattgtttcgaggggttcactgcttatattttattgagcttagctatattgtatttctttaaactgcataaccatctcattgcatagcccatatctttatagcaccgtaacaataacaactacatctctacaagattactactgtgataagaaatgaaggattggcggtacataaaatgcctcaagttgcctggaacaagcaaccatttgtagatccaaacaatattgtcgttgttattgcatacagcttgtttatataacatatatatctttcagcctcaaggtggagaagtttgatctctacataaagaaatagcaatcggtgttttctgcactcaaatatgtaaataagctatagtgtgtcagatattacaatggtgttcagtatagagcacacgtgcagacaacatttttgcagtgggcttatctatgaatatttttttattcatcttttgcatggttagcatgtgctgtatgtttcattcaattcgatctagatttgtaggtacgtccaaagggggcatgtgcatgtatagtaaacatgagttgggttactaataactaaacagatgtagtgtatgtatggagaaaaatatgtttgtcagtggaccgagaattgcatttggagatataaccaataaccaaacaacaggtgtaatgaaatgggaagttcattgtatatattactattgatcccttggaaaattaagatcatagaaaaatatttttttgctaacattaaattttagaagttattaaagacaaatagtattgcaccgtagcgtttagcatgggcatattagttccttcttaattgtaaactgagcgagcagcagcggcttcgccttatgccgtagcctcgtgcaggatgaaccacagctgagaccctgtccgttatatttcctctaagggcatgtgctacattagcacaatctgtctctgggatcatcgggagattaatccattttattacaagacgaatacccttcagacaggcatgagcttcggcctcctccgcaaacctacaatgtctaatcagcttctaggaaaaacataacataaaataaattaatgattaacatatattattaaagatcatataaaaaatatggtttataatttgggacggagggaggagtactacgtagagagctattggttatttatctgtacgatgacgacgtgaaaccagagcacagactttttatatttaaaaaagaaaagaaaaacagagcagggcgatggcccaatcctacacggcccattttctcggcatgaggcccagacacccagtggttatggagcccagccctgcgactacgagagtccgagtcaaccagtcagtcaacccaaccatacattttttcggagaaaatttggccatgttattttcaacttattaccggattatttgctccactcttaattaaaaacacgtttctataaaaaaaagattttctctgtggtatttgtttagaccacttattttagatatttgttaaatttatttattaaaatatttaatttagtcctatatatatataatcaaatcatttaatgatctaaattaaacagagctacgttattttttaataatggaatagagtatcccgacctttactcagaagagctacagctaattattactctctccattttaaattgatatgcatatttcataggtacaccaagaccaagaaaaactaataactctctcatactatatttactctagcaacaaactcaatgcatgcaccatccccactattttctagccaatagcaaatcaagatattgcatgtgggttataaatacttgtgtgcatagatgcatataccaatgtccatttactccaatgcacaaataacaaatagacttaataaatgaacacaaatatgtagatcatttaggaataacctaaaaaaaaaactatatatagatcaatttggaatgaagggagtataatcttgcactctaaacaaatctacgtcatactcataccgtcgtaattggctggccgtggcagcgacatcacaggctcacagcagtggatacctagtgcacacgattgaaacggccactggggaagtttaattaccagtccacagctcgccctgaagatcgagttaaacgcgaagttggtatatacatactccttccgttttgaaaaagacaacgttttgaaaaagacaaaatctagggtgagtttgtttccaactttttcttcaaactttcaacttttccatcacatcaaaattttcctacacacataaactttcaattttttcttcaaacttttaattttaatcaaactttcaattttagtatggaactaaacatagccctagattagtgttcgttcagattcaattttagaagcttttttagacggatgacgtgtagtaaagcctcaaatcaactttcagaacaccagacaatataaattgctgcaatggtttgaaacccgaaatcaatttttttttagaacttaaacccgggatcaattcaatctcgttccaattaataaactgtactacattttccgtcaaattaggcgggagatattttgctctccgcatatgaagtagacgagatggtcatcgcctggcacggcacgagcgtcgccacttggcagagaggatatcattcaatatggctctctcgtccacgttaaccaatgatgccaatcagtttctctttagagcaagttcaatagtatagccaactactaactccaattcatctatagccaatctaatagctcattcatataatagttatatactacactattaatatctagtcccacctgtcatagacacaccgcgtcttagagtccgtgctacagctggctacaaatctgtagcccgctgctcttctctctcctgatttatcttcttaaaatatgtttacagctggcttataggctgttattgtacctgctattagagtttagaagaacaaaatgctgacaaatcctggtcatttcttgaccgtatgaattctagaaaaataagattagtactcccttagagcaggtactatagcaggctattagctagctgtaaacatattttaatgagataaaagatgagagagaaaagcagcgggctacagatctgtagccagctgcagcgcgaactccaagacacaatgtatgtatgacaggtgggatcatatattaatagtatattaagcaactattctatgaattggctattagattgactatagatgaattggagctagtagtgggctatattattaaacttgctcttaccgacctttgaatcgatttcagtgacgtctcgctcgatctcgtcagctttccatggcccaattttctcgacggatatatccacatcagcgtgcatacaagtgtgtcaaagctcgtgccagtctccaacacacggaagcttccggctgctggtcccggtatcttgcacttgggtccaaacgagacaacatcacacaaggaaaaataaaatcgcatcttccaatcgcctcacactgcagcggcgcgcgtggtgatctgtccatttctcatttgtcgccgccactggaaaatcagaggagacgaagacttccagcaaccatgtcaagctgactcccaagcttatatgccgcgccggcttgcacgccctctgctccacgagacgcgacgcgacgcgacgcgcgcgcgcactggggagagtgtctttcttgctgcaatggctgagaagaagggggtgggttcacttcttcccgggctcgccgtcgtcctcgttggcttcgtggtcggcggcgccgggagcgacgaccggttcgtctacgccggcttcaccggcgcgccgctcgcgttggacgggacggcggccatcacggcgagcgggctgctcgagctgaccaacggcacggcgcagctcaaggcgcacgcggtgcacccggcggcgctgcgcttccacggcggcggcggcggcggcggcgcggtgcgctccttctcgacgtcgttcgtgttcgggatcatcccgccttactccgacctgagcggccatggcatcgtcttcttcgtcgggaagaacaacttcaccgccgcgctgccgagccagtacctgggcctcctcaacagcaccaacaacggcaacaccaccaaccacatcttcggcgtcgagctcgacaccatcgtcagctccgagttccaggatcctaacgacaaccacgtcggcatcgacatcaacagcctcaagtccgtcgccgtgaacaccgccggctactacgacgacaagaccggcgccttccacgacctgtccctgatcagcggcaaggccatgcaggtctgggtggactacgacggcgccaccacgcagatcagcgtgttcatggctcctctcaagatgtccaagcctacgaggccactggtgtctgccgtgtacaacctctcacaggtgctcgtcgatccggtgtacgtcggcttctcgtcggcgacgggcacggtgaggtcacgccactacgttcttggctggagcttcgccatggacgggcctgctcctgccattgacatcgccatgctgcccaagctgccgttctatggcaccaaggcacggtccaaggtattggatatcgttctgcccatagcaaccgcggtgttcgtcctcggtgtggttgtagtggtggttttgcttgtcaggaggagattgaagtatgctgagctgcgagaagactgggaggttgaatttgggccgcaccgattcacatacaaggacttgttccgagcgacggaagggttcaaggccaagatgttgctgggtataggaggatttgggagggtgtacaagggagttctaccgaaatccaatatggaggttgcgataaagaaagtgtcccatgaatcgaggcaaggcataaaggagttcattgcagaggtggtgagtattgggcgtcttcggcatcggaacctcgtgcaattattaggttattgccggcgaaaaggtgaacttattttggtttatgactacatgccaaacggtagtcttgataaatacctatatgatgataagaacaagcctactctggattggactcaaaggttccgcatcataaaaggggtagcatctggcctactgtatattcatgaggattgggagcaagttgtcattcattgagatatcaaagcaagtaacgttcttcttgatagtgagatgaatggacggttagccgactttggtctagcaagattatatgatcatggtgctgatcctcaatcaacacatgtggttggcacaatgggatatctagccccagaattagcacgatcaggaaaggcatcccctctaaccgatgtttttgcattggtgcctttctcctcgaagttacatgtggacgaagacctgttgagcaagccatgcaagacaaccaactcatgttggtcgattgggtgcttgagcattggcagaaaggatcacttacaaaggtaattgatgcaaggctccatggcaactacaacattgatgaggcaatcctagtgttgaagttagggttgttgtgttcacatccattgcccggtgcaaggcctagcatgcgacaggttgtgcagtatcttgaaggtgacatgcccttccctgagctaacgccaacacatctaagctttagcatgctagctcttatgcaaaatgaaggctttgactcttttgtcatgtcaacatcgcttccatcagagacgatgatgaccattggcacgatgagtggcctctctggaggaagatagtacagtagcacctacttgttagtttttttatcctacgaaaagttttatttccttggtgtaaatgtttgtaatatttagagtaaattacaattcattgtttaccttttgaacaatctcaaagatagtgcatggtagtgctaatgcttacaaaagcatatcctctgccttacaatagaggaacacagtaaatatatctagtaatgcaaacggttgtaatgattcaatgtagaataatgtagcaagttgtattgtgatgacgtagtgtagcagaaataggtgtgctcaaaatctttttggattgaaccgtggacctgtagcgatggatttcaacatttgatatctccgtgttcaaattcggtatgacaactgaaaagagctaagtgctttgcaattggtacaagttcactttaggtcccttaatttttcgtcgagtttgaaattcatccctaaaaccgcaacactagatatgttgcgtccctcaacttgcaaaactagtgcaaataagatcccaaggcgatttcaactaatatggcgcctatgtggctgatgtcacgcctaccatgggacccacatgtcagtgagtgtccggttaaaaataaaaaaatgcaatgcagaccacatcatcacccatatctttcccctcttatctcccttcttcctctctcgccagctcccccgccgctcaacccgatccgactcgatcgccgatcgaccaaccgccaccaccaaaccctctcacctcctccttcgggattccagcctccgcctctccggtgtccgaacccacccaccctgccacccgatggcgagatttcaccatcgccaacccatacctagttacaaggctcgtcgtcatggaggcattttctttgactgattagttcgaaccgagtgaatcgactagcgagtggtggactagtggacctggtggttaccacgctcaaagcaaggggcaccggagccaccttgaccctgtggataggtcatctcctacccggccaaactggtgactagtgagtttcgcatccgtgaagtattggtctctctgtgaggagaaactgcctacttttgtttagttatttttttgtttgggtatacttagatcatcatgtcgatgttccgattttagtttgatttgtcagtcgatcggctctagtagtaggtctgatgcctggatgcttagcgttgctcgtttggtggtggggagtacctattggatgagttgatcgacatcgctgctaacagccttgatgtggaggtagtagtttaactaatgacgtcctagctctccgcacgggacacctgcgggaacacaacgtttttgtgtgacctggtcatgcttgctcatttcccagttccttagcccctggatgtgcgggtcgccggcatccactcccctctcggcgcctgtagcagccgtcatcctagcaaaggcagggaaagggagagagagagagagagatagagaggaggaagggatagaagaggcgaaagaaaggggatgatgatgtgggtcccgatgcaatttttcaactggacattcactgacatgtgggtcccacagttgtttcttttttttagggtaaagagagattttattaatggctgaacatagggttacattcttgattcagaagatcaaggatttctgcaggagcacttaacttccactccgcatcaattcctgaccttaacgccatttgagctaaagcgtgagctatcctatttgaatctctctttatgttgtgcacctgcacctgcaccaaacattgcattgctgctcttacttctgaaattattccaccccattctgctctggaagcgcttgttgtatttaggtcagctaccacattaccattgtctaattctataatcattggcatatgcacccactcagtagctatccgaaccccttccaagcaagcccatgtaggcgcccactcagtaatcattgtcctacagttgtttctgactttaagtgccatgtcaatgcccacgtaggcgccatgttagttgaaatcgtcgttcaaatcgtcttgtgatcttatttgcattggttttaggagttaagagatgcgtcatatctggtattacggttatagatgaattttggactcgacgataagttgagagaccaatagtgaagttgtttcctttgcaattcgctaagggccatcccgagctgtttaatctgtattagttgtggtttgggcccaagtggcctaggtgccatatgcactacaggccagactaaatcacaccttaacatggaatgacccgctacattccatgtaaaatggcccgctatattttagtagactattcctatggggtggccttgcgggccagtaaaatggcgccccatttgcatttctattgtaccctgagaaaaaattaagttatatcatcacaaatcagtggattaaagtcacatcataaccactgtccactgattgatttttctcagattgatgtgaatcagaaataaaccactcgcttatttcaggtttaagtcttccttctaaacagtgcgtgcggcaaatccattggttctgtgtggaatttacccaaacaacgcgtcatatgtataatgcacaaaccgtatttactgattaattccttccacacttgaggaaaaccaaaacgtcacaacaaaacttcaatcttcaatcacaatactactacattgcatagtaaagaagcttttggtacacggctaatgttgttagcctgtaaagcgtgtcgttggagacgtggcagtggaagccgacgggaacgacatcgccacgaagtcgtcgtcgtcgtcatcgtcgtggcacaggaacgccggagtggccacgtccatgtgccccggcgacagttggtccaggacgtcgccgccgccgccgtcgagccactgcaccacgcgccgcatgcctgggcgcgccgcgggcagccggtgcgtgcacagcagcgcgagcttcagcatcgcctcggcctcgccggcggcgaagccgccgccgagcctcgcgtccaccgcgccggcgatctccccggaccgccacgagcgcagcacccagtccacaagcacgagccgctcgccgccggcggccgcgcgcggctgcacggggcgccgcccgcacacgacctccagcacgaacgcgccgaacgcgaacacgtcgctgcttgtggtggcctggccggtgcgcgtcagctccgggtcgaggtaacccatggtgccgacgatggtggtggtgctcggctcggcgccatggtcgtacaacctcgctacgccgaagtcgccgagccgcccgttcatgttagaatcgagtagcacattgctcgccttggtgtcacggtgaatcaccacctactcccactcctcgtgaaggtagagcaaaccggatgcggcgcctttgattatgttgatcctctgtgcccaatttaggataggtttaccttcaccgtacaaatacttgtccagactaccatttatcatgtaatcgtacaccaatagaagctctcctttacgccgacagtagccaagtaattgcacaatattacggtgtctaagccgacctaggctcacaatctcggcgatgaattctctcatcccctgcttagaatcatgacaaattttcttaatcgcgacatcaatacccgaccccggcataactcccttgtacaccttcccgaatcctccaacgccaagaaccatgtcatcatgaaatcctttagtcgccttgtgtaagtccttataagcaaaacgatgcggtccaaactcgacctcccaatcttccaccagctcaacataaattgccctcctctgcctcctgaacaataagaacataacaatagcggctaccactgtcactgataggctaacaggtaaccaaattttcacgggcatgtgcttggttgacgcagctgtggccatgacaggagggaggcttggcaacttggcgtagtccaggtcttgggctatgccggacaggctaaagctccagccaagaacgtagtgagacgtgtcgtcggagcccgtcgacgacgagaatccgacgtacatttggtcggagaacgccgcggagaggttcgccggcttcacggacagcagtggcctcgccggcttcggcttggtgagctggtgcagcgtgacgtcgaggcgcgcgtcgccggcgtcgtactccacccacacctgcatggcgcggcggctggtggctcaggttcctgaacgagccgccgggcgtgtagtaccccgccgtgctcgcggcgacggagtccagcccgttcacgtcgacgccgacgtggttgtcgtcgatgtcgcggaactccggcgtgtacatcgtgtcgagctccacggcgaggacgcggccgctcgccgggtcgccgttggtggcgcggttgaagaggcccaggtactcggccgcggcggcgccggagaagtcccgcgtcgaggagacggcgaacgcgatgccgtgcccggcgaggtcggtgaacgacgacatgatgctgaacacgaacgtcgacgtgaaggaccggacgccgccgccgccgccgctcccgttgcggaagccgagcggccgagcgtagaacgcgtggcccttctcgccgctgccgccggttagccgcaggaggccgtcgggcgtgacggaggcggcaccgtcaagcactagctcgccgtcgccggcgccggcgaacccgttgtaggcgaactcgtcgacggcgccattggcgaccgcgagatcgagcagcaggaggagcaaaagcgttgcaacatgcatggctgcgacgacgagaacgagacgtgagacgatcgatcgagcgaggcgtttcgcgcgcttttgtgaagcgttttggcgcgctagcgtggttgaccggttgtggaaatcgcatggcgacgcgtggactgaactcacactctccgtcagagaacgagctggtatgttcagaaccaagtgaccacagtgcagcgttcgagcaaagtgtacggtagcacagcacgtttgattttggtgtacaagagagtgcttgacggggtaaacggatcggactaatttggattacgacgagccgacaaaatcattccctgaattatggtatcgtcgtccacaagtctcctctcagactcaataactcaaataattgcacgagaagtggtttctggttggcagttatcgcatcatgaaacttcactattgagcatctcctgcagagtatctaaactaaactctcaaacagtttttagagcgaaggaacaatttttagtgtgaagggataaaaatcgagatccaacaggatccctattaaaaccccaaaattggaaggcacccaaatcctctccctagcccccaatcctggggctctacaccaacacccatcttttttttttttggtgcgggtgaaaaatcctagcgtacgcttctcccgttgtactcgcaccctcactacgccgccccgcccttctcctttcccgttgtactcgcaccctcactacgtcacccccgcacttctccttttccgttgtacttgcaccctcactacgccgccccgcccttctcctttcttgcgccgacggttgtcgtctaaccatcttaccatttatgtttatagaatatgttatttttaaaattatataatgcttgtgaacttgcatatgtgtgtgattgtggaaattgaattttattgtgcattttgcaatgttgaaaattttgaatttcaatttgaattgtggtcttcaaaattgtaaatttgaatatgattgaattctatgtgttttaaatatttctgtttgaattattttggtgctaaactaggtataaatatagtgtatacaaaatagaagagaatgagaaatgtggcctgagaaatgggggttgttgctgaagtacaagtcaacttttggatcctcggacagcctccattagatcttttaagggctttacaatttacaatataagttattgctggagatgcttggcagcatcatagtttctcccaccttcgtcggaaagtagattccgccaaatgcatggtttatttgatttgccattataccaaaatgttgcagtgctaaaatctaggtaattttaagtactgctatttttttaaaccggtgtatattatcggcacatcttaatagcaaattaaacaataacaaaatactctttaaagtgctaacaattcaacacggcacattttggattcaaacgagaatgcttgcatgggcataatcacttaacgtgtatttggtctggtgacaagatgagatgggttaggctcatccctctttttttttttttttaaggatatgttttcatcagtacacgtttggtagataactttctctttaaagaaatgagagaatgtggcccaatgagagagagtggattagattagttatgtcgatttttaagtacaaaactgaacccgatctagagagtattcccttttagggatcaatgtatcccacctatccccgaatcaaatacactgaagaataagttcacccttattgatcatcccattatgtccctttcaacttaaaaatatgtttatagttggaattagggtagtatgatttaaaggtgaaaaaaatgtattcaacgtagctttgaaaaggtaaagaaaagtgtattcggacttgttcttgtcaaacactttatattagtcaattgccgttgcattgtattttgaaaacagttatactcctaccttaggaattactactaggagttaggtcctaacttcaataactcctatggagattttagcgcacacaaaaagagaaaactcattaacatatgattaattaactattaactattataaacttgaagatcaaatttatttaatttttcttaagaaaacattttttatatattaaaaaattcgtatattttaaatatttaaaaatcgtgctaacagaaaacgagtacaggttagagtttgaagttgaagaaaaaaacaatgacagtggttgaaatttcctacttcctctgtcctaaaatattgctacatgacccacaaattcgttgttttacgatggtagcaacattttgggaccgatgtagtatctgtgatttcaactcaacggcccaacaattgaagcccacaaaccgcaaagcccacgaagaccaccagcaaaaataaagaagaaaccggaggtcagtttcctatctaatctcgatctctccacccgtttcccccaaaaccagcggcgccaccacccaccttcccccatggcatcggcggcggcgagatccggcctccgctcgctggcggcgcgcgccaaggcgaccgccgcccccgcggcgaggcgccgcatgtcctcctccgcccacgacgacgcccgtgagtcgtcccacctcccgtctcctcttccccgttttgtgtggttttctcgttgacccatgattggcttctgattcgcgtttcgatctccctatccccctccccctcgcagatgagacggccaagtgggagaagatcacctacgccgggatcgtcacctgcaccctgctggcggcgtacaacctctccaagggccacccccacttcgacgagccgccggtcagatctcgtccttgatttatccgggattctggattagctattgtatgaatctgattcgtggaatctgtgattgtttcaggcgtacccctatctgcacatccgtaacaaggagttcccatggggtaagtttgttcagctatggcttaaccctatctatttgagtacttgttgcgatgttctattgagatttatcgcgattaatattctgactgaagtcaaatggctggtgtatgtacttgtatgcggattgtgatagttgcatgttacggtatttcattttgccgaaatacccattcctttagttctggtcgtttataatcttggtgattgttcatcgttttctgatgaaactaccgatttagttgactagtttgactgtgataactcgccgaatatcatttacgattggcatagatatgtctgcaaggattttttttttgtctgcgcaagaatattataatttcatgtttggagattcgatcacatttcctaagatacttagggcaacaccaatgtctgaggaacacttcaatgcctagtctgcaaacattgggactttcaccagatacttaccgcacattgagatggaatttgatcgtacattgtgcttgcaatattgcatccagttcttggtgtacattttgctacacaaacttatagttgtactatacctaatcactctagaaacctttgagatctgggatggtaattttaagttgtattccatttttctgcatgacgactttcagaactcatttctgggattcgaaattcatataattagcatgggtgttgtaatcttctttttttggtacaaatgtttaagagttgcatgcaacatatgtcatgaacaacaatggtagttatgacaatatgaccttaaattcaatcagattttagactagtcttatgccttccacctatgattatcgtacagcagagtatagaatagtttgttatttttgtataggaagctatacaaagctcaaagttgcatgtaacagatgccatgaacatcccagtgaattagggcatgataaacctgaaatccacattggaactatatattggtagaatacttgagcattactatcgagtgagtacttccgtttcgtattctgtatttgtttcgagttactgtgttgctttcaaattctcacaccatacaactcttccatgcaggacccgatggcctatttgagaacaagcaccattaagtactgaacagcgcaccatcagaagcccagtgaatgcttaagaaaaattctctggttgttccagtgattcttgttttcagtgaaacctatttttcttgcaacaaagaaataagaatgacaaaactcttgtgttgataatcaggatttaactgtgttgttagttgttacctgttttcttcattcacagcagtgatcatatgcatgtgttctgtttcagaaaatgctgtcatcatcacaacaagctttgttattataatcttcctacgccatttctgtgctcttgctctttatgggatgaaacctgttccgaaaattgatgcttatttatgcttatgaattttcacggttcagtcgctgtcaaagctggatgtacttctttgcttgatcaacagattgcatagttgggaaatgttgagaaattgttaccggaagctattgctacaggaaaataaaaaagaagttactggaaaataacatgagcatcgcttaaaaagattgcctagatggatacacggctttatagtaacaagcagggtaacatgataaacagattatatcagcttgaaagatgcagcgagttgtcctgaagatcaaaccggacgaaataatctcatgctgtcaccggagagcattccgtctgccattttcagtcttcttccatgtcgttcgtaatcgtgggctccaagcctccaagtgcctcaatattgccagttgcttttctgtgattgtatcgcaatgacccggtcacaggaggattcaagcttacaccagaatcatttaccgatgtgttaatcactgcagttctgttcatatcatctgcaacgccattcaccagtggaccagcagctatggagtcagaagagttcgtgtgaggaccaaagctgatgacatccatttcatctgcctgaaggtgacggagatctccgccgtcgtcgtcttcgtcgccgggaaggccatcgtcggcaatgtaaccgtcgccgtcgtcgtcttcttcttcttcttcttcaccggtctcgacgtttccctcacccgcttgatcaccatcgcccacctgatcagacgtgacgccccgttccatttcggcctcggtggcaacattgctccggccaccgatgctccgacgaacgccatcaccatcagacgcgtcgccggcgaagacaatgaagcccttcctgcccagccggcgccgcgtcacctcaccgtccatggcagcgccgccgccctccacggccactgcacgtcgccggttgcgtgtgagctggtacaccagccagacactgacggcgactagcaggacgacctggaggatgtgctttggcctaagaagcttctttgatctgtggcatctgctggatggctgcctcagcatagtgaatcagtctcagtttgtgtgtgtggtggtagacttgttagtgttcagctccagattcctcctggagcaatcagaaaagttttaaggtaagcaaatagtctgaactttctgatggttaactatgttcaaaggaattacatgatctatagctaccagttatgcgccacaaatcacaaatgtttattcagaattggaaatgcagttgccttgttcatgagtttcagttcagcggagcatatgggtggctgatgaacagcagtgtaattcagaaccattatagcctaagaaaacaactgcttgtaacaagatccttatcagatagatagaacagtgtgtttaccttgcaaaatgaagctgtgaaagcactgaaaggaaaaaaataaatcttttatctcctcctggaactgtagatgcaacttgcaaggaagaagctagagtagcagtagaagagaccgtcgtatcttcttcctcttgctcgctacaaacactgctgcatctgcaagccccgatgaatttctgacgacgctttcacgccccaatgaattactccactctactccaccactgcatctctggttattttctcagcggcaagtgccacagtatcatgaccgagcacacagggtttgcacgacaccatgaacgccaagcgagaagcaagcaagtgagtacgagagtacgagagtacgagagacatactgcctccctctcaaaataagtgcagacataaagattcgtgtttagcgctttaatcacccgtcttatttgaaaaatttataaataatattaaaaaaattagtcacaaataaagtactattcatattttatcatctaataacaatgaaaatactaatcataatctttttttaaataagacgaacggtcaaatgttgaacataaatagtgctaaaactgtacttattttggaagggagagagtatatgtcgcatgagcaaacaataaagcacagaagtcacacagcgtgaaagcaacagtagcaaagttcagtaccaacagtagatgggcgcagagagaaaaggagttcagaatctgatcaggatagcaacggatcgggccgaacgaatcatcaaatctcgaaaagctgactgcgcagagctcgtagtgatggtgttcttggttcggtcaaatcgtcaaggcagcggcttgtactactgtatgcctgtgatgtggtggtgcaggcgtgcagcactagggccatgtggctgcatcctgcaacagtgcaactgctactccaatatgccaatactccgttagtacgttgtatacatagaaaatggctgtttggttcttaactaacattgccataactcactttagacaatgttaggcaagtgtggtttggggcttgccacactttttgtggcctataaattgtaagccaccctttgacaaaattaggcaaagaattgagtctatgacatataggataaaatagtactccctccgtcctaaaataagtgcagttttgcactattcacgttcaacgtttcatcgtttgtcttatttgaaaattttttatgattagtatttttattgctatcagatgataaaacatgaatagtactttatgtgtgactaaatatttttaattttttcacaaattttttaaataagacggacggttaaacgttgggcacggatatccacagctgcacttattttgggacggaggtagtaagaaagtgttgcttgccataactatggcactgaaccaaacacaaagctaaagaggtgtggcaagttgaagtattaaaccaaacagcacctttaaacctcattattttgtgcctccaatatgccattgccaatactccggtagtagtaactgaagaactgaacaagaatacccccatagaaaatgtggccatggagcttcagctcggcccatagaacatgggtttgtatagcaggataggggcccaacaagattaggcactaaaacttattatggtaagccacaagagaataaaaaaaaaatgagaatctctcttcttccattactccgggcctgttcaccttgatgtcatttttaaccttaccaaatttttggtaaagttgcaaaataatggctacatttaacttgctgctaaattttagtaattatataagaaatcctgtcaaaattttaacaagttgccaaaattttggcaaatataagtgccaaaatttggtaaggttttttttggcatcaaagtgaacaggccctccatcctctctccacctaataaaaggctaatttacaaaaaaaaaattatgggtaaagatgcccatatctattatctattcataacttatactccatttatcttaaatataagatattttagatggatatgatatattctaggaaaacaaatctggacaaagcagccaagtcgctacagcacgtgctttccgtttctccagctgatcagtgagaagtactggtagtagagcgacacgccggtagcgtttcctccgcggatcgatcgatgcagccaacgcactcggcgcttgcagctctccagtctccaccgttatgcctttctgcctgcgtgtgttgccacttggcgctttgccagcaaacacatgcgatctgtatgaccgtagaacccacacaaccacagcaagagatatatattttctttgttttcgtaactgcccaatgctcacatcaaatcctcgtcgatcgtcaacgcgataaggatatatacacggcatatacaccgtgatgcttgttgagtactacctccgtcccaaaatatagctatttctaccacagtactttatcctaaaatgaagctatttttctacctaccttctcctctcaaccaatcacaactattctttttcacctactttctcttttcaactaatcacacacctttttcaatcattctcacctactttcttaatacccgtgccaatctcaaaaatacttacattttaggacggaggaagtacttgagttttttctgtcctttttaaagcaagttcttgtttttttggaagaagctatcccgtacaaacgaagaaagagattgaacgagtaaacatctctgacttagtctacacataaccagaatatccgagttacaacactcgcagttcgaattaaccatcctacccacacatcaattccagttggatgtaattacaaatgaagagagagagaggagggggagggagagagtaaccatcctcaactatggagttaagtgcttggctcgaggtgctcatcgtgcgcagttgccgccacatcattccctagttgagctcatgtggctaagcttggggagtaggagagcctcgagcttcgtgtccattttgcctcttttccacctattcaagcttgaggagacaatggttggacaagctatggtgtccatcaccattgtgaattgtcggtcgcgaagctatggccgatctagagagggaagaaataaggatagctcaaactccatcattctctctaaatagagcttaagccggttgctgcctctagcgctctccctgtggagaactcgagctccgtcactggtgtcaccacctgcctccttcaagagggtagctcggtcaccgtgagagaaatagagagagccagagaggtgaggcatatgacatgtcgatcctatgttattcttatgttgattggattgctaaatccattgaaagcagtggtcggattatttttctggtttgaaaagttgagcgtgttggatttcaagtttttttttagtttggaggtaatttagaccatcacaaaagttataattaggactattccaaacataagtagactactacttgtacttactaacactaactcccagctaataattttgtgtagtgctgaacatttttcgtgaacgcgtaaaagtattgtacggtatagtactaatccaagtattatatagtgccaaaacaatatcaacctatcgaatggacgcacagcacgtaagcatacacaaacatgctctacggttccgtacagcactactagtagcattaacaacgcgtaggtagtacgtacataacacgtacggcatacatcaattacaagttacagcacactaggaccgacctatatactgtacagttgtacagcccgtgatatatataggctagattactactagaaaaagcattttttccaacgtgggagtcttattttcacaggcggacatgacccttagagctaaatgaccgcctacaaaaatataaatcgaagtgaaatttgatgtccacctacgaaaatcaaggtgaaattgattttcacaggcgccgcttaaatggtccgcctgcgaaaatagacttgaatataaatagacttgggataggaggagattttttctaagtctccacaccttcaccactcacggccggtaagcttatcccttcac
